United States Patent Application Publication US 2006/0134663 A1 - sequence listing, part 94

SEQ ID NO: 269478 - DNA, 712 bp, Homo Sapiens
  misc_feature (193)..(193): n is a, c, g, or t
  misc_feature (553)..(553): n is a, c, g, or t
  misc_feature (646)..(646): n is a, c, g, or t
  misc_feature (667)..(668): n is a, c, g, or t
gttgcttctggctgcagccctggaagaaggttgggctttggccatcccttgggtgggccttgtagggatagccacacactgcaaccagtcacccactttggctgatctaaagtagcaaatggaagtagtgatttgactgtcaaactggagatgcatcggcctgtggtttgacctgggaaaggggcttgtgtcntgggtgatagggaaaggtaaacagatgtattagccacgtggctttgtgtgggcagctgtgttgaatcagcctgctgctgagtcacagggagtaactgcagctgcctagggctggcttctagcatggagaggagaggaaaaggggtcctgcaatgtcccccagcagcctgtcattgtgtgtgaaactcctagcctgagagccccacctctggtcagcactagtgttgggagacttctgggagggattgtgactttcagctgggtaactggtgtctggctgaggccatcttgagcgcagtgaggaaggatctccagcctgagtgtgccgtgggccccccgaatacataggggagccctgcanagcagttttgaaatgagtagtacatctcacgaagaaagtctgcaagaggtcgaggtgcatgagaaagatctggccctgctgccctggcgcccncttgtgccctttctgctgtgnngggtctcattgcgtcagagtgcttagtaacatcagtggcgaggg

SEQ ID NO: 269479 - DNA, 719 bp, Homo Sapiens
  misc_feature (26)..(26): n is a, c, g, or t
aaatgaccagctaggctagtattttntttcccaaggaaaattctgaagggggaaaagacagatgaaaacaaattcatcagcccagaaatagagaaatataaaagaggttgtcttcaagtcagtagtctgtaagatgttgccagttttgtcagatatatacaaaacatggaaattattatttttttctgaagtacagctcatcagctttgtgagagtcctggagtaggagcagtactctctcccgtccagttggttgacactccgcacttggaaggttgcatagacacagttttcagccagcagccttacgagatagctacaaaaaccagtggtgcagaactgggttatttcctgaatagcagaaaaggtctcatttaatgtccatggaacaatatcaagatgaggcggatggtaatggaggagcctgaaaataaaagtaaggtaggttattttgatatacaaattgttaatagctcatggctacaaacatatagtctgcttgtgaagttaggggaaataactctcaaaaagttcaacagcctgctatgcaacataaaagtacagcctaccttactatctcccattcagccaatcttcctaagaatctaagaccattatcctactcagtgtacttgcaattttctatacttcttcaccaattagtcaaaaactcttggaatgttattacgtttaccattttttaagattgcttaaaaaaa

SEQ ID NO: 269480 - DNA, 605 bp, Homo Sapiens
cttgaatggtcttcaagattgcttgaagaagaaaattatctgaaatatgttgaagaaaatatattacctagctgagatagattctgaaggcagtcactagtgaaattgtaatttgttaaattattttgcaagaagccccctttttttaagcaatcttaaaaaatggtaaacgtaataacattccaagagtttttgactaattgggtgaaggaagtataggaaaattgcaaagtacactgagtagggataatgggccttaggatcccttagggaaggattgggctgaatggggagatagtaaggtaggctgtacttttatgttgcatagcaggctgttgaactttttgagagttatttccccctaacttcacaagcagactatatgtttgtagccatgagctattaacaatttgtatatcaaaataacctaccttacttttattttcaggctcctccattaccatccgcctcatcttgatattgttccatggacattaaatgagaccttttctgctattcaggaaataacccagttctgcaccactggtttttgtagctatctcgtaaggctgctggctgaaaactgtgtctatgcaaccttccaa

SEQ ID NO: 269481 - DNA, 404 bp, Homo Sapiens
  misc_feature (232)..(232): n is a, c, g, or t
tattctgtggatgtcacgtattttgaaatgatagaactacattagctttgtatcatgtttggataatccatcaaggttcacagtttaaaacatccattaaaacattatgtaattacaatgagaaagaatccttacttaaatttgggagattttcccccacatctctttttccgggataccattataattctggacccctatttatctcaaaacctcctaatatatgccaganccaacagggtcttggcattccttttaaataactggttgtgacaaagcttgttgttgatcagattcactgtttcatcatatttattgtaatatattttttgttttgtaaatatgttacaacaaaatgtgattggtctaaaatatttgtaatgtatattaaaaggttcaaaaat

SEQ ID NO: 269482 - DNA, 530 bp, Homo Sapiens
  misc_feature (24)..(24): n is a, c, g, or t
caccctaaatggaaaccctttccngaaaaaaatataattgccaagtaggtaggactggcctaaattgtctaatgtaataaagtcagacaaaatgcatactttataggttccaagattttcagtatataaaatctgtcccattcccattaaaaagtggaagattttaaataattgtctttacagatgttttatggaagcaggtagcgcaatctactaaggggtggttgagctgtgtgtgtgagtactgatggtaattaattttgggaaggcatgaactagcagaaaatttattaaattaactattaactacattcaccttgtaaattactgtataaaacttgttgacaatgcactgactttagaaagatgttaatgtacataaatagagtgtaaataaaatagtgttgatgtaccgaaatatgaactgtataaaaagtattggtaattgtatatggggtgtacctgtttatctgtaactgttatccaaacaaattaaatactgtggatgcctctatgtgctgtttttcctc

SEQ ID NO: 269483 - DNA, 468 bp, Homo Sapiens
  misc_feature (395)..(395): n is a, c, g, or t
  misc_feature (438)..(438): n is a, c, g, or t
tttcggcacaggacagatgctggagtccttcccaagtcccaggctgtgtggttcccagccccaagggtagcaagtcagaacctccggagaggcttttaagcatgcacatgtccagggtcctcatcaagagactgaatcagggggtctagggctcagcacaggcaccctttttgtttttgcagtttcacaggaattctgatgtgccagtgattgtcaggtttgtccctgggcaggacccacctgcctggaccttctgtccccctgggacaccagtatttccagagaggtgcttcagttgccccaccacgacttccagcgccccccatctctgtattgcagctgagctcatggatgggagcccactgtgtgctttttgttgttgttacattcctatnaaaaatgttccacgcatattttgaacatctgtgtttcatagtnggcattatttcaacaatgggttacaacaag

SEQ ID NO: 269484 - DNA, 461 bp, Homo Sapiens
  misc_feature (67)..(67): n is a, c, g, or t
tccccaacccccaaaataatggttggaaataacccgctttgcaaaaacggactggggcctgcaatgnccgtgggcccaatgggccacaggggccatcaagttggttggaaaccgagggctccctggggcattggctgccaggctctgtctgtggggggtgatgggtggcacatgagacatggtccctgtcctcaggagatggtcacatctggaaaacagctcttctagattcctgcctcccctctctctagcccaatgctactcacagcatggttcaccaatccctgctggtcaacaaggtaagttgagaaatgaaagtaagtctttagaaactttcatgacaatcagaatctaatgatataaaatttgggcttgtattttatgtgactgcttcttgttcattattatcttttaaagtaaacatctgagcaagcaatgactgtttaaaaaaaattctcttc

SEQ ID NO: 269485 - DNA, 312 bp, Homo Sapiens
  misc_feature (14)..(14): n is a, c, g, or t
ccggaagtaatacnctctgtattcatttgcaatcattaaaaatttagagtcagtttacccatccctacccaagtagctaagtaacaacacctcgctttcccagaggtcagtcttcttgcaacttcagcctcttaaaacaaatcccaagagttgaaaaaggatgctgagtgtcgaatattactgtacaaatctcatgcactaaaatctcttcaaaaatgagccctgggatctctttcacatcctatttgttttcttttacatataatcccagataagctttccttatttggcttttgaatgtacgttgaatat

SEQ ID NO: 269486 - DNA, 421 bp, Homo Sapiens
ccttcccctaagggatgtaaaaagaagtgaagggatttgagatgtatcccttgagttcccccatcaagaaggcctggttacctcactacgtcccaaaaggcccaaaaggaatgagttgcaaaggtataaaagaattataaattcagtttgtacatgatgcatctgagatgtccttgaatatgtttatttgtaattttagaggctcagaaagaaaactgggctgaagagataaatttggaagttgccagcatataaatagcaactaaagccttgggagaagaaaagaagagctacaattaagtcattaggaaggctgatgttcaaaggtaaagtggaggtgggtgggcctgcaaagaagacccaggaaagagaccagaccatattaggaaagcccaggaaagtgtgacattgggaaaacaag

SEQ ID NO: 269487 - DNA, 516 bp, Homo Sapiens
tttcatccctgacccaaccaatcagcatttcccatttcctagccccctctgcctgccaaactatctttctaaaaccctagcctctgaacttttggggaggctgattcaagtaataataaaactctggtctcctgtttagccagctctatgtgtatgaaactcttcgttgcaattcccctgtcttgataaatcgactcctatctgcacagcaggcaagatgaacctgttgggtagttatgcctctgcgtgaccactgatgataagatttggcactcactgaaaggcagtcatcttcaccactctccgactggctcagctattgttaacttctgttgattcctgttggtggcattcctgaaaaaaaatttgtatgctggcatttggaaaattgagaaaatgtgagtggaaggtagagcaaaaacaggtagagaaagaacaattttacttcttaggggtcttgtgttctccaggatattgttgccaatgtgggaactatcagaacagtcctcggatttg

SEQ ID NO: 269488 - DNA, 483 bp, Homo Sapiens
  misc_feature (165)..(166): n is a, c, g, or t
  misc_feature (193)..(245): n is a, c, g, or t
  misc_feature (258)..(334): n is a, c, g, or t
  misc_feature (345)..(436): n is a, c, g, or t
  misc_feature (439)..(439): n is a, c, g, or t
  misc_feature (444)..(444): n is a, c, g, or t
aaggctcagattgcttagaggtatattcaccatcattcattcactcattcaacaaaataggctgggcacttctatgtgccagaggactgaagttagtaatagctaacactaatttaccattattatatgctatagaatatataaataattttatttatttatttnncttttaagatggagtctcactctatcnnnnnnnnnnnnnnnnnnnnnnnnnnnnnnnnnnnnnnnnnnnnnnnnnnnnntgggattcaagcnnnnnnnnnnnnnnnnnnnnnnnnnnnnnnnnnnnnnnnnnnnnnnnnnnnnnnnnnnnnnnnnnnnnnnnnnnnnntttgtaggagnnnnnnnnnnnnnnnnnnnnnnnnnnnnnnnnnnnnnnnnnnnnnnnnnnnnnnnnnnnnnnnnnnnnnnnnnnnnnnnnnnnnnnnnnnnngtntgagncaccgcacttgggccataattttacatttatttcatttt

SEQ ID NO: 269489 - DNA, 432 bp, Homo Sapiens
  misc_feature (367)..(367): n is a, c, g, or t
  misc_feature (400)..(400): n is a, c, g, or t
  misc_feature (413)..(413): n is a, c, g, or t
agtataatactcaacaatctgtactattctgactttaaaatcatatcaaatattaataacatatatgctcttaagaaagtacctttctttgtaaatacaactgacaaaatattcagcaaagtgtgtacaatagtgccttgtatacatgtgtctttctagagctacttcagtataatttaacaatcattgcacaatagcagatgtataatagtttccatataaactattatctaagctgtaaaatatggaacatagttcagcaaatcatttctgaggaaaaggcataggatgtttatttacccaactatctctttaagtgggtaatttccttggaaaaggacaagggttgattaaataatttaaagancactactaggtaaggtgtttaggctaaaaccantttatgggggttntcaaagggctcaacttgga

SEQ ID NO: 269490 - DNA, 340 bp, Homo Sapiens
  misc_feature (24)..(24): n is a, c, g, or t
cccacctggccctccgaaagtgcngggaattacaggcgtgagcccaccagcccaggccaagctattcttttaaagtaagcttcctgacgacatgaaataattgggggttttgttgtttagttacattaggctttgctatatccccaggccaaatagcatgtgacacaggacagccatagtatagtgtgtcactcgtggttggtgtcctttcatgcttctgccctgtcaaaggtccctatttgaaatgtgttataatacaaacaaggaagcacattgtgtacaaaatacttatgtatttatgaatccatgaccaaattaaatatgaaaccttatataatta

SEQ ID NO: 269491 - DNA, 429 bp, Homo Sapiens
  misc_feature (100)..(100): n is a, c, g, or t
  misc_feature (148)..(148): n is a, c, g, or t
  misc_feature (221)..(221): n is a, c, g, or t
tcctgggtaagtccgtttggctttcctgtaaaggggtgggaaccctttttattcccttaaaggtatgacctatcctatttgcccaattaattcccatgtncccaaggatcccctcatggagaaaatgttgcactgagttaaataaggnaataactggacgaatacttgagattattcccttcataagaataattactaattgtgaattgatggtttgaatnccatgctaaaatgattgaacctcttttctcttgtgaagtgattgtgaagttacttgtacctttatgtttttaaaatttgatgataatagcaataaaagctttagtgcttttatgatctctttatttggtttgtagttatggcacatcagaaactcgcatcaaaatagaatcaagattattgtaaaagggacctcaaacgtagatttct

SEQ ID NO: 269492 - DNA, 492 bp, Homo Sapiens
taccatcgtcataatcaaaaagcattgcttgagactagggttgccagatttaccaaattaaaatatagaatactcagtttagttggaatttcaaataaaaagcaattttttttgcatgtcccatgcaatactggagcaatattttggacatagttacactaaaaaattactcattactcatcctgaaattcaaatttaacctagatgttcctctattttatctggcatcccctaattgagacccttctccgaagatacaaagagatagcagtccccagttgctgtcgctctttggggagttttcaatcaggtcaaagataaaatgaaaggagttaaacaacagttcagagcaaggcaatggacttcaaaagtcctaacactgctcaactcctgactgcccaagtcccaaacctgtaagtcagcctacttctcatcttggtgtcctcagcagctaccaagacacctagccaactggtcgacatctgctaagta

SEQ ID NO: 269493 - DNA, 341 bp, Homo Sapiens
  misc_feature (301)..(301): n is a, c, g, or t
gtgtaagccatcacacctggccctagtgacaggtttttatgggtacttttagatgatctaagaaatcatgtgcatatatctttcagatttttattttgggaaaatgaaggtttctacaacatattgtttcagtgttcaaataaactgaaggactcaacattacatttgaactatatccttcctagtggggttaagtgtgaaaaagagtttggcctgattcctaaaactctgccagccctgcagtaatctccggggccgggttattgttcaggacatttcctgggtgattcccggggaaggnaggcttgggtggttcagtttctgaggtctggggtgagata

SEQ ID NO: 269494 - DNA, 469 bp, Homo Sapiens
  misc_feature (24)..(24): n is a, c, g, or t
  misc_feature (41)..(41): n is a, c, g, or t
cgcccaacaagcacatgaaaaaangcctcaaccctcactancccatcgggtaatacaaatccaaaaccccacacaaagatatcactttgtaccttagttaggatggcctataataaaaaaggccagaataatagcaaatggcaagaatatgaggaaattagaactctcatacccccaatgctgggaatgtaaaaaggtgcagctactttggaagacagtctggcagttcctcaaagggttaaatgttatcatatgactcagtaattccactgctaggtggatatggtttggatctgtgtccttgcccacatcccatgtcaaactgtaattctcaatgttggaggtggggcctggtgggagatgagtggatcataagagtggtttctcatgaatgggttagtaccaacctcttggtgctgttcttgtgatggtgaatgagttctcatgagatctggctgtttaaaggtgt

SEQ ID NO: 269495 - DNA, 569 bp, Homo Sapiens
  misc_feature (28)..(28): n is a, c, g, or t
  misc_feature (50)..(292): n is a, c, g, or t
  misc_feature (305)..(313): n is a, c, g, or t
gtatcccttcccaaaaatcctaagggtnaggctagttgtggtgattcatnnnnnnnnnnnnnnnnnnnnnnnnnnnnnnnnnnnnnnnnnnnnnnnnnnnnnnnnnnnnnnnnnnnnnnnnnnnnnnnnnnnnnnnnnnnnnnnnnnnnnnnnnnnnnnnnnnnnnnnnnnnnnnnnnnnnnnnnnnnnnnnnnnnnnnnnnnnnnnnnnnnnnnnnnnnnnnnnnnnnnnnnnnnnnnnnnnnnnnnnnnnnnnnnnnnnnnnnnnnnnnnnnnnnnnnnnnnnnnnnnnntgactctgtctcnnnnnnnnnttaagagtaaagaagagggcttaaccatttgagaaataaacatcaaggtctgccattctaaaaaagcattaatggattacaatagtttcaatagtttacatggttttcactctttaagttcaatgaaaattgcatatattgtttttactcttgaacacagtggttaatactatatcagggtggttagtcacaagaaagacgcaaatacagaaaggataaccttatccaacttcagtattattttagtagtaatgtg

SEQ ID NO: 269496 - DNA, 420 bp, Homo Sapiens
  misc_feature (22)..(22): n is a, c, g, or t
  misc_feature (243)..(257): n is a, c, g, or t
gcctacaggatgcccccagggncctttcagaccccttgattaacacccactcacctgacctccacacccccgaatatccccggatccctagtgacaaaagttatagtatatttaagtccccaaaagttcatccatcattcctaagttcaaactaagtaattccctagtaaggaatttcccaatgtgagaatgttatagcctccaagcctttcagaacctgttaagtaaaatccccagagtttnnnnnnnnnnnnnnntcagaatttttaacaagggtgccagttcaaagctggaaactaaaatttcatgaatataaatgtgcaccctcccacagaaaaaaatacgactgtcactgaaaaatattatctatgtaacgagaattgttcattaattttcaaatgtagatgacaggttatccct

SEQ ID NO: 269497 - DNA, 475 bp, Homo Sapiens
acttttgagaatgtgtatggaaaattctttttgtgcatttgagggcaaaattcaggccatcttcttatacatatactatcaaattatgttgtgtgcattagaaatcagttgcttgatagtagctattaaacccaatattgctgatagtatgctaatatcctaaaacttaaatattgcatatctatgaatgttaaattcagaatatctctaaaacatggaaaattgatgtttcaataaaaagggagacattttattattttgccttactaatgattttgcagctctgtttttctgcacactcaatagaaaatattgtgggtctgagatgccctttgaaaatgcctgaaagaaaacatgggctactacattatgttaatgttttgtaatgtccttttaatgagtggtgacataaaagggctgctttgttgtcctgatatggcaaaaattaaataaattctttttcactttaaatcct

SEQ ID NO: 269498 - DNA, 432 bp, Homo Sapiens
  misc_feature (319)..(319): n is a, c, g, or t
aggtaggtgccatgtgtgggtacagagacttcagaaggtaggtgccatgtgtgggtactatttgccataattctagcttcttataagttttcattgaaagcctagcatttgaaatcagctgctcccaagagggcagtaatggagtgtatcactgtgtccctaaagaattcagaacaattttgttttggtctggttagttaggcctttaatttgcaacaggttacctcagctgtgatttatatgggttcatacctttttatttggctctctgagtcccagaattgctctgctggcactcttgtgttagcatatatgggtntcgcttttcagcttgctttttcagttcaccactcacaatatcttcatcaaagcagaccaattgtacatgatagttaccctaaatctctgttactttccataattaagaaagtt

SEQ ID NO: 269499 - DNA, 392 bp, Homo Sapiens
gcccctagtgcccatggatttaaaatatttttattacccattttgaaagggagaagccaattctgcatatgcctttgaattcctgcccctctttaccacctcttcctccccctcaaaggaaaaacatttcatccaagtaagttaacggcattttctgtaggattttcttatgcactgcacactctggacctcacctgcagatacagttccccccttgccaggagcatctgcatgtggtacttctcttttccctcagttgatatttcttatatgatattctagatactatagaactcaatttgtcagattcagtataacctcagattttgttacctgtcttttaaaaatgcagattttgtcaaatcaaataaagatcaatggatgttgagtat

SEQ ID NO: 269500 - DNA, 416 bp, Homo Sapiens
  misc_feature (19)..(19): n is a, c, g, or t
  misc_feature (40)..(40): n is a, c, g, or t
  misc_feature (50)..(50): n is a, c, g, or t
  misc_feature (153)..(153): n is a, c, g, or t
cctaaaactcctgccagcncctgcaagtaatcccccaggncccgggttanggttccagacaacccatgggtgattccctgggaaggaagcttggctgctcagtttcctgagtcctggggtgagataatgttcctgggaagggacatcctgttnctttggtgtaatctctcatggtgaaatctgctctgtacatcagacaattgcattgctaccaagtttcataccaaatatttgaaaggatggtattgaatctaaaaccaaatattagtttttattaaactcatgggaaggctaatatattccaacgtaaattattacatatggttaagtaattgcatgttaatttattttaatgtaaatatttttgttactgttctgagccaaattctaaagaaaaaataaatacattgccttgt

SEQ ID NO: 269501 - DNA, 165 bp, Homo Sapiens
gttcctccagtccggccctctagttgatagtccagtagtctgttaacaatttgtaaggacctgggttatattttaaaggtggttgttgttgttgtttgggttcacttatgtatatgcagcttgactgttcaacccagatttttaaacaataaaaagatttaatgt

SEQ ID NO: 269502 - DNA, 325 bp, Homo Sapiens
  misc_feature (21)..(21): n is a, c, g, or t
  misc_feature (48)..(48): n is a, c, g, or t
ccccgggtaaaactagaatantctggaactgagctgcccaaatttcancttaaagtggatcatttgactctgaaacacgattctcatggcagaaaaaagcccccggtgtttcccttggagcctggggataaaggcccagtgagcccagcctgtgatgagagcctccccctggcactatctgagtggaaagctcattgggacagccatgcagctatcagagccgactgaagccctgtcccttacccctcaggcacctgatgcttaacttgcctcctgggaaataatgatctagcatttacttggaacaatgattaatcatgttctt

SEQ ID NO: 269503 - DNA, 213 bp, Homo Sapiens
tattgaactcagtggttcaaactgtttgtgtaacccaaaaacccttaatcattgacatttgaagattgctgttggtttttttaactaataggacaaaatttatttttagtacaaaaatttcaaggagatataagaatagttacttaggattgaaatggcatgttaaatactaaaggaaaattggaatttgttttgttttttagaatggtttct

SEQ ID NO: 269504 - DNA, 358 bp, Homo Sapiens
tacttcattttcagtaagaacaatttttaatgctttatttattggacgaataaagtactgtttcagtacattcagagaactagataaaagatataacttaagctttgatagtggcactggagccacccgttttaatttatataatgagaaatgtgctttgatgtttaaagccactgtacctgaatcatgctgttcatctatgaagttattactataagtagccttcagaagagtggtatcacaaagttgtgtttcttttgtgtccttaagcttgtctcacaagaaagatgccaggcctctaaatgtaataagatagagggtcaaaggttcaatcaataaaaatattttattcaaaaaa

SEQ ID NO: 269505 - DNA, 403 bp, Homo Sapiens
gctatggaatgtttctgcaaccctaaggcacagagagcccaaccctgagtgtctcagaggccccctgagtgttccccttggcctgagccccttacccattcctgcagccagtgagagacctggcctcagccctggcagggctctctcttcaaggccatatccacctgtgccctggggcttgggagaccccatagggccgggactcttgggtcagcccggccactggcttctctctttttctccgtttcaatctgtgtgcgttgtggggtgggggagggggtccacctgccttacctttctgagttgcctttagagagatgcgtttttctaggactctgtgcaactgtcgtatatggtcccgtgggtgaccgctttgtacatgagaataaatctatttctttct

SEQ ID NO: 269506 - DNA, 173 bp, Homo Sapiens
  misc_feature (126)..(126): n is a, c, g, or t
  misc_feature (138)..(138): n is a, c, g, or t
gggaacaaggtaggatggaatctcatagggcactttattgagaggaaaggaagacaaaagagtacatactgaggtaattcaattgttaaaattttaaggaacatagggtaaaactaatttccggcngtccgacagtcnatcttttggtgcctttactgggggaggggacacag

SEQ ID NO: 269507 - DNA, 473 bp, Homo Sapiens
  misc_feature (417)..(417): n is a, c, g, or t
ttcggcacagcagacagtgaacacatgcacggtgcagctgtcagcacctgcatcagaacaatgagcacatcagagtcagacacagtgaagggactaaatgacatgaccccttagtgttcttccaaacccaagagtctgtgtcatctatgaacacaggagtctcccttaacttttttggtttttgcaatctgcttttatgtagttttatgaggaagttttcttttattcaagacctctgccaggtgggtggtgagagcagagtccagcaagcattccaatgtgctaaaaggaaagagaagtgttgtattcctggaaggccccaaggaccacctggcccctaaagtcagagagggggaaggggccatgccaattttcagctggtccaaatcaagttgaccaaaacttctaaagaacttnctttaaggcaggtataagcatcatttcccttgccatctcatcagttctcaggggtg

SEQ ID NO: 269508 - DNA, 321 bp, Homo Sapiens
  misc_feature (249)..(249): n is a, c, g, or t
gttcttggcacaaagtactcaaataatgactgaatgtagaaggtactctcctaaaacacatacttctttgagtcaagtaagaacctctgtctatgtgtaaaagggctctctaaatttgggaacactgccacgtatttctagatctagtatatgagccattgtcagatgtacatcctattccagttttgagccattactggctgcctttgggttgagtttagctttttcattctaatttcagaagccagnccacctgccattatgctaaaatcctgttccacattcaagtttacacagtaaggcatttcataaaggtgtgga

SEQ ID NO: 269509 - DNA, 402 bp, Homo Sapiens
gttccaattaatatgcctacacccacatcaaggacgcctaagcaggaaaagcatccttataattttagtgcatacttgacaggtattttatagaaatcaacaatcattccctaataaaaatttcagaactagaattaaaaagaattccggttaacagcatagagcatccatatttaaattagcaataattcctctacattcagaatatataaagatgcctactattatcattgtcattgaaatcattcataaaaatattattatttaacattgtctggaaagtttttaaaaacaacgacagaaaagataaagacaccccaatggaaataaatactgaaaaagaagagacaaaaatatctcctgtatatgatgtgattacatacctggagagttaaatcagcc

SEQ ID NO: 269510 - DNA, 405 bp, Homo Sapiens
  misc_feature (27)..(27): n is a, c, g, or t
  misc_feature (40)..(40): n is a, c, g, or t
  misc_feature (54)..(54): n is a, c, g, or t
  misc_feature (57)..(184): n is a, c, g, or t
cggaatgtggtggaacaaaattggaancctttacctaacngcaggttgtttgtntgnnnnnnnnnnnnnnnnnnnnnnnnnnnnnnnnnnnnnnnnnnnnnnnnnnnnnnnnnnnnnnnnnnnnnnnnnnnnnnnnnnnnnnnnnnnnnnnnnnnnnnnnnnnnnnnnnnnnnnnnnnnnnnnncataccctggcctcactgcaggttttgattagtccccctggctgcatatttgggctcaaaaaaatgcttttcttcatgttactaagtagactgaaatttatctttgtggttacacattatatatcatttgttatttcttaaagtcatgtaggttagtctttcacagtacataccttcgatgtttaccattttgactgaagatataatgctaaagattttat

SEQ ID NO: 269511 - DNA, 456 bp, Homo Sapiens
ggggtttttgacactacattccaaagtcacctgaacaaggccttatggaaggtagggaagttaactagtcctggggctttgctctttcagtgagctaggcaatcaagtctcacagattgctgcctcagagcaatggttgtattgtggaacactgaaactgtatgtgctgtaatttaatttaggacacatttagatgcactaccgttgctgttctactttttggtacaggtatattttgacgtcactgatattttttatacagtgatatacttactcatggccttgtctaacttttgtgaagaactattttattctaaacagactcattacaaatggttaccttgttatttaacccatttgtctctacttttccctgtacttttcccatttgtaatttgtaaaatgttctcttatgatcaccatgtattttgtaaataataaaatagtatctgttaa

SEQ ID NO: 269512 - DNA, 420 bp, Homo Sapiens
  misc_feature (392)..(392): n is a, c, g, or t
  misc_feature (403)..(403): n is a, c, g, or t
attttatttgccaaactgagaacaacagcctttacacattttctatttttctggacttgattcttaggaactttaattttgcacttttgcattcctctataaatgttaatgtcttagccaatgacatttttctagataaattcaaaagcttaacctaagtaatgtaatggtggcatttatgaaattgactcctggggtctctctttaaattctttttattgtttatttctatgggcaccattacactatggctatcacattgttcttgttttattccccatggtttaaaaaggctgggatattccttggccggaatccttaaaggggcacctttggaaacctcaggaccaggactggaaatacggtgaagggttaaggggtaaaaggggggnaaaaagggggnaaattataaaacccccc

SEQ ID NO: 269513 - DNA, 399 bp, Homo Sapiens
  misc_feature (94)..(94): n is a, c, g, or t
atccgagaaagtagtgatggattgccctgatttttaccataaatatgacctgaaaataccttttgcccttatagagccagagggtcattaaaantgatcccgttcctgtgtgtcaaataccatgaggtatacccactgagtcacatatgtaaatgttatcagcctagaacagaacatggcatgagatgaggacccatgagagaggaatgagtagagaagcagattttacttccaagtggagggaagaaggcttcttggaggaggcggcatttgagtagggtgttgaaggatggtatccggacagaagagaatgaggctttccttgtacaatagcagaggtacacagctgataaagtacaatgtgcttttcaagcccaaatacctttcaaaaaagaccat

SEQ ID NO: 269514 - DNA, 671 bp, Homo Sapiens
cacaaaccctcaccgaaccagtggccaccaccatgacaagggaccagaatggaacctgggagatggagagtaatgaaaactttgagggctacatgaaggccctggatattgattttgccacccgcaagattgcagtacgtctcactcagacgaaggttattgatcaagatggtgataacttcaagacaaaaaccactagcacattccgcaactatgatgtggatttcactgttggagtagagtttgacgagtacacaaagagcctgggataaccggcatgttaaggcactggtcacctggggaaggtgatgtccttgtgtgtgtgcaaaagggggagaaggagaaccgcggctggaagcagtggattgagggggacaagctgtacccggagctgaccctgtggtgaccaggtgtgccgtcaagtgttcaaaaagaaatgatggcgacgtgggaggcctgccaagcacaagctccccactgcccacactgagtggtctactggctttgagaaacagctgtggggaccttcccactcttgacagagccccattaaggcatctgggtgggttttaaacagaatgcctatgtagcagtgatagacatattcccctcctttgaaacctagcattaaatggaaaaacaaaaattactcccatattttgaaacccttt

SEQ ID NO: 269515 - DNA, 170 bp, Homo Sapiens
aaaaggaggacattgtaaacaagtggacaagcactgtactcaaaggatttcattgtttttctttgtcttccttggtgggttaaaggccccaagtagttcaatggctagcttttctcattatcccaatgagatcaagtgctaggactggattgaaatctaaaaggaagatt

SEQ ID NO: 269516 - DNA, 450 bp, Homo Sapiens
  misc_feature (166)..(166): n is a, c, g, or t
  misc_feature (429)..(429): n is a, c, g, or t
  misc_feature (437)..(437): n is a, c, g, or t
tttaaaacatacccaagtcgcctgaagctttaatgctgtaagatgacgtatgggtgaggacttttggttgcacataaccgaatgatctggaatcatttaacagaaaagtgaatttacagggattctgggacagccttacgtaccagggctgggacgcagaccaggnaacggatggaagcagggaagggagaatgctgctctcggtttcaggccacgtcctcgctctgtatcgccttcatccgcttcacccacagcccacctattcccagggcacttagggagtcttctccacacacagaccattctgaaaacagggagcccagtgggaggaactgagtagggctgacccatctgtgctccggggtctgctggggacctctctggaactgatgtaaggacacggtcagtcttgatggagctccaatgggngacttccnggagaaaggtagg

SEQ ID NO: 269517 - DNA, 425 bp, Homo Sapiens
  misc_feature (18)..(18): n is a, c, g, or t
  misc_feature (35)..(35): n is a, c, g, or t
  misc_feature (69)..(203): n is a, c, g, or t
ccccctgagtaagccggnaactaacaggccgcaangccaacccatgccccagccaaaattttggtaatnnnnnnnnnnnnnnnnnnnnnnnnnnnnnnnnnnnnnnnnnnnnnnnnnnnnnnnnnnnnnnnnnnnnnnnnnnnnnnnnnnnnnnnnnnnnnnnnnnnnnnnnnnnnnnnnnnnnnnnnnnnnnnnnnnnnnnnttgtttgatttattttgaaacaatgttgctaacttcatacaaacttaaaactgggtttctaccaatacttttctaatccttatttgcacaattctggctcacaagtcaaagaaggctctggcttgccttcctctgggcctgttcctgccacgaatattaaggtaattttagatggttcactgtaaaatataatacatgctaggttactctttcgttatgcaa

SEQ ID NO: 269518 - DNA, 408 bp, Homo Sapiens
  misc_feature (170)..(170): n is a, c, g, or t
ttgcccaaaatggttttaatttaagacctaatgtggttcctagtccctagaggattccatactggaatccatcggtttaatattaccgcctatttgaaaggcagccatagtatagtacttttggaaaattggcctgagggtgatgtcttttggaatatttgtgaattcanctatgaagcctaattccttaaaaatgacctccttcactcaattatcagtgttcttggtttgccctgggagtgaaaagagatcttaaaatctttttggttttagttacataattgactgatgtaatattatgtaatgatggctgtacacagtgtctcatgccctataatcctagcactcatttgagctcaggagttcaaggccagcctgggcaacatggtaaaaccctgtctgcaccaa

SEQ ID NO: 269519 - DNA, 459 bp, Homo Sapiens
  misc_feature (223)..(350): n is a, c, g, or t
  misc_feature (375)..(389): n is a, c, g, or t
  misc_feature (436)..(436): n is a, c, g, or t
  misc_feature (444)..(444): n is a, c, g, or t
ttcggcacagcattatcagtcacagctatcctaccagacccgccttcttccatcatgcccatttcagaacaatgaaggactagacagttttttgttccttttaattcagaaagggaaggaaataaaaaagtgtgtttaaattactattgcagaaaatctggctggatgctgggacctacctcttccaggatggggattcatgatttaatttttttgagacagnnnnnnnnnnnnnnnnnnnnnnnnnnnnnnnnnnnnnnnnnnnnnnnnnnnnnnnnnnnnnnnnnnnnnnnnnnnnnnnnnnnnnnnnnnnnnnnnnnnnnnnnnnnnnnnnnnnnnnnnnnnnnnnnactgcgctgggcttaatttttgtannnnnnnnnnnnnnnggtagagacgaggtttcaccatattgggccaggtggttttcgaactnctgacctnaagtatttaagtaat

SEQ ID NO: 269520 - DNA, 345 bp, Homo Sapiens
ccatggccctgccacatttttctatgagaacaaagtcatgtgaaaagagtaaagaatctccacatgcgaaaatcaccattttggctaaagtttagaagtattaataattaatttcatagcttaggcaaaatgtccattgttccaaaagtcatcatcaaatattcacactagatacgaatttcagtaattaatcctatttgtaaattaaaaaccaagttttcagcttgaataaatgatgaagatcagccaagcaacgttcacttcttaaaagcgtttgttttgtgaaaaatgcaacaagactccgtctcggtgggaaaggtgtggctaaaatattcattttttctc

SEQ ID NO: 269521 - DNA, 481 bp, Homo Sapiens
acactgcagtacctacggaagaggcctacgttatatatgatgaagattatgaatttgagacgtcaaggccaccaaccaccactgagccttcgaccactgctaccacaccgagggtgatcccagaggaaggcgccatcagttcctttcctgaagaagaatttgatctggctggaaggaaacgatttgttgctccttacgtgacgtacctaaataaagacccatcagccccgtgctctctgactgatgcactggatcacttccaagtgggacagcctgggatgaaatcatccccaatgacctgaaggaagagtgatctgccttccccagcatgcttccccgcaacattcaccgtgggtgggccgtgggaaggtttgccacttcattttgttcattgtgggattggggacaaaaggccaccccagggagattttgggtcaacaggtttattttgttttacagtggcattcctatggaaggattt

SEQ ID NO: 269522 - DNA, 414 bp, Homo Sapiens
atcagctttccacgttgccttctgcgcaaagggtttcaccaaggatggagaaagggagacagcttgcagatggcgcgttctcacggtgggctcttccccttggtttgttaacgaagtgaaggaggagaacttgggagccaggttctccctgccaaaaagggggctagatgaggtggtcgggcccgtggacagctgagagtgggattcatccagactcatgcaataaccctttgattgttttctaaaaggagactccctcggcaagatggcagagggtacggagtcttcaggcccagtttctcactttagccaattcgagggctccttgtggtgggatcagaactaatccagagtgtgggaaagtgacagtcaaaaccccacctggagcaaataaaaaaacatacaaaacgtaaa

SEQ ID NO: 269523 - DNA, 395 bp, Homo Sapiens
  misc_feature (43)..(43): n is a, c, g, or t
accctgaaaagcccttggccctttgtcaaaattaactttacanactaactcccaaatgatgctgacccaaaaacacctaagcaagtaaaatactggaaatgacctataatgacattcatataactattatgaagctactaacaagcaatgagtcagattacatgtactgatatggaagtgtttcaaacatatgtaagggggaaatcaatgtataaaaatgtcaaagtatattactatttatatacttggaatatttctgaaagactacatgagacaattgctaacaatcgcatagtacttttctgtaacacagaactaaaagactggggactggggtagaaagaagacccaatttcacattaagccaaatctttgtactatttgaatctcgtgcc

SEQ ID NO: 269524 - DNA, 401 bp, Homo Sapiens
  misc_feature (20)..(20): n is a, c, g, or t
  misc_feature (296)..(332): n is a, c, g, or t
gaaaaacccgtcccaagaancatgagtgaattcgtgccaggaagagggaaatacaaaagttccgtcccatgtgaaaatctgccttcaggtattggacatcgttccctccacctggacctagaggatatgtgttcaggatctcgctatggttagttacccatgtgctagacataggttgctagctagaagttttgccagccatcttcccccctcctagtgctaatgcctaatttcctaaagtaatctgaatccttataagcccagggtagctcaggaggttctatttacttatttannnnnnnnnnnnnnnnnnnnnnnnnnnnnnnnnnnnnagatctcgtctgggcccgagtctcgttgcagtggtgtaatctctgcgacagtgccgagctccgtctcaa

SEQ ID NO: 269525 - DNA, 472 bp, Homo Sapiens
  misc_feature (16)..(16): n is a, c, g, or t
tgaaaggagaggtttngttgagggaagattatgtcactaagcatagctacaaaaggaaaagccacatggaagcagagacaaaggcaatcccgacacacagaggcatgtttgttgcggctcagggtttctgtttttcaagtgttcagagacgaattccagcaagacttctggtttgagtcaagcctttcaaccgaggtgcttggcatacttaacggaaaaagcgagtacattcagatttagttttgctagatattaaactagaaaactgggatgacagtaaaaccaatacagaaacaaaaagtcatgtttccagtaaagaaccgtacacacaagcaggttttgcttattaatgtagccgggagagcatgggaaatcggaatttcagactctttagaaaagacaaaaggcaggggaggggagagaagaaaaggaggattgcagagaagccctccaagaatggttgagtgatttt

SEQ ID NO: 269526 - DNA, 476 bp, Homo Sapiens
  misc_feature (425)..(425): n is a, c, g, or t
  misc_feature (447)..(447): n is a, c, g, or t
taaagaaaagatgtttaattagctcatggttctgcacactgtacaggaagcataacacgggcatctatttctgggtaggcctcaggaagcttacagtcatggtgggagttcacgggggagcaggcgtctcacatggtgggagcaggagcaagacagtgaggcgggaggtgccatacgcttttaaaggaccagatctcgtgagaactcactatctcaaggacagtaccaagaggatggtactaaaccattcatgagaaaaccatccccataatccagtcaccacccaccaaggccccacctccaaacactgggggattacattttcaatattgaggatttggggtggggactttccaaaccatattaacctttattaaatggggttaattgacccttataaaagggatggggaggtaactagatanggtccaattttggcccttccanctctttcccatatgagaagcagtgttcaa

SEQ ID NO: 269527 - DNA, 429 bp, Homo Sapiens
  misc_feature (60)..(103): n is a, c, g, or t
taagttcctcggtggcagggatttatctggttcatttactgttatatatccttgtggaannnnnnnnnnnnnnnnnnnnnnnnnnnnnnnnnnnnnnnnnnnnaaaatactagttgaaatatgtattcatctggcatccatggtacccatcatctgtattaaagggcttaaaaaagcatcattgcaataaaccatactaacccaccactaaagtcacagtcataattgaagtgcacccaaaataaggtccagtgactgtaccttagcttttacttcagacatgtccaaaacttgtgagaacatacaatttaaagttgaaaacttcatccattttggggctatttttgaataggggctggaatgtgggtgacatgttcagggcacttcagttttttgggagctgtctttaaaggtgagggtgggaaagtg

SEQ ID NO: 269528 - DNA, 463 bp, Homo Sapiens
tcagtagatctagtcaaagccatctcagtgctagtgattggtaattgttaatttgatggtaattaccctacttgtaaagttgacattcatactggctaatcctccctgcccctagtcgtggacaatgaaacagtgagtggctggtgaattagatcagattcaaactaagccattccttgatgctattcttcactgctgttccttagggtatcctaaatgtgttatttataaacatttttggggctcctgcctgcaaacttcggtaggtgttggtcttccccacctctacaactgagccaaggacttgttctgaaaggtgagtaataaataagggaacaaggtttctattttctgtgtttgtaattaccagattttcacctctgtttatatattattctgatgtaaaagaacctcatagttatataaaattagaccttttgtaaataaatataatttattagcc

SEQ ID NO: 269529 - DNA, 736 bp, Homo Sapiens
  misc_feature (34)..(34): n is a, c, g, or t
  misc_feature (83)..(83): n is a, c, g, or t
  misc_feature (120)..(154): n is a, c, g, or t
  misc_feature (203)..(203): n is a, c, g, or t
  misc_feature (205)..(205): n is a, c, g, or t
cccggacagggtatggctgagcatggaaaaagtnggtaagggtcacacaaacttggtggtcctgcaccaaactacaaagattngctcaattatagcattgtgctaacagtaaaagtagtnnnnnnnnnnnnnnnnnnnnnnnnnnnnnnnnnnnctaaattcctacacaaagtttctcgagtacagaggtgaatgtcttctcncntgctacagcctccaccccaaatacaacccaccagttaagagggataacactaaacaatgctgtttagtgtcatgtgcacccatctacatgaccagaaaaatactgttcatatgcaaaaaaatttactaattgttaatgcctggcccagatgttcttgtgaagagcaaggcaggggaaaaacatgttatcaagtgaatactctatccaaactccaagagaaacatctccagtttttcttcagagtcaatttgatcttcaactgagggtccctccattcttggcagtgagaggaacagtgaataatgaaaacaggtgttcagaaacctatgcagtatactccctgggtaaggaaggtgagcagcagtgacctaagacactgacatgacctcatgactagcaagaccaaactttgagaaagctgctacattccagaaatcaatgctaacagatggcaacacaaggcctagataagatctggcttaggctccagaaaagggaattaactttttaaaggatgtttcttgaccttga

SEQ ID NO: 269530 - DNA, 464 bp, Homo Sapiens
  misc_feature (276)..(276): n is a, c, g, or t
  misc_feature (314)..(314): n is a, c, g, or t
aatgttcacacaatccaagacttcaaaaatgagtctaaagccatggaaacacatttatcaccttcatgcttgttgaaggacaccagcaaaaatcaatgctaaacctatcagcttcatccattaaagcatttgcatagagaaactaacttccattttacaactctttaatgacagggagaatatccaacaaatcgcaagtaaaatagcatagaccacaaggaaagaaactaagacaagtcaaaaatacaccaagtaagaaattcaatacaactgggnaaacatactcatagggcaccaacattcctcctttgggncacctgttccttactgccctcagatgccccggggcaggggtaatgggctggagcatgggaaaaagtagggtaatggggtcacacaaacttggtgggtcctggcaccaaacttaccaagattagctccatttatagcctttgtgctaacag

SEQ ID NO: 269531 - DNA, 271 bp, Homo Sapiens
  misc_feature (17)..(17): n is a, c, g, or t
  misc_feature (24)..(24): n is a, c, g, or t
atggccctcgctgcttncgaaaanaaagtggtcccctcccaagctgagtttggcatgatgacgggcatgagttggcccaggtcacaagagcctgagtatctgtgtatagggagaaagcccaggagaggtttgaaatggaggctgctggcatttcttcactgccctagtgcacctggagtcttccatgcaccacctctgatccttccagagagtccttcccatttaaccgagagggaaactgaggttcagataatttgcccaggactgcttg

SEQ ID NO: 269532 - DNA, 414 bp, Homo Sapiens
caccctgtggtcctacaacctaactcaaggaatcctgaggccaggaaaaatcacttaaaccccaagaaaatccaaggctgccagtgaacctgtgttcaacaccactgcactcccagccccaggcaacacagcgagaccttctatggagaacacagccagtaccagagtttatgcagagcgtgggtgaagctgttgatctctttacaatctgcacagcctattgtgagtatttctgggcaggcagttcctctgcctgtttcaggagaggtttactgatttgaggcttatatgttaggtctttggtttgggtctcattttaagggttgtttgggggctgggtggtcggccttacacaggaagcggacagacagtggatgaagtcgccgggtgtgtgtgcacgcctgtaatcccagc

SEQ ID NO: 269533 - DNA, 620 bp, Homo Sapiens
  misc_feature (48)..(200): n is a, c, g, or t
aactaatgccgttatcaaattggaataatctttaactggccaggaatnnnnnnnnnnnnnnnnnnnnnnnnnnnnnnnnnnnnnnnnnnnnnnnnnnnnnnnnnnnnnnnnnnnnnnnnnnnnnnnnnnnnnnnnnnnnnnnnnnnnnnnnnnnnnnnnnnnnnnnnnnnnnnnnnnnnnnnnnnnnnnnnnnnnnnnnnggtagtagatgaagcacaaggaggattgaatctggagccggaaaacctggcttcaaaccccagctaccctgcttccgactgtgtgatctttggcacatgacacacggagcctccttcctcatctgtaaagggagaacagtcatcacaccctccaggattattgtgaggatcaagggagacgacataggggaaagacctgtcacatggcaaaaccaagcaaatgtgactcactctccagctatgcggcctaactgcccctgtctaagtctgatcctcattatctagaaaatgggaataatacttaattcccagatttcttatgaggatctaaagaagtactgaatgtgagatactactgtacaagggaagaatgacaaaaaataaagcaccatttttgttagttgtatgtgataatagtaa

SEQ ID NO: 269534 - DNA, 416 bp, Homo Sapiens
  misc_feature (349)..(349): n is a, c, g, or t
cacgagttccgactgggcggtgggctgaaccctgggcttgtccgtgccctggccatcagccccagtggccgtagtgtcgtggccggcttctcctcaggcttcatggtgctcctggacacccgcacgggcctggttctgcgaggctggccagcccacgagggggacattctgcagatcaaggcggtggagggcagcgtcctggtcagctcctcctctgaccattccttgaccgtctggaaggagctggagcagaagcccacccatcactacaagtcagcatccgaccccatccacacctttgacctgtacggcagcgaggtggtcactggcaccgtgtccaacaagattngcgtctgctccctgcttgagccaccctcgcaggccaccacgaagctcagctctgagaacttccgcgg

SEQ ID NO: 269535 - DNA, 430 bp, Homo Sapiens
  misc_feature (41)..(41): n is a, c, g, or t
  misc_feature (57)..(57): n is a, c, g, or t
cctgaaaacctttggttttgcctgatgaaaatccaggaaanaggaccaagtgccccngcccagccccacaacctagtattccagcccattgggagatcattccccagtgaaccccttcctgggggcccaacttactgaggaggaatacttccactttggggagaaggctgactctgagaaccaagcccggaagtacatgaacgcagtacgaaagcggaaggggctttatgtggaagaaaagattgtggagcatgcagaaaagcagaggacactcagcaaaaataagtagctacctactactggtggattcttttccttatagtgaatttaaaagtatcatcaagggtttaatattgggaaaatttctttttgccacattatctctgtttattcactttcaataaagttgatccatataaatattttaaaa

SEQ ID NO: 269536 - DNA, 686 bp, Homo Sapiens
gagaagaggacatcacagaaaggagaatctccactcactgattgctatggacctttctcaggacagctaattgccaccatgaaagaagcatgtcgctatgcactgcaagtgaaacctcagcgcctgatggcagctatgtacacatgtgacatcatggccactggtgatgttctcggtcgagtctatgctgtcttgtcaaagagagaaggtcgggtacttcaagaagaaatgaaagaagggacagacatgttcatcatcaaggctgtgctgcctgttgctgaaagctttggttttgctgatgaaatcaggaagaggacaagtggcctggccagcccacaactagtattcagccattgggagatcattcccagtgaccccttctgggtgccaactactgaggaggaatacttgcactttggggagaaggctgactctgagaaccaagcccggaagtacatgaacgcagtacgaaagcggaaggggctttatgtggaagaaaagattgtggagcatgcagaaaagcagaggacactcagcaaaaataagtagctacctactactggtggattcttttccttatagtgaatttaaaagtatcatcaagggtttaatattgggaaaatttctttttgccacattatctctgtttattcactttcaataaagttgatccatataaatatttt

SEQ ID NO: 269537 - DNA, 645 bp, Homo Sapiens
acacttgcacccggccagaagctttttcatttattcgtccagcagcatcttgtactagtcctgactggttagtatagaaacagcactcctcttctaaaaagatacacaggccgcctttctcggcagtgaggagatctaaacctcgatggttttgaagtgtcactgctgcttaaagagtcttttggaattggagagcaagtctatttgggattggagaacccttcgtggggttttgggagggcctggtcggcttgttggcagaggagatagctcatgagggagactgttgggaggtattctcctagctgagagttagaagggggcctgttttgtaagaggaaagggcgtccgtatattaactcaaatggactgaggaaggagggtgcttttggactggctctaatgctctccagtgctatgggcaaaagggaggtccatggtttttggacttcaagagtgagtttggttaactgagccttaaggatcccatttgccctttcgacttttccggatgtctggggccagcatgggatatggagacgccactggatgccaagggactgagaaacctgttgagtgatttgggagatgaagctaggggccattgtctgattgtatggagccagtgagaccaaatctagggat

SEQ ID NO: 269538 - DNA, 361 bp, Homo Sapiens
  misc_feature (22)..(22): n is a, c, g, or t
  misc_feature (33)..(33): n is a, c, g, or t
taaacctttcggcccccttaanttaaaaacaanccccaaaccttaaatttaactgacaaaattctgccggtggagacagataaaaagcctcaggggaagcagctacagacccgagcggattacttgttgaagctgctcagaaagggtctggagaagaagggggctgtgacaggtggggaagaggccaaattaaagaagcggaagcctcgggtaaagaaggaaaacaaagtgcccaggctgaaagaggagcatggaattgagctttcatctcctaggcattcagataatccatcagaagagggagaagtgaaagatgatggcttggaaaaaagtccaatgaacaaaaaacagatgaaggtag

SEQ ID NO: 269539 - DNA, 420 bp, Homo Sapiens
  misc_feature (49)..(203): n is a, c, g, or t
agtgcttgggttcaaatccctgttgcaccagggatgagtgatatgcttnnnnnnnnnnnnnnnnnnnnnnnnnnnnnnnnnnnnnnnnnnnnnnnnnnnnnnnnnnnnnnnnnnnnnnnnnnnnnnnnnnnnnnnnnnnnnnnnnnnnnnnnnnnnnnnnnnnnnnnnnnnnnnnnnnnnnnnnnnnnnnnnnnnnnnnnnnncggtcatccttgatcataaggaggatgactatattgactttggagaacttgtgctcagggatgaaggtcaaggtaggatccagggagatatttgcagagacatgtggagttggttctgttctacttacagctaccagtgccaactggaagtcatcccaccgtcatttataacacctagaaagtgtgagtcgacaggtatgctctccaatatgggtgg

SEQ ID NO: 269540 - DNA, 473 bp, Homo Sapiens
  misc_feature (11)..(11): n is a, c, g, or t
  misc_feature (32)..(32): n is a, c, g, or t
  misc_feature (50)..(50): n is a, c, g, or t
  misc_feature (55)..(55): n is a, c, g, or t
  misc_feature (62)..(62): n is a, c, g, or t
  misc_feature (71)..(71): n is a, c, g, or t
cccctactgtnaatcccaacagtggaataccncgggggaccacctgtganccganaaaatcnccttgtccnaggggaaaaggataagagatttattccccaaaagccagccagggcctatgcctgccttgcccaaacaacccaagaaggtgtccccgattaaagtgccagaggtgggtgtgccaggagggcagtgcctgtggacccgctgaggagcaagcggcggaaatactctttcgaatgcactgacggctcctcctttgtggacgaggttgagaaagtggtgaagtgcggctgtacgaggtgtgtgtcctaaacacactcccggcagctctgtctttggaaaaggttgtatacttcttgaccatgtgggactaatgaatgcttcatagtggaaatatttgaaatatattgtaaaatacagaacagacttatttttattatgagaataaagactttttttctgcatttgat

SEQ ID NO: 269541 - DNA, 499 bp, Homo Sapiens
  misc_feature (373)..(373): n is a, c, g, or t
ctctagaaatttatggaacatagttaatctattacagtagaggatctggacaataaaaatagttatttaagctttttattttccctgacctagtagctttcatgtctcttaaaattccctaaattttatttctcaaatcccatatcgtgattggttaaacagacagccaagaatctgagtctattttttgagaatctcaatcacatttctgggaaatgtgacttattgagtacatatttattttctcatttccattcagataaatgacacagctttgcggggaggactgacatcggcctcctacctgctgggcatcctatttctctacctcacctccctcaaactaaaggatctggtaaccacatataaagancccacacccaagatggcagataggaacacaagtcaatgtcattgactcagcattccattgtcctcttcactggcttcctcctgcgctttccacctccctcaatcaccctagaaataagatgtctga

SEQ ID NO: 269542 - DNA, 409 bp, Homo Sapiens
  misc_feature (26)..(26): n is a, c, g, or t
ggccaagggaaaccccctgtttaaanatttccagttagaaggtgcctaccctgtataatccctattgccaaataatagagtgagtatagcctatttcccataagtgtggtgtggtagataatttcccatctaaacttttaccctgtcaagatatagaaattccctttgggggtctatgaagttccttggttttattttcctaaacgaagaaacctctgggttatgggcaccctactcacttttattacctggtagaatttgcagaataattgcccagaactaatatattgattcagattttatattacccatcccttaatttttcttccaagctgcaggagatcactgcttgattcacaggaataagcagggttagtctaaaatgtaggcgaaaagcttgaaaacaaaa

SEQ ID NO: 269543 - DNA, 510 bp, Homo Sapiens
  misc_feature (410)..(410): n is a, c, g, or t
  misc_feature (425)..(425): n is a, c, g, or t
ggcacgagaacttcctctgtaaactagcagagtagaaataagaggccaggattcagcaccaggtaggctggattccttcttaggtggctcaagctggctatggggctggtctcatcatatctaaagaactgccccagcttttaccgcattttgaatgtggtggaacccagctgcatatttttatatgagagcggcaaatagtcattgtgttcccagtttgcttctcgggtcatctaaacatcagaggccatgcccacaagcaccgtaactgagggatatagtgtgactgtggtcccaggccagtgacctctggagctgaatcatgacttcccagatgactcccagagcctgagaggggactggttgcgtggctccaaattgattttcacctggggcctctttgaaagtcngggagagatacgtgncagtatggtagatgtgggagagggagaggcatggtgtgtccaaaaattagcaggacctgatccatatacgtggattctgaagcag

SEQ ID NO: 269544 - DNA, 331 bp, Homo Sapiens
  misc_feature (20)..(20): n is a, c, g, or t
accaaagagggacaaattgncttaaataagcccacagtgaaagagtttggattttattcccaactgaaatgggtaggcttttaatagtttaaatccagaggcatagtctgattgatttatatttttacaatctcactctgtctctttgagaacaatatgttgggggagagagcaaaacagaggaaatatcaagaccaattaggaagctcttatagtagtctgggcaagtaatactgattgcctgggatagaatgagggcagagtgggcagagagccatcactagaattgaaatatgtttgggatgtaaaatctcaaactccttctcctcaa

SEQ ID NO: 269545 - DNA, 736 bp, Homo Sapiens
ccacaacccaagtcgcggccgccgcagccatggctgggtgtgggcgctgctgaagaatgcgtccctggcaggggcgcccaagtacatagagcacttcagcaagttctccccgtccccgctgtccatgaagcagtttctggacttcggatccagcaatgcctgtgagaaaacctccttcaccttcctcaggcaggagctgcctgtgcgcctggccaacatcatgaaagagatcaacctgcttcccgaccgagtgctgagcacaccctccgtgcagctggtgcagagctggtatgtccagagcctcctggacatcatggagttcctgggacaaggatcccgaggaccatcgcaccctgagccagttcactgacgccctggtcaccatccggaaccggcacaacgacgtgttgcccaccatggcacaaggcgtgcttgagtacaaggacacctacggcgatgaccccgtctccaaccagaacatccagtacttcctggaccgcttctacctcagccgcatctccatccgcatgctcatcaaccagcacagtgggtgccggccacagcggcggggagcgggcggtggggggggcggtgctgggcccagggccgggctgctgaggggacctagaccactcttcagaaccccacaaagggagtctttgaatagttactccagtaactatggagttaatggctccaacatggaaaaataaaatttttctttctcattgaaaaa

SEQ ID NO: 269546 - DNA, 636 bp, Homo Sapiens
  misc_feature (22)..(22): n is a, c, g, or t
aacgtgggtcttccagggaagnctctgggcaccccaatccaagtcagcccaaccaggtcccttaagttgggattaaatgggtgctcataaccagtaactttctcccctctctgttactttatcaacttctatgtacatgaagttgagattttgatcaaaatgctgatctttgaacacaccttttcggaatcatcttatttggcatctttcctttgagatccattgcaagcttcagcatatggttattggttttgccagggaataaaatttttccagtatagagttcgtataaggtgcaacctacagaccacatatctataccatagtcatagcttttacctataatgatttcaggagcacgataaaatctactgacaagataaggtgttatgtcattatccgcaacatgtgaagccgaccccaaaaatcgcaaagcttttaaaatagttttgggattcattaacctgcaaaacattttttcaagggaatttaattcaagcccaggaataattaatacaaataaataaaaattattggctttgaaaagttttattaattccaatactgagaacaaagacattcatttaaaaattccttttctatttatttttaattcaatttcctaactatgaaaag

SEQ ID NO: 269547 - DNA, 407 bp, Homo Sapiens
  misc_feature (355)..(355): n is a, c, g, or t
acactccagaggcatttccatgtaggaatgcaatccagagtttatggaacagaacctgattattcttgtgtgaaaagtctgagcatctagagtttccctttggaccgtcaagaagtaaataaaattgttgctttcaaaggcatggacatacttaatggggtaagaatctctgaactcaggtaaaacatcaatgtaggactggtccgtcaaaaacataaaaccatctttcgtttcctttagccttctcactgatatcgaatgcaatgggatgatctggggaaataaggaaggaatttatgggtattgcctaccaaaggaagttgatggaaccggtcctttacaggatggaaagggnctttgggctcccggggccgcttcaccacacagtcaggggcactggcccgggg

SEQ ID NO: 269548 - DNA, 991 bp, Homo Sapiens
ttttgtgagaatacactccagaggcatttccatgtaggaatgcaatccagagtttatggaacagaacctgattattcttgtgtgaaaagtctgagcatctagagtttccctttggaccgtcaagaagtaaataaaattgttgctttcaaaggcatggacatacttaatggggtaagaatctctgaactcaggtaaaacatcaatgtaggactggtccgtcaaaaacataaaaccatctttcgtttcctttagccttctcactgatatcgaatgcaatggatgatctgggaaataagaagaatttatggtattgcctacaaagaagttgatgaaccggtcctttacagatgaaaggactttggctcccagggcgctcaccacacagtcaggacactggctgggctcttctatctgtggggagaatatgcagtgaacctccgactgtatgtcagcagtatgattgtggggaaagacatgtcgctggcaggtccctctgttgacgctgccacagctaatgagttgatcatcatagtaggtgtcgacaactagagccatgttgatgttatctttccaaacacctcctgataaattggctttgctgctgcagtcctgacatgggaaacaatctgggtgttccaagcacaggcccagtcttgtactcagcaaccttctgaaggtcttcctcatttaaaacataaatgtagttagtggcaccaaggaaaatgtgatgctcatgtagaatgacattctggatgggtgtttccgcggtgaagttgggaagctgatacttcatattcacattcatctcggactttgctagtgcctctttacactccccattgctcctctgcaccaaggtaaacaggagcacgaggatgccaagtgcaagcacagcgggggccttcattatgagaggtttatctttcggtgcccaggaaccagtggagaagtcagcggcgcaaggaccacacgcgcgctccgcgcctccccg

SEQ ID NO: 269549 - DNA, 448 bp, Homo Sapiens
  misc_feature (327)..(327): n is a, c, g, or t
  misc_feature (408)..(408): n is a, c, g, or t
  misc_feature (414)..(414): n is a, c, g, or t
  misc_feature (430)..(430): n is a, c, g, or t
gactttgaggcactgctgtaaagaagagtgcaaaaatcaacatattcagatttgtgccaaagaaagacttgagtttgagaacatttacatctgttttcaataattcctcgcatatgttgcagaatgtacgttatccatcttgttatccaggaaataacatttgttgcaaacagtttgccaattcgtaattttattgaatttgtttatcatgctgtggcttcatatgaggtctgaaagatgggtgatctttgggtgttccagctgttgtaacattctgcagtggggccttaaattccagggatgagctggaattctttggagggtctngggctttctgagaactacagcataagagccggcattgctgaatggggcaattatcctttgggggaacgcagtaaactttgnctgtancattccccaacccccnttttcatttctggctttt

SEQ ID NO: 269550 - DNA, 430 bp, Homo Sapiens
tcagtaaaaggataaaccaagcaatcttcagtgtaaggaataaatagacagcaggcagaaagttggttcacaatcattgctgttttgcagcattttgtaaagttcctaagtcagtgacagcttgtgctctcaactatgcctctggtaagccagaataaactcccaactaattaactaaagggagaaaaccttgctaaatcctatttactttttgtaagataccaggacgaaggctatctattgagttgcatttatcatttcaagcgctttggaagtacttagtgctttcaagccattttgattaatttaaggctcttaggaataaattaataagtattcacccagaggccagaataagtaggtgtagtaatatttcagtggcttgggcactttgtcagatgtattctgacttggaaggcagagcttcact

SEQ ID NO: 269551 - DNA, 304 bp, Homo Sapiens
  misc_feature (44)..(44): n is a, c, g, or t
  misc_feature (56)..(56): n is a, c, g, or t
  misc_feature (165)..(165): n is a, c, g, or t
  misc_feature (191)..(191): n is a, c, g, or t
ccctttgcccttagggcccttccacacatatttgccccacaccngattagatgganccatttccaggaaagcccttttcctaacccactttatgtaagtgagagtcctcctcacatcccccaaaactttacaattgtagatccccagtcccttcttgtagtgtgngttatatataccctcaatatattatnaattatgtaaaggcaaaggctgtgtcttttttgattaaccattctaaatggttgtggcatcatatttatttattaaagtatttcttaaatgcctaagatgttttaaattctag

SEQ ID NO: 269552 - DNA, 891 bp, Homo Sapiens
  misc_feature (613)..(613): n is a, c, g, or t
cgctgcgtgacaccaaccgctgcgtggagccctacatccaggtctctgagaaccgctgtctctgcccggcctccaaccctctatgtcgagagcagccttcatccattgtgcaccgctacatgaccatcacctcggagcggacgtgcccgctgacgtgttccagatccaggcgacctccgtctaccccggtgcctacaatgcctttcagatccgtgctggaaactcgcagggggacttttacattaggcaaatcaacaacgtcagcgccatgctggtcctcgcccggccggtgacgggcccccgggagtacgtgctggacctggagatggtcaccatgaattccctcatgagctaccgggccagctctgtactgaggctcaccgtctttgtaggggcctacaccttctgaggagcaggagggagccaccctccctgcagctaccctagctgaggagcctgttgtgaggggcagaatgagaaaggcaataaagggagaaagaaagtcctggtggctaaggtgggcgggtcacactgcaggaaacctcaggctggggcaagggtggcacttgggggggcaggccaagttcacctaaatgggggtctctatatgttncaagcccaggggcccccattgacaggagctgggagctctgcaccacgagcttcagtcaccccgagaggagaggaggtaacgaggagggcggactccaggccccggcccagagatttggacttggctggcttgcaggggtcctaagaaactccactctggacagcgccaggaggccctgggttccattcctaactctgcctcaaactgtacatttggataagccctagtagttccctgggcctgtttttctataaaacgaggcaactggactgttaaaa

SEQ ID NO: 269553 - DNA, 513 bp, Homo Sapiens
  misc_feature (192)..(192): n is a, c, g, or t
  misc_feature (238)..(238): n is a, c, g, or t
  misc_feature (255)..(311): n is a, c, g, or t
  misc_feature (317)..(317): n is a, c, g, or t
  misc_feature (375)..(375): n is a, c, g, or t
  misc_feature (398)..(398): n is a, c, g, or t
  misc_feature (403)..(403): n is a, c, g, or t
  misc_feature (441)..(441): n is a, c, g, or t
  misc_feature (494)..(494): n is a, c, g, or t
gtgtgtattttcataaaatgatttggggttgaggtgataaacattaattataaatagtggtagataacttctatcaccagcacggaggtggacttaggagctgagaaggctttgaggagggaattttctttctgtttttctttacctgtcatgtttgaattgtgttccatcaacatgtcctttttatttttntgagatagtgtcttacttcatcacccattctgtagtgcagggccanatcacagctcactgcannnnnnnnnnnnnnnnnnnnnnnnnnnnnnnnnnnnnnnnnnnnnnnnnnnnnnnnnccactnggcatgtgtcaccacagtctgggctaattttttgagcttttttgtagttgggggtctncaccatgttgcccaggctgggtnttganctcctgggctcaagttaccctcccaccttagccttgcnaaagtcctggggattacaggtgtgagccaccacgggtgggccaatattctacnagttttgagatttaaaaat

SEQ ID NO: 269554 - DNA, 208 bp, Homo Sapiens
ctcaaagatttattgataataccctgcaagcacaagcgtgcaaagcaaaaatggacaaataggatcacatcaagttaaaaagctgcacagcaaaggaaacaataaacaaagtgaggaaacaaccacagaatgggagaaaatatttgcaaaccacccatctgacaagggattaattaccagaatatataaggagctcaaacaactctat

SEQ ID NO: 269555 - DNA, 387 bp, Homo Sapiens
  misc_feature (21)..(21): n is a, c, g, or t
  misc_feature (26)..(26): n is a, c, g, or t
  misc_feature (76)..(76): n is a, c, g, or t
  misc_feature (180)..(180): n is a, c, g, or t
  misc_feature (237)..(237): n is a, c, g, or t
  misc_feature (344)..(344): n is a, c, g, or t
  misc_feature (367)..(367): n is a, c, g, or t
atcccaacccctgggccaatntgggncccgggacgggaaggaaaaaggaggctaggagcaggggaaaaaggtgcancttggccagtggcgcccgcccaggagtgagtcccatgcgttgtctgcccacccctacccacagtgtttgtgccttcagctgagggggcagcctctgggccctgnaacccctgctggggctccacgaccctgagagaaggggtgagaagaatcatctctgcncctcgggtctctgccagaggaagacttaagcatccctgcgacctcacattctagacagagatgaggtcccaggggttggcccctgctgccttctcacaatttgcaanagatgtaaataggcccaataaancctttggaagagcccaaaaa

SEQ ID NO: 269556 - DNA, 471 bp, Homo Sapiens
  misc_feature (324)..(339): n is a, c, g, or t
tctgaacaacaagccttcagccccctagaaccttcccctctgacagaggcctaccccaaatgagaagcaacccagaaaacccaacccctggtaatatgacaaaacaaggctcttcaatgcctccaaaaaaatcatactagtttaaaccagcaatggctccaaatgaagaagaaatccctgatttacctgaaaaagaattcaggaggttagttactaaactaatcagagagggaccagagaaaggcaaagcctaatgcaaggaaatccagaatatggtacaagaaatgaagggagaaatattcaaggaaatagataacttaaagnnnnnnnnnnnnnnnnttcagaaaactttagacacactgttagaaatgtgaaatactctggaaagtctcagcaatagaattgaacaagtagaagaaagaaattcagagcacaaagacaaagtattcaaccaatccaacaaagacacag

SEQ ID NO: 269557 - DNA, 376 bp, Homo Sapiens
cctaactaattattttttgagaagaactcattgatagcacaaaagtacttggagaaactacttaagctaactactattaagctgtcttctttcacaaatattaataaaagtactgatagaaatgtaactaagatacataatgtgttttaatacacattaatcttttgaattacacattttctcttgaggattataataaaatgatggtacaatttatccttctttatagatttgtggaaagtaccaacataattgacaagaaatgaaatactgccatttaaaagtcctgtattaaaataaaactactttgaatcatcttagactaaatattttaaaaactgattcaagtgcttattcataagataatggaatttta

SEQ ID NO: 269558 - DNA, 493 bp, Homo Sapiens
  misc_feature (68)..(68): n is a, c, g, or t
  misc_feature (73)..(73): n is a, c, g, or t
  misc_feature (91)..(91): n is a, c, g, or t
  misc_feature (96)..(96): n is a, c, g, or t
  misc_feature (104)..(104): n is a, c, g, or t
taatggggttaagtgaagcagttttcaaaggaaacagccgccttcggaataaagccccctggttaaangaaanccaacaagtacttaaaancaaanccaaaatnatggatccccgagtggcctacaaggcctcctttaaataaatcccagtcttccttcatggaattggttaacccctttattaagccctctcttgcttatgtgtcttgtattgatatttggaccctgtatacacaatactataactcaaattgtttcttctcatctagaagcaatcaaactccaaatggtgctgtaaacagaaccacacatagacacatcattcttctgaggacccttagattgaccccaggaggagccctagctgctcttccccattcgacgcccttttgcaacaagaagtagccagaaggagtcgtcgcccaaaactccctaacagcagttagtgtggcatctccacaggggggaatgttgtaggagttattaagaaatt

SEQ ID NO: 269559 - DNA, 372 bp, Homo Sapiens
  misc_feature (13)..(13): n is a, c, g, or t
ccggaagagaatncccctagagcctaccttaacccctaagttaagtaaaattttccactttcattccttttcattctctcataaactggttgaaaaaacactgtacctacccaacaaaggtgtcagttgcttgtgctgccctgtctatgttatgctctgaataggtctcggtaaagattatatggaaatactataaagaatacataaggtaaaatactagtcagaaagggttcagaagaagttagcatcaactgtatgaaaattctaggtaaagctaagtactattgagttggaaaaaagtaattctatcatgtttgcttgttttcctctactgtttttaatgtgatgttgtaatatattttaaaaataaaa

SEQ ID NO: 269560 - DNA, 498 bp, Homo Sapiens
  misc_feature (12)..(12): n is a, c, g, or t
  misc_feature (34)..(34): n is a, c, g, or t
cccctgtaggtnccaaaaacacgtaagcaatganatgttagccataatgtgttaaactacttaatctcatttctgtgatgtgaatatttttaaccccctttttgtagatgagggaactgacaagtgacttgtccaaggccatatagctgtgagaaaacccatgcattctcttttcagagttcatgctatcactcaactttaaagtaggcccaagattaatgttggtaagggtttgtaatctgtaagaatgctaaaaacgtaagtatatatatcattttagatttgacattttgtatcttgccagtttttaggagaacttttcattttgttaagtatgcatgaatatagttgagtatatgagtaactggttcttatgctgctgttttgtatttttaccagcaggaagattgcaaaagttgatgtatgtaaatcttgaaatatttctaagttttatgtataacaaaatatgtattttaataaacttcttttgatatttta

SEQ ID NO: 269561 - DNA, 401 bp, Homo Sapiens
  misc_feature (11)..(11): n is a, c, g, or t
  misc_feature (71)..(71): n is a, c, g, or t
  misc_feature (107)..(107): n is a, c, g, or t
actggaagagngcgggaaaatgttgctttcccaaatccttgggggatttaatctgtgctctcccagtttcnggagccttatgttgtgagggtgagatgactcctcantaagcagtatacaaatagattattggtagtcttctgtcatctcccacgaaacacaacctccccctcatcacctgacagccctccactaaccaccctataaacaagagggaactgagtctccttttcaaacacctctcctaagctagactgcagaagctgggagggctgagtcatcttcctcttgaaagaaaacccgtgtaacaaagccacagaagtatgctttctgtgcatatcatttgtttcaacacatggctgcttttataggatgcccacgccgagccctatgcagtctca

SEQ ID NO: 269562 - DNA, 326 bp, Homo Sapiens
gtgcctgggattaccaggcgtgagccactgtgcctggctggtatgccaaactcttaagatccttgtatagtgtgaggaattcatattgcacattttgaatacatctattccatgttagtattattattcccatttttagatagtaaaactctttttatagaatgcttggaggggtttatccattggttggtggaagtatagcatagccgcagttactgtggtgatgcatcattaagcatttttggaacctaatacagccctaaggttaagaggagaaatacagtatctaatatgaactttgccttcaagaagtttataaaatttct

SEQ ID NO: 269563 - DNA, 509 bp, Homo Sapiens
  misc_feature (30)..(30): n is a, c, g, or t
  misc_feature (97)..(97): n is a, c, g, or t
  misc_feature (105)..(105): n is a, c, g, or t
aagaagggtttggataatgtgtacggatcnaataatattactgtttgaggaacctgaagtaattttccataaaatgtgaataaagtaacaataatgntcccgganaaattatttccaaattactttcatccctgtgtgaggcctaagaatgggtaagaaaaaactcagaacacatttctgtggtatgtcacagtcccagatgaactcggggaaagagaaaacagtttggtgtgagttggctaattcaacaattataggtcaagtatatgtcagccctaaaaattaaaagataattagatgcaggttcccttaagagacaggtaagtgagcaactacgctgtggtatgatgtatataataatggaattatttactgtggtcacactgataagcctattatcagttataattatttatcttggcagactgatttcacagctttcaggaaaaggttacctcgtagttcccctttactcacaggggatccattccaaaacccctagtggatgc

SEQ ID NO: 269564 - DNA, 224 bp, Homo Sapiens
  misc_feature (121)..(121): n is a, c, g, or t
  misc_feature (133)..(133): n is a, c, g, or t
  misc_feature (161)..(161): n is a, c, g, or t
  misc_feature (191)..(191): n is a, c, g, or t
gtgtgagccgccatgccaggccctccatcattctttaaagtgctgacagaagaaccacttacagtcggtttggacataaactacatagggaacacataaggccttttcccaccagtggaantaaaagtagggnaccaatattccaatgtttactaaaaagntgttctattggaatgttggcaattttgtantttctaaggatgggtttggataatgtgtacagg

SEQ ID NO: 269565 - DNA, 532 bp, Homo Sapiens
  misc_feature (26)..(26): n is a, c, g, or t
  misc_feature (36)..(36): n is a, c, g, or t
  misc_feature (89)..(89): n is a, c, g, or t
  misc_feature (103)..(103): n is a, c, g, or t
  misc_feature (109)..(109): n is a, c, g, or t
  misc_feature (164)..(164): n is a, c, g, or t
  misc_feature (283)..(406): n is a, c, g, or t
  misc_feature (485)..(485): n is a, c, g, or t
  misc_feature (492)..(492): n is a, c, g, or t
gaaacccccagaataaaattaaaccnacccccaacntcaaattggggtcaaaaaaaggtgggtttgtacccccgggttccatatactgncccaacagtatggncctcanaaaaactgaccccccttaaacctttgtttgtgttacctgccctacactcattganagttgggacctatttcacacatacagtccccgggcatgtagaagggaccttaatgttgaaagaaggggaggcattttaaaatcccacatcaaaaaaatgttgttctgtttgggaagtgnnnnnnnnnnnnnnnnnnnnnnnnnnnnnnnnnnnnnnnnnnnnnnnnnnnnnnnnnnnnnnnnnnnnnnnnnnnnnnnnnnnnnnnnnnnnnnnnnnnnnnnnnnnnnnnnnnnnnnnnnnnnctgagcatgggggtgggatcctgtggtcccagctacttgggaggcttaggcacttgaatgagaatcgcttggacccggnaggtggnggttgcagtgagcaatgattgtgccactacctgggcaaca

SEQ ID NO: 269566 - DNA, 418 bp, Homo Sapiens
  misc_feature (144)..(144): n is a, c, g, or t
caaaacctccagacggggaccttccccccagggcctcctggaatttggggcaaaacaagaactgaaatgaagccccaaaagcctgcctccccttcccaagctgccctctggaacccctaggcccgagcatattgcctgaggaancggggggtacaaggtgcccagaggattggggcctggtggacaagaaacaagacttgtggtccacaaaattcctctggccttggagaaagctgtaaatcttgtctgaagcagagactataaagaagtttctccctgctgtcaagggtacattgttgacaagcaaatggtgtttcggttagtaacggttctaagtgcaatgagttgtgttgaagcctccgtctcccatccttgcctgtagcccgtagtcacttgtgcagtgaggacatctttttaa

SEQ ID NO: 269567 - DNA, 533 bp, Homo Sapiens
  misc_feature (19)..(19): n is a, c, g, or t
  misc_feature (23)..(23): n is a, c, g, or t
  misc_feature (90)..(90): n is a, c, g, or t
cagtctgcccagtgctggnagtncagctgtctaccaggcctccagggtatctgcggtttccaattcacagcactacccacaccgtgagangttgggggtgtgcaccagtaccgactccagccactgcaagggtcaggagtcaagactcagacgggactttcctagggcttctggatttgggcaaacagaactgaatgagcccatagctgcttccttccagctgcctctggaacctaggccgagcatattgctgaggaacggggggtacaaggtgccagaggattgggtctggtggacaagaaacaagacttgtggtcacaattggctctggccttggagaaagctgtaaatcttgtctgaagcagagactataaagaagtttctccctgctgtcaagggtacattgttgacaagcaaatggtgtttcggttagtaacggttctaagtgcaatgagttgtgttgaagcctccgtctcccatccttgcctgtagcccgtagtcacttgtgcagtgaggacatctttttaaattta

SEQ ID NO: 269568 - DNA, 767 bp, Homo Sapiens
tgtgaatgacaccttcactgtaaacaatgggaaggagagtcaaccaggcagccctatgggcaagcagtggaggaacagcagctctgggacctgctcagagccttaggcaggcggagatggccaatgacccactaggccctggctgcccgcactggccccttctgggggcatctgttttcttctttttagtttggatatccaccctcccccaaagaggagtcccttccaatgagaaatggcaggagctgcaggtacaattgagtcagagtccccagggcctgaggactcctgggaggcactggtcacttgtggcgctgagcagtcttcttccttttcctcttaaagaaacagcagcacttagcttcctccactacctccacctcggcatgagctgtgattggtgcattggagtgggctcccgtgggatcatcaacattcagctctccattggttgagctaaccacctgatttcgaagaggctgctgttgtgatggccgatccctatgtgtgtggctttctcgagttattgcagatgcaccagaatctacgtgaactgaccctactggagtaggaataggtctcccaacccaatcataggcatagtcaaaggtgtagcctttcttttcaaagaggtctgtgaagagggtccgtaaatactcataatcaggtttttcaaagaagtccagtcgcctgacatatcgaaggtaggttgccatctcctctggaaagttctcacagagagcttcaatgggagtattccttttggt

SEQ ID NO: 269569 - DNA, 489 bp, Homo Sapiens
  misc_feature (146)..(146): n is a, c, g, or t
  misc_feature (236)..(236): n is a, c, g, or t
  misc_feature (290)..(290): n is a, c, g, or t
  misc_feature (336)..(336): n is a, c, g, or t
  misc_feature (445)..(445): n is a, c, g, or t
aaatagtattgaaaaattgaaaaataggcatattaaaacttgtaacactatttaagcttagatatattatttgtacctcatcaacattttttattttgttgagaaagtgtaaggttaattcgcagcataagtctacccatagaacnatagaataatgtctgttttataaacattgacatcctacattacatgtgtgaaccctgaaaatctgagacagctctcagattttttagaanagtttattttgccaatcttgaggatgtgcgcccgtgacgcctccccaggaagtncctgacaacatgggcccaaggtggtcggggcacagcttgggttttnatacactttagggagacatgagacatcaatcaataccgtgtaagatgtacattggttcagtccagaaaggtgagaaggccagacaggggggcttccaggtcataggtanggtaagagaccaatgggttcattcctttgcattgctgattaccc

SEQ ID NO: 269570 - DNA, 449 bp, Homo Sapiens
  misc_feature (383)..(383): n is a, c, g, or t
  misc_feature (401)..(401): n is a, c, g, or t
ttcggcacagaatgacttcttcaatcttgttcaggtgatctgtctttctgggaaaataaaaccctgacatctttttttctgaaaaactatacttcctaaaatactaagacttactgtttttatctatgcatatagatctaataagagtagtagggcattgggtactactggcaatagatttgtgaataaataatgctgtgctcttgtatgaaactcttttgttttcctattaagtagtgtatcttctttgaagtttttgtcttcatttatttgttgggggtggatggagggggatgaatttgcactggcctgggttcattttttgacatgtcatcaatgtccagtgggcatcggttgggaagtccagtcacctttaagacctngcaggcctttccctgtgncaacatagtgacagtccttgtcctctagggagagacatgggcatgcta

SEQ ID NO: 269571 - DNA, 469 bp, Homo Sapiens
  misc_feature (322)..(322): n is a, c, g, or t
  misc_feature (439)..(439): n is a, c, g, or t
tgctaaacaacactgaagctgaaaagacccacacttggttttgcccacagaatcaagctgccatctgaactaaaacagcctgttctctaccctatttcctgcagaagtctttttctttgtaatgcaacaagtgctacacagctcagatccaacgggacacggggaaagaggctgtagtgcacctagccctgctgagggagacccttgccttgccaaagcactttgctcacaaaggcagtttcaaagagtatagcccgaactcattcctggtaaaacaaaaggaaaacatttttgataaatgtacccaaaagtctcaaaaggntacgctggtcttctgaatggaaaccaaatgaggtctccccaggctcatgtcatgagtctcagggaaggtgtgtcctagaccagctgccttggcctgcccaggccgaggctgccgtcnactgcagatcctgcaggttgctgtgccgaa

SEQ ID NO: 269572 - DNA, 527 bp, Homo Sapiens
ttccctgtatattgtaggagctaagtgttgaatgaatgaatggtggctgctattattgcttcaccttcaccctccaagagtaatctccccattctggtttatagtttctgtgctcactgcttgtgataatcgtaagtatatattgttgagaacagtgcctgttttctctttccctgaaaacacatactttgacgttggctgacatagttcactcagctgttcctaaccactgatccctctgtatcacaggtatctcgggggagctttgtgccttgatggatcaagttcatcatatgcagcactcaaaatggcagcatccttcggacctcaccacgcgaaactacgcccgccgacagaaacatctgcaaagatacagtctgactcagtgggttgacaggaacatgcgaagccaccatcggttccagcgtctcccagacttctcgtacagttaatttgtgtcatcccatcagcaatgaaggtccctatccagggtcctgcttggagcagcatttcatgttcttttgctg

SEQ ID NO: 269573 - DNA, 713 bp, Homo Sapiens
acaacttctcaaggcagtcacctccacacccatggcttcaattgctttctccattctctgagaacaatagaattttaaatggttttatttcatgtattagctttattttatacaaggtgcctcacctgctgtaaccatagattcaaagttgctccatgaaagtaataaatgaaaaatggtgattttttagcatgtaaattttaggaaatttccccagttacgcttaatggcttgatttagtgtgtatgttatttttgaaaacatatgttgggatgtcacaaatggacttagcctacagagatttatattcaactttttgaccagagagttccattttaatgtgacactgagagtaaaaaactatcttttcctccttacctatttctcttcctacattctcggccaggaggaaggcactgctacacacccagtcttccccagcagagcctggaggcagctctgttttccttctacttcccctcttctttcacatctcatgaccaagcacttcctattctgtctcccaaatgatcacagactttttcctccacttttgtcactgccactgcccttaggcattactctgcctttaggaggaaagtctcttaattgggtttgggttggctttcctttcagtcttttatttatacaggaccactaacacggcacatctggacagaggacttttttcaccttttttatgggggtggaat

SEQ ID NO: 269574 - DNA, 347 bp, Homo Sapiens
  misc_feature (13)..(13): n is a, c, g, or t
  misc_feature (237)..(237): n is a, c, g, or t
ataagtgctcttnggggtggctctaccccattacctcccccagccacaactcctggccttcgacttctggctgggttagccagaccctggtttctctaccctgatgttgcatgagacctggtaacagtgtctccctcccagctccttgccaaagcctctgttgagacctgggcttcttgtagccccttctccctctggccagctgcacagcctgtgggaggtgcccggcccaggctnggtgtgggggaagctggtccctgctgtgggtggcgctggggacctaggggctccttctgaggttggccttgtggcttctgggctgtatgcctctggggtgtagggaagag

SEQ ID NO: 269575 - DNA, 560 bp, Homo Sapiens
aaaaagtcccccgtacctttaatgtacagaaatgtcccagtaggaaggagacaattgtcaattaagaccttccccttagaatcttagaattccataaattaaatgatcacaagcaataaataagggaaccccaagttgtcatcaggcttcacctcactcccggtctagtaatgtacttaagagaatacccaggttggtgtgctccagttctcctcttgaatgtcagcagtgatacacagtctggtgcaatgcaacagaacccactccaatgacatgaggcaattatgatctttttgttttaattggatagaatcctgcctctgaaacttcacttcatttgtttccaaagtctgatatttttctccaataaatgtccttattcttcatccttgaaacattaatactgtccaatctgtcctttaacataggaaccctggtccttttatgactgccttttgcaaacataggcccaatggtcaatattgtgtatatatctggggttttaaaaatctatgagggacatggatgagtcttacactccctagtattggcccacatga

SEQ ID NO: 269576 - DNA, 379 bp, Homo Sapiens
  misc_feature (356)..(356): n is a, c, g, or t
aagaggaatttcagtgtgatctatgtgccctttttgccccttgataggactggagtcctaaaaatgattaagtgattaatctaaatgctacacccaattacttaactgcaaaagtataatatgccaaaatacataactggactgtatctactttgataatttaagcggaggaatgccaacccagcagagatctcttctgtaggaccagggcaagagtttaatcatgagctggtagggtcatgcaggctgccaataatctagggggggtgctgacacttccgggcatgatgggatatatctaaatctagggcgttcgcccccttgggggaaatccccagctttccctccatcttcanagggggaggggagggcagggtcc

SEQ ID NO: 269577 - DNA, 862 bp, Homo Sapiens
  misc_feature (19)..(19): n is a, c, g, or t
  misc_feature (21)..(21): n is a, c, g, or t
ctccatcctgctggccttngntccctgttcagcagccgacagtgagtgcacaggagtgttccaggcctttcacctgctctgccttgaaatggctatttgggcctttccttttctttttaaacagaaacttttaatgaactgttctcttaacattgacctctcaatgaagttatgttcttaatctcttgctaataatgatttttacttttaagtcacttttgggttcactagtggactaaccagaagtgattgtagttgagtccagttttgctttttaataatgtgttgaagttttagtttttactctttgttgactttgctgcttattggcaccagggacagagtttctagatacaattttatggattggttttaatttttatgagtttgtctctgcagtgattcggtttctcagagtctcatggcatcatagtttttccagaatgacacagtagccaccggtggatgacagcccacgggggccacagtcacttctgcctgttgctctgaaacccaaccccaggcagctctgctgtggcttctccctgggctctggcattagttggtctgtgtcacattgtcagaacaggtggctgctgtgtggtgccatcgagtccctgctggttccccttgtcctgggagggtcacccattgcccaaggaagtgcatcccacctggcaggtgacctggaggagtagcttccccgaggacccccaggcttggcctgtgattgcgcaaacccacatttcctaagcacactggacacccttcgagtgtgggttttaacatccctgtgagattgaatacttgtgccacacatgtcacaaaagagtatggaaataaaagaaaatttatccgaaaa

SEQ ID NO: 269578 - DNA, 342 bp, Homo Sapiens
gtcttcaggctattgtgaaacatgtcctagctgttagcttacctctcctcattaagagctagaaatgtctaaaagcaaagcccaggaattctggagctttagaaggccctaggctaatttaaagcgacataccccatatgtgacagtcattttaaaatggctttgaggcacaactgacataaacgatacacacttaaatttggtgacttttgagcgaagcattacaatctagaccccaaacatccccctgtaagtatcactgcccccattaaaatattttcatgtccaggcaatcggtgatctttcaggtgctttattggtttgtaatttttagggattttc

SEQ ID NO: 269579 - DNA, 657 bp, Homo Sapiens
  misc_feature (74)..(74): n is a, c, g, or t
gtcaaggatcaggaggggcagatgtcttctctgggctgcgtggggccggagcagaggtgagcagcagtgcactngttcgggagcccccatcagcctccttgtgcaaactgggcccccatgccacagtctggctttccctccatctgccccaggacaagagcaagaaggacatcagttgcccagtcatgtgatcccctgccatcttgccttaggaacagccttcccccaccaagcacccatggctggctggggctttaccaaagccaccttactgccaggaattggagcctcagttccctcctgtgtcaagtagctaactgcagcagctggactgagggcagagtctgtgggtgcagagaccctgcatgtaggtcacaggttgaggcccagccactctccctggggcctggtgggtaggcaagtagctctggggccacctcaagtgaccaaatgctattaatttccatcctttagcaggctgggccctaggcaggaagctggcttctgggagaggagtgagaacgtgcagggcctgcctagcttgcgtgcttgaggaaggtggcattccgtgcttgcctccttgaggagggtggcattctgtgtcttctgcttatgaagcgcctttcttaaagtttggcaataaatccatttttatgg

SEQ ID NO: 269580 - DNA, 462 bp, Homo Sapiens
  misc_feature (349)..(349): n is a, c, g, or t
  misc_feature (400)..(400): n is a, c, g, or t
atttcggcacagaggggcacatccagtctccatcactgctgcagcagctggactgagggcagagctgttaggtgcagaggccctggctcccgaggtccagccactctccctggggcctctggggtgagagcagcttccgatagacctgcccagatttctgcatgtgcacttttgtttactgaaagagagaaaggggggggtcacagcaacatgccctggcctttctgccctgttccccaaccccactgaggcctgctgcacaggtcaatgccttcgttatcgttattgtactgtcactttgttcttgaggtagtagtcaaggatcaggaggggcagatgtcttctctgnggctgcgtgggggccggagcagaggtgagcagcagtgcaatggttccgggnagcccccattcagccttccttgtggcaaataggggcccccatggccacagtttggcttttcc

SEQ ID NO: 269581 - DNA, 185 bp, Homo Sapiens
tagctcgtacctgaaccctgttgctgaaatgcccagcccctgttctccctgtaactattatatacgccatggcctggggggccattgaaggaagtaagctctcagagatcctaacactggctgggaacctctgactcagagcatgtctttaaagagtccacatctggccaggcgcggtggcacat

SEQ ID NO: 269582 - DNA, 415 bp, Homo Sapiens
  misc_feature (366)..(366): n is a, c, g, or t
ggcatggtaagggcttgcatgtattaattcatctaatcctcacaccagctctatgagattgatgccattattaagaaaggtaaaacaagtattcaattatgataccccgcatttcaattacattgccatgacttacctcattatagcctcatataggttaccatagactagttctaaatttcaaaggcaaaaattgccaaagatttgaatccaaagtagcatgcagactacagtcctgattatattttaagtcttttgttaagtataaaagaagatagtgaagcaaattctgggataatttgctgcattagtaacttaataatacaactttttcttgaacttgaaatcatgtggttgatccaaggnggtcttacccaacagtggtccttaccatcccctttaggagaggtggcct

SEQ ID NO: 269583 - DNA, 590 bp, Homo Sapiens
  misc_feature (11)..(11): n is a, c, g, or t
  misc_feature (49)..(49): n is a, c, g, or t
  misc_feature (58)..(58): n is a, c, g, or t
  misc_feature (77)..(77): n is a, c, g, or t
  misc_feature (85)..(85): n is a, c, g, or t
  misc_feature (137)..(137): n is a, c, g, or t
  misc_feature (155)..(155): n is a, c, g, or t
  misc_feature (198)..(198): n is a, c, g, or t
ggcccccctgnggaattgccttggaatcccctttaccactcttctgttnaggaaagcnttggggtaaaccctggaanccatccangcccataggtcctgtccacatcctttcctggcttggaatatttttcccccgnggcccaatattggatccngtggtatccgggctaaagggtaggccatggccaccaaattaangcccaggaagtctttggaataagtgatcccatcacaatgaatccaatttgcccattggaacatatttttacaaagtcactcttttgaaaatatttagctatgaattaaaacagagtctgtatggttaatattttcccctggtctaaagtgaacagcattttagagaatgaactcaggacacaaccacagcacaagaaaaacgtgataattaagtttacacatatgtgttactaccgcaacagggaaaacatgtaaagaacatttgatttatgtatcagtctgcactgtttaattttttgtgtcataaatactcttatttaaaaaaacaggactagttaacagtgtcaattactagtaattcatggtataaataattaaacaaggaagtgttc

SEQ ID NO: 269584 - DNA, 452 bp, Homo Sapiens
  misc_feature (325)..(325): n is a, c, g, or t
  misc_feature (333)..(333): n is a, c, g, or t
  misc_feature (370)..(370): n is a, c, g, or t
actggaagaggttgctcggcgctggggcatccagaagaaccggccagccatgaactatgacaagctgagccgctctctccgctattactatgaaaagggcatcatgcagaaggtggctggagagcgatacgtctacaaatttgtctgtgacccagatgccctcttctccatggctttcccggataaccagcgtccgttcctgaaggcagagtccgagtgccacctcagcgaggaggacaccctgccgctgacccactttgaagacagccccgcttacctcctgggacatgggaccgctgcagcagcctcccctatggccgaagtnttggcttnacttaagtttcttgagtgggcggagtgggccaaaccntaggagctaggcagtttccctttcagggcaaacaaggggcagtgggtttttgtttgtggtttttgggttgtttcctaaaagg

SEQ ID NO: 269585 - DNA, 449 bp, Homo Sapiens
  misc_feature (383)..(383): n is a, c, g, or t
  misc_feature (394)..(394): n is a, c, g, or t
  misc_feature (399)..(399): n is a, c, g, or t
  misc_feature (431)..(431): n is a, c, g, or t
aattccatccaaagctcactcagtatttaatcatctgctaatttcatcctttgttaattccatcagacactgtggttttcatctctagaagtttgacttgggccttttttataccttccatatctcaacttgttaagcatcttaaacagttataactgttttaatgtttttgtctgctaattctggcatctgtcagtgtgggttggttttactgattttcatcttattttgcttctttgcttgtctgggtaatctttgagtagatgcccaacattgtgaattttactttgttggggtgctgtataattttgaattttcaaaaatactccaatactctgaaggcactctccaatactctaccctaaatactctaactgggcttngggccccaccngggtncctctccccgtaccgtgggcccgaaaactttncccacggcataaggtggg

SEQ ID NO: 269586 - DNA, 336 bp, Homo Sapiens
  misc_feature (22)..(22): n is a, c, g, or t
  misc_feature (49)..(49): n is a, c, g, or t
ttaccagagcctttagtgcaantttaaggttatggtttttggagttttnccctttttttgggataaccctaacattggtttggaatgattgtgtgcatgaatttgggagattgtataaaacaaaactagcagaatgtctttcaaaactttttgccgtgtatgaggagtgctagaaaatgcaaagtgcaatattttccctaaccttcaaatgtgggagcttggatcaatgttgaagaataattttcatcatagtgaaaatgttggttcaaataaatttctacacttgccatttgcatgtttgttgctttctaattaaagaaactggttgttttaaga

SEQ ID NO: 269587 - DNA, 465 bp, Homo Sapiens
  misc_feature (13)..(13): n is a, c, g, or t
  misc_feature (21)..(21): n is a, c, g, or t
  misc_feature (35)..(35): n is a, c, g, or t
  misc_feature (41)..(41): n is a, c, g, or t
  misc_feature (46)..(46): n is a, c, g, or t
  misc_feature (64)..(64): n is a, c, g, or t
  misc_feature (67)..(175): n is a, c, g, or t
tccccaagtagcngggactangggtgtgctaccangcccangctanttttggtagttttagcangannnnnnnnnnnnnnnnnnnnnnnnnnnnnnnnnnnnnnnnnnnnnnnnnnnnnnnnnnnnnnnnnnnnnnnnnnnnnnnnnnnnnnnnnnnnnnnnnnnnnnnnnnnnnatgccccaggccagaatttgcccatttttaatgcatgttctccacctttcatagaaaaagccatatatcctactaagctatttatgaagaccacaggttctagcccatgacaagcttgttatcctttctaaaccacacaacccccaaatctagtcagcaaacttgaaggtctagggtgatggtcatgaaaggaatcaaacaaaagaatcttggaggggtctctgcaaattcatcgactccattaaggaatattcaacaacacagaaacttaaatccaggtaatattaaag

SEQ ID NO: 269588 - DNA, 402 bp, Homo Sapiens
  misc_feature (38)..(38): n is a, c, g, or t
gccccacacaagaatttaggccaaacccctcccctaangtccattgtatatgagtagtacagatcccctgtgtttgttccccattgaatataccagaaatactgaatacctcccttaaaacagccttttattgaaaaaaaggaagctgattaaaaatcacttttgctttttttataaaaacgcttgataggattacctttctagagagacttctgtgtatggccacacttatccaccacagtttttgtttatatagagagcattttaaaaagaagaaggttttcctggccatgcacagtagcacgcctgtaatcccagcactttgggagccaaggcggaaggattgcttgaggccaggagtttgagaccgagcctaggcaacattgtgagactgtttctata

SEQ ID NO: 269589 - DNA, 466 bp, Homo Sapiens
  misc_feature (52)..(52): n is a, c, g, or t
  misc_feature (174)..(174): n is a, c, g, or t
  misc_feature (225)..(225): n is a, c, g, or t
  misc_feature (389)..(389): n is a, c, g, or t
ggtactttgatcaatgcccctgtttcagtctcatctgtactcacggcagccntgtggagtacggtgtactggcccagcttacagatgcagaaagcgagacgttctgccatcagataaagtcacgtggctctttaagtaacacggacaaagctcctcgcccaaggaactcgtggncaaaaaagggcagcagttggcagtagctgccgatgtctgtccccagctccnacccaatcctccctgtggctgtgccgtgctcgtggtttcagtgtccgtgtgtcccatgtgtctgcccttcaggagctcgcagctggtgtgcttggcggtcccaggcctgtgtagtgtctctcccctgctgcgggcgcccccaccccgattcctctccccagaancggtgggatgggcccccatgaactgcagcagcatgctgaggtgtccatgttgtctgcctttgtataaagaaacagcc

SEQ ID NO: 269590 - DNA, 379 bp, Homo Sapiens
  misc_feature (334)..(334): n is a, c, g, or t
  misc_feature (341)..(341): n is a, c, g, or t
  misc_feature (346)..(346): n is a, c, g, or t
ccaaggtctgtgacccaaaggcaaggcccctacttctgctccaaatcagaagcccttgaggaaggaatttgagtggcttatcttgatcatattgtttctaaccctatggccagggcaggcgaggtactacgattgatgcctccagcaaaagttgggtaggaatggttttctaaggaaacagggacgctgcaaatattatagcatagtaaatatctacacttccatccttttggtagctcagcacgtgtgtgtactcacatttgttctcatacatacaatttcaaaaatgggttctgcctaatataatgcaaagatttgcacccacaacttaaanctttttncaaangcctcttttcccacagtttacatcctgtgaatt

SEQ ID NO: 269591 - DNA, 472 bp, Homo Sapiens
atgatccaccgtgcctggcctgagcttcattttaaataatatctttgggtccaagaatgtctctgtacaatccatatttgtgtaaaatgaactagactttccttctgaccccaatctgtaattagttttacaaccttccttaataagcacattttacctcagtttgatgctttatagtcttttgacttgggtaaataatttttaatactatgtttttgctgggattatacaataggcttaggggacttactgatatatagaggccctcatggtaaggtttacaatttttgagtctagttctaatagtttttctgtctccttttgttttcatcatcagtgcttaccgttagtccaacacatttatagcagtctatcttccaccattctaaatcaccatttctaccatctgcctttggttttgaaaccaaatagctacatgttaggattaaatgttaaataaaaattgataagg

SEQ ID NO: 269592 - DNA, 389 bp, Homo Sapiens
taactacaaaggcgaacatgtaaccctctacctgtgggcgcacatttgctgtggtgttacgttccactggtagcgcccaacctcccttcattcaagcacattttacgggcctacagggaaggttttcttcctgtcctctcctaagacttgtttatgttcatcatctcttctatactagagctgcagtcttacatttgcttacttcctgacatccacccccaccccagtgatttctccccatctccacctctatattatttgaactaaatgaattcatgaatgaacaaatgagtggatgaattaatggtaatgggataatgggctatgaagtcatatttaaaggcactatctcatttaaaaacaatctaaataaataactacaatgataa

SEQ ID NO: 269593 - DNA, 302 bp, Homo Sapiens
  misc_feature (14)..(14): n is a, c, g, or t
  misc_feature (32)..(32): n is a, c, g, or t
  misc_feature (84)..(93): n is a, c, g, or t
ccttgcccgattgnagagagaattaaagtgtncctttcccccctccctccctctgagcccagatcacaatgacttggatatggnnnnnnnnnnttagggtgataatttttcccctttgaccctgctcccccaagcccccaactgaaaaatgggtgtggtccattcatcttggaagcattatgattgcccattattatttagttatttttcttttacattactagtgtgtcactatgtaatacatgacctgtaatcatggttataatcacagttaattatacatcatgaggccgggcgcaatg

SEQ ID NO: 269594 - DNA, 239 bp, Homo Sapiens
  misc_feature (25)..(25): n is a, c, g, or t
  misc_feature (50)..(50): n is a, c, g, or t
  misc_feature (67)..(67): n is a, c, g, or t
cccctcactgacagacgtttcccantgtttcctgtcttttgcctataaanaatgctgtaatgaatantcttgtgcatatttcacattaatttatgggattacatctgcaggataaattcttagaaccaatggtggtttgtggggagggtgacagggtggataggtacaggattgggagacttttcactgtatctccttttgtatttttttgaattttgtaccatatgtatcacctattc

SEQ ID NO: 269595 - DNA, 459 bp, Homo Sapiens
  misc_feature (84)..(84): n is a, c, g, or t
  misc_feature (146)..(146): n is a, c, g, or t
  misc_feature (209)..(209): n is a, c, g, or t
  misc_feature (423)..(423): n is a, c, g, or t
  misc_feature (427)..(427): n is a, c, g, or t
  misc_feature (438)..(438): n is a, c, g, or t
caagggtggaatctctgggaacagaggactgagatacatactgtgtttaggcatttgtttggagcagcagggaggaccctattnttaatctcacatttcctatcagtaattgcttccctattagaacaaagagaaaatgggcagcnctgggtccttaatgataccaatattttgcacacagttatttatttctcagttatactaggtcnagtgaaaaagaagtgctgagtctactatgaacacaagtagtaaaagtgactgtggcaattttgataggggcagactgggattttacgcttggaaaggtcttccagggttggtgtattctaagcagccagtagagtgctagaatggagacatactgtgtttggagctaccctcttacttactggattgtcttactttaattggtatattcacaantagngggagggaaanataatctctggtgaaaacatc

SEQ ID NO: 269596 - DNA, 414 bp, Homo Sapiens
tccaccctagcccaggaaagaactgtcctgtgtaaagcaaaacccaagtcatccccctccagaaatttctctggcagccaagcctgaccctaagggttcccactttgctttaaaagcctaggagtggccctctagagccaggaacacattaatacaacagttcaacctcagcacccaagtcaggtacgaagcgcttgatacgtggaatttttctctatatcaagtttaaatttctggaaatagactttggttgctaatgacaattacagttataccatagtctgtaatttgagaaaaggtgaaatgtatttaatatatatttagttttaataaaaagataaaattattacagaaataattgagagagagaaaatctattataatttatttgaaaaataaaacattttatccagt

SEQ ID NO: 269597 - DNA, 518 bp, Homo Sapiens
  misc_feature (503)..(503): n is a, c, g, or t
aaggacactgcttgagaagatgggagggaagccaagacccagtgggcgcatccggtccgtgctgcatgcagatgagatgtgagctggaacagaccttcctggcccacttcctgatcacaaggaatcctgggcttccttatggctttgcttcccactgggattcctacttaggtgtctgccctcaggggtccaaatcacttcaggacaccccaagagatgtcctttagtctctgcctgaggcctagtctgcatttgtttgcatatatgagagggtacctcaaatacttctgttatgtatctgtgattttatttcttctttgggtatagggttgaggggaaataagttttgagtgagaaataaacgttttagctgaaattgtatcccagaagtttgaaataagtagtagaagagggggaaaacaagggagaagtggtggggaagacttggtagattggggccttaagtaaccacctcctttccctctctgcccccatgacttccngctccaagttacaga

SEQ ID NO: 269598 - DNA, 566 bp, Homo Sapiens
aatgaacacagcggtgggtgtgctcgcaaacgtgccgccatgtctgttacgctaacatctgtgaagagagtgcaaagttctccaaacctattggctgcagggcgtgattctcagtcaccagactcagcaaaaggttttagaagcgttcgaccaaacctacaagataaaagatcaccaactcagagccagataacagtgaatggaaactcaggaggtgccgtgagtcccatgagttactatcagaggccgttttccccctcggcatattctctcccagcctcactcaactccagcattgtcatgcagcacggcacatccctcggtaagtaatttactcaccgtgatttccatggcaacctcaatgcggcaagtacaaccacaggagaaagatatgcggcatcaaggtgaggcgggagcgctcagcactcatgaccctatccccagggagaaactggggcagaggacccaacatgggaggaaatgggcaccatgctattccaagaccatgtctccacctgtgtctgagcctggtgtgggcacttaaatgtctcaggtggtggagtaga

SEQ ID NO: 269599 - DNA, 611 bp, Homo Sapiens
actcagctgcctgtaggaaaactgaagactttaataacaaactctccaaggtgaaaatgaacacagcggtgggtgtgctcgcaaacgtgccgccatgtctgttacgctaacatctgtgaagagagtgcaaagttctccaaacctattggctgcagggcgtgattctcagtcaccagactcagcaaaaggttttagaagcgttcgaccaaacctacaagataaaagatcaccaactcagagccagataacagtgaatggaaactcaggaggtgccgtgagtcccatgagttactatcagaggccgttttccccctcggcatattctctcccagcctcactcaactccagcattgtcatgcagcacggcacatccctcggtaagtaatttactcaccgtgatttccatggcaacctcaatgcggcaagtacaaccacaggagaaagatatgcggcatcaaggtgaggcgggacgctcagcactcatgaccctatccccagggagaaactggggcagaggaccaacatgggaggaaatgggcacatgctatccaagacatgtctccactgtgtctgagctggtgtgggacttgatgtctgagtgtgagtagaag

SEQ ID NO: 269600 - DNA, 522 bp, Homo Sapiens
  misc_feature (449)..(449): n is a, c, g, or t
  misc_feature (473)..(473): n is a, c, g, or t
  misc_feature (484)..(484): n is a, c, g, or t
  misc_feature (495)..(495): n is a, c, g, or t
  misc_feature (504)..(504): n is a, c, g, or t
aagtcttcaaatatttaatcagtttggagacctctgcattccaatccaattgggtaaaaattctaaagaaagcaagattaaggggtcctcaaagaaaacactgggctaaaatggagaggagactgggtttgggaagacagaacatagcatgtgtctgaaggcctttcgaaggaattctacgacatattttttaaaaatactcaaaatgaacaagacagaattaaaccgttatacaaatttaaggacaactgaaacttcttttatggttgaaaataccaggcatggttttgaaacacattctctaaaaacccttcgatcctgctgtggtttgtttacatagccttctctgtgtacgcaaaaagcaaactagctactcccaggggttccccgccagctcccggggtctttgcaaagcggtaacacagtgagagaagggagtgggagaggtnaggaggtgccagcaagcttgttcnccgtcttttgnccatgggctcnggcccccgnaacctaatctttttcctt

SEQ ID NO: 269601 - DNA, 369 bp, Homo Sapiens
  misc_feature (238)..(238): n is a, c, g, or t
ccaaaatacaactcatccactgaaatacctggcttagtgtcaaatgttttattctgcaatggtggcttaattcagatgggttggttacatgctacctgctattaagatggcctcatgcaaactgtcattctttgaaactgctggtatgtggagattgcacaacttcatgtacaaatgcacatggaaccagagaaaccacttagcagttacactggtacaacaacaccatacaaatganttacaaagcagccctcaagagatgttacacacgtgataacaaggtaggtcactgctggcctggtcattttaggcaatttataggtttgcttgatatatgtgtctgtgtgtatgaatctaaaggattgagga

SEQ ID NO: 269602 - DNA, 363 bp, Homo Sapiens
  misc_feature (19)..(19): n is a, c, g, or t
  misc_feature (32)..(32): n is a, c, g, or t
  misc_feature (39)..(39): n is a, c, g, or t
  misc_feature (97)..(97): n is a, c, g, or t
  misc_feature (141)..(142): n is a, c, g, or t
  misc_feature (153)..(153): n is a, c, g, or t
  misc_feature (194)..(194): n is a, c, g, or t
gatagcccgccccaattcncctaggcacggcnagaagcnagaaaatgtggtctgtattcgggaggaaaaaatccatttaagactcagaaatgacagnaagagtgaagttagcagaccaaaaccactattatgaatgttttnnaatataaaggnaaacatggacaaaataagggaatagtgaatcttaatagagnaatagaatctacgaaaaggaactaaatggaaattctaaaaatgagaaacaaaataactcaaatgaaaaattcactgaacggacctaatagcagttcagacaccgcagaagaaaagataagtgaatggaaaaacaaagcaatataaattaaccaaactgaaaacaagttt

SEQ ID NO: 269603 - DNA, 388 bp, Homo Sapiens
aaaagtcaagtagtactaacagatatgaacaaatatcagagtccccccagcatgaccttaccccaagtcagcttttgtagcagcaataattttgctatttgtcaccatatttctaaataatatccatatactattgtctcttgattcatcccctttgtctattctcattggggtatatgagcacattagttcttatatcccgtactaatcccctacctccattctctgcatatcactctcaatgtcgttatttcagaatttttggttatatgcatactcaatgttttcattattatgtctatataaatgttgtttccttattatggcctatataagtgtataagtgccacagtggctatggccaggtatggaggggggtttccaggtt

SEQ ID NO: 269604 - DNA, 567 bp, Homo Sapiens
  misc_feature (17)..(17): n is a, c, g, or t
  misc_feature (40)..(40): n is a, c, g, or t
  misc_feature (50)..(50): n is a, c, g, or t
  misc_feature (93)..(201): n is a, c, g, or t
  misc_feature (334)..(334): n is a, c, g, or t
  misc_feature (412)..(412): n is a, c, g, or t
cttcaaagtagctgggnactaacagggcacacatgcaccnacccataccnggcctaagtttttggatcttgtaagaagaacagggaccttacnnnnnnnnnnnnnnnnnnnnnnnnnnnnnnnnnnnnnnnnnnnnnnnnnnnnnnnnnnnnnnnnnnnnnnnnnnnnnnnnnnnnnnnnnnnnnnnnnnnnnnnnnnnnncaaaaaagttattttagatccaccattagattgtagtggtctttccccatcaaacataacaggcttgtatccctgtggtgaacatagaaggcattgatttcagggaaattagcatacaataatgtaattcatnccctttggcagctaaaaaaattaaagtgcttgaaagatggactctacattgatgtccagagaggggatttataacccntgtaagtcccaacaaaaatccttaaaaattagagtaagacttgcattgttaaagtttgtagatttggattgttgaggcttaaatactgcatagttctatattcactatgtcataatttgcattgctgctgcatcagaggagcttaaaaatatttc

SEQ ID NO: 269605 - DNA, 435 bp, Homo Sapiens
gacgagagcaccctaaccatcagggtaatatcctctaagtgctggtgtcctgtaaatgtcagaagcctggtgggattaatccacaacctcaggttctaattcaggtcagaggcagacaagtggtgattggcagttttacttaattgtcaattaaaggctctctgatgaaaaggagggatcgacattccaaggcaagcaatgcagttgacaattaagagctaaaaattaaaccagccatccatatcatcacatgcccaaggcttcataggaacccttggtactgcaattgttcccaggtagaaaatgaggtccttgaacctggccatgatggggcaacagctggaaatcttgctctagccctggatcccacaagattccctgctccctgacaatctctcagaggctccccattggctctcagataaagggcctggc

SEQ ID NO: 269606 - DNA, 138 bp, Homo Sapiens
attcggcacagcaggtgaggagaagcagcgagagagaaggggccaggtataaaaagggcccacaagagaccggctctaggatcccaaggcccaactccccgaaccactcagggtcctgtggaagctcacctagtggca

SEQ ID NO: 269607 - DNA, 443 bp, Homo Sapiens
  misc_feature (408)..(408): n is a, c, g, or t
aacgtacttcttttctttgagcttcttggtcaaataatttcaaggtacatgctaataaaaactacaaatcagatttttgcctttagtgaaggtgcctaaaaagccagatgatctatgactttgaggtgaaacagcaaagataaagatttaatgttcctgttattgttataattaaatacaatgctgtggaagttagcatttcctcagaagtaattcacaaatatatttttatccttatctaacatacagtgaccattactaaataaggcattacatgcatgcagtttggccaaattatgggaaccttttctgtaatgtggaacttatttcaatataattcctgcttgggctaggattctggtttgatggtttaaatcaacttataaaaccctagtgactgggaaatgntagaaaatttatctataattggatcataaagtttt

SEQ ID NO: 269608 - DNA, 193 bp, Homo Sapiens
  misc_feature (51)..(51): n is a, c, g, or t
  misc_feature (133)..(133): n is a, c, g, or t
  misc_feature (160)..(160): n is a, c, g, or t
  misc_feature (176)..(176): n is a, c, g, or t
ggcctgaggcaccatgcctgacctaatgttttactttgggcagtgttgggnatacatacaaggggctaacggtatggggggtcccaatattatactataaaaccatttaatcaaattttttgaaaagtcgggnaaaactgtgtgtatttctaaaagtcanggggaaattaaaaggnaaatttattcccggagg

SEQ ID NO: 269609 - DNA, 266 bp, Homo Sapiens
aaaaaagcaaattaattattttatactttaagacattttcaaagatggaatcagactaatttgtagcatataaatggtaatgtttatccataatattttggaattcaggggtctgtgaatcatgtaaccgaatactaaagctatatacacgatataatttaaaagaatgtacactgtgtacaagtacacaaaatagatgtagaaaaaataaacagcaatttattgctatatattttagtattaactaagaataagtggggttcttt

SEQ ID NO: 269610 - DNA, 318 bp, Homo Sapiens
  misc_feature (254)..(254): n is a, c, g, or t
  misc_feature (283)..(283): n is a, c, g, or t
  misc_feature (287)..(287): n is a, c, g, or t
tgcctggccgttgattccattttttaaaagtcttgggtacaagccactacactaaaatccttaacccacaaactggttccaacggccactttgaaaatgactggtctaaataaactttaaagtatggaatttgtaatgaatgtattttaggatatttcctctggcctccagagaccactgaggaccttttgaaagggaaacagaccaacctccagaaaaaaaagactggaggaaagagtgagcatgtaagctanccatgcaagccatagactgcaataatcanagantatccaacaatgggaggtttctcttaattaa

SEQ ID NO: 269611 - DNA, 563 bp, Homo Sapiens
  misc_feature (123)..(123): n is a, c, g, or t
tgtcaggcatcgcagtgttctgcgggatggtccagttccccggcgacgtaaagaggcaggcccctcctgcagctgtgtctgctccctctgccaccgtttcccgctgatccgaaaagaccacgngccagccaggtgtacgagaacattgctcacctacagtgacgtcgtgggcgcggatgtgctggacgaggtggtgactgtgctcagtgacactcgtgggacgcggagcttgcagtggtgagagagcagcgcaaccgtctgtgtgaccttctgggcgtacccaggccccagctggtgccccagcctggtgcctgctgaagccagtcctggagcccatacctcacccctgcctggtgaggatgtcttgttcctgagggaggccggtgtggaaagcctcgcacagtggtgcctccagctgttgaagggtagcgctggcccttggaggctggcactagctgacagcttttcctctctgcacctgcgctctggtgacttggggtggacgcctctgccttcacttgaacacaaatgtgcttcctataaaatcatgtaccaagaaaaaa

SEQ ID NO: 269612 - DNA, 771 bp, Homo Sapiens
  misc_feature (641)..(641): n is a, c, g, or t
  misc_feature (706)..(706): n is a, c, g, or t
ggcacaggcagaaagatgcccgatttcgaatcaaagggaaagtgcaggatccagagagatgttgaactctcgcaagcagcagaccacggtgccccagaagccccgccagttgctgatgcccgggagaagatcagcttgaagaggagttcccctgctgccttcataaacccacccattgggacagtgacccctgctctgaagctcaccaaaaccatccaggttccacagcagaaagccatggcaccacttcatccccatcctgccggaatgagaatcaatgttgtcaataaccaccaggccaaacagaatttatatggacctggatgaagatgatgatggtatagcttccgtttcctactaaacagatgaagtttgcagcctcaggcggctttcttccaccacatgggctgggctaagcagttccaagctttccatgtccaaggccctccctctcaccaaagtggttcagaatgatgcatacacagctcctgctctcccttcctctattcgaacaaaagccttgaccaacatgtcccggacactggtgaacaaggaagaaccccccaaagagctgccagctgctgagcctgttctcagcccattggaaggcaccaagatgactgtggaataatctggcaccntcgagtcactgaggaggacattgttggaggttttctgtgtgtgtgggggccttcaaggcgagctngaattggttccttctgggggttagccgaaggttgtgttttgtgaaaaaagggacgatgggcatgt

SEQ ID NO: 269613 - DNA, 416 bp, Homo Sapiens
  misc_feature (343)..(343): n is a, c, g, or t
  misc_feature (347)..(347): n is a, c, g, or t
  misc_feature (378)..(378): n is a, c, g, or t
  misc_feature (392)..(392): n is a, c, g, or t
tgatgtgtccctttaactaggaaccattgtgaggaggtagcccaacccagggactacttggcagaccatatgaaaatggcgcatcagagcagcattaaacgcttctacccaaagcttgtgctaactgtgcaaagcaatacagcccagctcttgctctcgttaaacatagtccacatcaggagcacaggatgctgcccagccaacgtctctatcactgccttatctccagatctaacaggtacctgatgaggttaggctataacctaggaaaccttaggaaataacccacggcatttttctctcctatgtcccagccgccgtcagccaatccagtgggactcgncagnccaaatttgttcatccactgttcacattccntcagtggggggttncgacaaatgtggaaggtacagttt

SEQ ID NO: 269614 - DNA, 782 bp, Homo Sapiens
  misc_feature (388)..(397): n is a, c, g, or t
  misc_feature (666)..(728): n is a, c, g, or t
tctggcttttcagctgttctttgtagtcccttttattatgcataaaataaagaaattcttagattaaatcagaatgctgaataaccttgtagctagcaataaggtgacttacaattgtataaacaggaagccaggcttttgaactgtttacttaagattctgtggtgtgacatctctgttattgtttccagtcaatatttacaaagcatcctaaagacagggtcttggaaattgtcttcagatgatcttagaggtctctgccaagtctgagagtataattctgtaggtattgtgttatttgcaacgtaaatagtgcattttcttaatcaaatgattgtaaattatatttacttgtaatcagttccatagctttagacggtggttagannnnnnnnnnccccaccagggtcttgtttaaaggggtgagccaccgcacccagtcctgaggggtggcctctgctgctggatttcatgtcttcctccagcatgactaagtctggaacagcaggaagggttgatgcttactgacctggtgatgttagaagacaagtagtttatggatttaaacattagagctggagtggggctggaaatctatgtaaaggaagttctttcagtaagatgcccctgcttgtctttgtctcttttttgtttaacaaggtaacnnnnnnnnnnnnnnnnnnnnnnnnnnnnnnnnnnnnnnnnnnnnnnnnnnnnnnnnnnnnnnncatattggaaaagtaattcatattcagtagaggaaaactgaccaaaacagaagc

SEQ ID NO: 269615 - DNA, 717 bp, Homo Sapiens
  misc_feature (188)..(188): n is a, c, g, or t
tttcactcgtcttatgctttatttgtaattttgtcctatatcatcacacgtgcaacacattataaaatataaaataggttctcacactaacagtagaacaagagaactgtgtttacttaattatccattggttggttttcacactcgtggccctagagcctctgaggtcattgtaagtatgccttggngggcaacaaaagagtcctatctgtccggagtcagtttactggtggctgccaggaaagtcaccttggatgacacgttacctcttgtaccatacctctgtttatggagtaaacttcatattgattgtggtgagtagactgtataacaaggcaataagagatgcgttgatattaattccagagaagggcacaacccaaataatattcagctgatggacatactcatccatacttgaaggcatatcaaaattgacaaccagcctgacactgatcaagtctaggcctcgtcccaagactcctgtgctcactacaacttcatagtctccttcaagtaatcccttcaatatgtttttcctttctatttgcgacttctccgaatgtatagatatgcttttcagccctgtgattttctgaacggcttcactcaaaagatctgctcctagtttgcagtccacaaatactaacactggaggcttaaagagtttcttatcatttaaaatttcaaataattttttctttttggctgggtctt

SEQ ID NO: 269616 - DNA, 146 bp, Homo Sapiens
ggcctgtaatttcatttttaaatagttaagagcttgcccgtatttttaggacctatgatctgaagatgttttttctttccctaaacagggaaacgtcctctctgtagttactgagaggaaggtgaggacctcaggctcccagtgta

SEQ ID NO: 269617 - DNA, 409 bp, Homo Sapiens
  misc_feature (25)..(25): n is a, c, g, or t
ggcctcagcctccccaaaagtgctnggatggacagccgtgagaaaactgcacccgggccttctggctcccttccttacctttcaggtcattaggctgaaaacacctcttttgagttgctttcccctaaaaccctatccaaagtagaccctttctcctgcactcttctctgcccatataatatttatcaagaggcatcctgtgcccttggcagaaagctgatgccttaggggtgagtaccacatatggagtgcagggacaggataacagtcaacatttaccactcaggctacttctcatgtaccccacacacagacattccagattttaaccagtgtggaccaatgacagagagtcagcagaccttgactataaaatccaaacgttcaaatcaggcgcagtggctcacac

SEQ ID NO: 269618 - DNA, 439 bp, Homo Sapiens
  misc_feature (45)..(268): n is a, c, g, or t
gtactactgcactaaattgtaaactccataagcaatacctattannnnnnnnnnnnnnnnnnnnnnnnnnnnnnnnnnnnnnnnnnnnnnnnnnnnnnnnnnnnnnnnnnnnnnnnnnnnnnnnnnnnnnnnnnnnnnnnnnnnnnnnnnnnnnnnnnnnnnnnnnnnnnnnnnnnnnnnnnnnnnnnnnnnnnnnnnnnnnnnnnnnnnnnnnnnnnnnnnnnnnnnnnnnnnnnnnnnnnnnnnnnnnnnnnnnnnnnnnnnnnnntgctcatccacatgtgccggtggcgacctgtattcaattcggtacgttggacagagcaacccaaaaataagggctttgtcttagaccagagcatgccctatcagcgccttacctatagtagatattcatacagcaaacatgtattagagcttactcggaacaaagaagctg

SEQ ID NO: 269619 - DNA, 452 bp, Homo Sapiens
  misc_feature (12)..(12): n is a, c, g, or t
  misc_feature (53)..(86): n is a, c, g, or t
  misc_feature (93)..(93): n is a, c, g, or t
  misc_feature (96)..(96): n is a, c, g, or t
  misc_feature (394)..(394): n is a, c, g, or t
  misc_feature (400)..(400): n is a, c, g, or t
  misc_feature (440)..(440): n is a, c, g, or t
tgttgcccaggntggtcttgaattcctgggctcaagggatccaaggaatcctnnnnnnnnnnnnnnnnnnnnnnnnnnnnnnnnnngcgtgantanctgcacccagccagtcacttacaagtgtgtctgatttccacatatttgtgagtttcccaacttttcattgttttctaacttcatcccatgtgggtcagagggcatgctttgcatgaatttcagtctacttatatttattaaggcttgttttatggctttaacttatgacctattttgggagatgtttcatatgcactcgagaagaatatgtattctgatgttgggtggaaagttctatagatgtcttttaggtcaatttgccttataatgttgttcaagtctttctatttccggggtngaaccncggttccaggggccccattattggaaaaagggggtattgnaatattcccaac

SEQ ID NO: 269620 - DNA, 171 bp, Homo Sapiens
aattttgagatatacgccctctttcatctgtaagggactaggaaattccaaatggtgtgaacccagggggcctttccctcttccctgacctcccaactctaaagccaagccctttatattttcctcttagatattcactaaggacttaaaataaaattttattgaaagagg

SEQ ID NO: 269621 - DNA, 575 bp, Homo Sapiens
  misc_feature (120)..(156): n is a, c, g, or t
  misc_feature (292)..(310): n is a, c, g, or t
  misc_feature (546)..(546): n is a, c, g, or t
tccaatcaaaatatatcactttccaagattccacattcatattacttacttatactatggagactttctctacctgagcatgtattcaggggctataggtacatttaactctaactaacnnnnnnnnnnnnnnnnnnnnnnnnnnnnnnnnnnnnntaacctcctaaatcatttgggggtatcccatcattggtgcgtgtgtctgcgtgtgtcaaactttaatgattatttattcagaccctggaaaaccacactataaaatagggcactggatcacaagttcgtttggttnnnnnnnnnnnnnnnnnnngtgggggcggggggcagagaagaagtttaacttggatgatttccatgcccattccagctgtaacattctatgactgtgacccagcctttgttctcttttctcactctcctactagacatttcaatgaaaagttaggcaggaaaaaggaaaggaatcccaagttgctgccagctctgatgagagatcaggttgggggagagattaggtggttactgaattgaggtgtgggcctcccntgaccatgtcagtgatccctgtgccgaat

SEQ ID NO: 269622 - DNA, 586 bp, Homo Sapiens
  misc_feature (415)..(415): n is a, c, g, or t
aagttatggtatcatatgttaaactaagctttcaaaaaccttagtgaaatagcaagtgactgctttcaagcagcagtcgacatgtaaatgaaggtgttcttacaattcgcattttgccagctcagcgcacctccacaacgaatgaaatgctccgtatgatttgcacaaatgacatagacctccccaaaagttaactggctctccttcctcacacagttcatcataacccaaccccccacccccgggtcatgaaaatcacagaacttataaacacattgaaccctagatctcaggcttcctgacctaccgccagtggccccttgctggccaccctatagggtcctccttccctggcagccccccatgtgggagaaatacctgattctcccaatctgcagtgggagagctttgctgnaattccatcccaaagtcaaacatgggcaagaggtgaggatttcacttttaccctcaagtccgatttgtctgtgattttaaactaactgtgtatgtattgatgtttggaagattgtttgaattttaaagtgataatagtacttaatgttattccagtattgtttcattaaaa

SEQ ID NO: 269623 - DNA, 571 bp, Homo Sapiens
accctcaagtccgatttgtctgtgattttaaactaactgtgtatgtattgatgtttggaagattgtttgaattttaaagtgataatagtacttaatgttatccagtattgttcattaaatggtgttatcctaaagctgcacttgggatttttacctaacgctttactgattctctcaagccacatggccaaagtttgattttgcactccgttcatttcctgacacgttttgctgcccccctacctttctaagcgtcatgcaaattcgagaatggagaaggacgctgccggtccctgagcggtgtggagagggcggaaggtggactcccagcgcagcttgaggggctgaggacggaggctgcagcatctgtgtcgttctactgagcacgcttctctgcctcgctcctgactcagcactttgttcactggctcagcagttatgtttacacatcatttttatgttcctgctttgtaattcatgtttgagatgggtggccactgtacagatatttattacgctttccagactttctgaatagatttttttgaataaacatggttttatgaagtgt

SEQ ID NO: 269624 - DNA, 386 bp, Homo Sapiens
atcatgaggaagatatggcaatgcttcccaaacattctgaaaaacatagtcctcaaacatagtttcacaaataatgttttaaaaaggtaccctcaaaaaataaatttttgaaaaaggtatataatattaacttggaaaatactggattgaagaaaatataactagattctctccttcaagatgtcacaggcttttgatattctagggtgcactgtgattttctaagataggaataaaatatacactgcttcccaaatttatttgaccatgaaaccatttttattcttgatttaccttttgaaactacaaggctaattcaggaaacagtgacttctttcatgcacttttctagtgttggtcaagcgagtttaccaatattgaatgtt

SEQ ID NO: 269625 - DNA, 505 bp, Homo Sapiens
tcatctgtcagatccagtgtattcctaagctgggacaaagcctctgttttccccagtaggagccagggctgagtgtggaaattacagtgactgcttcttctcagcttctctggttgaaagcaagctggcgaagtaagaggaggtagagttgagaaggtgtggaagatagggacagctgcccccagaactcccttcaagggaggacttccccagctatgggaagtgccatcagggtggccgcagctgcagagagccacttcacctgagaccacgcccttcctggggcagcctgtatctggtgtctgagtgaggcatggtataaacacctggtcatttcaatccaacatgggacggacactgacagacagtactcccagcaggcccaggccagccagggcttcgtcaggcctgcagcacaatttgacttcctatgcccaggcctgcttcctcttcttcctcttcttttcacaggtgcttattcctaataaacatcttgcaacccaaa

SEQ ID NO: 269626 - DNA, 440 bp, Homo Sapiens
gattttcattctggcacaagcctctttcattctggacagctcacaaatagttaatggaccatgctttgaatagccttcctctaagcaacatttataaatactgatattttagaactgtttacatttcttctgtttatttttgaattttcagtttgatatcttgtccttattcattgttgtataaacaactgtactttaatttcaagtagtattaaaagtatttcacttcagtttggggggattattatcaatttataattttataaaagtattttaaagaataattgtaaattttccataaattacaacttcctgccatcttttattaaataataatcttgcttaaggcatatagacagacattattatgagtattccagtaaaaaaaatctacatcaacttgaccattctggctaaaaattaaaaagcacttttttaat

SEQ ID NO: 269627 - DNA, 253 bp, Homo Sapiens
  misc_feature (119)..(119): n is a, c, g, or t
gccctcagaaagaacccagatgccctctgcccacccatgccccccggcagatctgatgttccctccttatggctaccacctctcactgctcacctccaaaccccacatagggctgtctncttggtggagctacatcttaagcaaaacatgaccttcaagacaactaggaaaagtaatttcataggaagtcaaactagaatgagggctgccacgagaactgagggagacagctttgtttctgccatgttagcaa

SEQ ID NO: 269628 - DNA, 420 bp, Homo Sapiens
  misc_feature (63)..(187): n is a, c, g, or t
tgggttcaagcaattcttctgtctcagcctcccgagtaactgggactacaggcacatgccacnnnnnnnnnnnnnnnnnnnnnnnnnnnnnnnnnnnnnnnnnnnnnnnnnnnnnnnnnnnnnnnnnnnnnnnnnnnnnnnnnnnnnnnnnnnnnnnnnnnnnnnnnnnnnnnnnnnnnnnnnnnnnatgagccaccacactcggccaagccttaaatttatgataactgtaatatctcaggaaaacgtttagacactaaatatacttgttgtgcatgtgtttactaagaagctgtcaactgagagtttacaattctagtttaaaacagggatgtctgaatcagtctcaattacttgacattcatgcaggtatgtatgtatgtatgtatgtattttgagacggagttttgctcttgtcgc

SEQ ID NO: 269629 - DNA, 452 bp, Homo Sapiens
aaaataattgaagtgtaagctaaataaaatgcttggagttttgcctgggctcagtgagagttggtgccaaaaccttgtgtgtgtttgccataggaaggtgagatgccccatcctactaaagaggaagtagccaaatacagatctgtgggtgtttttaaaaaaactcaaccctatctggtgttttattttaatggataaaaatgtaatttttcctaaggtagcaacttatttccaaattaatatagatgaaaaatagataccaattagactaaattgaaagctttttgttctatatttgcatagcctttgaaatatttcttagtgcctaggaggtctggggattcctctttcgtggtggtcactaaccttacttgatgcagataaaatcacttgtcaatgcaaaatgtgttagaacttgataaagctttgagtttgagaaataaaggtatatt

SEQ ID NO: 269630 - DNA, 429 bp, Homo Sapiens
  misc_feature (38)..(38): n is a, c, g, or t
atcccctaatttaattttccacaagaaaaattccatgnaaaggacctatacttatccccccttttaccaggtgagcaaccctggagtgccagtgaagtgtaaaatgtgggccgacttaggagcacaaataccccagcaacaatgagcactcttagtacacaggtcttggtttctaaaatatcatcatccgataaaaggaacacaggctctttgaagaaatgactgattccgggattggggcaagaaacacacaagctgagactggagcatcttgcagtcccagaaagtgaagaaacgctgaggatatgtcaaagggacacaggagccaaatgaaagagcttccactggccaaagctggaatgttgagcaacaaagcaacatagcattggataataacccaaagtataaaataaatattcatgagtacat

SEQ ID NO: 269631 - DNA, 236 bp, Homo Sapiens
gagaatgaagatgggtgaaccttgtttttctcatatttaactaaatctaaatgacaggatatttggtaaaaggagatataaagctacaagggcccttgcggcacctgccatgaggtctgtctaggtgaagagctggggaaccaaagatgagcagctgaattttctgttcttgatgttctgcgggagtaatgatgcaccagatgataatgatagaagatattttgataatttactaa

SEQ ID NO: 269632 - DNA, 426 bp, Homo Sapiens
  misc_feature (323)..(323): n is a, c, g, or t
  misc_feature (397)..(397): n is a, c, g, or t
ccacttcaaggggcctacctcctgccagttgtgaccctgtggaattgcagtccacagtggccaggtggagattttttcaagaaaagctggatggatgtttctgagtcatcttaatttcaaaatgagactcatattttaaaatttctgtgggccaaatgaaacaagtatgcaggcaggtctggtccgagggggctggcttggcatgccttttctgtgcctttaatgaggactaagaagcaagattgggccacactgtctggactcaaagcccagctccaccactgaggcacccgtgttgactcttttccatatgtattaacgtngggggataataataatagctgctttcacagggatggaaattgaagttttgagggtgaggagcatttcaaccatnggggccccatcgtgtttaattcccattgt

SEQ ID NO: 269633 - DNA, 726 bp, Homo Sapiens
  misc_feature (122)..(122): n is a, c, g, or t
  misc_feature (128)..(128): n is a, c, g, or t
  misc_feature (292)..(292): n is a, c, g, or t
  misc_feature (303)..(303): n is a, c, g, or t
gggctccatcagtggatacctacaaagtatgacatggtttttacctttcttcggaccctaagtggtcatttaattgctattacttttggcgtattgtgtttttaaccttttggtaaagtttntgtctntcaggtttcaatagctccaagtcaagctaatgatggcccaagaattccaacccataacatcccaggagcaccccagtccctacaggtctttaggacagccagtgagagatttccccaccccctaaagttaggcagggacgacatccctgttcagcaggaagtcncttcagaatangatgatcttcagccctttctccttaagaatagagggtgaaatctctcagggggaaatagagatagaacagaaatggaatggggttgcttcttcataatactttaaccatgccttcttactttaaagttctagggaactggccttaggaaatctaactatgaaaccaaggttatggagtatcccacctcaggaaggaacactgaacaactgattgacagtcttcttgccgccagccagaaccaccaagtggcccattaaccaagagaaccagcgcaaccagatacgctgacccgcatctcctacctctcatgtgctttgcccagcccagcctgcataccttactcatgatgtcaattcccaagtttcgctaataaaaacatctctgcaagcctcttcagggagccaacaagacagtcaaaataa

SEQ ID NO: 269634 - DNA, 428 bp, Homo Sapiens
  misc_feature (416)..(416): n is a, c, g, or t
aataaaagtaaagattcaccaagaggctacctggctacataatcgtaatgactctactgctcaaaccatctggggctccatcagtggatacctacaaagtatgacatggtttttacctttcttcggaccctaagtggtcatttaattgctattacttttggcgtattgtgtttttaaccttttggtaaagtttgtgtctttcaggtttcaatagctccaagtcaagctaatgatggcccaagaattccaacccataacatcccagggagcaccccagtccctacaggtctttagggacagccagtgaggagatttcccccaccccctaaagttagggcagggacgacatccctgtttcagcagggaagttcgctttcagaaggtgaggttctttcagcccttttcttccttaaggnattaggaggggt

SEQ ID NO: 269635 - DNA, 410 bp, Homo Sapiens
  misc_feature (13)..(13): n is a, c, g, or t
  misc_feature (33)..(33): n is a, c, g, or t
  misc_feature (45)..(45): n is a, c, g, or t
  misc_feature (60)..(60): n is a, c, g, or t
ttaataaataagncaaggcttatttattatgtngaaaagctggtnttctacataattccngagttctcacaaaccacctatttgttttctctctctgctcaagaccccaaaatggtggctgtgcggccctgttcctttggttggaaatgaagttcctccttcctaattctggttaaacccatgtagctaaactgaaaacaaactttttcacctagattacctcagttggcctttttttctccccctatttctacacataaatatatcattaaaatgctaatttttatcatttgttcttctctaataaacacgtgagaaaaggaatataatttttaagcgggaagatctttgacaacaagaagtctgtattataaactaccaatatgctgaaaacacaataccagcaatgt

SEQ ID NO: 269636 - DNA, 443 bp, Homo Sapiens
  misc_feature (212)..(225): n is a, c, g, or t
ctacaaacctggagggacaagagactccagaaaggccaagttcttagtttgggaggcctaggtattgaagtttatcccaaattaatttggaagtttagatcagttgcaatcaaaatccttatttgattgacagtggggatggataaaatggagtttggatttgaaaatctacataggaggaggaagtaatagtatatctattttattatacnnnnnnnnnnnnnnataactataacaattagaatatcataacactgttaatagaccataaagtgacaaactaccccaaaacaaatcccattttcacataaaaatttaatatatgataaaaaagccttcacaaatcaaaggggaatgaaaggcaagattattcatcagaaagttaggtcttcatcttacaccggaataaattcaattgaactgaagagttaaatatgtattac

SEQ ID NO: 269637 - DNA, 410 bp, Homo Sapiens
  misc_feature (52)..(52): n is a, c, g, or t
  misc_feature (376)..(376): n is a, c, g, or t
actccccccgtttcccatcccatttctctgaggggaaaaacagcccctgggnccagtggggaagccaaaagagggtgcctgtttggagtccgattggagcgctgttggggacagcacaggggctccactccccaggaggcctgccttagggtagggagggagtgctcggggcctgaggctgtggaggtcagcttcttcaggttccttcaggaggaacctggaaataggggccacacacacctgacaagaatccagtagctctgggtcctagcataacttcataaaagcttgtagctaggtatctctccccatttctctgtccattcacagaataggtcgggcggtaagatagtgttaaaactagaagatccacttnctcccatggccatttttcttgatctaatgtgtac

SEQ ID NO: 269638 - DNA, 364 bp, Homo Sapiens
  misc_feature (351)..(351): n is a, c, g, or t
tgaaactgaaggctgttgtatatctctgtaacgtacacctaatagtttgaagtaacaaaaatatcaaattttggctattatgcttgcacatagttgtcagtctagtacagataaattacataattaacttttttgtctattaacaatttccttaaatatttctgggattaatatatcatttcatgttacaactgcagaaatatgaattaccatatcagtctttaaaaatgccaaattctataggggcccagtagtatactttacattttgtaatttttaaaattcagtgtatttacaggtctcttaaatggaatcactttaggaatgcttggatttcactcttggggtaantgggatggttacc

SEQ ID NO: 269639 - DNA, 475 bp, Homo Sapiens
  misc_feature (26)..(26): n is a, c, g, or t
  misc_feature (58)..(58): n is a, c, g, or t
ccctcaattctcctggcaaccctcantcctaatttgaactccctaagaaaattacttntccctagttgtcttgaaaggtcatgattttgccttaagatgttagctcccacccaagcagacagccctatgtggggtttggaggtgaaccagtgaagaggtggtagcccataaggaggaacatcagatctgcggggggcatggtggcagaggcatctggttcttctgaggcagttgcaggaaagtttctggaatccagtgccatgtggctatacagtagtactttgcagagcagtttagtggtgtggttaggtgtgtctcctggttgctctgtgtagcagccaaacccagttttctgacttttcttgagattctttatgtttaataaaccatgcttcttaaaatagctagagcagattttccagtttacaattaagaaatttgacaaatataaaatgtgctcaacaaatttttgtta

SEQ ID NO: 269640 - DNA, 415 bp, Homo Sapiens
tacaagccagtgaagtgggtgataagcctgactccactatctcagccaggtccttcttctaatattattggccagtctgtggaagaagctatcagaggggtgtttgatgcttccctcaaaatggctggcttctatggattgtatacctggctgactcatactatgtttggcatcaatattgtcttcataccatcagcattagcagcaatccttggagcagtgccattcctggggacatactgggcagcagtacctgcagttcttgacctgtggctgacacaagggttaggatgcaaggccattttactgttgatttttcatctcttgccaacatactttgtaggatactggcaatctactctgacatattcagggaggtgtccattccttacctgaacagggttgggcagtgggc

SEQ ID NO: 269641 - DNA, 638 bp, Homo Sapiens
  misc_feature (37)..(37): n is a, c, g, or t
  misc_feature (56)..(56): n is a, c, g, or t
  misc_feature (66)..(66): n is a, c, g, or t
  misc_feature (75)..(75): n is a, c, g, or t
  misc_feature (86)..(86): n is a, c, g, or t
  misc_feature (91)..(91): n is a, c, g, or t
  misc_feature (121)..(121): n is a, c, g, or t
  misc_feature (410)..(450): n is a, c, g, or t
aatgcccccataaatgaactagactggaataaaaganacaatgttgcccacatttnacacccatgnaaatactancccagtccatnaaaanggcaatgagatccacgtcctttgccaggcnacatggatagaactggaagcccattaaactaatgtaggaacagaaaacccaaacatgttctcacttacaactgggagctgaatgatgcaaacacacggacacaaggaagggggaacaacacacactggggcctgtcgggggtgtgggggagggaaagcatcaggaagaatagctaatggatgctggcttaatacccaggtgatggtatgatctgtgcagcaaaacaccatggcacacatttacctatgtaacacaaacctgcacgttctgcacatgtacccctgagctnnnnnnnnnnnnnnnnnnnnnnnnnnnnnnnnnnnnnnnnntaggtctgagacgggggtacaattttattcttttctatgtggacatacagttgcctcagcaccatgatgaatttcttgaaaagtgaggttgacataattggaaagccatctggaaaataacaaaattagatttcattactcctatcttaaaccaagtttcaaaatggatctgagattcaaatgtaaga

SEQ ID NO: 269642 - DNA, 396 bp, Homo Sapiens
accattccaatttgaaatggactgtgtacacgcttcatttagtacttttgtaaactgtgtttgtgatctgacagcagcctgtgaaattcataagaatcacataggatgtaaatctccatgatgtatgccaattacagaaattaggttggtctgtgtctttgttactaacaaaaatagctatagcagtggccttcagagatgtagagtctggaaaaacttgatcttaatgtcaggttctgggcactgcttttacagttatagccctgatgagagctatcagtaggggaaaataatttatgggaggaaatttaattttgctaaaagagataaaagtttatggctcataaaccctaatgtaggtttttatccattatgaggccacaaactctttgagga

SEQ ID NO: 269643 - DNA, 376 bp, Homo Sapiens
  misc_feature (32)..(32): n is a, c, g, or t
ttcctaattaactttcctcagcctacctagantccatggagagaaaaaaggcatttaaaactgtcaagaaatacaaatggatgcttccctgtcttagatagtattttaacagttattatttcctgctttatctaccttctgtatcacaaggcatttataccagcaagtataagtgttattcagctccaagttagtatgaggggactacatagattaccaggttttttccccctctcaaactgatctaggtttgaatgtgaaagaattcaagatccttttaataagatcccaaattcttttgaaacattagatcttttaaaattttaatcagtcaactcatcctcaatgtctcaaaagatctttatgtatgaaaacc

SEQ ID NO: 269644 - DNA, 418 bp, Homo Sapiens
  misc_feature (347)..(347): n is a, c, g, or t
  misc_feature (390)..(390): n is a, c, g, or t
  misc_feature (399)..(399): n is a, c, g, or t
gacccatcatcatcatacaaaagagaaaagtaaaaaggaagatttactaacatgttacatatatgacagcattcaggccaaaataatccactgactattcacaatgacaaagaaggcttctgatgtcacaacagagttaaatataatctttgaattaaacaaatgaattgcctgcttgctaatgggtattacataccctacactaaaggaaacaaaatacatctttcattttctgatatttaaagattgagtttttccataatactgatatacagggcaacttttactaatatattgtaatgataacaggacaaatggaaataatattatcctaaaggtacacgggnaattttgtttggtttttaaatggaggcttgggttaggcatttntgtccgggnccattaaaggtggggggtt

SEQ ID NO: 269645 - DNA, 530 bp, Homo Sapiens
  misc_feature (216)..(252): n is a, c, g, or t
cttcagtgcttctgccaggtattctacagcggtgagtcctgtgttcctacggccaaattccaccacacacggggaggagtcttttaacaatttcaaatatatgagcttatcagtttctgtattcagtggtaaaaaggatgagggaaaatgttatagccaatgaatacctaaaatagacttaattggattatactgcatttcagaaatacttgattnnnnnnnnnnnnnnnnnnnnnnnnnnnnnnnnnnnnntacaatataaggggaaaagtccaggagttagattgggacgtggtggcctactctgtatgtcaactgatatttatagggtgccctgcccatttgcccaactgcactaggtgctgggagacagctatgaacaagccagattatggctgcatgcaccaataagggtgaattctcaaaatataagtagtggagaaaaagcaattaatagggaatatacaaatagtgtatattcaaactaaataggttgtttcagatttatatatagtggtataaccctaaag

SEQ ID NO: 269646 - DNA, 631 bp, Homo Sapiens
  misc_feature (468)..(508): n is a, c, g, or t
  misc_feature (611)..(611): n is a, c, g, or t
ttttgagaaagcatagggctcggcgtgggtaaaagcagctcctataagctgtggtctggggtaaaaacagctcactggggcaggagctttactgaatagtaattctgtccatgctgggctccccaggcctggtcagaaggcctgtgtgttttgattccatcctacctccagtaagggaaaaaagatgaatgctctcaaactgaaacctctactggctggtatgtttctttactatctgtacaaaaccaattgcaaatatcaaactattacacaacaaaggaactcaacattaaggggacactgcctaatgataacaaaaacttaagttataattagagtttcagagatagatttagattggggtttctgtatttttcttacatcagctggaaacttatgcaccaattatgtgggggacactgtgctaagagctgcatacacattatctcactaggtttcacctgaaannnnnnnnnnnnnnnnnnnnnnnnnnnnnnnnnnnnnnnnnttttaatgggatatgctcaaagggtaaaatcctcacttagcatttgggaggttctgtgatttgattaatacctaattttcctgcctgtaagtctttgtggganaggttttatgaacaaatgcc

SEQ ID NO: 269647 - DNA, 357 bp, Homo Sapiens
  misc_feature (17)..(17): n is a, c, g, or t
  misc_feature (210)..(250): n is a, c, g, or t
tgatttaaggcatgctngtggacaaagcagccactgccctgccctcatagagcttatagcctaacacaaagcaacagcaaacattaggcatttgttcataaaacctttcccacaaagacttacaggcaggaaaattaggtattaatcaaatcacagaacctcccaaatgctaagtgaggattttaccctttgagcatatcccattaaaannnnnnnnnnnnnnnnnnnnnnnnnnnnnnnnnnnnnnnnntttcaggtgaaacctagtgagataatgtgtatgcagctcttagcacagtgtcccccacataattggtgcataagtttccagctgatgtaagaagaatacataaaccc

SEQ ID NO: 269648 - DNA, 553 bp, Homo Sapiens
  misc_feature (115)..(167): n is a, c, g, or t
  misc_feature (444)..(444): n is a, c, g, or t
  misc_feature (497)..(497): n is a, c, g, or t
  misc_feature (514)..(514): n is a, c, g, or t
  misc_feature (520)..(520): n is a, c, g, or t
  misc_feature (528)..(528): n is a, c, g, or t
gaacagaagaaaactaggaagaaaaccaagctgggaagggcaatgaaggaacaggttagagttcaaaagtaaaagtacgttccacacaaaggaaagatttcagagagaaggcttnnnnnnnnnnnnnnnnnnnnnnnnnnnnnnnnnnnnnnnnnnnnnnnnnnnnntgaaattctgggctcaaatgatcttcttgcctcagcctcttgagtagctggaattacaggttgctggggcagctctgatccacatacgacttagggacccaggatgcagctgcttcaacatcttgtagccgtactatctggaatacatgggctgccagttgtcatgactactctcctatgtttcagcccaaaagcttaagcactttatttctttcatattagcccattggccagaattattgcatatgtcttcacttacaggatgggcccgggagtngtaccttcatgtagggaaaaattaaaacataattcgtgaggaattattccaantgtggacataggagggntcgaantgagcacngggtgttgggaaaattggcacccta

SEQ ID NO: 269649 - DNA, 394 bp, Homo Sapiens
aatataaagaaaagtggtttatttggttcatggttctgtacatttgttcaaagtctcaccgtacccactcttacttgtcccctgcctcgggggttatctgagcctttcagaaatgcagcagcggtcatcagaaactttgagaatttgcccagagcacttgaaggtgtttccagacctgggaggtttctggtcacagccaagggtgagcagcagggtggggaagggaatctcatcccccagaggcagacagagcttcagcctgaagaccctggcccagcacttccctgctggggatgaccccgggcaagttagcaggctccctgtgcttcagttttctcttctgtaaaatggggacactagttcctgtatcatagggttgctgtactaatcaagt

SEQ ID NO: 269650 - DNA, 470 bp, Homo Sapiens
  misc_feature (205)..(395): n is a, c, g, or t
  misc_feature (410)..(410): n is a, c, g, or t
  misc_feature (431)..(431): n is a, c, g, or t
  misc_feature (447)..(447): n is a, c, g, or t
aaatttagcctagtttctgaagcagatggactgcctggagatatttccttctgtaaacaaattattatttgatgattcctcacccttggctctgatcacctcttgataagttgaccatcaaaatttgaggggattgaggtttggagagcacaaaggtacacttataccagtgattcttaattggtgggtgacgttgtccttcctnnnnnnnnnnnnnnnnnnnnnnnnnnnnnnnnnnnnnnnnnnnnnnnnnnnnnnnnnnnnnnnnnnnnnnnnnnnnnnnnnnnnnnnnnnnnnnnnnnnnnnnnnnnnnnnnnnnnnnnnnnnnnnnnnnnnnnnnnnnnnnnnnnnnnnnnnnnnnnnnnnnnnnnnnnnnnnnnnnnnnnnnnnnnnnngcaggaggaaacccnggatatacatttaaatccccnttatataaatcttttnctacctaggtacttagggggttt

SEQ ID NO: 269651 - DNA, 394 bp, Homo Sapiens
  misc_feature (18)..(18): n is a, c, g, or t
  misc_feature (31)..(31): n is a, c, g, or t
  misc_feature (41)..(41): n is a, c, g, or t
  misc_feature (51)..(51): n is a, c, g, or t
  misc_feature (62)..(62): n is a, c, g, or t
ccaaccccccctaggggncccggaagccttnccccaaaccntggccaaagnaaacccccccntcgggcctaaaggaccctgaccgcgaatgccccagaaagacaagttattgtcctgttcctcacccaaggttttttaaaaaaggacctttttgtgacctcctaacacccaaggtttggtgttagaattaaattcaagggacatgacattgtcctttgattttgttatacactttgagaagcacataaggctgaactcccaggagataagaaccaaggaggggacataaaatcataaatgtccataaactctgaatatgaagccactctacagatacacaaagtacatttttagctgaaacttcatacaagaaatattgaaggtatacactaaa

SEQ ID NO: 269652 - DNA, 394 bp, Homo Sapiens
  misc_feature (18)..(18): n is a, c, g, or t
cctaaaataaacctgccngccccataacccggtgcctgcctggtgtttggttgacctggggtatccccactgggaggatgtccaatgtggaaaccaccacctatgggcctagagggacccctggtggccctcctacctattcccaaggtgtgaaacccatgaacatccgggggaaatggtaaagatgccttagtcctatgaaatattgcatcacagagggaaacctgactctccagtaagcctgatgagctcagatgaattgtacacaaccatagagacttgaggttgtagattatctcttaggtagcaaacagaagatgtggtctgctaagagaatactgtagtgctattttccaattgaattttatataaaattagaaattcattaatccgg

SEQ ID NO: 269653 - DNA, 583 bp, Homo Sapiens
  misc_feature (22)..(22): n is a, c, g, or t
  misc_feature (33)..(33): n is a, c, g, or t
  misc_feature (79)..(79): n is a, c, g, or t
  misc_feature (91)..(91): n is a, c, g, or t
  misc_feature (134)..(134): n is a, c, g, or t
  misc_feature (147)..(147): n is a, c, g, or t
  misc_feature (153)..(153): n is a, c, g, or t
  misc_feature (169)..(169): n is a, c, g, or t
gacaaacactgaaggcccgaanggccccccgangggcagccgccacctagacatgcccaggacgggtaataaacaagangagagagttatncccaactcagaactggcaaacattcaccccaactccaaagaanatttatagcctgncacctncctgtataaagtgccntcctatggtgaaaactttttccatagtaaaagggagttgtaaagttttaaagttttcctagtggcagtcttttcccttactacttcccaattttttataccagcagcaacaacaacaaaaatctattttttagaacctgttccttagaaggcaaccatattcagaatatgtaaggtgctcactccctcactaacaggtttctgcaagtactgaaaataacattagtgcagagggccctacacaatactaacaaaacactgggaaatgtcatttataagcaagtattgatcataatttaattgcagcataccttcttagtgtgtttaattttatgtggactcaatttatccaattcttcctggatttcttttacctgttttgtaaaggggaaaaaagaaaacttcatacctttcc

SEQ ID NO: 269654 - DNA, 327 bp, Homo Sapiens
  misc_feature (1)..(1): n is a, c, g, or t
  misc_feature (8)..(8): n is a, c, g, or t
ncaacatncacgcccagcctagattccctaatttcttacctgtttatctcaccagtccatagttttagagtaccgcaaactcctaaagtactaaggtagaaaagattatataagggggatttaatgtatatcagggttttctctgcctcagcactatagacattttttgaccagataattcttcggttttgctgggggctgacctgtggcactgtaagattgttttagcagcatccctgggcctttgccaactgggctgccagtataccctccccccaagttatgccgatcaaaattgtctccagaaactgtcaatgtctgtgggaa

SEQ ID NO: 269655 - DNA, 374 bp, Homo Sapiens
  misc_feature (25)..(25): n is a, c, g, or t
cccccattggagagtcaaccctcanccccctccctcagcccttgtggatggaagaagaacaggcagtgatatacattaacctgctgttgaaagatgtccgcttatccttctctttcagtgaaaagttgcttttttattcaatatgtactgaacaggttctagagtttcagaaacaaaagaaacagaaccaacatttatagatctcactatagaggcatcactaattggggaaagacagactaggtaatagtcagatgtgatatagtatgtttaagctataggatggcaggtgcatgagtgttggttgtattattatttatttttttgtatgacttatgatattcatgataattaaaacgttttggaacaattca

SEQ ID NO: 269656 - DNA, 461 bp, Homo Sapiens
  misc_feature (45)..(45): n is a, c, g, or t
  misc_feature (70)..(70): n is a, c, g, or t
  misc_feature (406)..(406): n is a, c, g, or t
aatgcaattacaaagtgttatataaacaaatttagaacaatatanttccttgtgttggtgttttggattnttcagaaaggatatatgtggataaagcctgttgtccaaaatttgagatgacccatgctctttatgcctgaaccatcctttttttcctttctcattgctgctgactcactcctttaggtatattgtctactctcctcagcaaacctatttccaatcatgtacctcttctagtgaattaaaatcatattgtgattgagaatgaaagacttttttccttatactgactgtctgttggaataattgtactgctcgctctctgtaatgttctttatggtttggtattatgctaatacatttataaaaggactatctaaacataagggctgccatttatccngaaaattaatcccaccttggggtgaaggatttgtggaaggaaattaccatatatg

SEQ ID NO: 269657 - DNA, 471 bp, Homo Sapiens
  misc_feature (23)..(23): n is a, c, g, or t
  misc_feature (44)..(44): n is a, c, g, or t
  misc_feature (65)..(65): n is a, c, g, or t
  misc_feature (80)..(80): n is a, c, g, or t
ggtgtctcccccgaaaccccccncgaaactgcccttgatgagcncccacctgctgccctgtcagncccaacgcggtgganagggttgggggtccaaatccccccatgttcaaggtgataggagagaccctcagtgtgcccctgtggatgccagaggatgaaaatcagcaaaactgaatgagctgtgtgcctgttccttagaggaagcactaggtagactattcccagtacaattctgtttattcttttctgtgcaaacccaaatttagtgtacccaatacacatgcatatgaatacataccacatagaaatgcacagacatcacacacacccacaacactcagacacagggatgtgagtgtatgcatgaacacatactcacactcacacaccattgtaaggcttgtcctcatcctaagagtttaacgtaatagcttttttaaaaaaattgaataaatgaatgaatgaaata

SEQ ID NO: 269658 - DNA, 453 bp, Homo Sapiens
  misc_feature (16)..(16): n is a, c, g, or t
  misc_feature (97)..(97): n is a, c, g, or t
  misc_feature (141)..(141): n is a, c, g, or t
  misc_feature (200)..(200): n is a, c, g, or t
  misc_feature (366)..(366): n is a, c, g, or t
cccaacccgggtttgncccccggaaacctttccccttgtgtgtacccaaaccctgccctgctgtggaaaccccattgtggaaggcggtggggggganaaggcctcccctgaggaacccctgtccccctggggctggtggantgggcagaatccctgggcccccagagacctttgccccacacacactccttccccttgtnccctggggcactcccccaggattgtgcaatagtcagagtgtcccctttttgcaggggactgggccatgggtcctcggcccatctgtccatcctcctctccatgcaagtgctgtttgggcaggagtcaccatgcaagggtgacatcgacaaccacgtaccaagccanccgcagctgctgccactctgctgcctgtacagaagaaactgaatctttttcatattctaataaatcaatgtgagtttttaatagaaa

SEQ ID NO: 269659 - DNA, 357 bp, Homo Sapiens
catcgtttactacttgccgggtagaactggaggatagactttagaacaagaaatcatataattgaaaactacctttgctacttttggaattttaaaactgaaataattttagaaataattcgacctccctcatttgtaaatgatgaaagacttaaacaatttcacacaatgagaaaatgccagaaccagggctcgtaccgctaactcacatgttcaaccatcaaagtacacagtccctattggttttagttctgcccttttagattggtggccctgcagatatttaaagacaggcattatttttatcctcaatcttctcttctgctgagaggctttatcaggaaagatggtaagtgg

SEQ ID NO: 269660 - DNA, 419 bp, Homo Sapiens
ttcgaattcctatggttctggtttccttatggttactccacagggtaagcaccacccccgccacccttccctgcccactgaatgtggctaaaaggctagacaggcacacaaaggagctactgaggcctctgagaattgaccagtagcaggtagaagggggttgaagaccacaatttgaagtgccaccaaggttgcggtgagtttgccatgtccctgaccctggtatccccagcctggactaaatacaactcgatatccagaggcgagcaagagtgtgcccggggggtccaggagaagcatctagtaacaggaaaggggtcacctgggttctgagacagtgggccagatccctggggttttttcctttctccctggtctctctgggtgccctggtccccaggaaattccacagcggcagt

SEQ ID NO: 269661 - DNA, 610 bp, Homo Sapiens
  misc_feature (84)..(84): n is a, c, g, or t
cccagggttaagaagtgtttggttttgtttggattggtggcagggagccctggtgaagagttgatggcactgatgaggacctanccagggcagtggcaatggaaaggagaggagaaggtggcatttgaactactatatacagaaaaatcaaaaggacatgatgccaccctagaaaatctattgatgtcacaaggcttcaaagattttggctgagaccttgccttctttgaggggggacaagtggtctcaggtaatcttctttctctttgcagaagaatataattttagtgtgcttactctaacattcttacagaattagctcatgactaattgagagtgtcagagatttaaaaaattagtcatgtctggcacagagcatggtagtggtgtgaaagagctgcccggagcaagtatgtgacaacttttaaagatgctctttgggtgcaggttggtgccaaaagtgctgctcgagctatgagattccatgggctcccgtatatcatcatctttggttcccagctaagctgtcaacttctgggtttgcctcaatttccttctcatggaaatagggcctcaaaagaggagcaccctgagaaatgtatgtgattag

SEQ ID NO: 269662 - DNA, 414 bp, Homo Sapiens
  misc_feature (36)..(36): n is a, c, g, or t
  misc_feature (61)..(61): n is a, c, g, or t
  misc_feature (81)..(220): n is a, c, g, or t
actttgtcaaccccgggctggagtgccagtgggtanaatcctcagctcactcccaaccctnccgccccccgggctcaagtnnnnnnnnnnnnnnnnnnnnnnnnnnnnnnnnnnnnnnnnnnnnnnnnnnnnnnnnnnnnnnnnnnnnnnnnnnnnnnnnnnnnnnnnnnnnnnnnnnnnnnnnnnnnnnnnnnnnnnnnnnnnnnnnnnnnnnnnnnnntcctcagtccatttttaatactgaaggtataaattgtataaagatgtttagaaagttctaattcattttatgcatttttgcaaatttgactccatgaaagtgcattatcacgaagctgaatttgtgtaagcattgtgcatgtatgtaaaaacattgcaacttcctcaataaaatatcttctttttgtacatcca

SEQ ID NO: 269663 - DNA, 426 bp, Homo Sapiens
  misc_feature (403)..(403): n is a, c, g, or t
  misc_feature (408)..(408): n is a, c, g, or t
taaggctgaataggctcagttgtctaggtttctggggaaacatgtcccccaaagagtttgtatttttttaactgaaaataattgtaaactaaacatttctatgatgttagctagtctttcttaacacattatttagtatttgtactcccacgaactctctaatagttattttaatgtttaatagcctgtaactgcttgctactttaattgaatttttttaactgcctgtttttaactgtgatttgtttaggacattgaggtaaaaggtcacttgtactgttttaggaatgttgtgtttttgtctcattttattcaccgcctctacatgcgccttttactgttctgtttttctctttaggctatcctcataccacccaagggcagtcttccacccgggggcagnttccnggggccggccacccgggg

SEQ ID NO: 269664 - DNA, 477 bp, Homo Sapiens
  misc_feature (18)..(18): n is a, c, g, or t
  misc_feature (53)..(53): n is a, c, g, or t
  misc_feature (133)..(133): n is a, c, g, or t
  misc_feature (142)..(142): n is a, c, g, or t
  misc_feature (264)..(264): n is a, c, g, or t
  misc_feature (319)..(319): n is a, c, g, or t
  misc_feature (330)..(330): n is a, c, g, or t
  misc_feature (348)..(348): n is a, c, g, or t
  misc_feature (367)..(367): n is a, c, g, or t
  misc_feature (385)..(385): n is a, c, g, or t
  misc_feature (396)..(396): n is a, c, g, or t
  misc_feature (414)..(414): n is a, c, g, or t
  misc_feature (439)..(439): n is a, c, g, or t
gtatgaatatgctacagnctgttcactcaccaactgaatgacatttggatttntccaatgccttcctggtatctatttccctccattagtctatgggaagctttctagagaatcattgtgattctaaccaggnatatttggnattttctttctgagggcaaaggtttttgggcagcgtcccccaagtcatcctgtataattgtgtactgagtggtcctttatggtgatgagatggtagtggtggtgtcgccgtgcccaagtctngattgacagctaaccattcagccatccttggttattctcttcctctctctggtgnacaacataccntctttgatgttgatgccnattagacatgttataaggncttctctgaaaactcagnacccaaacatnaccatccccatatgctgnttctacttcaaaaacagttggaggnttgtaagacagaatttcttcccattagcagtgggggcc

SEQ ID NO: 269665 - DNA, 358 bp, Homo Sapiens
  misc_feature (46)..(46): n is a, c, g, or t
  misc_feature (75)..(75): n is a, c, g, or t
acccccttttgttgccttaagatgccagatggctccttaagaatcnggcagtcgccccacttctctcccagatgnagggaagacattcataggtcccaaatctgccccattcagatgtccacataatatggtgggatatcaatttacttccttccacacatgtggttgtgcacatgtgagcttgtgtgcttttggagagaatgttgattggcaaaagcagcacagtattaatatttagagtaggatgcagcctcttatgcaccacagttaaatctagaacgaacaaaatttcagagctcaagacatgggacatttaaatcctcaaggagtttggaacaaaataaacagatctaaaaat

SEQ ID NO: 269666 - DNA, 569 bp, Homo Sapiens
  misc_feature (74)..(74): n is a, c, g, or t
  misc_feature (92)..(92): n is a, c, g, or t
  misc_feature (135)..(135): n is a, c, g, or t
  misc_feature (478)..(478): n is a, c, g, or t
aaccaacccccacctgtaaaataagaaacagtcaaacctcccctagactgaaaggcaagtgcagggcagcaatnacttcctgctggggcaanaactcatggtgtgcaatgacagctggggtgtgggctgtgtgantggttggcagatggtggcagggggatccctggcaatgggggtgcccgtctcctcctccctctgaaacactccatgctctagcagccctcttctctcctccccgtggacagctctgttcattgggctgggcgtgtttgctttttatctcttctggtcactctttatttctgcctctccaattagaacattacaggtcaggatgattttaggaggataatattcttgatgtgctcatggtcaagggatttaactatgggccttttccaaattttctttttggaggcaaaaatgtttaatgttgcccagggtctttggcttccctgctgggttcctgtcatctctnccaggatgtataagggcttggaaggaggccacaatatgaaaagttaacgctctgggaagaataatacatacctggttgggcgggtgctcat

SEQ ID NO: 269667 - DNA, 476 bp, Homo Sapiens
  misc_feature (68)..(68): n is a, c, g, or t
  misc_feature (109)..(109): n is a, c, g, or t
  misc_feature (135)..(135): n is a, c, g, or t
aaaagcgaaagttgactcaaacccagagtaactctgacacaagttgcccaagagggaaaaaatacttnaatttgactagattaccccaaatgtgtaagccttcaatttnaattaccaaggtaagaatcatccccnaaccacttttccagctgagaacacttgcccagagaatgtctctggatgggaatagatgtggtcaccagctaggccactggactacccgagttcagctgcccaggaaatcagagccacctcaaatattgggcatgctctgattcagcagtggcagtgccctataactttcagatgattatctccatgtgctatgttaaccaaaataggcaaattatttacgaaaccatttttttctgtaaagcaaaataaatatatacaattcaagattcttttctcttctaaaaaggtacagatagtgtgagctgaacatcagtaggaaaattatttcagaatctggatgt

SEQ ID NO: 269668 - DNA, 581 bp, Homo Sapiens
  misc_feature (50)..(50): n is a, c, g, or t
ggggtcgcagaaatctgcactcaactgccaccctggctgcaagggatctntgaataggtatcttgagcttggttctgggctctttccttgtgtactgcgaccagggccagctgttctaaagcgggaattagaggctagaacggctgaaatggttgtttggtgatgacactggggtccttcccatctctggggccccactctcttctgtccttcccatgggaagtgccactgggatcccctctgccctgtcctccctgaatacaagctgactgacattgactgtgtctgtggaaaatgggagctcttgttgtggagagcatagtaaattttcagagaacttgaagccaaaaggatttaaaaccgctgctctaaagaaaagaaaactggaggctgggcgcaagtgcacgcctataatcccagaggctgaggcaggcggatcacctgaggtcaggagttcaagatcagcctgaccaacatggagaaaccctactgaaaatacaaagttagccaggcatggtggtgcatgcctgtaatcccagctgctcaggagcctggcaacaagagcaaaactccagctcaaa

SEQ ID NO: 269669 - DNA, 198 bp, Homo Sapiens
  misc_feature (1)..(1): n is a, c, g, or t
  misc_feature (94)..(94): n is a, c, g, or t
ntgacacctgagcctgggccttgttatctatttcttattggcttataatgcaagtgtgcacaacattcttttctccttaacatgattatactgntggcaagcccttttaatgcttaaatttggattcaaaggcagcaaatactttttaccccaaacagccacagttaggactttcaatatggaatttcccccaaatat

SEQ ID NO: 269670 - DNA, 514 bp, Homo Sapiens
  misc_feature (76)..(76): n is a, c, g, or t
  misc_feature (396)..(396): n is a, c, g, or t
  misc_feature (401)..(401): n is a, c, g, or t
  misc_feature (408)..(408): n is a, c, g, or t
  misc_feature (416)..(416): n is a, c, g, or t
  misc_feature (494)..(494): n is a, c, g, or t
  misc_feature (502)..(502): n is a, c, g, or t
ctctcttttctctggtcgataatgctccgcaaggacagagacctggtacatcccctttaaattctgaagtttcccnagtgcctggaacagggcttggtttctgacaggtagtgtagtgggtttgattccctgcacaaaaatctgcttaaccgcaggcctagactataactctaggagggtggagacccagtctccctcccacccacggcgtccccagtactaacatggaacctaccctgaagcccagtcaatactcttgaaatgaatgatgggctgaacagatgctaaaatcacagacaagcatcatttaatcttgtaattatcaatctcagttgacacacgggggaaagaggctcaatgctgggcctggattttgtccctcctcaaggcaaacantacanttacaanacatgggntgagaagtgggagaagttcaaaatttaaaacccggggaggcccaggttccagccttttaaagctgaggtttaatttangcgggcgnaaggtttttttg

SEQ ID NO: 269671 - DNA, 325 bp, Homo Sapiens
attcactgtgtcagcttatagtagcaaaataagaaaaaaaggtgtatttagttctgagccaaatcttaatccagttaaaatgtactgaatgttaacttacaatttttaaattagcaatataagaataattcataaaacttatctttgcattaaattttctttaaatttatgttcaaaggaatatcaaaggcaactttttaaaaatagacttcatgggattgtcaatgtcttaaacagcctttttacttgaccactaaagcacagtaattgatctttggttttaacaactgaaaccctttaaagcaaatgccaacagctttttgat

SEQ ID NO: 269672 - DNA, 178 bp, Homo Sapiens
atactaactcctactgtgacaaagaaagtccaatacataacaatgtcattgatcctaaagaactgacagcttatcattgtaataatcaatagaatatttattccatttatattctatttcaatagaataagaaaatgaagctaggcagaaaaaaggttttaaaagtacagtgacggct

SEQ ID NO: 269673 - DNA, 400 bp, Homo Sapiens
tcaaatgcttcgtttttaataggaacttacacagtcttttatgtttttttatagccctcaatgtcactgatgtggattctcccaaactcgatactttgtttgtttttatgtccccataataagtctttaagaaaacagggcaagtgagctcaaaatcaaaagaaaacccaccaacagtgaatgcattcagggctatttccaggtctttcttttgaagaaagataagactcagtccagagagcacatctgtgacacaccgtgcctcttgcctttggtgcgtggcagtcatctttggctcatgctgtacattattctacattagaaaactcactgtatgttgctaaataattttttgaaaacaggcagattaataaatggacatcttatttattgcaccgat

SEQ ID NO: 269674 - DNA, 305 bp, Homo Sapiens
  misc_feature (51)..(51): n is a, c, g, or t
  misc_feature (69)..(77): n is a, c, g, or t
  misc_feature (147)..(147): n is a, c, g, or t
ggttgcagtgagcccgagaatcgtgcccctgcactccagcctggatgaccnaagtgagactccatttcnnnnnnnnngggataggaagaatgaatttttcctatacgattttgctgtgtatggaggctcatgaggcgttccatgtanaaagcccccaggtaaaagtaccacacttctttccacattaattctagaccctggtacacttgcagttattgccatttaatttcaaacctggtggaatataaagcccaattccccatgctctctgggaatagttattagagtaattttaactgattctc

SEQ ID NO: 269675 - DNA, 173 bp, Homo Sapiens
tcactttgctcattttagtgtttagaaacacagtccaaatcagaaaagctcaacaagccctgctattatgcaagagcaaaaatattgagaaggaaaacaaaatggtgaataaataaaagcctaaagaaaactagagaggaggaaatgtgtgtttttcccatctgcccttatgg

SEQ ID NO: 269676 - DNA, 580 bp, Homo Sapiens
  misc_feature (22)..(22): n is a, c, g, or t
  misc_feature (126)..(126): n is a, c, g, or t
  misc_feature (175)..(175): n is a, c, g, or t
  misc_feature (341)..(382): n is a, c, g, or t
  misc_feature (447)..(502): n is a, c, g, or t
  misc_feature (515)..(515): n is a, c, g, or t
  misc_feature (520)..(520): n is a, c, g, or t
  misc_feature (534)..(534): n is a, c, g, or t
ggaagtaccctactctattggntgcttccccatatggttgtcactgtacccttccatactgccctcatttgacccctcatattagccctgtacagtagatgggtacactggtttgcccaaaggagnccctggaatcccaaggtggaagtaagcagcaaagcccagaaacttcaantctggtctgtctaccttgatagcctgcaccctcccctctaccgttttcttccactatttttgattccttaatgatgaatcatcctctcccttctagttggatttgtttctaatggcttccattacaaggataataatgaaactggtgaaaactttcaggcaaaagnnnnnnnnnnnnnnnnnnnnnnnnnnnnnnnnnnnnnnnnnnaccaaattaactcattacagtaaaaaggactgatttttaagccagctgtgatagctctgtaatannnnnnnnnnnnnnnnnnnnnnnnnnnnnnnnnnnnnnnnnnnnnnnnnnnnnnnncggggaatttcgnaggantaggccggggcagncatgggttgaaaccccaggcttttacaaaaaataggaaaatttcag

SEQ ID NO: 269677 - DNA, 164 bp, Homo Sapiens; identical to SEQ ID NO: 9528

SEQ ID NO: 269678 - DNA, 310 bp, Homo Sapiens
  misc_feature (16)..(16): n is a, c, g, or t
  misc_feature (55)..(55): n is a, c, g, or t
  misc_feature (76)..(76): n is a, c, g, or t
  misc_feature (88)..(88): n is a, c, g, or t
taggaagattaagtgnaaaccctggggatcacatggtccagggtgagatacagtnggaatatgaaacccaatgtantgacccttcccncctttaaactttatccctatttgctggtctttatcaatactttcagtttgaatgtggttaaactggaatctacactaaagaatctggtggatggtgagacggctcagaatacacccagcatttggatgttctgcaagtaaaatgagatatgttttatgtcatcattgatgtttttctactagtggtgatttattttgctctcattctgatgataattaatat

SEQ ID NO: 269679 - DNA, 382 bp, Homo Sapiens
ttacccttaaaaataattccagaaaaaagataaatgcatgaagacatttatgtctgccattctttataataacaaaaattggggaaaaaaactccatgtcaagaaagtgggataagaaaaatagtgaagtattatactgccattaaaataattatttggaagactgtagaaacgtggacatgtttgatatggtaagtaaaatgagcacaatacaaaatagtatgcatactatgattgtgactttgtaaaatctttatgcatgtggaaggtaatctgcaaaacaaattcattgtgttagtgtagcgggatatggaatgactttatttatttaaatcttttctttaatattactttgtattttcaataaaaataaatcactgta

SEQ ID NO: 269680 - DNA, 950 bp, Homo Sapiens
  misc_feature (69)..(69): n is a, c, g, or t
  misc_feature (71)..(71): n is a, c, g, or t
acctgtccccctgagccccctggccccttcctcagcagcccatttgcggactctcaaccagctgccaancnagcccttcactggccccttcatggctgtgctctttgccaaactcgagaacatgctgcagaactccgtctatgtcaacttcctgctgacggggctggtggccagctggcctgtcacccccagcccctgctccgctctttcctgctcaacaccaacatggtcttccagcccagtgtcaagtccctgctgcaggtgctgggctctgtgaagaataagattgagaactttgcggcttcccaggaggacttcccagcactgctgtccaaaagccaagaagtacctcattgcccgtggaagtttggactgggctgagggcctgcagcaggacctgccccacgccgttctgatcccctagtgaagagccggagaattccttgggggagttactcctgcggcatgcacacagtccaaccagggcccggcaggcggcacaattggtccttcagcctgggcgagacggagcaggacttggcctaagtgggggctcccctggggcttcaactccagttctactcatccgcggcggggcccctgaacgcccaaggtgaggctcttcgagtcaagaatgctgtctactgtgcagtcattttccctgaatttctcaaggagttggctgccatctcccaggctcatgccgtcacctcgcctttcttgttggagacttcagaggaaggatctggccctctcatctcaggctgtgggcccctcaatccttaactttcttccatggacaatcaaggccatgggtggcccgggctggggctagggcacaggctcctttttatgtttggaggcagtggcaaaaggactttttaatttatttcagatgaatgttttatggagaacttgttgcaatatgtataaaagggaaatctctaaaa

SEQ ID NO: 269681 - DNA, 407 bp, Homo Sapiens
  misc_feature (107)..(107): n is a, c, g, or t
acaaagctgaagacatccacactacccagacttcaaaatatactacaatgctgtagtcacccaaaccgcatgatactggcataaaaacagacacagaggccagtggnacagaatagagaacctataaattaattcacatatctatagccaactgacttttgacaaaggcctcaagaacatctactgaggaaaggacaatcttttcaataaatggggctgtaaaaactgaatatctatatgcagaagaatggaactagactctcacctcttaccctttataaaaatctaattataatggtttaaagacctaaaactcagatatggaactagaagaaaacataagggaaacacttccagacattggtcttagaaaacattttatgaataagacttcaaaaggagtcaag

SEQ ID NO: 269682 - DNA, 460 bp, Homo Sapiens
  misc_feature (15)..(15): n is a, c, g, or t
  misc_feature (56)..(56): n is a, c, g, or t
tccagtttccacagntcgaacaaaaggtaaagggaaattatgtccaaggaatctgncacttaaatggaacactcctcggaagccctccattccacaccctggtgtggatgtttttagatgggattttaaacttttgaatctgatgtggtctacatgacatttttcatgttgaactaatgctttaatgacatgaaatctggaaacctcaggggagagggtaaatgcactttgcagatgggggaatgtgagtgtcctactgtggtaaatggaatttctgaaatggtccccaaacatgccacacccttgtctctaaagcctcttaaggtgatgagacaccattcctgtgactatgttgttatatgccagttatatgactttaagatggtgaggttaccgcatgaactggatctaatcacatcactccatacatgacagagctttgtgtggctctgtgccgaat

SEQ ID NO: 269683 - DNA, 460 bp, Homo Sapiens
  misc_feature (396)..(396): n is a, c, g, or t
  misc_feature (422)..(422): n is a, c, g, or t
  misc_feature (440)..(440): n is a, c, g, or t
attcggcacaggtagtgtaagttggcagtgcgcacgtctcggtttttttacatgatttaaggaaagacttttatgtcagaacttggtgcctgtaccgtcaaccccgctgctgcccgtgtttaaacgcaggagaactttaaaactggccatctatcttttcagtgtacaagtcactgaacccattgtttctttctgaagagactttcctttcaaggcttcccatgggtccgcgccacacagggccggtgctgctttatttcagactctgccccaggttccagggaatccgaaccccggagtgctgacgcggttccccaacttccgccttaagaaaacaggaccagccgggcaccaggcccgtctcttcacgtacttttaacacattccttggaaagnccctcgttttaattgaggaaaagcgnaacattgcgggttccttngccaaagttaaattgaagtt

SEQ ID NO: 269684 - DNA, 564 bp, Homo Sapiens
  misc_feature (501)..(501): n is a, c, g, or t
  misc_feature (536)..(536): n is a, c, g, or t
  misc_feature (550)..(550): n is a, c, g, or t
agcaaggaaggcaactcctactgtcctcacttagaaccagaggaacagtcctgcccagggtgaactcaccctcgagccagccaaactggtgaatgcccttccccaagcgggagaagccctcatatctccaagcagccaacatgcttctgggttgaaggagcagctatgtgcccacacccaggtcctgagaaacagccgcacagtgccccacccactacagacaagccccagtcccgcccaacagctttgtatccacaattagagcctgcgataacagacctgtgtgctgcccctgacagacatgctccttggctatctgaacagctctgcgctcacatgccaggactgagaaatagtctgcaggccaaccctggtgggaaagccctcgagtcagccaattatccctgtgcccatatcccaggctgagaagcaggcctccaagcagtatcttgtgggagatacttccaaaaaggaagcaaaagacctctacaatgaaaactnacaaaacactttatgaaagaaattgaaggagggtncaaaacaagtgagnaaatatctcatgca

SEQ ID NO: 269685 - DNA, 427 bp, Homo Sapiens
  misc_feature (90)..(90): n is a, c, g, or t
  misc_feature (363)..(363): n is a, c, g, or t
  misc_feature (373)..(373): n is a, c, g, or t
  misc_feature (384)..(384): n is a, c, g, or t
  misc_feature (391)..(391): n is a, c, g, or t
  misc_feature (398)..(398): n is a, c, g, or t
  misc_feature (415)..(415): n is a, c, g, or t
tcattaaaaaaaatttcccatataaaaataaggtggcaaaaaacctcttgttcccatctttctaacagcacctaaactctgtgtgagacnactatgttccctacttcaaatcaaagacctgagttctaaaattctcaatagctgaccagtagtttgacaatctggggactcaagttcagattctcgaggggttgaacattagacatccattagagtgtaccaaatcccccaagagtgtatcccaatgacacgtgcatatgaggcatgggggcctctgaggaaggatgaaggacacataattattatgggacagggtcatctgattttggactattgctttggaacaaaaatctttcccaaaantacacacggnaaatatatttntgtttgngcccctntctttaacataggtttnctggatggaaac

SEQ ID NO: 269686 - DNA, 573 bp, Homo Sapiens
  misc_feature (125)..(125): n is a, c, g, or t
  misc_feature (275)..(275): n is a, c, g, or t
  misc_feature (554)..(554): n is a, c, g, or t
gcacgaaaattctcatagtatctacttaccatagatacctttcataactggtaactgcaaagccttttgtgctggacccaggaatccttaccatggagcagcagatagtcccagtatactcactnatctcatccatggatgtaaatgatgatgaatcaacatagtaactgaaatgaaatcttcttgattttaaataatatacgaatggtgctattaatattgctaaaatcaacgtgtgaagtgtgttgtggaagagacctgtaagtatggggggnggcgatattttatcagaccattttgtaaataaaggcagaatttgtgttgaagattcttatatgaatgaaccttcctgggatttgtttagttttggcaccaatcaaaactgtgtaactactgtttgttggtttaagagtagcagattgaaatataagaagccagattagactctaaaattgtggccattgggaatctcatttatgaaatgggaccttttaagtatatttaattcctcttcagaattgagctgggacacatttgggcattcttagtttgtncatataaccagggttatcc

SEQ ID NO: 269687 - DNA, 646 bp, Homo Sapiens
  misc_feature (89)..(89): n is a, c, g, or t
  misc_feature (132)..(132): n is a, c, g, or t
  misc_feature (166)..(166): n is a, c, g, or t
  misc_feature (633)..(633): n is a, c, g, or t
attattaatgagatcctggtcatgagggaaaacaagaacccaaacattgtgaattacttggacagttacctcgtgggagatgagctgtnggttgttatggaatacttggctggaggctccttgacagatgtngtgacagaaacttgcatggatgaaggccaaattncagctgtgtgccgtgagtgtctgcaggctctggagttcttgcattcgaaccaggtcattcacagagacatcaagagtgacaatattctgttgggaatggatggctctgtcaagctaactgactttggattctgtgcacagataaccccagagcagagcaaacggagcaccatgggtagggaaccccatactgggatgggcaccagaggttgtgacacgaaaggcctatgggccaaggttgacatctggtccctgggcatcatggccatcgaaatgattgaaggggagcctccatacctcaatgaaaaccctctgagagccttgtacctcattgccaccaatgggaccccagaacttcagaacccagagaagctgtcagctatcttccggggactttctggaaccgctgtctcgagatggatgtggagaagagaggtttcagctaaaagagctgcttacaggtgaganaactggagggttt

SEQ ID NO: 269688 - DNA, 1103 bp, Homo Sapiens
  misc_feature (650)..(650): n is a, c, g, or t
  misc_feature (762)..(762): n is a, c, g, or t
attcggcacaggtggaacgatattctcgaaaggtgtttgtaggcggattgctccagacattgatgaagatgagatcacagctagttttcgtcgctttggccctctgattgtggattggcctcataaagctgagagcaaatcctattttcctcctaaaggctatgcattcctgctgtttcaagatgaaagctctgtgcaggctctcattgatgcatgcattgaagaagatggaaaactctacctttgtgtatcaagtcccactatcaaggataagccagtccagattcggccttggaatctcagtgacagtgactttgtgatggatggttcacagccacttgacccacgaaaaactatatttgttggtggtgttcctcgaccattacgagctgtggagcttgcactgataatggatcggctatatggaggtgtgtgttacgctgggattgataccgaccctgagctaaaatacccaaaaggagctgggagagttgcgttctctaatcaacagagttacatagctgctatcagtgcccgctttgtacagctgcagcatggagagatagataaacgggtggaagttaagccatatgtcttggatgatcagctgtgtgatgaatgtcagggggcccgttgtggggggaaatttngctccatttttctgtgctaatgttacctgtctgcaatattactgtgaaatattgctgggctgctacccaatctcgtgctggcagggaattcccacaagcccctggtgaaggnaaagggtgaaccccctcggcatatttcattccgctggaactaaaggataactgcagtgctcattttcaggcctcagaataagtgcactcttctgttcattctgaccccttcctcaacctcttcacgctggcatgtccttttgtagcagtctgtaacttaactatagtataatgaaaagaatgacctataatataggtgttttgtagattcttgtgtcactgcaaacaatatgaactcctttttcgtattgccatcgggttgcatggaagttttattctcttgttttgctggaaaccaagaggatccaaacttcctgcaacattttcttagaggagagagag

SEQ ID NO: 269689 - DNA, 435 bp, Homo Sapiens
  misc_feature (364)..(364): n is a, c, g, or t
ccccatttccccctaaaacagaactgatttcaacccttggttgctgacctagggcatgttataaccctcacagtcctaaatcattctttctcatggcattatactcttccaatctttttattatattcctcaaaaatcagtggcaaggaatgggaaagatagataagggactgtacattttaaaatttttaaagatttctatacttttacggccatgacacatcattttcatttttctgttgtggcaccctttttctacagggaatgggtaaaaacaatgggaacatcagggtcaaacaactcttggctactaatggtaaactcactctcaggaaaaccattctcaaataggacaatgagggtncgtaaaggaaaggcatgtggaatgctattacaagtggggaaataaaacttctttggaaattaaaaaggacg

SEQ ID NO: 269690 - DNA, 444 bp, Homo Sapiens
aacccttgcatcctccatatgggggtgggaattggactgcaagctatgcccaagtccttaatttaggttaccataacttttatttcaaattcagaaatgaaaaataaaaataaggtacaaatcaagcattaacctaataatggagcacagctggccctggctcttgggaaacttccctacaaaaacgaggattcttgtatggaaatcgttctgaatctttttcctgtaatggagtgactcttaacacaagagatgactattgcgaaaatctctctggcatatttaggtttggagcatgtggttgtgcttgaacaagtttctgttttatattttacaaatgcctaacaattcagacaactacagaaacaccttagttatctgaattccagacttccggctcccacgagcaaccggaataccaattacagaattagggaaaattat

SEQ ID NO: 269691 - DNA, 258 bp, Homo Sapiens
  misc_feature (48)..(48): n is a, c, g, or t
  misc_feature (132)..(161): n is a, c, g, or t
  misc_feature (168)..(168): n is a, c, g, or t
  misc_feature (175)..(175): n is a, c, g, or t
cattacatagtgcaaacaccaaaaagacagagctattaacttagtggntgcttataaggaaaactaggcaagaatgcagaaaatgccttcctctttcctcatctagtgagctggccacattcaataagttgnnnnnnnnnnnnnnnnnnnnnnnnnnnnnngcgcganagactgnagttttattattacccaattcagtctcccaaaagttattttaaattgctgctttcttcccacttgatgaaaccacatttggct

SEQ ID NO: 269692 - DNA, 512 bp, Homo Sapiens
  misc_feature (15)..(15): n is a, c, g, or t
  misc_feature (39)..(39): n is a, c, g, or t
  misc_feature (64)..(64): n is a, c, g, or t
  misc_feature (80)..(80): n is a, c, g, or t
ctttgtaaaaccccnccaaaatgtgcttgaactgcaaangggcaaaaaaatgttggaaacccgngaacctgttaaagaantttcctttctcaaaaaactgtgagctcccttcatgacccgaccatggcttggggaagtccctgtcccaggtacagcagaaaaccatgggatgggaggtctgcagacccccctctggaactctgtggtgagaatcctgcagcagctgcccctcagtggcaaggccaaggaggctaggcccacttaccctggcagaaaatgacccttagcactgctggatttggtggctgtgctcaagacagcacctgaatctcagttgtctaaagagcctccaggtagactgacaaagttgtcaacagttaggcattccaaaaccctgagtggtttaccttatttttcctaataatttccaaccttccttctaccccttgatcattttagaactagaagctggagggaaatgagcaatacaatcgctttgggcatgtacttcg

SEQ ID NO: 269693 - DNA, 531 bp, Homo Sapiens
  misc_feature (52)..(52): n is a, c, g, or t
tcctaactgaggaaacacccgggtagaaaaactggcaccaagctggaattgnagcttcgtggtaatacacaaaaaatgcacacagctcagctcaacaagtgcactgagtcacaccaaacacatttgatgttaccaactttccatccaattccagataaccttcctcccactgcttctcaactgctcaaaagcctaactctccaaacccatttccacaaggtaatttgaagactttttcaaataaaatgccaaatttaccatagtagttatgtatttcttaaccatttaacatttataaaactatatcatttttattcagttccttttttcagatgtgtcactgacaaagttttagaatattgtgcccttaaccaaattttccccgtgagacctgtggtttcattgtgcagttctgcttaatgtggtaatttttagaatgcgtatgtcatgttgtattgtagcagaactatttccagggctctagtgtagagtatttacattcattcttaaaaattacactaaatgtccaat

SEQ ID NO: 269694 - DNA, 459 bp, Homo Sapiens
  misc_feature (29)..(29): n is a, c, g, or t
  misc_feature (51)..(51): n is a, c, g, or t
gggaaatttgcccctcgagcccaaaaatnggcaacggggaaaccagaccangggccccttttgtgggtttctctgtgctctgaatgggagccagaattcactaggaggtcatcaaccgatggtcctcacaagcctcttctgaagatggaaggccttttgcccgttgaggtagaggggaaggaaatctcctcttttgtacccaatacttatgttgtattgttggtgcgaaagtaaaaacactacctcttttgagactttgcccagggtcctgtgcctggatgggggtgcaggcagccttgaccacggctgttcccctcacccaaaagaattatcatcccaacagccaagacccaacaggtgctgaactgtgcatcaaccaggaagagttctatccccaagctggccactatcacatatgcttactcttgcttaaaattaataaatcatgtttttgatgga

SEQ ID NO: 269695 - DNA, 447 bp, Homo Sapiens
  misc_feature (385)..(385): n is a, c, g, or t
  misc_feature (398)..(398): n is a, c, g, or t
taacccagctacatgcacacaaaaacccagaagtgaattaaacatgcctggcgctcaaagaatcccttcaaggagaacacagctgcttcaaaaggaagtttttctagaatcactatgtgatttttctgacacataaggtcacctcaaaacccttcctttcacaccctacaaaaacccagcttaattagaaatatggaaataaaaatggtagttatgctgtcaagatttaggagattagtatagatttaaaacccctcaaaatcagaaatacacagtgaaacacatacctcaaaggtatgatgaatattaaactgggggctcgtatcactttaggcataagcacttttccattttgacttttcatattatggccaacttctggacngttgttaataaantgacagttgtccatttagttttaaacgggttggagtgggggtggggtgc

SEQ ID NO: 269696 - DNA, 439 bp, Homo Sapiens
  misc_feature (427)..(427): n is a, c, g, or t
taaagagatagagtctcactatgttgcccagacaggatttgaattcctgggctcaaggtatgcttctgtcttagctcctcagtagctgagaccatgggcacccaccactgtgcccagattcgggctttcttgtaaaaagcggatggatgcttgaaactattttctgaatccctttggctcccaaatgtgaatattctgggaaatatttttatccaaattagctgagtaatcgagtagttaggcacattttgaagactgaggcttgtcctttaaaagaagggcagcccacaaactgacttccttgagccaaaaattgttttaaaaggggaagtacagcccaaaacagtgattttaaaattattcaacaaaaagggttcaaattctgtgaaaatattttaaaggggtttttttctgaggccaatttggngtgaccctgtcc

SEQ ID NO: 269697 - DNA, 465 bp, Homo Sapiens
  misc_feature (35)..(35): n is a, c, g, or t
  misc_feature (85)..(85): n is a, c, g, or t
  misc_feature (104)..(362): n is a, c, g, or t
cggggacccccccggttagggtccgttttaaattncctggttgacaatggttgagtttaccctaaagccccgggatcaatagaanggaaatgtctgggttgcannnnnnnnnnnnnnnnnnnnnnnnnnnnnnnnnnnnnnnnnnnnnnnnnnnnnnnnnnnnnnnnnnnnnnnnnnnnnnnnnnnnnnnnnnnnnnnnnnnnnnnnnnnnnnnnnnnnnnnnnnnnnnnnnnnnnnnnnnnnnnnnnnnnnnnnnnnnnnnnnnnnnnnnnnnnnnnnnnnnnnnnnnnnnnnnnnnnnnnnnnnnnnnnnnnnnnnnnnnnnnnnnnnnnnnnnnnnnnnnnnnnnnnnnnnnnnnnnnnaaaacgttgagttgtgaacactgagagcctctgcccagaatgtaaaagagagaattcttgctgactgtggccgggcatgcatgtcctttcacttccttttttt

SEQ ID NO: 269698 - DNA, 412 bp, Homo Sapiens
  misc_feature (375)..(375): n is a, c, g, or t
ttgatgtacttacatttgtgcatcacaatcaagaggttcccagcttggtggaactttcaaagatgaggcagaaaactaaacaggcaattacaatcttacttttcacgctgacaagtggtacggtggctagcccaaactcccctccctgtcccagctacctcccttatagaccattcacgatcacttaggccaggctgccatgtgacctaagagaagacagggagaacacagcatttcttactcctactaacttgcaacatcattctctcaagttgctctcattgggagggctcccaactgcttcaagctggcccagtggatatttgtatttctaaagtgggggcagggcatgggccatttcccaaaaaaaggganacacatttcaggactttgtggcctttttgtttacccc

SEQ ID NO: 269699 - DNA, 377 bp, Homo Sapiens
  misc_feature (15)..(15): n is a, c, g, or t
  misc_feature (22)..(22): n is a, c, g, or t
gtgggtggcccgtcnccccttnaaaaaaccctaaaagtggtccccccaggcgggacagatgaagtcccttggatccttgtttccctgatcttgtttccccatttgactgaattcctgaacccttcattgtccttcacagtcttgccacttgcctagtgaggcttttccgaacctggaaggagacgtctagaaatcccaactttgctgtgtaaggaccattagctgcaagtcagtggaagtctatagaaagcagtgtgaattccatagtggtcttgacttcttagcaaggatttgggataagtctaaaacttcagacttaaagctttgaagcatgttaactgcatgaaatattaaacatttcgaacttctttaaaaaa

SEQ ID NO: 269700 - DNA, 495 bp, Homo Sapiens
gttgaggttgtgcttcttcaggaagtcattcagcaggccacgctcggacagggtgcgcctcaaggacttctttctgatgagggggaccctgtggtttgcagaaggaagaggaattaggcaaggattctgctgaccgggtgctgtggcagccccagaagggaagggaagctggtctaagagaggaagaaggaaggaaaggagacgccccctcttctgcccaacaatgcaaagaagttaagttgactagtgctggagctgggagccaaacccaggctggactcttaaccagctgatctaagagaggaagatggaaggaagggagaagctcccacttctgccccataatgcaaagaagttaagctgactagggctggagctgggaaccacagtcaggctgggcccgagttttaaccatgtctgcagggctgcctcccaaaaaggcagagagagaggcggaaaagggggatggagacagctgaatagagagggagaaaa

SEQ ID NO: 269701 - DNA, 363 bp, Homo Sapiens
tctataagaagtctcttgaatactctttggagtatgaagtattaattatgtgtcttagttaaaatttgtggttgctgtgataatactgtgtagataggtatgtcagtaatacagatcttctgaattgttcttgcttatacaaaatacaaatataacatcaatatctgtgtctgataatattgtctttattttttaatccttttattacctgattttttgccaaatttctacattaaatacgttattttgaatttaagagacagtgagtaggaattcaaggaaatgcatttgctggaaattaaatacagcatgcacattttgtaactctggctgtatgtatccatggcaggcccttggagcaga

SEQ ID NO: 269702 - DNA, 335 bp, Homo Sapiens
  misc_feature (80)..(80): n is a, c, g, or t
ttcagagaaaagttctaaaatactttaaaaataagaaaaggctttgaaatctatgaaaaatgtttcatttgattattctncccaaatatacaggaactaaatataagattatgtatctttggaacagtataaactgaagaggaggggagagtaaatgacttaccccaagataacagttcaatgtgctgagcactcttctctccctggtatctcttctttagatgtaacaaagctcccaaaactacttgggagagttgtatagtaacgtaggaagtatagctgactttgctagttgtatgggccgccttttttgaaattttgttggataggttaaa

SEQ ID NO: 269703 - DNA, 492 bp, Homo Sapiens
acagaaggtgtcatgaaatcaaggtccaacgttgacatggactttgaagtggaaaatgctgtgctgggaaaagacttcaagctctccatcaccttccggaacaacagccacaaccgttacaccatcacagcttatctctcagccaacatcaccttctacaccggggtcccgaaggcagaattcaagaaggagacgttcgacgtgacgctggagcccttgtccttcaagaaagaggcggtgctgatccaagccggcgagtacatgggtcagctgctggaacaagcgtccctgcacttctttgtcacagctcgcatcaatgagaccagggatgttctggccaagcaaaagtccaccgtgctaaccatccctgaggttcattcattcaagggtccgtgggcattcagggtagtttgggttttgacatggattgtggaacagtttgagttttaccattccttttaaaaggaaaccctggcggaaatgtttggggtt

SEQ ID NO: 269704 - DNA, 490 bp, Homo Sapiens
  misc_feature (36)..(36): n is a, c, g, or t
  misc_feature (402)..(402): n is a, c, g, or t
  misc_feature (444)..(444): n is a, c, g, or t
ctttaattaaaggctaatgcttagcacttcattagnaggtggagagattaaaaactaacttccttgccgaatagcctgggtttggaaaagcatgtttttgaaatatgtgggatctccactctggggccctctgcagtcctgtctgggtcttcacacctaagtcaaagcaagagctatttttgcgttagaatttccttagccaagactacaagaggccaaatgccagggttcatctcagcttcctgtgcattcacatggaaggtcgtctttgaatctgcacgtccagctcgccatacacatgtctcagggagtcactgctcatgctgggctatcagcttccgatgcccagagacccaggggccggcacacttcttcccacttgcacggtgggagttggggccnggattttcacgggaacatcttctttcattgggtcttgttaantccaggggccatccagggggtaacccagacattttcggagggtttt

SEQ ID NO: 269705 - DNA, 367 bp, Homo Sapiens
  misc_feature (298)..(298): n is a, c, g, or t
aacctgattgctctggttaagacttccagtactaaattgaataggagtggtaagaacgggcatccttgtcttgctccagttcttaggcagaatgcttgaaacttttgccagttaccaattatgttgatttacccgccttttccaattctattttatgacaacactaagttattttcaaaaatatttaaactatgttttagtgatagcataatttctaattatttgtataaagtaaattacttggtaaaatgattctcatgggtattttttttaaggtcatggaacaaaagctattaangttttctgccttaaaaagataccatccctgggctgggcacagtgggctcacgcctggtaatccccaagc

SEQ ID NO: 269706 - DNA, 385 bp, Homo Sapiens
  misc_feature (18)..(18): n is a, c, g, or t
  misc_feature (49)..(49): n is a, c, g, or t
  misc_feature (90)..(90): n is a, c, g, or t
  misc_feature (123)..(123): n is a, c, g, or t
  misc_feature (130)..(130): n is a, c, g, or t
  misc_feature (181)..(181): n is a, c, g, or t
tacgttcatgtgttggcntgttaacatttttaagagtcctataagaganaaatgcatcccaatctcgacaaaaatatttttcaagtatcntgtaggtacgtacaactaactaccttgtgaacnaaagtcnctatataattatataatttctgacacttaaaaaagtttattgtgcaaaagnagatatatgttctaataccaaatccacatataaaataattgacttatttaaataatttaagatgctcttttatatatttatattaaaaactttacagagaataaaaaaggcattatacaggctgcttatggtttttgatgtttggatatacaatacatgtatcaaagattgtggaaataaatcaagcaatatattcaattggaa

SEQ ID NO: 269707 - DNA, 448 bp, Homo Sapiens
  misc_feature (431)..(431): n is a, c, g, or t
taaataaagatattcagtgcaaaggtacataggaattttggccagtctgcatatgccttgtgtgactgttcacagttcacacagttgttcgtttaactctttattacctgaattttgcaacattttcttctctctgcattattaagtagtggccttaataaaacccaagtccagacgtgttggttggctcctacacctgtgtcaaggagaacttgacgtctgatacattaatgggccttcagcacttctaagccagaaagccaacatcccagacacaggaattttcacctaagaacttgaaagctctaacaaactgcgaatgattagttaggggttatattcaacatttagtcattattttctaatgttctaaaaagagatactggcttaactaaatgatcttattccacatagggtagggagggttgggngatttggatatatcctt

SEQ ID NO: 269708 - DNA, 420 bp, Homo Sapiens
ctcagggcacctggagatcaggcctggactcaggccctcccgtcggtcattaaggaagaaaaaatgctgggcatcttggtgcagcacaaagtccggagtggcgtctcgggcatcgtgggcatggaggtggatgggctgcccttccacaacacccacgccgagatgatccagaagctggtggacaaaggacaacatttctctggggctttttaacttttattcctaagactctaaaggcgttgatttcaaccctccttcactctggcttcttcaggcaacccacgtggtctcctgtgagaatcttctcgacagttacttatggggacacttgtgaacaattaactgccaggcagagcatgagaacaaacattcccaggccatgtaggataggatactccagactccagtcatcctccccca

SEQ ID NO: 269709 - DNA, 420 bp, Homo Sapiens
tccatgttccgtgtgagcagagtccctaccaacgggcaggtctgcatccggggagaattcagctgcttctggcgaaaaccctgctagtaaaaactggtcttcggtgagccaaggaaaactcgccctggccctgggaaactgcatgcccactttctgggaggggttagtgcaggtgccgtggacaaaggacaacatttctctggggctttttaacttttattcctaagactctaaaggcgttgatttcaaccctccttcactctggcttcttcaggcaacccacgtggtctcctgtgagaatcttctcgacagttacttatggggacacttgtgaacaattaactgccaggcagagcatgagaacaaacattcccaggccatgtaggataggatactccagactccagtcatcctccccca

SEQ ID NO: 269710 - DNA, 111 bp, Homo Sapiens
aaataaaagtcatttaatgtagaatacttttaatttcactttctgtattttaattttgttgaagggctgattgggatttccatgttcttattaaaaatctaacaaatctgt

SEQ ID NO: 269711 - DNA, 417 bp, Homo Sapiens
  misc_feature (65)..(83): n is a, c, g, or t
  misc_feature (113)..(159): n is a, c, g, or t
cataagcgaaacatgattttggaattttcaggatggggaaaagaaacaaaataaattatgggagnnnnnnnnnnnnnnnnnnngagactggctctcattcctctgtcacatgnnnnnnnnnnnnnnnnnnnnnnnnnnnnnnnnnnnnnnnnnnnnnnnaagtgatcctcccacctcagactccagagtagctggggagcacataaaattaaaacatctaaactctcataatgggtcattttgccaaggttctgcaggcaaacttttatttgaagtattcttttttgtgctttgtattgaaagtaaagttagggtagctaagggggactacttcaaccctgaggaacacgaccgagaaaaactgcaaggcatatggatgtttgtcgaagtatcacatgactatttcaagcttataga

SEQ ID NO: 269712 - DNA, 264 bp, Homo Sapiens
aaccctgttgtgtgcgtgtgggggttaggattagtaaggtgaactgttcaggaattctctgcactagctgtgcagaagagcagataactagcgctgctctggcattaatcccaggaaccactagcagtagtgggcgccgccaatctaacatgagcacaggtgcttcatgacaaacattactagcatgttcaactgcaccatgttctggcactgtattttgaatgacattaatttattaaataaattgtatatattcaatatcta

SEQ ID NO: 269713 - DNA, 453 bp, Homo Sapiens
  misc_feature (33)..(33): n is a, c, g, or t
  misc_feature (47)..(47): n is a, c, g, or t
  misc_feature (66)..(66): n is a, c, g, or t
  misc_feature (79)..(79): n is a, c, g, or t
  misc_feature (104)..(104): n is a, c, g, or t
gggaagacacgggggttggggcccgggggaccncatggtcggggagncctacttggccccaccagngtttaattacccncccttcagcaggttacttggggaanggtttacaatcctcccaatatcaacatgagttttattagaatcctttaaatatttaatcccttattaaatctttaaatatcccagctgcccccaaaaagcagatgctgttctgcccaggtcattgactgtgtgagcctcccatatttatttgaaactctccatcttcgagtcaatggaaaggaaagagtattagctctgaattttcatatcgcattcaatcttttaagtcttatatgctctcaggacttaaatctcaacaaatggactttcaatagaaatccttgtagtcactattaaaaaaccagtttgtgagtttttatttccactcaaagcatgacaaaaaggtac

SEQ ID NO: 269714 - DNA, 185 bp, Homo Sapiens
agagggcatgagtcaccatgcccagcctaaacttgggcaagataataaatcacctttttaagtgtcgttggggcacttgtctgggttgtttttctttagggttaccatggccaggcaatggattccttttgagtttctggacagaaggtagtgggtttcatcccaaataagggcactactttacc

SEQ ID NO: 269715 - DNA, 383 bp, Homo Sapiens
  misc_feature (42)..(42): n is a, c, g, or t
  misc_feature (56)..(56): n is a, c, g, or t
  misc_feature (176)..(176): n is a, c, g, or t
cccgggtccaaaaagggaaaccccaacctttaccctttgcanggcagggtattaanacctaaagccaattttaataaaattttataaatgaattcatcaaatatcaatcagtttaatcataaggtacggatttaagaaatgccttgttaaccttttactattttctactgagaagncagataaattctctgaaaaaatgatgtccagatccctgggcttgcataaatgtgttttttaatgttcaatttatagaaagactgaataataccctttaaatttcagcccacttggtcacagacaatatttcttttgtaaaatcaatctgctacaaatctacaattccgtcaaactttcagttttgtcctacgattttaccttagaac

SEQ ID NO: 269716 - DNA, 536 bp, Homo Sapiens
aaagttaaagggtgcagcaaaccaacagggcacgtgtatacccaatgtaaacaaacctgcatgttgtgcacatgtaccctagaacttaaagtatattaaaaaaatatatatatttatttctactgaacacaatgtctatatattagatgacctagaactggtagggggttctaatcccaggggattgttgataaactcagacaacttctataatttttacattgttactcttaaagtcttgtcattgattgtctcaatattggaaaataacatgtcaatattcagtgtaataaactggaagaaaaaatgggccaatatcccattcaattaaagacattaaaaagagtgtgtatgtattacttctgctcacatcttaatgttcaacatgtcgtcaccaagccagatagaaccatatactggggaatgtaatgtttatctgagaaaccaaatgcctaaatacaaattttagtagtacgaagtaagaggaaataaatatgggggattttctagtcttctctattatatataaattgcaa

SEQ ID NO: 269717 - DNA, 452 bp, Homo Sapiens
accttctggcttactttcatgattattatacagggatatagacatggatgatgcaagacaagggcaaaaagatctggcttgattgaatgtagtctgtgtctccccttcctcccaaaaacttaagctgtagagattggtatgctttcagttaatatttaaatgcctcccctccaaaaagttttctatctttgacaaatgtcactggttttcctctctgttgccaagatctgctattcattttatgttttactattttagaatctatttttttaatcccatcaaagctaccaaccattgtggttctatgtatatttctcttccttctctactgtctatctatctcagtgagacagatagcatgataagcagcaggagaaatccttgctgcatataagtgcccttactgggatgctttttaaaccaccactgccggccgggcttggtggctcacg

SEQ ID NO: 269718 - DNA, 369 bp, Homo Sapiens
taagtatttcaacacaccaacaatggactctttgggtgcagtttaactttagctctcttctgttacaaaagttttgggtgggctacaaaataaggagttgcttaagaaaacctcacatcctccaagcagcaccacatcaacaatgaatttcgtctcactggaagctcactttgccctctctcccctaactcctcaggcccccaaagcagcccatcacagctccttagtagagggataaagccagcatttgtaaaagggagccctatttcccagagatatattaccttggaaaggcttgggggtctccacatcaaagttggtgggaagcacagtgactccaagaaagtccagccgtttccctactctctc

SEQ ID NO: 269719 - DNA, 389 bp, Homo Sapiens
  misc_feature (187)..(187): n is a, c, g, or t
  misc_feature (359)..(359): n is a, c, g, or t
ctataagattccctcattattaaatcatgcaatttttcaagatggaatcaacctttgatttaatcctaagcctgatattctcatttgttagaagaacaaccctacatgcctagagagagaggaggaaatatacccacgacccacacagcccagttagtatcccagttggtgctggactcccagccanggtgtcctgcctcatggtagttaaatgatatataggaaaggtaaatttttaaagaaatatttattaatatattcctataaaacattttaaaggtaaccacataaaaatggttaatttttccattccaaagtaaatgctaagcatgtttattaatgaagcagtacttcataantagtatatgacattctgaagttaattaagc

SEQ ID NO: 269720 - DNA, 224 bp, Homo Sapiens
  misc_feature (127)..(130): n is a, c, g, or t
  misc_feature (133)..(133): n is a, c, g, or t
  misc_feature (137)..(137): n is a, c, g, or t
  misc_feature (170)..(170): n is a, c, g, or t
  misc_feature (178)..(179): n is a, c, g, or t
attcagaattcagagacctctactaggaatttcaaaataggctttgcatatgtttgttaagacaaacatatattcatttgcataaaagtagcattgatttccaagagattcaccaatgtgttaaaannnnaanacantaagtagaatgctatgttctaaagctgtatctntgcctcanngagaggctttagaagcagtgcttttatgtgatcagggtaatttct

SEQ ID NO: 269721 - DNA, 966 bp, Homo Sapiens
  misc_feature (38)..(38): n is a, c, g, or t
  misc_feature (158)..(158): n is a, c, g, or t
ggagccgcaacttgaagccagacaggcggccacaccgnccgcgactactcgctgtcaccctcccagatgaatggccatcagagggggcaagcccaaatcacacattcccccaccgtgagtcaggtgacggagaggagtcaggacagactgcaggactnggatgcagacggctcgattgtctcatacctgcaagatgctgcacaaggttcctggcaagaggaggtcacgcaaggtccacactcattccagggaacaagtaccatgactgaagggctagagcctgcttggatctcaggagtacgagaaggtcctggtgtctgtaagtgagcacacgtggacagaacagcccgaggtaagaagctcccaggccgacagggaccggaggcagcaaggccaagaagagcaggtgcaggaggccaagaacaccttcacccaagtggtgcaagggaatgagtttcagaatattccaggggaagcaggtgacagaggagcaattcacggatgaaccagggcaacattgtcaccaagaagatcattcgcaaggtggttcgacagatagacttgtccagcgccgatgccgcccaggagcacgaggaggtgactgtagaggggcccctggaggatcccagtgagctggaggtcgatattgattactttatgaaacactccaaggatcacacctcgacacccaacccctgaaccccacacactctgccatgcacacaggaggagagctggacctgagggccaccgcagcggtgcacacattcctctgggctgacggcatgacctctgtaagggactcctgctagtcccctcttggcatgaatgactgactgtagacgcatgacctccaggcttcaatccttgcctcttgcaattgacagctgatctgttcgggaaccagggacacaaaaggcagcaaggaagcggggagagagagggataggaaaacaagcgcaggag

SEQ ID NO: 269722 - DNA, 409 bp, Homo Sapiens
ctggacgttgcacttttgcattctaagtgactccttctctctttgtgtctcccaggatcacacctcgacacccaacccctgaaccccacacactctgccatgcacacaggaggagagctggacctgagggccaccgcagcggtgcacacattcctctgggctgacggcatgacctctgtaagggactcctgctagtcccctcttggcatgaatgactgactgtagacgcatgacctccaaggcttcaatcctgcctcttgcaatgacagctgatctgtcggaaccaaggacacaaaagcagcaagaagcggggaagaagagagggataagaaaacaagcgcaggaagaacctgcgaaacgcaaaaagtgaatgagggcttttttgtggctggggatgggttttggtttt

SEQ ID NO: 269723 - DNA, 442 bp, Homo Sapiens
  misc_feature (371)..(371): n is a, c, g, or t
  misc_feature (383)..(383): n is a, c, g, or t
  misc_feature (395)..(395): n is a, c, g, or t
  misc_feature (411)..(411): n is a, c, g, or t
  misc_feature (431)..(431): n is a, c, g, or t
cccccgtcactgtgcagacagcacagaacgtagaacgtgtcggcgttgcaggaagttctgcacagcactgtgctaaaacaaaaggcaggttgtgttactctttcagcgggaatcccctcgtggctggttctctcgctgagaatgcaaggcaaaagcaaagtctttactctggtctttgaggttcctgggtgatcccacctccccacaagtacaggtcactgtcccataccttcatgctgctccagccaagtggcccccacacaccaagcatacgcttaggaacatccttcccagatgggcagcatggcttcagtctttatctccttcagctctctgctttttctggccaccttccctagggagctttctcnaggggcagctanggtacagtgttncaaggcttgccctgtnaatttcccccaacccccganccgttttgttc

SEQ ID NO: 269724 - DNA, 445 bp, Homo Sapiens
aactgggcagccagctagaatactttgtggaaattaagcgaggttttccatttcagccccatggtgcatggtggtggccgatgaatgtgtcagtctgctcagagaaaggacaaaaaggaaattattttcaaaaactgtgttcactgtttgggtgtgtgtatggctctgcatgtgtgtgtttttgtctctgtataggtagaggtattcacatcttactccgactgtaaggttgtcttacttcatctctgcccccaccacagttgccattttgtaatgtccttccaacatggagaagacacgagctctctccagttggcatcatttgtcttttttgttgattgcctcattctccagtgaactccatctggccaattgattcagaatcaggcaagatccctgccctttggcacatccactgaaaggccgaaacagcaagtccgagtga

SEQ ID NO: 269725 - DNA, 553 bp, Homo Sapiens
  misc_feature (357)..(357): n is a, c, g, or t
  misc_feature (413)..(413): n is a, c, g, or t
  misc_feature (432)..(432): n is a, c, g, or t
  misc_feature (489)..(489): n is a, c, g, or t
  misc_feature (519)..(519): n is a, c, g, or t
  misc_feature (535)..(535): n is a, c, g, or t
aagagattaaaattgtgggctctagaatcaaacctgattcttccagttactagtaacattgccatttctcatgtgtgaaatgggaacagtgacctcacagggtcattgtgagaattaaattcacagtacctagaacagtgccaggtatggagtgagtcccccgtggttgttagctttggtgagtgtcaaccactgccctggcctctcccaccttgagcaccagcactgcttacagctgccactccccagggcccctccttccccactgctcttcttcatcttcagtgaaccacaggcaatgcgagggcaacactcaggccctcgatgtgttccagggtgccagggcaggcattcttnacttgttcgtgtcttcacttgattccggggttacagcccttttgaggtggggggcntgtttacattctttcagcntttacaggcattgaaggcatccaaggtttaattaacttgtttcatggttttcaggancattaggatttgtttttcagacctggtggncttttggggttcagtnttttttgtagttatggtt

SEQ ID NO: 269726 - DNA, 479 bp, Homo Sapiens
  misc_feature (16)..(16): n is a, c, g, or t
  misc_feature (34)..(34): n is a, c, g, or t
  misc_feature (62)..(62): n is a, c, g, or t
  misc_feature (69)..(69): n is a, c, g, or t
  misc_feature (78)..(78): n is a, c, g, or t
  misc_feature (305)..(305): n is a, c, g, or t
actggggactgtgacncctgggagattaaaaggnacagggcattggatggaaaggtaaaggnccccagnagaaagagncctttctgcctgtgtccccctcaaggccttgcccctcgaatttctggcagggcccctgggctccccctgaaaccctgtccatatttatggacccagacactggggcagcatcaggcacagtctgtctgggtgcaacttcttcagctgtctggccgcaccttaaaaactatttattcacccaaaagccccaggcatttcagaaggtggcactcaggtcaccctgaaanaaccccaggggcttgcaattctggaaaatattttgactagctgcttggctggatgtacaaagaaataggcattattttattgctgtaatattgtatgatactttaactgtacaataattgttgtcacttactgtaaatgtactatggttttattaacaataaacactcattaac

SEQ ID NO: 269727 - DNA, 388 bp, Homo Sapiens
  misc_feature (165)..(165): n is a, c, g, or t
  misc_feature (344)..(344): n is a, c, g, or t
  misc_feature (349)..(349): n is a, c, g, or t
  misc_feature (361)..(361): n is a, c, g, or t
ttcagaattaacacaatagcccatttcaacaagctgtatatttgagaacagagtgacagttattaacatccagtaggaaattaagagttgttgttcacaaataataaattactagattctgacaaagactaatggggattaagtaagcgtgactcaatataacanatttaagcctaagcatcttctaggccctggaaatgaacaaggtattgctgccagttaaagtcagttgtgtcttacaacctgctagctgtcttgctgtaaaaactgtaacgtaaggcccttgaaataggatgccgtcatcagccccagcccccaaggcattcatctatttaaacacatgncaggnggtgggtggagnggggttcagcagctattcctgtgggag

SEQ ID NO: 269728 - DNA, 875 bp, Homo Sapiens
taaatagtaaaaataaaattaaagctgaaaactgcaacttgtaaatgtggtaaagagttagtttgagttactatcatgtcaaacgtgaaaatgctgtattagtcacagagataattctagctttgagcttaagaattttgagcaggtggtatgtttgggagactgctgagtcaacccaatagttgttgattggcaggagttggaagtgtgtgatctgtgggcacattagcctatgtgcatgcagcatctaagtaatgatgtcgtttgaatcacagtatacgctccatcgctgtccatctcagctgggatctccattctctcagggcttgctgcccaaaagcctttttgtgttttgttttgtatcattatgaagtcatgcgtttaatcacattcgaggtggtttcagtgcttcgcagatgtccttgatgctcatattgttccctattttgcccagtgggaacccctaaatcaagttggcctccaaatcaaagcttttaaaccctattggtaaagaatggaaggtggagaagctccctgaagtaagcaaagactttcctcttagtcgagccaagttaagaatgttcttatgttgcccagtgtgtttctgatctgatgcaagcaagaaacactgggcttctagaaccaggcaacttgggaactagactcccaagctggactatggctctactttcaggccacatggctaaagaaggtttcagaaagaagtggggacagagcagaactttcaccttcatatatttgtatgatcctaatgaatgcataaaatgttaagttgatggtgatgaaatgtaaatactgtttttaacaactatgatttggaaaataaatcaatgctataactatgttgataaaag

SEQ ID NO: 269729 - DNA, 898 bp, Homo Sapiens
  misc_feature (30)..(30): n is a, c, g, or t
  misc_feature (63)..(268): n is a, c, g, or t
aggtcttgctctgtcgccagccaggctgangtgtaatggcgtaatcatagcagctcaccacannnnnnnnnnnnnnnnnnnnnnnnnnnnnnnnnnnnnnnnnnnnnnnnnnnnnnnnnnnnnnnnnnnnnnnnnnnnnnnnnnnnnnnnnnnnnnnnnnnnnnnnnnnnnnnnnnnnnnnnnnnnnnnnnnnnnnnnnnnnnnnnnnnnnnnnnnnnnnnnnnnnnnnnnnnnnnnnnnnnnnnnnnnnnnnnnnnnnnnnnnnnnngtgtgtgccacatgtccggccaggaaaattattttctatcttaaagaaacatagttacattttagaatgtcaattcagttaaatctttctcagtttttacctttagatggctcctggaaaggccagcgttccttttcccctctctgaattgaaagcacttgaccccatgctgcccctgcttccaggcctgtctcagttgtcatatattgtgagtccctggcaccattactgttttctaagccagtcttctaggtcttactttcaggatgctgcttcatggcatgaggatatagtttacagtgttgtagccttttctgtctttaaagctttgttctttaaaaatactttttaaaaagaaatctactggttagatttattgtctcacaaaaatgtttttagagattatttttttcacaaatgttttctttctcatgctgatgatcaactgatttttgtctacaggtgttagcttctcacagtattttttcattttagagtctatttaccaaatgaccatttttagtgttaaaaggtactgaggaattgaggtatgtaaatcaggtgacataaacatgaaaattatgtgcctaaatatttttgtaatggtgtaaaataaatactttttcctga

SEQ ID NO: 269730 - DNA, 656 bp, Homo Sapiens
  misc_feature (494)..(557): n is a, c, g, or t
atgtggttttatgaaatctatgttgccagttgatttttctgccccctgttactgtagaacaggcgttgacaaactgtagcataaatggttgcttgattttgtaaacaaagttttactacaatacagacatatccatttgtttacagattgtctgtggttgccctggcactataaggacagagtttagttgttacaacagagactatatggtccataaagcctaaactatttattatttagccctttaagaaaaagtttgccaactcctactataggcaaactaaacttcaaattgtatttagaaataaacttgccagaaccacagttgttttccaaatagggcttctaaagagaaaaccaggaaagtcaagacctgtgtcataatgctgacctagcaagtaaatatttgcaatatgcatagtggtatgattgattactaatacaaggttactgaaatggaaagctgtaatggcagtccagcttctttatctttnnnnnnnnnnnnnnnnnnnnnnnnnnnnnnnnnnnnnnnnnnnnnnnnnnnnnnnnnnnnnnnngctttctcactgggtgtaggcgttcattcagtggtaggatgttattactattattggattctctaaaggttttataggctgggcgtggtagctcacaca

SEQ ID NO: 269731 - DNA, 429 bp, Homo Sapiens
  misc_feature (369)..(369): n is a, c, g, or t
gagtaaaaaaacagccaagcatctttccagtagccccattgaaattgtgaatccgtcctggtctccctaaggactgcacacattgatattcaaggttggtggtcattagatatggaacagaactgaaataaccatggtagaactgaatgtgtaatgttggctttattctagctggtactacatggcacacagtttcaaaacataatttcacctactggaaagctcagacctgtaaaacagagcatgggaactgctggtctaaatgcagttgttcctgctcaaagagacctctggccaaactggcaagcagttaaagttttctttcagggccttcctctctatggcctcaacttccttcctcttctcttncttccagcaacttccccttttcattcattcctttcccggggggacttgggctttcagtgg

SEQ ID NO: 269732 - DNA, 672 bp, Homo Sapiens
  misc_feature (15)..(15): n is a, c, g, or t
  misc_feature (49)..(49): n is a, c, g, or t
  misc_feature (61)..(61): n is a, c, g, or t
  misc_feature (69)..(69): n is a, c, g, or t
  misc_feature (90)..(90): n is a, c, g, or t
  misc_feature (150)..(150): n is a, c, g, or t
gtcccggaatcctgnacagcacatggcccctagtgcaggccctaaaggnctaacagcgggncacaagangccaactccactgaacactancctaacaccctcaactctaactttaacatgaactgccaatagtttagctcttggagttgnaaaacagttgtcagttacaataagcaggatcacaaaactccattgtcaaccatagactacacttcattcctgagacgtaaactggaaaactgaaaagattaagtaagtgctaagtatattccttagtttttaatgctaaaaatcggtgtgacctgtgaaatttcctggctctaaactggagtatttcagatctgaagagacagtagtgtatggcattccttccctcaacccaagaatgttattttcttcctaaggaacattatcttgaaaatatttccacataaaacactctccagccaacttaataggccatgcaaatttgaacagaaaaaggcgacatataaactgtctacatttgttcaaataaaattatgtagaagaaaaaaaatcaattaaatatgtacatgacacaaattactccttaaacataattgcttatgttaaattaaatgatgtcagtattattccagtgtttagctctgggtataggaaatgctgtagctaaagtcaccataaaaataa

SEQ ID NO: 269733 - DNA, 563 bp, Homo Sapiens
  misc_feature (467)..(467): n is a, c, g, or t
  misc_feature (475)..(475): n is a, c, g, or t
  misc_feature (519)..(519): n is a, c, g, or t
  misc_feature (551)..(551): n is a, c, g, or t
aaggatggcccttagccagttaacagctttatagcccatcctcattgcttactgccacccctcagctggggtccaaggcagtactattcagtttattcaccagacctgcctccagacatctacttctttcaaaaattagtgttttccatcaaggagcatgttccagagcatttcccagagatgtcccaaagaacactgtccggtgctgtggcgtacagtggcaacagcattagactaagtggaacatcccagcaggctgctttagaatccgctcatttgactagatacgatgtaattggctgtctttaaaaaacgcgcacacacacacaatctgataaggcatatctcatgcccatttcaatatggaatgtttcttcgctttgctgaatttaagcccgtattttaaggttttgtggttcctcggccacaatgggtgatgtcactgataggacgaagctgagtttccnagggtttngggctgtgcaaggagtaaacactaggagcttgagttgttatccngctgggcaacacgggaagtcttttgaaggatntaatgtaaaaag

SEQ ID NO: 269734 - DNA, 729 bp, Homo Sapiens
  misc_feature (233)..(233): n is a, c, g, or t
gttgaaaagagcaggcaaaagaatcctcgaagcttatgtatccagccacagacagctcccgatgcgctgccccctgagaaaacacttgaattgacgcaatataaaacaaaatgtgaaaaccaaagtggatttatcctgcagctcaagcagcttcttgcctgtggtaataccaagtttgaggcattgacagttgtgattcagcacctgctgtctgagcgggaggaagcactganacaacacaaaaccctatctcaagaacttgttaacctccggggagagctagtcactgcttcaaccacctgtgagaaattagaaaaagccaggaatgagttacaaacagtgtatgaagcattcgtccagcagcaccaggctgaaaaaacagaacgagagaatcggcttaaagagttttacaccagggagtatgaaaagcttcgggacacttacattgaagaagcagagaagtacaaaatgcaattgcaagagcagtttgacaacttaaaactgcgcatgaaacctctaagttggaaattgaagctagccactcagagaaacttgaattgctaaagaaggcctatgaagcctccctttcagaaattaagaaaggccatgaaatagaaaagaaatcgcttgaagatttactttctgagaagcaggaatcgctagagaagcaaatcaatgatctgaagagtgaaaatgatgctttaaatgaaaaattgaaatcagaagaac

SEQ ID NO: 269735 - DNA, 142 bp, Homo Sapiens
aaaactaaaggagaaaagccaacctgaaataatttaaactttatatgaacatttcgataagagtttgtggattttttctgtagataatatatttgatccagaactcaagtgcatggaaacatgattttgatttttaaaatct

SEQ ID NO: 269736 - DNA, 431 bp, Homo Sapiens
  misc_feature (397)..(397): n is a, c, g, or t
actctctggctaagaatcatagagccactgatagagcaatagcactgattattagttatcaaaggctatgtgatttttaggtcaattctcaggtcaactgggtcaattgtaagttcaatatttattttattaagggggaaataagcaaatattaacaaatcaataaataccaactgacagagtaaatggaaggtagaatgaaaaaattaatggatagaaaatctcaaattttgtcttctgctcttccttgtaatcctcagaacagtcactccctggcactgattctgccatgaccacttggctctatgggttgttttaagggaacctacaggacaaatgtgaggtaatcgtccaaagttcttgtcttggtttgggccatttaagagtggtcaatgcnttattaataagtagaaaatataattaaagaagac

SEQ ID NO: 269737 - DNA, 822 bp, Homo Sapiens
  misc_feature (23)..(23): n is a, c, g, or t
  misc_feature (27)..(27): n is a, c, g, or t
  misc_feature (167)..(167): n is a, c, g, or t
  misc_feature (224)..(232): n is a, c, g, or t
  misc_feature (465)..(465): n is a, c, g, or t
  misc_feature (480)..(480): n is a, c, g, or t
  misc_feature (489)..(489): n is a, c, g, or t
  misc_feature (525)..(527): n is a, c, g, or t
  misc_feature (530)..(530): n is a, c, g, or t
  misc_feature (532)..(532): n is a, c, g, or t
  misc_feature (538)..(538): n is a, c, g, or t
  misc_feature (540)..(541): n is a, c, g, or t
  misc_feature (543)..(546): n is a, c, g, or t
  misc_feature (552)..(555): n is a, c, g, or t
  misc_feature (557)..(557): n is a, c, g, or t
  misc_feature (562)..(562): n is a, c, g, or t
  misc_feature (564)..(565): n is a, c, g, or t
  misc_feature (575)..(575): n is a, c, g, or t
  misc_feature (578)..(578): n is a, c, g, or t
  misc_feature (582)..(583): n is a, c, g, or t
  misc_feature (589)..(589): n is a, c, g, or t
  misc_feature (595)..(595): n is a, c, g, or t
  misc_feature (600)..(601): n is a, c, g, or t
  misc_feature (604)..(607): n is a, c, g, or t
  misc_feature (613)..(614): n is a, c, g, or t
  misc_feature (619)..(619): n is a, c, g, or t
  misc_feature (627)..(629): n is a, c, g, or t
  misc_feature (631)..(631): n is a, c, g, or t
  misc_feature (634)..(634): n is a, c, g, or t
  misc_feature (637)..(637): n is a, c, g, or t
  misc_feature (641)..(641): n is a, c, g, or t
  misc_feature (644)..(644): n is a, c, g, or t
  misc_feature (646)..(646): n is a, c, g, or t
  misc_feature (649)..(650): n is a, c, g, or t
  misc_feature (657)..(657): n is a, c, g, or t
  misc_feature (661)..(661): n is a, c, g, or t
  misc_feature (670)..(670): n is a, c, g, or t
  misc_feature (673)..(673): n is a, c, g, or t
  misc_feature (705)..(705): n is a, c, g, or t
  misc_feature (708)..(708): n is a, c, g, or t
ccaaaaaagtccccgttcccccnaccnagcccctggcctagggggctgtcctcaaccaaccgtaataccctgccccgccccagcccgctcccccccaaataacaaccagaggaagagaaaaaggtgcccatttaccgatgccggccttgcgggtgtccaaaccgaancgggatggggggggctcggcaactccctgggggcctggcgaggaggcgggcttcccnnnnnnnnnacacgggaccgcttacctggagcccccaagcttacctgagcacgcgcacagaccccacacccaccaccacggggtcactaaagctacagggaggggaagtggggggttctagggagccaggagagggagaggaaccacatctcctgtaccacctggagacaggcagaggacgtggtagaccccaaagaaaatctcaaggaggcctttagagtgggggagacgaggattatcantccaaactgagcgcntggaaagcncttggactatctcgtgtgaatttacaaagaaggcgnnnccncncgttcntnnannnnctgggnnnngnggtcngnngccgttggtngcntgcnnccgtgnccgccngtttnnacnnnnttgtgnngtggntgttctgnnntnganctnaaantancnaannccccccnccanctgcgtctnaangaggctggcacacaggggtccaggagacggtnctncccgtgctctgatggcagccgcttggcccctgaacccacgggaggggagtggggaaaggcatttaaggaccaggatcaaagtcaagcgaaggaaccccgctctgggttcagagt

SEQ ID NO: 269738 - DNA, 404 bp, Homo Sapiens
  misc_feature (11)..(11): n is a, c, g, or t
taggccaccanggtatttgtggccaggtatttccacaccgatgttttccgtcctacactttttcatgtccatattttcccatggaagtcccacactcgaagcaagggcagaaggggagaccctctgagatacaactggtagtttagcataatgatgagttgtgtatgtttttaatctgtagggaagaaataccaaaatctcataaagctggctactgggatgggactgggaacttggagggaacaggatgaaagtgacagagacttgggcacgagggacactgtaaacagtaggagcactggctacttggaggattattcagttacaaaaggggccctgtggttggcatcggaaggccaagcccactcttgcctttactttgtgatgtattacattaggcagca

SEQ ID NO: 269739 - DNA, 484 bp, Homo Sapiens
  misc_feature (30)..(30): n is a, c, g, or t
  misc_feature (61)..(61): n is a, c, g, or t
  misc_feature (75)..(75): n is a, c, g, or t
  misc_feature (118)..(118): n is a, c, g, or t
  misc_feature (169)..(169): n is a, c, g, or t
aaaaggggctaatggggttccctggagatnagaagtctggggtggccatgggcagggcaanagcaccgtggaganacccgcaaccctgctccagctggtcctgcaattgccacagggnctattgcctctcctgccacccagctcctgagagtgaatcctgacacgggtnattgggacgtgtacttcctcttgactctggtctcaggactgaagctcacaggaagcctgagaaaacagacaagcgggagctttctagccccttcccagctctcccctgctctaaagcctagaaaaagcccctctcaggctactggtcagaggccctggatgagggcagtgggggcagaaggggtctggatcagccttgctgccaaccaacacaacacacgtggaagcggtgatgcttagcccacgaggagatgggagactgcagtgctgcttgaggtgttttataaaaaacagaaagccaaagccccggggccgg

SEQ ID NO: 269740 - DNA, 476 bp, Homo Sapiens
agagaaagctggattgccagagaccactggctctctgggtggcttggatccaaagtcagaggagaggcagctggttgtggctcggtgatatggtgacccccttccctctgaccacaggcaggtgagcacagtcctgctttagccggggtccctcatggtggtctggtcctatactcttcctgtagtgcttggttagagtcgggcgggggttggctgcacatttatgcagtggccttttgacccttcagggtggtggtagtcttcaccttgagcttagcctgtgtttgatgagcacattgcagaccattaaattcacaataccatttcattcttaactccccactacctcttattttttaaccacgacattgtgggaaatgtttgtcactccaaaactgtggaaatttgccaatctaaaattgtagcagctttggggaaattacttttataaaattacttttataaactccctggaa

SEQ ID NO: 269741 - DNA, 671 bp, Homo Sapiens
  misc_feature (218)..(218): n is a, c, g, or t
  misc_feature (227)..(227): n is a, c, g, or t
ttttggctcaagcacaataatgctgtcactgagacagtgactgagcactcaatgtccaagactaaatcacatcaccacgactaagtaggcactatgtcctgggatgagtcttttaaactctggccatcaggttccttacttgttaaataagtaggttggcctaaaaggtttctaagacctctcatgatctaggtaaaatccagggtttcaggtcagtntccctggtngcagtgcaagaaagccttgctgacacacccttggcctgaagcagttgagcacatgagactgtgtgacaacacttcagagaaaaacagagatctgttcctccaactcagattgatttaacatccttgcttctccttttccttcctggctttacatatttgtagggtttttactccttctccagagcctactattttcctaagagttagtagcaaccataggatccacaagaaatgaaattattcatcaacaataactttggcgctgcaaaagactgagtcaaaggttaaatcagtcacacagatatccaaggccaagttgaagatcacaagtatatcccatttagagatttgcatacttagagattaagcccatgttcattaattatttagttaattcaaaagccattaataaatccacgccgaccctatgcagtctcaaaaaaa

SEQ ID NO: 269742 - DNA, 443 bp, Homo Sapiens
  misc_feature (18)..(18): n is a, c, g, or t
  misc_feature (33)..(33): n is a, c, g, or t
  misc_feature (50)..(50): n is a, c, g, or t
  misc_feature (80)..(80): n is a, c, g, or t
  misc_feature (87)..(87): n is a, c, g, or t
  misc_feature (116)..(116): n is a, c, g, or t
  misc_feature (129)..(129): n is a, c, g, or t
aacgttcccgtgctgtgntcctgaaaataatancaattttgaggtcccantgcccagaacccatgtaagagcggaagccnactacantccttgggaccccgggtcccggccccggntcctgcagtaccnggggacagtgttctctgcagccctcagtttccctcatctgtaatggaaggggtttcaacaacatcatctctgaccatttctcccaggctctgacattctgagatacacctaaatgtagctgatggcacaggatttgaaattgggagacctgtgttcaagcctgtatctcacctcttagtgacttggtgactgtgagtgaatcactttaaccccccaaagccccagttcccacatctctcaaatggggacacttgaaatttcctcatgaatattgaatgggttatagaagatgacatggcataaatgtgatttaa

SEQ ID NO: 269743 - DNA, 240 bp, Homo Sapiens
  misc_feature (112)..(112): n is a, c, g, or t
  misc_feature (133)..(133): n is a, c, g, or t
  misc_feature (203)..(203): n is a, c, g, or t
ttttggagcttcacatcagatttaaactctcacatacaaaaccttggcttccctgacaaggcagatcttctaaactcaatgtgagaaaacgttatctaactctagtgtaggngtctaatgttggtaaaaaganttccattgcacagttcttgggagcaagacagtctctggacgacttaatattcctttaatacatttttggngtagcattctcctcataaagaaggatacattaaaaaa

SEQ ID NO: 269744 - DNA, 302 bp, Homo Sapiens
  misc_feature (283)..(283): n is a, c, g, or t
gtatgagccaccagggccagcctaaaatgtacttttcaatgctttgttagtaatacgggaatccagataatataggatttaaggaattaagatcaaacagaccaggttccagtttctgctccatctctcttagcagttttatgaccttgaacgcaccctgtaagtgtccctaaggcaccagttctctcatctgtgaaatgaggaattatcacaactcccactttagagtttttgtgaaggttaaattaggacaatacatggccaaatgtttaacataaaggtncatgttccaataaatgtta

SEQ ID NO: 269745 - DNA, 485 bp, Homo Sapiens
ctagtggaacccaaaaagtgttaattggaagccttacgccgtgggagatgtggagaaaatggctctggtgaaaactggcaaagcttcatgaaacagttgactggagtcagaaacaggctgccccagtgttacatcaaatatatcccaagatatctattcctgtggggaaatagtagaacacttggaggaaagcactgcctttcgctatctggcccagtactattttaagtgcaaactgtgggatgaagcttcaacttgtgcacaaaagtgttgtgcatttaatgatacccgggaagaaggtaaggccttactccggcaaatcctacagcttcggaaccaaggcgagactcctaccaccgaggtgcctgctccctttttcctacctgcttcactctctgctaacaatacccccacacgcagagtttctccactcaacttgtcttctgtcacgccatagttggctactctcaaaaccagcacattgt

SEQ ID NO: 269746 - DNA, 134 bp, Homo Sapiens
ttatgcaaacggttgtgcctattctgctaaaaacagaatgcctggatcaaagggaattaatatttctaatcataatgcatgttgctagatagatatttagaaagagtatgttagccaggcacggtggctcacac

SEQ ID NO: 269747 - DNA, 486 bp, Homo Sapiens
  misc_feature (30)..(30): n is a, c, g, or t
  misc_feature (39)..(39): n is a, c, g, or t
aaattcctgtcatgcctgcaaagattgagnggacttttnccctctccccagcagtaatgaagcaccccctctctttccctgctcctacggtactgtcccagaagaggctgagtagagagcgaagactttcattcactgccctgcagtaatggggccaccatcaccactacccccatattatcagtaaaggtcatgtggggagaagtagcaagggactcaccacttgtcccagccaagatggtaacagtggaagcctagtacagagtcagaattccttcccctacccagcagctatgaggagccccttcatcccttgggtgtcaacagaagtcaaatgggtaacttagactctaccataagtggccatagtgaaaaaaacatctaaaacataaagtttaagtaagatccagaatctcataacataatactcaaactgtccatgttttagttgcaaatcacttgtctaacaaaatctcaacttttctg

SEQ ID NO: 269748 - DNA, 484 bp, Homo Sapiens
  misc_feature (44)..(44): n is a, c, g, or t
  misc_feature (49)..(49): n is a, c, g, or t
  misc_feature (55)..(55): n is a, c, g, or t
  misc_feature (72)..(72): n is a, c, g, or t
  misc_feature (140)..(140): n is a, c, g, or t
  misc_feature (150)..(150): n is a, c, g, or t
cgccagcctagcccccgggcctcctcctactcctgaaaatgggncgggnacctcncctgatcctagaatttncctagggccataaataggggccaagaaaaccttaggaaataatggggggtagggaagagatgggaaanggagcatgangatcccagcttcgttattcccctacttgagaaaaataaggcccccaaagattaaacaacttgccccaaggatattgccttgttagtgtcagaactgaaaccagaaaccaaatgatcatatccctagacttttagtctgctttctcttccataaaatgaaacttataatgtttctaatccattgctcagacaggtagacatgaatattaattgataatgactattaattgatctggaaaatacttgtttggggatcaataatatgtttgggctattatctaatgctgtgtagaaatattaaaacccctcttattttgaaataaaaaagataccca

SEQ ID NO: 269749 - DNA, 372 bp, Homo Sapiens
  misc_feature (331)..(331): n is a, c, g, or t
  misc_feature (350)..(350): n is a, c, g, or t
  misc_feature (359)..(359): n is a, c, g, or t
attagcctcccggcccagtgttttgttttgaagtgtgctttgtctgatattaacatagccactccagcttaatttgattagtgttggcatgttttatctttctctttatgtcattttatttcaattgtctttcaggtagacagaatataattagggtctaaaatagattctattagtgggggcatagtgggcatgtgcctgtaggtccgggggtactcaggagggatgagggtggggacggaacacctgacaaaaacaacccaactcaaaaatgaggcaaaggaacttccacaggacatttttccaaaggaggttattacaaatgacccanaaaaacctggaaaggtggntcacggtgnctttttgggaatt

SEQ ID NO: 269750 - DNA, 457 bp, Homo Sapiens
atggccccagaaaggcggccaccaaaattaccctggaaaaccctgactacccagcgggacttcttttccccaaggaagcccaagccaaatggcatctttaagggctcccacagctgaaaatgcagaatacctaagggtcgcgcccacaaagcagtgaatttattggagcatgacccacggaggatagtatgagccctaaaaatccagactctttcgataccccaggaccaagccacagcaggtcctccatcccaacagccatgcccgcattagctcttagacccacagactggttttgcaacgtttacaccgactagccaggaagtacttccacctcgggcacattttgggaagttgcattcctttgtcttcaaactgtgaagcatttacagaaacgcatccagcaagaatattgtccctttgagcagaaatttatctttcaaagaggtatatttaa

SEQ ID NO: 269751 - DNA, 432 bp, Homo Sapiens
  misc_feature (45)..(45): n is a, c, g, or t
cctcagacctttctcgcttctgagcttggtggcctgttccctccnatctctccgaaaaactgtcgcctgtccctttcactccaaaccctctggccttctgccttgagctgggactgctttctgtctgtccggcctgcacccagcccctgcccacaaaaccccagggacagcggtctccccagcctgccctgctcaggccttgcccccaaacctgtactgtcccggaggaggttgggaggtggaggcccagcatcccgcgcagatgacaccatcaaccgccagagtcccagacaccggttttcctagaagcccctcacccccactggcccactggtggctaggtctccccttatccttctggtccagcgcaaggaggggctgcttctgaggtcggtggctgtctttccattaaagaaacaccgtgcaacgtga

SEQ ID NO: 269752 - DNA, 420 bp, Homo Sapiens
  misc_feature (78)..(78): n is a, c, g, or t
gtgtgtgtgtcttgtgcttcctcagacctttctcgcttctgagcttggtggcctgttccctccaatctctccgaaacnctgtcgcctgtccctttcactccacaccctctggccttctgccttgagctgggactgctttctgtctgtccggcctgcacccagcccctgcccacaaaaccccagggacagcggtcttccccagcctgccctgctcaagccttgcccccaaacctgtactgtcccggaggaggttgggaggtggaggcccagcatcccgcgcagatgacaccggttttcctagaagcccctcacccccactggcccactggtggctaggtctccccttatccttctggtccagcgcaaggaggggctgcttctgaggtcggtggctgtctttccattaaagaaacaccgtgc

SEQ ID NO: 269753 - DNA, 526 bp, Homo Sapiens
ggagacgaatttccctcttgtagcccaggctggagttgactggcattgatgtgggacgcggggagtgaacaagcaaacactggggctgtaggagtgaagagaaaggaatcaaaggaaggaaattcccatcccccagaacaaaggagaaacatgctcctgtgatgagcacgcataggatgaggctgcacctatgtcaggaaaaagccgttctgctgaaggcccatcagagaaagaattgactctggacacctagccccacaaacattgtctgctccaacacatatccagttttccccataaatttatgtaaactactcagggtatactctcattcttacttggaaactaaatttgtatggctatgcctgtgtactctagaagttctctaaagagggaggaattaaataaactgtaatcactcatcctttcttaagtttaattaccatgatgctttaaggtgacattaggctcttttgatttgcaaaaagacaaacaaatagcataaatggtcaggagatttcacaag

SEQ ID NO: 269754 - DNA, 465 bp, Homo Sapiens
  misc_feature (44)..(44): n is a, c, g, or t
  misc_feature (70)..(70): n is a, c, g, or t
  misc_feature (92)..(92): n is a, c, g, or t
attgtagaccatttagatggccctatgttagaccgtttaccctnccctttgagccaaatatttgccctgnggatttaccccaagttgccccnggtaccagagttaaatgagaaaccattccccgaagaccttaaggaacccaacagccccattagtaaaacaagataagcagataatgacagttgaaagtaggctcctactctgattagtgtgtggaggaatgaggttattattaatgtcccagaggaaaaatccctttcctaagttagcacgaatttgattgttcaaccaaatgtgaaataagcatgctcacagtggaagagtgagcagcacactttgtctgcataaatgactgggattaaactgctggggcgaggagtatagaaaactgttattgtgtggacatgttagggtcttaaaaggtaagtagaagtttttcagctagagaagggtatttcatgcaaa

SEQ ID NO: 269755 - DNA, 968 bp, Homo Sapiens
  misc_feature (667)..(713): n is a, c, g, or t
cagaagtttgccatctacatcccactcttcctgcctatggccgtgcccatcctcctgtccctggtcaagatcttcctggagacccgcaagtcctggagaaagcctgagaagacagactgagcagggcagcacctccataggaagccttcctttctggccaaggtgggcggtgttagattgtgaggcacgtacatggggcctgccggaatgacttaaatatttgtctccagtctccactgttggctctccagcaaccaaagtacaacactccaagatgggttcatcttttcttcctttcccattcacctggctcaatcctcctccaccaccaggggcctcaaaaggcacatcatccgggtctccttatcttgtttgataaggctgctgctgtctccctctgtggcaaggactgtttgttcttttgccccatttctcaacatagcacacttgtgcactgagaggagggagcattatgggaaagtccctgccttccacacctctctctagtccctgtgggaaagcccctagcccctgctgtcatgaaggggccaggcattggtcacctgtgggaccttctccctcactcccctccctcctagttggctttgtctgtcaggtgcagtctggcgggagtccaggaggcagcagcttcagggacatgggtgcnnnnnnnnnnnnnnnnnnnnnnnnnnnnnnnnnnnnnnnnnnnnnnncagaggttccagaaagttccagatttggaatcaaacagtcctgaattcaaatccttgtttttgcacttattgtctggagagctttggataaggtattgaatctctctgagcctcagtttttcatttgttcaaatggcactgatgatgtctcccttacaagatggttgtgaggagtaaatgtgatcagcatgtaaagtgtctggcgtgtagtaggctcttaataaacactggctgaatatgaattggaatgataat

SEQ ID NO: 269756 - DNA, 479 bp, Homo Sapiens
  misc_feature (62)..(62): n is a, c, g, or t
cggaccccagagtctgggatctaataattccagtcatttgggatggactaaaaggaggaccngaattttctgccaaaatgtcggaaggcaccaaggagcagtcaaccactcacatctaattccttactaccgctaactccagtcataaacgtttaattttcttttggaaacctacttttttctttataaaaaggtagagcattattacagaatctttcaatcatgtaagaattgagtatataagaattgtctaaaggcaagcatatctatactattaaccacattacacattttgttctaattactggctttttttcctcttttggtgtcttaaggctttttgaagcttattttactgtgagtttattgggagtatatagattattttcgattaaaaagtggaattattggtccccttccaattgtaattatcttgaatttttatacattagtttctcaaatatatagaatgccaattt

SEQ ID NO: 269757 - DNA, 175 bp, Homo Sapiens
tggcccaagatctgatggttttgtaagggaattttccccctttgcttggcacttcttcctgctgccatgtgaagaaggatgtgtttgcttccccttccaccatgattgtaagtttcatgaggcctccccagcctgtgggactgtgagtcaattaaacgtgtttactttataaatt

SEQ ID NO: 269758 - DNA, 373 bp, Homo Sapiens
ccagaccctagggccacaatccgagagggcatgctggcccagccactgggccgcatgggccagcccgctgaggtcggggctgcggcagtgttcctggcctccgaagccaacttctgcacgggcattgaactgctcgtgacggggggtgcagagctggggtacgggtgcaaggccagtcggagcacccccgtggacgcccccgatatcccttcctgatttctctcatttctacttggggcccccttcctaggactctcccaccccaaactccaacctgtatcagatgcagcccccaagcccttagactctaagcccagttagcaaggtgccgggtcaccctgcaggttcccataacacccccttgcagccagaa

SEQ ID NO: 269759 - DNA, 366 bp, Homo Sapiens
tttaattagcacttaagataataaaaacaaacagtaaaatgattccagagtagcacaagccaactataacccctatggtgaaagaaagatgaactcgttacgcctttgaggactgccattgtatcacaattctctaatttagattaaaaatgactattctctacaattgattaaaaaaagcggtttccctgtgtgtgttttcttctgggcacaggccctttgcacccttgcagctttttccttttgatatttattaaaaggataaaagtgggataggaagggacagtttgtctctgtgggaagggttattttttgggaggagggggcaaaaaaggggctttcccccctcatggtcccctcttgggg

SEQ ID NO: 269760 - DNA, 517 bp, Homo Sapiens
ttttaattagcacttaagataataaaaacaaacagtaaaatgattccagagtagcacaagccaactataacccctatggtgaaagaaagatgaactcgttacgcctttgaggactgccattgtatcacaattctctaatttagattaaaaatgactattctctacaattgattaaaaaaagcggtttccctgtgtgtgttttcttctggcacaggccctttgcacccttgcagctttttccttttgatatttattaaaagataaaagtggatagaaggacagtttgtctctgtggaaggttattttttggagaagggcaaaaaaggactttccccctcatgtcctctcttggtgacttgtgaagaagaaacactcgattcagagggcgcgtcctgagcctcctgtcccctaccctcagtgtttcctctgggggagatgcatgcaggtgggttgaggttgagagggagatggggaggggagtcggcttcagtaaattgtttttcgttgagatttaggt

SEQ ID NO: 269761 - DNA, 544 bp, Homo Sapiens
  misc_feature (74)..(74): n is a, c, g, or t
  misc_feature (257)..(257): n is a, c, g, or t
  misc_feature (260)..(260): n is a, c, g, or t
gagatgatgatggtgcctgtagttcattatatctagaggaggatgacatttctgagaatgacgacttacgtcanatgctgcctggccacagtcagtattccttcacaggtggaagccagggaaatcatttaggaaaacaaaaagtgattgagagatctctgaccgagtacaacagcacaatcggagagggttgagtctcaggtgcttaaaagaaatgaatgctacaaacccactgggctgcatgctaccccaggtgnaanagccaagaacctaacctctctgctgaaagttgtggcctaaattcaggggcccagtttggttttaactacgaagaagaacccagtgttgctaaatgtgtacaggcctcagcacctgctggatgaaagaatccttgattactatagccgcaagaaaagccagttttgaagctgaagtcatacaagacactattggtgacacaggaaagaagccagctagctggagttcagagtcctcagaatcagggaaatgagaaaacatttccccacaaaagttcccaactttt

SEQ ID NO: 269762 - DNA, 439 bp, Homo Sapiens
  misc_feature (27)..(27): n is a, c, g, or t
  misc_feature (50)..(50): n is a, c, g, or t
  misc_feature (384)..(384): n is a, c, g, or t
  misc_feature (413)..(413): n is a, c, g, or t
  misc_feature (425)..(425): n is a, c, g, or t
aagttacccagtctcttggggcccctnctttgatctgtaaaatggccatnatgatcagatcaacgccgaggattaagcgagggacctaggaaaatgctaggtcactgcattttcctggcgcgaagtaaatgttacttctcttcaactgttgcctttcggtgcttgtggtatgtaattaccctttttgctactcaaaattccagatttagagtttgtagcactttaaaaatttttcccatttaaattttatgtcagaaattataatgggttctgcatggggatattttaaggaaactcagccattgttatggaagcaaatggaatttctgtgtccctgtgtcctgtgcctattgggattgcacatttggacacccaaccaaattntccagtgtttccgtacagggcggtgttcntttaaaagcccntttttccattgttc

SEQ ID NO: 269763 - DNA, 513 bp, Homo Sapiens
  misc_feature (19)..(19): n is a, c, g, or t
  misc_feature (42)..(42): n is a, c, g, or t
  misc_feature (51)..(51): n is a, c, g, or t
  misc_feature (59)..(59): n is a, c, g, or t
  misc_feature (104)..(134): n is a, c, g, or t
catgggaggggaaaccggnctggacggttcctaggtacaggngaaaggaanataggaangggtactcggagggccccatcaaccttttttatggagttatcccnnnnnnnnnnnnnnnnnnnnnnnnnnnnnnnataatttttgtttcactttctatttttataataatattgaggaactctgcataggctacttactctccacaagcacacatgtggccacagggttgaaaaagaacagctgctttcttgtcagagcataccacacattcttcaatctatagaaaaagaggttacagcacagtgaccatttacagataaatctagtaactcttaacaagttcaattatatccaaatgtatttcctctgtaagaaaacacctaggcacagagaaatttaacacacactttcctcccatcctctactttcctggttattcattttcacatctttatataccctagcttaacaggcacttatttctattctaccttcatctccctatctgtccta

SEQ ID NO: 269764 - DNA, 532 bp, Homo Sapiens
  misc_feature (448)..(448): n is a, c, g, or t
  misc_feature (457)..(457): n is a, c, g, or t
  misc_feature (488)..(488): n is a, c, g, or t
  misc_feature (499)..(499): n is a, c, g, or t
  misc_feature (511)..(511): n is a, c, g, or t
  misc_feature (520)..(520): n is a, c, g, or t
atagctaaaggaaatacccacacttaaataagttaacatcacagacttaattcatttttcttgacattttaaggagaattagttcatttagactagtgtttattgaacatacttttcatgatatctatattaaggaaagcgatggttgggggagataaagaatagtagaattttagaattggaatgaacatcattttaaaatgaggaaactgaaagccaaagagtttactagaaatttcaagttacaattagaacccaagttttatagtgcttattttttactttcctaatttccttctaatgtattttacctagatttggctagaattagtagataccgggttgtttattatttcagggcaattgggactatcctaaataggaactctatcctgtagggtttaccctttgtgggaattttggaaagtaataataggacatataggcnaaaggcaanccgactatttgtaatggtttaatttatttantttatttattnatcttatttttnctttttttnagacgggccact

SEQ ID NO: 269765 - DNA, 445 bp, Homo Sapiens
  misc_feature (123)..(123): n is a, c, g, or t
  misc_feature (193)..(365): n is a, c, g, or t
  misc_feature (378)..(378): n is a, c, g, or t
  misc_feature (381)..(381): n is a, c, g, or t
  misc_feature (388)..(388): n is a, c, g, or t
gacatttagtcagcagttaccaagacgtaaataaaacatagtgaatctcacaagatttcaccataaaaggtctcagtccatgttcacgtaatctccttaatgatgtcatgtattgtattatgnctcaaaaaatgtacattatgttaggaatttaagaactcaggcccaggcaccgtagctcacacttgtaatnnnnnnnnnnnnnnnnnnnnnnnnnnnnnnnnnnnnnnnnnnnnnnnnnnnnnnnnnnnnnnnnnnnnnnnnnnnnnnnnnnnnnnnnnnnnnnnnnnnnnnnnnnnnnnnnnnnnnnnnnnnnnnnnnnnnnnnnnnnnnnnnnnnnnnnnnnnnnnnnnnnnnnnnnnnnnccttgagcttggnagntcaaggnctgagtggccatgatgatgccactgcattctggcaacaaaatgagatcccgtctgaa

SEQ ID NO: 269766 - DNA, 413 bp, Homo Sapiens
  misc_feature (29)..(29): n is a, c, g, or t
  misc_feature (76)..(76): n is a, c, g, or t
agggcaaaaactcctcaaaggggcataancccaatgtcctccattatccatcagtccctacactgggaagtgtggncaccgtaccaataagagaggaagaaccctattaccccaagggtgggtatataggttaattgccttggcctataaatgcctacagagaaggtccctaggccagcttctcccacactggctcaattttaatacatctcagccttagtttaatgcccaaattattcctgcttttttctccatcactcaggcatctctacattctctcatttctctttaatgttattaacactaaactgcaatgctgatatatttttagaaaggttatttctctcctatgaccaaacaacttatgtttgtataaacactttggaagcctacaaatatatctcatttggccc

SEQ ID NO: 269767 - DNA, 107 bp, Homo Sapiens
ctttaagcactttattcagaacaatacatgttcttctggtagtgtttggataatatgattttaacacatgctaataaaagccaagaaaaatcatggcaacttctaat

SEQ ID NO: 269768 - DNA, 425 bp, Homo Sapiens
  misc_feature (29)..(29): n is a, c, g, or t
  misc_feature (346)..(346): n is a, c, g, or t
taaagactccctttccccactctggcttnctaaagtggacccagctggaaggtatgctgaagatgcttcgggaagatttgaagaaggaaaaagaagacaaagctcaccttcaggcggaggtgcagcacctgcgagaggacaaccctgaggctaacaggaggagtccccagaacgcctcggacaagctgaagaagttcacagaatgggtcttcaacaccatagacatgagctagggaaggctgaggaggacaggagaagggcccagacactccctccagtgagtgtcctgcagcccttattccctccatagaaagcatcctcagagcaccttccctggcttcctacntctatcccctttcggggagtgcacaacacaatagttgcagatcaacaatcatcacctgccttttgtagaaaagaaaaac

SEQ ID NO: 269769 - DNA, 763 bp, Homo Sapiens
  misc_feature (559)..(559): n is a, c, g, or t
  misc_feature (716)..(716): n is a, c, g, or t
  misc_feature (724)..(724): n is a, c, g, or t
  misc_feature (730)..(730): n is a, c, g, or t
gcccagaaacagcagctgcacacaacctcttgctgaaatataaaaatagcccaggcaggtttgtgaatttatgtccttttgcataaatcagagagctggggccctgtcctgaattatattcaaaatagaactgcatttcctttaaaatggagcgaatgatcctggaaatcagtttttaaaatattagactatctctgcatggatgtttgaataaattctcctaatgctgtgtttctcaactccacttttgaattggattgtattctggttagcatatggtcaaagtctgcctatcgacctcaattccaatctgacagccaagtatgatctttgataattccttaaacaaactacacctgattgtattaaattgtggtcacgattcccaaaacgctaggcaaaacaaagttcatctcctttcctttccagcggaacgaacagctgtctgccttgttgtgagagccatgcagacttattttgacaaggagccaagtaggcaccatttactgttcaattctgagacttctgatgataggaacagaatgcaagttgatacaantcgggagctttaaatttggccttcctggggtgcctagaaaagtcacctttggacataaaattggccatttctggaaaatctcctccaagaggacttgaaacccaaagctctaaaacggccggcttctttcagtctctgggggagcacgttgaagttngggttcanatccanattctgggctgtgttagccactccacagatggg

SEQ ID NO: 269770 - DNA, 452 bp, Homo Sapiens
  misc_feature (60)..(60): n is a, c, g, or t
  misc_feature (291)..(291): n is a, c, g, or t
  misc_feature (427)..(427): n is a, c, g, or t
cccccctcccccagctccttaagtgggcccctgtgggggccagggaggagccccttcccnccccaggtttccctactttccctccctcagcagagaaactggagaaaggacattaaacctcagtgcaagtcgatttgagtgcctgaaatatttcccagaatcaatggtggtgcctaaactatctcccatgtttcctagcatttttaatagtggagttggtttgtttttaatctcatcacaaaaatgcagtgcccttggggaagggatccagccccttggcctgccactttnccaggtgtcctttatcactttgacgggactctttggtctgcagaaaatgctctgtcttggcatgcttctagactgtaagatttgggttttgttttgtattttatgtttacatgcatcttatatttcccataaaacntaaataaagttttggcctttttaac

SEQ ID NO: 269771 - DNA, 448 bp, Homo Sapiens
  misc_feature (16)..(16): n is a, c, g, or t
  misc_feature (26)..(26): n is a, c, g, or t
  misc_feature (37)..(37): n is a, c, g, or t
  misc_feature (44)..(44): n is a, c, g, or t
tcatggaaattccccntcccaggctnttaagtgggcntcctgtnggggccaggaggagcccttccttccaggttttccttctttccctcctccagccagagaaactggagaaaggacattaaactcagtgcagtcgatttgagtgctgaaatatttccagaatcaatggtggtgctaaactatctccatgtttctagcatttttaatagtggagttggtttgtttttaatctcatcacaaaaatgcagtgcccttggggaagggaccagccccttggcctgccactttccaggtgtcctttatcactttgacgggactctttggtctgcagaaaatgctctgtcttggcatgcttctagactgtaagatttgggttttgttttgtattttatgtttacatgcatcttatatttccctgaaaactaaataaagttttgggcctttttaa

SEQ ID NO: 269772 - DNA, 555 bp, Homo Sapiens
  misc_feature (263)..(263): n is a, c, g, or t
gaatgtgcccctgacagtattggagctgccctgcccatggagctgtttgaaatgcagatcctagtctccaccccatccagttcatgagaatctatatttaacaagatctgcaggggtgtgtctgctcagtaatttgagtacaaccattccagactgcttccaattttctggaatacatgaaatatagatcagttataagtagcaggccaagtcaggcccttattttcaagaaactgaggaattttctttgtgtagctttgccnctttggtagaaaaggcctaggtaccacagcctcctagacactgcccacacagggtcctgcaaggtctttggttccagctaagcctaggaatgaaatcctgcctcagtgtatggaaataaatgtatcatagaaatgtaacttttgtaagacaaaggttttcctcttctattttgtaaactcaaaatatttgtacatagttatttatttattggagataatctagaacacaggcaaaatccttgcttatgacatcacttgtacaaaataaacaaataacaatgtgaaaaaatta

SEQ ID NO: 269773 - DNA, 161 bp, Homo Sapiens
tggattttttaaaaagttttattgaaatgtagtaagttctaaaataaggcagagaggtcatatatttaatgctgaaaggggaaagtgatgctcaaagtcacacaaaggctgcaggatttgctgactcaacacctttggggctagaaagaaatgaggagtga

SEQ ID NO: 269774 - DNA, 718 bp, Homo Sapiens
gtttgctctgttagaggttcagatgtgtattattttaatactttataaatatgactgtagtcttctggacccattacccaaacagagttatctccatttggtgggtgtcccccagccggaagggcaatgccgaattgaatataaacaaagaatatgacatctgttgggcctcacaaggaccagggccttctggaggagtggcactaccccacctgggcagcacctagacctgagctctacaaaaacacactgcttcactttgttttaggacttagttcaagaacacattcaaatggtgcatgtgtttggtatcttcaacagtagaccaagaatctaacatcactctcagtaatatagagaccggaatacatggtttataggaaatgatcaaatgatccaaaaaaactccacattttttaagaagttggaatttgatttcatgcgtaactgtattaaaacattaaatagaaataatgtcatttgaatgaaaatcttatcacattaaattcactgtgaaggcagcatacttaaatttttattttgaaaagtctaaaaggcttagatttttaaaatttaataattatttctacaaattttctatttttcttgaggtgattctcaactagcaattggaactcctaggctctattaacataattctttattgtaaacgtatctaatgctaaaagtaataaaatggtagttttctgagacctgt

SEQ ID NO: 269775 - DNA, 425 bp, Homo Sapiens
  misc_feature (383)..(383): n is a, c, g, or t
ttgcattacaaagtctacaaaaacaaataaggatttttatttgcagtactttccactcttcctttaaaaacttgccatttgcttatcagttcctctggggctgacccactcaaacaagacaaaggataaagaacaaaagatagtcctccgaggttacaggcttggaagggcagagaggagctacgaaccttggaagaaaaacaaggtgctcaggaattcatcgcctaacatttcacttccccacccaccccttagtgctcccactttggcaagtgatctctctttggctttaaagaagaaagggggaaatgtgccttgttttgcaggtgtgcaacaacacagctctggcatctcaagcagcaggggagaactctaaggacagnaagaatttcttcatggaaaatcacggtatgttatcacatact

SEQ ID NO: 269776 - DNA, 524 bp, Homo Sapiens
  misc_feature (322)..(361): n is a, c, g, or t
  misc_feature (376)..(376): n is a, c, g, or t
  misc_feature (419)..(419): n is a, c, g, or t
  misc_feature (441)..(441): n is a, c, g, or t
  misc_feature (468)..(468): n is a, c, g, or t
  misc_feature (474)..(474): n is a, c, g, or t
  misc_feature (513)..(513): n is a, c, g, or t
aggagatgaagaagatttagcctcacacaaacatataaatggaaaagaggagtattttaatagccttttaagataattggtggattcctttatgattgagaaaatcaacaagtaatttcttaaaggttggtagattttgaaactgtatcgatgacttttgtactccattgcattacaattcattggactctcttatgcattggttgttttgaaaatagtgattcactaagttatgcagatcttgcaaatgctaacacattcattataccatatcaaataatcactttcattacacttatactgatttaatcataaaattctnnnnnnnnnnnnnnnnnnnnnnnnnnnnnnnnnnnnnnnnacagagtttcgttcntgttggcccgggtggagtgcacattctcagctcactgcaaccntggcctccgggttcaaggcgantctcccgcctcggtctcccgagtagcngggggnttaccgggctgcggcacccatttccggggttattttggnatttttattaa

SEQ ID NO: 269777 - DNA, 619 bp, Homo Sapiens
ctgccgcaaacacacggatgcctccccccgccacgaaggttgagaacaaagccagggggcccagaggagcaatagccctgggccacaagcgtgggtaggcctttcacgtattccgtctgcacaggcaaccaaggccagtagaaagctatggctgcaaaaccctggggtggacgatgtttgatgattagacggtcatctctaactactaaactaatatctgcattcttgttaacataaatctctccttggctattttaatagccacagtcccaaacttcatcccagcttagatttctcagcactgaggtaaactctgcattgtcatcccagcgtacacctttaatgttttattgatttcactggcactgtatttggacctgtccttgtatatgtagagacatatgtggcttcattggtaatttacaagcaaaagatgacatgacgtgacacctgtatgaaaatgtgatgattgaactccctgtgtacagcgagtgaattaaaatgtctgcctctccagacatttcttaatgattccacttaatagactctatgtgtgctgaatgttcctgtgtacatatgtgtgttaaataaaacaattgtattgaagactgtttttctc

SEQ ID NO: 269778 - DNA, 494 bp, Homo Sapiens
  misc_feature (52)..(52): n is a, c, g, or t
  misc_feature (89)..(89): n is a, c, g, or t
  misc_feature (128)..(128): n is a, c, g, or t
  misc_feature (130)..(130): n is a, c, g, or t
  misc_feature (424)..(424): n is a, c, g, or t
  misc_feature (458)..(458): n is a, c, g, or t
gggtgctgttaggcggcctggtacctttcagccaagaaccagagcctgtgangcaaagctcatgaaaatgtctgtctctctaactcgcnactccccattatatttgggtatctggaaaacaacttttntntgtgtcacatgtattttatttcattgaatatcatatgaacatcgggaaaaatgtgagacaacaaatcctagattatcaacataggtaacagagaggaggaaggcccaagcaaacataagaaaaaagttctgtactgaaacacagctattccattctactcatttgtaaagttaaagtgtgaatattagaaagtaatacaatattaaggacactaaaagaaagaataccccctagatttgtggtacaagtgtgtggctgtgaaaaacaactttatacatgaagaattcactggangtaaatatcagagtataaacaaaagggtttgggnattgaggatgatgcatttgatttaatacaaagtggg

SEQ ID NO: 269779 - DNA, 897 bp, Homo Sapiens
  misc_feature (169)..(169): n is a, c, g, or t
  misc_feature (821)..(851): n is a, c, g, or t
ggctcccacatcagtgccctgccctgcctatttcaaagattgccctgtaactcaaattttagggctctgcactaaaaagtaataaattgacccaaaacagagtatataggctgggagttgtctagagggcatcttgcaatttctgtcaaacactgcatgtttccagtcnccatgtgtttctcatcttcctttgcatatgccgccatgggatattcagaatcgacggtttctgaaatcactgctttcgttttcacatctggtgatgatctcatagtcccaaagagaggttatcgaaggaacgcaataaactatgtgctttttgctttctttcctgttgtcttctaaaacagatcaatggggaaaattaaataaacaaacgagcgaagcgcgccacctagtgacctctgtgctcgctgcagattctgcgactgaagtgcgtgagaggagtggctaaagcgattcgagtattgatggagtcacaaaaatcgttcattaagcatgcaaaaggaaagaacaagaacatgggaaggatagaggcaacacacccaaaaagcccaggttggtcttcacagatgtccagcgtcgaactctacatgcaatattcaaggaaaataagcgtccatccaaagaattgcaaatcaccatttcccagcagctggggttggagctgagcactgtcagcaacttcttcatgaacgcaagaaggaggagtctggacaagtggcaggacgagggcagctccaattcaggcaactcatcttcttcatcaagcacttgtaccaaagcatgaaggaagaaccacaaactaaaacctcggtggnnnnnnnnnnnnnnnnnnnnnnnnnnnnnnngaccaggacctcaagatagcaggtttatacttagaaatatttgaag

SEQ ID NO: 269780 - DNA, 264 bp, Homo Sapiens
ttcccccactgccatgccctcccccacgtacccagtgcactaaggcgcacttggccgaacttatggtccaggcagcccaggcctccgtgatggccgtggtgttgctcagcatgcacaccgccagctgcactttggccaggtctccacagggaccaccgtggggggctggtagttaatgcccacctgtcagagatgggcagcatagaatgaagtttatattggcctcagaaatgggagctcattaaaaatcagagctgtggacca

SEQ ID NO: 269781 - DNA, 596 bp, Homo Sapiens
gtcttatagaaaaccaaatggaaaatgaatataaggaaatgcaaaatacattaaatttctttttacccttgctgcctgttttttctttagttcatcctggacttgtgggccaatacttttttgttatgtttaatactaggagagcaaatacataacaggaactgtgatgaatctggaaagaaaatttatatcattcagtcttcctgaagctgtaagaatctccttaacatctattagatttattttctctttgcatttaaagttttggagaaaatatctttgtcatactgacttggttcttagctatgtaagaggactaaatctaggtgcggagtttgctggtttaaataggaattaaaaatttatttttttctggtgacctggagagtgtttcttaaaattataataatgaatacttttcatgctctgatttatgtataggaattattaagagcttcactctgataaagttatttaccacttgggctactcaggggtgggagtcatttcacaaaggatctgcaggcgaatgaattaggaccagggagtaacttcacccttctgcttgtcccagctgggagcagggattagggact

SEQ ID NO: 269782 - DNA, 708 bp, Homo Sapiens
  misc_feature (445)..(644): n is a, c, g, or t
acttacaatagggttatgttccagtagacccattgtaaattgaaaataccgtaagttgaaaatacatttaatacgcctaacctactgaacatcccagcttagcctagcctatcttaaatgtgttctgaacacttaacgttggcctttagctgggcaaaatcatctaatacaaaacctattttataatgaagtgtttaatatctcaaataagagtattgtaccacatatcgttatcccaggataatatcagagtacaaaatttgaagtacagtttttaactgaatgtgtattgcttttgccccattataaagttgaaaaaccataagtcaaaccattgttaagtcggactgtttgtgttacatatatttgggattttttagtggccctttttaaaaagctgtttcttatttctgatcattgtgagtggggatagatgtgggaacgnnnnnnnnnnnnnnnnnnnnnnnnnnnnnnnnnnnnnnnnnnnnnnnnnnnnnnnnnnnnnnnnnnnnnnnnnnnnnnnnnnnnnnnnnnnnnnnnnnnnnnnnnnnnnnnnnnnnnnnnnnnnnnnnnnnnnnnnnnnnnnnnnnnnnnnnnnnnnnnnnnnnnnnnnnnnnnnnnnnnnnnnnnnnnnnnnnnnnnnntactatgagctgatactgggatttcaggtaccgcagtttgtgctgaatgatatggtttggggta

SEQ ID NO: 269783 - DNA, 578 bp, Homo Sapiens
ttcggcacaggttgcggaggtgtaggtctgcagtgagtgcccgcatgtctctgcaggcgggaccacatactggccattctggcgctgcgcgactgggccgccagctgaaccagcatctcttgcagcacaccgaagacctgctgagagctgcggccggggcggcgggtgcggaggcccctcggggccgcgtgctcttcgaggagatcaaggtgcccagtgccatggctgtgctgatcacctgcgtctagttctctctggctcgagggggggcccgccgctggcagggagctgtggtcagtgggggtcagccaggagcccagggagtcactctgggccctgcccccaactctgacactgcagttagggaatttttgtcgtcagcagccaagcgcagctgtcaggccagaaggagcagccgtgcaggaggcatttcaggcatcgttgaggggagtgttttggggccgcagagctctcaatgctgcctaatgggcgggggggcctcccgcccgactgtccagcttcaccctccagtctgaaagtgaagagcagagtatttatttaaaaaataaatgtgaatt

SEQ ID NO: 269784 - DNA, 409 bp, Homo Sapiens
gaatacaaaatttgtagtgtctgttacatttcagcaatagggggaatacagattttgtgggaagggaagggggaggagacagcaccttagttttcctacaacataaatgtaacgaagttatccttctactgtattgcaccttagtcccaaaagtaaaacaactaaatgaaaatttaaataaatcagactgaaaaagcccaaagagtaagaggaataccttataaatgtgactacccacctaaaaattcttgaactactttgttttgcataggattttatgggactaaccaaatgttccatgaaccatgaggtgaagactgcgatttcatgatagcacattgttttacaattctgattagaaatccttcagaaatatttctgtatcaagcttgtaatgagcctaacattt

SEQ ID NO: 269785 - DNA, 410 bp, Homo Sapiens
  misc_feature (62)..(62): n is a, c, g, or t
  misc_feature (184)..(293): n is a, c, g, or t
  misc_feature (396)..(396): n is a, c, g, or t
aatgcaaaatgagtcaatataatattctccttttccttttgggtttcctaaattatgtttgnatggttgaagaacaaaaaaaactgatatggttctcaaatacaaataaatatttaagacaattataaatggagaagaataaagtgatgtaaagggaaggaagcattctaaatttcactcaaannnnnnnnnnnnnnnnnnnnnnnnnnnnnnnnnnnnnnnnnnnnnnnnnnnnnnnnnnnnnnnnnnnnnnnnnnnnnnnnnnnnnnnnnnnnnnnnnnnnnnnnnnnnnnacattaaaggaaattaggctgaggcataggtgggtgcatgcctctaggtcctaggctacttcggggagggctggaatcagggagggattggcttggagggccngggggttttcaggg

SEQ ID NO: 269786 - DNA, 561 bp, Homo Sapiens
  misc_feature (225)..(225): n is a, c, g, or t
  misc_feature (252)..(252): n is a, c, g, or t
attcaagccaccagatgctttccaactaacagggaccaaatgggaccgttctaagatatcctaaaagatttgggagttagaggaggtaaactaagataattatattacaaagggtacaagaccacaagacaacaaccgactccggaattcttggacctccgccttccgtacaaggcccagccgccccgtccactgccaccaccaaacgccgccgcccatcttaanaactgccagcggccgccaccaaccaancgcctccgctctactgcctttgcgccctggctgccacgctttccggccccgtttgcgacgatgtgctcgagaagactgagggaagagtggtccgccgagctcacggctcgcaaccctcctcgaaggacgcacaaggggcggggcttaaggccaacggaaaacagagcgagaggcgcctgcgcattaccgaagaggcaaagttgtttttgtagtttcttcgggcttgcttatcttgtgatactcaaaacaaatgcgagttaggggctacccagagttgtgatagaaataaactaaatttccaggggaaaa

SEQ ID NO: 269787 - DNA, 786 bp, Homo Sapiens
  misc_feature (232)..(232): n is a, c, g, or t
tcccagtccgttacacggtagctttggggaattatttttaaaatttttaattgttcttgctgtctccctttgaagtgactagtactctggtgagttaatctgctacatctcagctaaaccagtcaaagttcagaaaatctaggcaggagccacctgtagttatctcaccattgtttctccaggtgcagttagagcggatccggcaagctgactccttggagagaatccgggncaattctgaatgatactaaactgacagacattaaccagcttcctgagacatgacaccctcatgggcaggattctagcctgcactttggggttttttaactcatctttagagcaacagtaattattatttaactcttaactgaagaaagagaagtcacaaccaaaaggaagactggagaaatgcttacttctagagggagaagactgtgcggcacaggaaacagcaaacagcggggtgatctgcagcccagagaccttcaaatgcgaacactataaactccaggcttgattccaacaggcgtgggatcagatttggtgatggaaaaagcgctgtttccttgcctgctttctccaagacagattttcggaacacatttccctaccctaaagcgacatcccattagtgtttggaattttctgttcatagatattggaagagagaatttgctttatctgttgtctagagctcatcagtaacagtattcagttagcagacagaagtgtagtatgctgtatgaatattttatattaaaatatgaaggtttgagagcaaaa

SEQ ID NO: 269788 - DNA, 351 bp, Homo Sapiens
ctaatcctgctttcatactagccagtgtggggaaaaggtacaatatgtcaaagagatgagagagtgttatttcttgggcaattttctattagtgtttcttattttggccagttcttttatttatgtccttgtgacccaggtacttggggggccagctacccttctggccttttagcgtctttgaaggagaccagacatgagtgaatacctaggagagtgtcagcatgtttctggaaaattggcagagaccaagccctgctgcagattcgtcaggccaggtgaaagggccaggcagttgcagctgatgatgtaaatattttgtacagtagataaataaatgtttccccagaa

SEQ ID NO: 269789 - DNA, 449 bp, Homo Sapiens
  misc_feature (23)..(23): n is a, c, g, or t
aattttcctatctgttaatgtgntaacacagtggaggaaagttttttctagcattctgtgaatctgaaaattctcattacttttccgaattgggaaggcagccagccataagtggactgcaatgaggtttcagcttgattcaatcttaataatatagaattatttctgtattttggcagtcaagaaaataattgactttttgcaggtcttacgataaaactaaaattatctgtaccttatttggtagcaactggttattctgacagttagtgaaaataataacttatattctagcattaaaattactggctaagatattttttaaagtctttttcataagtagttctgatgtagtcctacttatttaaaacttaaaatgtatttattacgtttgaccgaatttttggatttattgaattcttttaaagcttcacataagaaaaagggaa

SEQ ID NO: 269790 - DNA, 430 bp, Homo Sapiens
  misc_feature (398)..(398): n is a, c, g, or t
  misc_feature (410)..(410): n is a, c, g, or t
  misc_feature (416)..(416): n is a, c, g, or t
atctaattaaaaagaaacaactttctagctgaactttccacaattccaaaggtatctcacaggtggtgcaatgcagtggccgtgagagtgacatctctttgagggaccaaggagcgtctaacggcgacaggacagagcacctggatgagcagatccttcctcatgaatgcaaatgcactttaattcacctccctcagcttgtgctcagggagcaggttctgtcccattctctgtgggaacacttcattgaggcaaaggaacaacttcaaaagggcacagaggcccagctccgtcctggggagaagggggctcgcgggtgtttgcccaaacacattaaacttttattgtttcatggcattatttttactttcggcaaaagggccccaaaggattatttnttcactttgttnatgttnttaggggggttaac

SEQ ID NO: 269791 - DNA, 316 bp, Homo Sapiens
  misc_feature (22)..(22): n is a, c, g, or t
  misc_feature (142)..(142): n is a, c, g, or t
  misc_feature (146)..(146): n is a, c, g, or t
  misc_feature (235)..(235): n is a, c, g, or t
  misc_feature (303)..(303): n is a, c, g, or t
tacatccagggtgttgaggggntcctggctgcaaaatgcagtcatgtgtcatgtgttgaaactctagcaaaaggggatgaatgctcttttcagtctggtttgctttggtaatgttcttgtagaccaactacacgtttttgtntctntctacaggaataatattaagtatatgtaaaaatgccactgcaaatttgatgttgtttagtaagggcagttagctatctgtaaaaccagnagaaaaatatgctgtgttattggctaataatatacctatttttagaggaaataattttttcttgtctnatttttagccagc

SEQ ID NO: 269792 - DNA, 417 bp, Homo Sapiens
  misc_feature (321)..(321): n is a, c, g, or t
  misc_feature (343)..(343): n is a, c, g, or t
tcctttccactagaagcgaggtgtgtactgcgtgcatgtttgctgagcgctcaccacgggctaggctccatgcccagttcctgtgaggagaaaacacgtttctatgtgcccggcaggtaggaggcactcacaaaatgttactttgtctttacagaattttctgaaggagagataaaaactgagttaaataaagatgatcagaatggatgagaaataactttagacattatttcattgaaccttcccaactgaaattattttatgatgttataacatggatagtaactcaagtagcaataagttacacagttgtgccatttngtgcgtctttctataaaaccancactcacgttttacagctcctggtattattgcctgcacattcttggtatcttagtattattgttgttgccagtg

SEQ ID NO: 269793 - DNA, 503 bp, Homo Sapiens
  misc_feature (481)..(481): n is a, c, g, or t
ccatcctgaaggcacatttgtgggttccccatcagccaggccttggtgctaacctggctgaatttcacacaggctcttacacacacacgctcctaggagacatctgcctacacggcaaccatatttcctctgaatgagaaggaattgaaccaaaagtccaagaaagaactgattgcttgttccataggagcttaggaaacaagaaaccctggattgcccagggggtctgagaagttggttggtgactttttttgcggttaaatgaagggtgatggggagatcagcccgaattgccgcctgcctcttgctaaataggagcagaggacttggcctgcagctccttgggaccactttgattgggaagagagtttcaagggaggcagctggattcaatctagcaggtggtcagcttcagctttctccatcgaaatcccattctcctgtccagaggcccagtgggtcatctcccaaggtgggtgtnggaccctgggccttcagaggct

SEQ ID NO: 269794 - DNA, 128 bp, Homo Sapiens
  misc_feature (26)..(26): n is a, c, g, or t
gtattaaaaagttcacaccaaacccngaacctctagtatatgcagaagccatataggtttttgcttgttttttgagaggctgcttctatcaccttacgcattttcagtgagttaaaataccatcagat

SEQ ID NO: 269795 - DNA, 340 bp, Homo Sapiens
  misc_feature (15)..(15): n is a, c, g, or t
  misc_feature (30)..(30): n is a, c, g, or t
  misc_feature (39)..(39): n is a, c, g, or t
  misc_feature (57)..(57): n is a, c, g, or t
  misc_feature (70)..(70): n is a, c, g, or t
  misc_feature (107)..(107): n is a, c, g, or t
  misc_feature (146)..(148): n is a, c, g, or t
  misc_feature (157)..(167): n is a, c, g, or t
gggcaacaggttgancggatgggaaggagncagccccgncgtgggaagcggcgaganccctcgggcctgngggtgccccacgtttgcctacctccccactgtgaaancgctggtgcctcacaattgtctctcacagtgtatgtgannnttttaaggnnnnnnnnnnntccctatttaagattctgaaggtgctaccattattttgccacagactttgaagaaacttttggatgtggggcatcatccgcatctttctctctcctccaaatgacaaagtttggggaatttttgaattttcctagcatcgcccttgtgctcatcaggtaatctgctaaggagg

SEQ ID NO: 269796 - DNA, 1036 bp, Homo Sapiens
  misc_feature (177)..(186): n is a, c, g, or t
  misc_feature (671)..(671): n is a, c, g, or t
  misc_feature (776)..(776): n is a, c, g, or t
gacatattgcgtgcctaacaaaatgctgatggaaaacagaagcctgctaatcaaatactagatggtcttctgaagagccaattgactaccctcagttttttactcaggagcaggaatcaacataagtgtcattgaagagtgaggctgcagaatgtaactgaagtccttaagatatcnnnnnnnnnncaactttgatacttggatttttctgtttgatattaccagtcaacccctgctactagtcctgaaagagtcctgggaagtgaacaagaataaaagtatgtcaaagctaaaacatgacccaagatagaagcaccttgtaaaatatgattaactgtctgtgccactatgacacaatactgcaggctggggtaacttattaaaccatagacatttatttttcatagttctggaggctgtgaagtcccagatcaaggtactggtgggctgagagtctggggaggcctaccctctgcttcccagatggcacagccctctctggaaaggacaaacactgtgtccttacttcacagaaggggcatacttcccctgaagcccttttataagtctgtaatccattcatgagggcccaccctcattgcccaataactttctaaaggccttatacttcttaatactgttgcattggggatttaagttcacatgaattntggagtggatcacacactcaacccatagcaatattatgaattgtgttttgctcgactgccttacatttagataattttgtataatgtagttaagactatcactcntcgtagatggatatggggttgtgtgtacctcgcacgactagtaattgtcatctctgaatccacacaggataattcgggggtttacgctgagaggtggttccgggcgcgtgagtgcgttggatgtgagttgtgtgtggctagtgctcaactcgtagtgaaacacattcccgcttttaggtgtcgtcggtacatgccacactatcctctgtgacgaccccctgtggacgtcgggccgcgcgctcctcttggacgaggcccgt

SEQ ID NO: 269797 - DNA, 537 bp, Homo Sapiens
  misc_feature (24)..(24): n is a, c, g, or t
  misc_feature (34)..(34): n is a, c, g, or t
acgttccccccctaacctggcagngtagtacccnaaaaaaaggttccaattcaacaaactgtagaaagtatacggtctgtacggctcccctaaaaaggcaataccggaggaccctgaactacaagttggaattacctgccatacttggcaaaattcaagtgtggctgccctatgccctcggagagaataagcagcaaacccagccccagtccctaaatccgaatagcagctcttaaaagagaaatagggatgccccttggataggctttcctttaggactgatattccaatttctggggcttacccccgggtttatttcctacaagccctatatagagtgtaacgcctagaaaatattcagtgatgttaaaaataagcatagttactttgactcaagaccaattactctacacacacaggcaaatttctgcccaatggtctcaagtttagcattagttttgcccactttttcttttattcttaagtcagtttcactcttcacatgagcactccaccaacaccataaggttgaaaaat

SEQ ID NO: 269798 - DNA, 473 bp, Homo Sapiens
agagactctgttgcccagactagggtgcagtgatcgatcatggctcactgcagcctcgaactcctgggctatatgcgatcctgccacctcagcctcccaagctgagactatagacccacaccatcacgcctggctaattctttttttctaatacatggggttttcttatattgtcctgggccgatctgcaactcctggggctcaagcaatccttccgaaagtcctggggactacaggtgtgagccaccacgctcagcctttttttccttattactgtactaggggacatttgtgggcttttccacaatgaggacttagtaggagaaatgacagcttcccttgggccctatcctgaaatacactagctagctcttctctgccagggctaccgttttctccctaactttgcagatgtatgtatcatataaatgtttctatttcaacaactgtagaagtatacagtctgtacagct

SEQ ID NO: 269799 - DNA, 485 bp, Homo Sapiens
  misc_feature (23)..(23): n is a, c, g, or t
  misc_feature (50)..(50): n is a, c, g, or t
  misc_feature (57)..(57): n is a, c, g, or t
  misc_feature (65)..(65): n is a, c, g, or t
  misc_feature (87)..(87): n is a, c, g, or t
  misc_feature (94)..(94): n is a, c, g, or t
agtaaatgccatggggctacaanatccagggccacgaataagggctaagncatgggnaattttcngctcccaaattaacctatgagncccaccncccaatatgccagtcccttggttgacccaaaacattgttatgtaacacatgaacatactcaggatggtcactatcctactataatcacttgattctcaataaagcctgagttccatcatgtctggaataaggtgatgaataaattggttcctatattcaagaccttagaaattgagactagagtagataataaacatgtgaacacatactcatgtccagcaccatatggcaatttttaaacaatatggcagaggtatttcaggagaaagtaattcattcttaccagaaatatgtagaaagaggtcagtgagaccagcataatggaactggcttttgcaggacttgagtaagtaaaagaggaaaagtaattccagggtattgctgtgccgaa

SEQ ID NO: 269800 - DNA, 451 bp, Homo Sapiens
  misc_feature (294)..(294): n is a, c, g, or t
accacttctagagtacctttgcctaaactcttttagaattgaggccccaactttgatggcacatttaatacccaatttcttccataatagatatttttaatagcaggacagatggcactgattagatcaagaactatttggaagtgcctcttatgtttttttcctgcattctgtacataaagttttaagtggcaggtcccagatatgtaaaatcatttcgctctattttccagctggttttgttaatgattctctaggacagcaggtaaatgagttaagttgttggcttggggncaagtgaagtttgtgactatgcttgatttaataagctgagagtctattgtttgtctgtcaaggtgccttcctatgctgaagcattacctccttctcacccagtaacggttaactcttctcttatctatactgcaaataaacctattattcacttctc

SEQ ID NO: 269801 - DNA, 352 bp, Homo Sapiens
  misc_feature (13)..(13): n is a, c, g, or t
ttattattttttncaattatcttcaccttcacagttataccaataataatgatgacaataacaataataatccagcaggtttagaattacactgacaaccaagggagacttcagggagattacaggattactgttatgttcaagtctgatctttatctacaggcatgtccagatgttgggagggactgggcatataagttttgtaaccacattgaactaaccaagattcatactcttgacataggaaaggtgaataagatttcttaacaaagcaggtcaaggaaggaatttctctccatttttcagcccaaccattcccctcacccaaactggggccatatccctccaaatt

SEQ ID NO: 269802 - DNA, 420 bp, Homo Sapiens
tgtgttatgggagtaatcccgtaacaaaagactggggaaccgaaaccccagaaagccttccatccttggtttgcctgcctttggacctatttgtaccgtaacccccacactcccatgatatccaggcccagtcagtgcctgacctaggtacaatcctcaatttgccacatcctatatattttttctagattccccaaccagaaaaagctgagatttaaattctataggttatggagaactaagtgtgacccaaatgagaaaagaaagctggctaaacaaaacacaattatgcgcataaaatgtctccaattttcctattcagcaaaagtcttgtaaagtaaaatggcatattacaacaatattagctcttggatgtaaggagcagaatgcactttagcatgggaaagataagagtctatc

SEQ ID NO: 269803 - DNA, 613 bp, Homo Sapiens
aagcccattgtttattctttgagaatttgttgtaacttcttcaggataacacctgagtccacaggctgagcagctgtggcccagacagaactgctccggcttggctgttccagcaggtggggcgctggcctcggtgagggcacagcagcaaggttcacggatatccgtgtgtcttgtctgtggccaccaggcacaggtttggcttccggtcagtgtcccgacactgtgcgggaggtgacaacagagcaaagcagcgcaggggtcagggaggtacagacactgctgaaatcacactaccccaccctcagctgaagccccacgttccacaaacttggggtcatagattgtccagtcactggctccctccctgtcagcacagcacagaggaaggggctaactgaatcttttaccacttctggcctggctccagaactttgttctagattccttaaaagtcggtagctgatgtcaaactcaattgagcagtagctttgatcccttggtctgggggtcgaaggaagatggcgctgttatcagcggggaaatgtactatttaagatcagctttgttgtaaaaccatttgttctagaataaaactcaattggaaacgtga

SEQ ID NO: 269804 - DNA, 368 bp, Homo Sapiens
  misc_feature (16)..(16): n is a, c, g, or t
ttttaaagagccgtgncctcattaccagattaattggtaaaataacctataaaaacttgattttttacagtattgtcttttagaaactacttgaaaactaggtacaacatacatcatcagtaacagtacatttatataattgaggaatgcattttgagatgagaatatgtactgtgatgtgtaactatcaaatttgtgtttaatcacttgtttccatgggccaaatagctaaattttggctttactttgaatgattgtattttagaagttggtaatgcaactaaatttgaggaatttttttctgcattttagtaccattagattaaaagctgaaattggtgttttaaagtaagctccttttacctttg

SEQ ID NO: 269805 - DNA, 268 bp, Homo Sapiens
  misc_feature (42)..(42): n is a, c, g, or t
  misc_feature (46)..(46): n is a, c, g, or t
  misc_feature (82)..(82): n is a, c, g, or t
tgcccagcactttcagactgaggcagtaggattgccctgagncccnggagtttgagacccagccgaggcaacataacaacantctgtttgtacagattcttttaaagaaactatacaggtgtggtagtgtgcccaactgtggtcatatttactcaggagacataggaggcatgactgctttacttcagaaatttgaggttacagtgagctgtgattgcaccactgcaatctgtcccaggagatagagtaagatcctgtgtataaaatg

SEQ ID NO: 269806 - DNA, 108 bp, Homo Sapiens
aaatatatttgatgacataatttttgtgtagtttatttatcttgtacatatgtattttgaaatcttttaaacctgaaaaataaatagtcatttaatgttgaaaaaaaa

SEQ ID NO: 269807 - DNA, 437 bp, Homo Sapiens
ccctggtgccaaaaaggctggggactgctgacctacacgatatattagttatgactcttggtgcatactattgacagaaatcccactcaacctagtataatgcagaggacagttcacggagcaactcaaataattgccacttttacaatattgaagcttcctacgggaaacataatacatctctcaatttatgtcctttaatacgattaaacatttttcttcatgtaggttctccagaattttggttatgcctatgcctagattatttatgattgttgttggtattgcaaatgtcctctcctattgattatttaatggtatctatggaaagtattgatttttgtgtatttgctctgtgcccacttgccatctaactggttgttatattttattgaacctttcaaaggatataaattatgctgattttaatgtcaaaa

SEQ ID NO: 269808 - DNA, 830 bp, Homo Sapiens
ttgcagacaggaatcttaaggtgtagccacaccaggatagagactggaacactagacaagccagaacttgaccctgagctgaccagccgtgagcatgtttggaaggggtctgtagtgtcactcaaggcggtgcttgatagaaatgccaagcacttctctttctcgctgtcctttctagagcactgccaccagtaggttatttagcttgggaaaggtggtgtttctgtaagaaacctactgcccaggcactgcaaaccgccacctccctatactgcttggagctgagcaaatcaccacaaactgtaatacaatgatcctgtattcagacagatgaggctttccatgggaccacaactattttcagatgtgaaccatttaaccagatctagtcaatcaagtctgtttactgcaaggttcaacttattaacaattagggcagactctttatgcttgcaaaaactacaaccaatggaatgtgatgttcatgggtatagttcatgtctggctatcattatttcgtaggatattgggacaaagaaccttctctatggggcatcctctttttccaacttggctgcaggaatctttaaaagatgcttttaacagagtctgaacctatttcttaaacacttgcaacctacctgttgagcatcacagaatgtgataaggaaatcaacttgcttatcaacttcctaaatattatgagatgctggcttgggcagcatccccttgaactcttcactcttcaaatgcctgactagggagccatgtttcacaaggtctttaaagtgactaatggcatgagaaatacaaaaatactcagataaggt

SEQ ID NO: 269809 - DNA, 574 bp, Homo Sapiens
  misc_feature (462)..(462): n is a, c, g, or t
  misc_feature (489)..(489): n is a, c, g, or t
  misc_feature (498)..(498): n is a, c, g, or t
  misc_feature (523)..(523): n is a, c, g, or t
  misc_feature (534)..(534): n is a, c, g, or t
  misc_feature (541)..(541): n is a, c, g, or t
  misc_feature (548)..(548): n is a, c, g, or t
  misc_feature (559)..(559): n is a, c, g, or t
agagtcacacgatgtcatggttcactaggcagcacctcacgctggagctggagtgcgaggttcttaggggccgtgcacccatgttgccaagccaatgcatgctgagctgaaggaatttgtcttagtggcagttttttaaaaaatgcccccaaagtctatgctgatactgaaaaagggctactgtatctttaaaaacaggaagttgaacccaagctgtgaaaagccagtggtgctctgtgcatggtgctgtgcggacctgggtgctgtagtgttgtgctgggactttcttgactcttgggcaggtcacatcctacaggagcttcagcagaccagtgttaacaacagtttaatggcattcttattcctgatccctggaattttccacattgggacaatgggtggcatggccttcacacctgaggcctgctttcctccatggtgttcattggggttcggggggcntacatttaacatttttaaagtgcaagngttcaaacnttttcaacaggttgctataattttncctccctattnggtgccnttttccnttgatcatttnttttttttcccttct

SEQ ID NO: 269810 - DNA, 605 bp, Homo Sapiens
  misc_feature (19)..(19): n is a, c, g, or t
  misc_feature (28)..(28): n is a, c, g, or t
  misc_feature (44)..(44): n is a, c, g, or t
  misc_feature (67)..(67): n is a, c, g, or t
  misc_feature (78)..(78): n is a, c, g, or t
  misc_feature (85)..(85): n is a, c, g, or t
  misc_feature (95)..(95): n is a, c, g, or t
  misc_feature (159)..(159): n is a, c, g, or t
  misc_feature (174)..(174): n is a, c, g, or t
  misc_feature (310)..(310): n is a, c, g, or t
  misc_feature (351)..(351): n is a, c, g, or t
  misc_feature (444)..(444): n is a, c, g, or t
gacaccacaacaaaagaangggacagangaaaaccggctggctncgcctacaggaatcggacattangggcccggagnccataantgtgacaacnaccactcttcacaacctatatataatacctcaaaataagttaatctctatcctcaaagtttatntccttatacctacantttctatgatcaacacactcactacaaaaaagtcccactagcggttgccccaggtgctccccgtgagttggctgcttactgtgaagtggcccatccatcttaaatctctcagaggacaattataggattactaaanttagcttaacttatatctgaataggtttattttctgaacangacatggggaagaatgtgtgaactttacctcttgtctgaggatggaacttgattttcattaatccctggttattatattagaagaaaaagacnaaacacaaaacaagcaggtcaagaagcaatccatgctagttaatcacatatactttccaatgaaaaaaagtcaattgttaaacttgataccttgagtacatcatgcaaaaatacttaccacaagattcctttgaaacagactcaatgactgttataaaaag

SEQ ID NO: 269811 - DNA, 515 bp, Homo Sapiens
aacccagcctggcaccatggtgagaccccatctctattatttaaaatgtttcttaaataaaaaaaacacagacattagcaactagttgctagccataattcctcccttgtttcgattgccagttagaagcaatttttatttcactggttatttgcaagagaaggggtaaaaaaacagcatcagagtgcaacactgaagtgagcttactttaatttgtaagtgaagctgttgctgaacatgacccactatcgttgctgaaatataaaattatactcactgattgtaatggttgaaattttcctgaataatcattagccaaagatcaactctctaatggtgctaatggcaatctagctaatgtgcaaatttaggaagtcttcagtactaagtacataattttcaaataatattttttaattgtctactttggatgttagctatgtcttgtgagtataaattccaattttaagcactattttgatgcaaaaaaatgaataaaaaatttaatttataaa

SEQ ID NO: 269812 - DNA, 478 bp, Homo Sapiens
  misc_feature (437)..(437): n is a, c, g, or t
aagcagatttatctctaagaaaaagaaaacaaaattgtttccatcttttatttcaatttaaaagctaagatggaatattaatattgcctacttctgctttccttgtttaagcactaaaagaaatcaagcagtcattggaatgttttcttttttaaaagaccctttaactatatgattttaaaaatgtctgtctccaaaaaatgaaaatcaaaacacatagccaagagccaagagacgaggaagaacattctcatatcttttcagcatttgggaggtgggtgggtgattgtgaggcactttaggactgaggccaacttggacctaatatggacaaagggaccagagcttttgggttatgggtatttcatcagcttcctttctcagcatgcataattgggcttataatttatggtccattggttggctggtaccgattncctacaagctggtattaataccctaaggaacctttacctta

SEQ ID NO: 269813 - DNA, 417 bp, Homo Sapiens
  misc_feature (72)..(72): n is a, c, g, or t
cggtgtttgggtttggtgggaccctgtcctgttaaacaattgaggccagcccagccgggttcccccgggaanaagaggaaaaaccccccgtaaaaactgaaagctgaaaagctatgaaaaagccgctgtgaggacagtcaaatacaattcttagctgccagggggctgaaacagcacattggtctcagagacagatcctaggatcacctccagcgaccccaagagacgtactcagaaagctgagagagggcatcggtgaaaaaggaaatgatcgtgttcttccctgggtaaagttctggtggaatgaagggtgcctttctggatggagggtggaagcacaaagtcaatcttcaattcccaacagctgacagcaccaagagattctatgttactgtgaggataattttatatctatat

SEQ ID NO: 269814 - DNA, 447 bp, Homo Sapiens
  misc_feature (17)..(17): n is a, c, g, or t
  misc_feature (32)..(32): n is a, c, g, or t
ccccccgggtcaacatntgaacggggcctcanaacctgagtgcccttgtgctttgtgtacattgtgttcctcccctagggtgctttaaacccctgtttgttttccttcctgcatgaggctgatttcccagtttgtcatcaacctctttatcttataatttaggatagagttgaacgttagtcttgaaagattttctaaagtagtctttcaaactgttcctcagaggcctaggattttccaaaagtaccttaggaaccttgtaggctgcagtgggggtgtggcgatagagcaggaggcagggagacagggctgcagggcctcccaccttccaacagacaggctctgctgtatctgttgtacatactgggattctgtaaaggacattatctggggtgttgtatgtatttttgtgtgttctgctttttttaaataaacttgaaaagctaa

SEQ ID NO: 269815 - DNA, 310 bp, Homo Sapiens
  misc_feature (11)..(11): n is a, c, g, or t
  misc_feature (86)..(120): n is a, c, g, or t
acagcttaagngttaacagctcagtggagggtcagtgtgacagactgtattagtcagggttctctagagggacagaactgatggannnnnnnnnnnnnnnnnnnnnnnnnnnnnnnnnnngggtgtttattaagtattaactcacatgatcacaaagtcccacaataggccatctgcaggctgaggagcaaggacagccagtctgacttccaaaactgaagaacttggaatccaatgtttgagggcaggaagcatccagcatgggagaaagacgtaggctgggaggctagggctgtctctctttttcaca

SEQ ID NO: 269816 - DNA, 622 bp, Homo Sapiens
  misc_feature (14)..(14): n is a, c, g, or t
  misc_feature (25)..(25): n is a, c, g, or t
  misc_feature (47)..(47): n is a, c, g, or t
  misc_feature (84)..(84): n is a, c, g, or t
  misc_feature (131)..(131): n is a, c, g, or t
  misc_feature (513)..(513): n is a, c, g, or t
  misc_feature (571)..(571): n is a, c, g, or t
  misc_feature (581)..(581): n is a, c, g, or t
  misc_feature (599)..(599): n is a, c, g, or t
cccgaacggggatnggggaaacccncaaaaccctacctccccgaagnagtttggggccctaccgtttttaaggggttttgggantggggttgaaagtgttaccagattggaacgggtccaaccgaatgccngggtaaaaccccataggacagggaaaatgaagaaactattccttaggcctgattcggttccttcctgtgagggtcctttaaactggatggccctcagcctgttaaattggaattcaggatcctacttaaacaattcttaaacaaaagcctcatgattcctaacacccagagatcccaatctaaggccagaaatactatctataggaacaaccagggatgcaaatggtcagtatccagtgttatgtgactttcagttacaagggaagtggggtcaaagcacagactgaataatgctttaattatagctatatttctgtctaggaattctttttaaccctgtggaacatgggcttcagcagggaaaccaatattgttaaggganaaaatgggggttgggggggtaaatttttttcccggaggtactccagcccagttgctgnttacttttcncttaatccggggtggggntgaaaagtgctccctctaccagg

SEQ ID NO: 269817 - DNA, 459 bp, Homo Sapiens
  misc_feature (307)..(307): n is a, c, g, or t
  misc_feature (321)..(321): n is a, c, g, or t
  misc_feature (334)..(334): n is a, c, g, or t
  misc_feature (341)..(341): n is a, c, g, or t
  misc_feature (404)..(404): n is a, c, g, or t
  misc_feature (419)..(419): n is a, c, g, or t
  misc_feature (432)..(432): n is a, c, g, or t
gagaagtattttcaaagttatcaccatcttgttactgctcctgcaaacactgtactacttggccaaagtctgcttaaaatgtgatatctagaaaggaacacaatattccaacagtaattgatcttaaactggagtccggggggattattcttttgatctaggcacatacttccatcaacacattcttaaaaagccttagttctcgcctcccgtccccctcccccggtgtgctgtaccatgagctgatattgggatttgggccaaataaaactgccaactcttttttcctgaatactactatcaaggncagggtttcccctncttttaccggggnaatgggnatgtggtctaatttccattttgaggcttggtctcccacattggaaaatattttttaaaacatnattattttttttacntttgagggcaggngtttcaccccgttggcccgggggggga

SEQ ID NO: 269818 - DNA, 498 bp, Homo Sapiens
  misc_feature (333)..(358): n is a, c, g, or t
  misc_feature (383)..(383): n is a, c, g, or t
  misc_feature (445)..(445): n is a, c, g, or t
  misc_feature (453)..(453): n is a, c, g, or t
  misc_feature (479)..(479): n is a, c, g, or t
gcccttgtgggagacagaagccatcagttaaatgaggttaggcctctcctcctaatatactgattgacaatgcatattagccaggtaatgcactttagctaccctggacaatgctatcaagtgtgctgggaagggaggaaggcctctctacatatggaaaagcccatgcgtggagttcccctcctttcaacattgcaacaacagtaacaacaagacaaccgcaacatgtgggcgtagtcaggcaatgctgtgtgcgaagtaaactacctcaaggtatgaagttacctcagcaattattttcctttttgttccccccaaccccattaaaaaaannnnnnnnnnnnnnnnnnnnnnnnnngcagcttgctgatattttatataanaaagaaaaggcaaagcaaaagaggagctgatagtcctgaatattttaatttttttaatgaanagaggaanaaaagaaaggtcctaataaatctcgnggccgaattcttgggcctc

SEQ ID NO: 269819 - DNA, 404 bp, Homo Sapiens
ctcactaacttacccatcgagagcggcccagctaggggtcaggctggcccttaacagagaccaaggagacttggttagacgacacaaacggggctgcgggtgggggtggatgggaaagggatttcatcacgaggtttctgccctaccctttagaagagtggtagagtggtcttagtttttccagaaataagcacctacacttgaaaatactctattccctttttctctctcacttttctcccccgccccccatagtctttcgtcattcacccactgagtgtttggggtagagacttgtcccaaagatgtcttctgggtctttgggcagagccctaaggcttggagccctggttggagaggaaacagtaagactctgctggagctccctgcggtggctggaaaaa

SEQ ID NO: 269820 - DNA, 172 bp, Homo Sapiens
  misc_feature (102)..(102): n is a, c, g, or t
  misc_feature (132)..(132): n is a, c, g, or t
gatcagaggcttcttaaatcaagtttgtatctaagttctggtccagtctgtgctacttagcatgggattttaagccaattgtttgttggctttgagcctcangttttctcatttgtaaaagtaggataaaangtgggttgcaaattcaaatgttcactgctgggacacagta

SEQ ID NO: 269821 - DNA, 261 bp, Homo Sapiens
aatgaattcattatcaacaaaggtgcccaagaacatatattggggaaagaatagtctcttcaataaatgggatgggaaaactggatgtccatatgcaaaagaatgaatctagacccctatctcttgccatatacaataataaaatcaaaatggatgaaagacttaaacctaagacctaaaactacgaaactactaaaagaaaacattggggaggccggcagccatgagtcagggttggcgtggtctgtgcagtagccggtc

SEQ ID NO: 269822 - DNA, 457 bp, Homo Sapiens
  misc_feature (368)..(368): n is a, c, g, or t
  misc_feature (376)..(376): n is a, c, g, or t
  misc_feature (405)..(405): n is a, c, g, or t
  misc_feature (430)..(430): n is a, c, g, or t
  misc_feature (440)..(440): n is a, c, g, or t
gacttgtagctttaacaaaaattaggttccctagttgcagctgccagggaaagctagtctaatatcaaagcaaaccatccttcttctcaagcacagagtttttaagataggagtgtgtgtgtattgacattttcctagcagtggctgaagtcaaggaccaggagatttagggcccacttggagttcttatggtgaaacagtagtagcttcctagagacctttaaagcttatctgtaatttgtatagttcagaagatactgtatacatcattatttctccctgctttcaaaacagggaagggggtgtgggagagtaacacacttaaaaaaagggtaagtaatttaatttctggggatttacaggcgtgncaccccgncggcccggcccgctttcctagggtaattncttaatggcctggattacaggttgnggacccgtgnccctgttacaggagttg

SEQ ID NO: 269823 - DNA, 327 bp, Homo Sapiens
  misc_feature (16)..(16): n is a, c, g, or t
  misc_feature (51)..(51): n is a, c, g, or t
  misc_feature (70)..(70): n is a, c, g, or t
aaaatcccttttaggncttagcctagacttttgagaactcctagccccctngccacaatagcactttgcnactcatccctctcctgccaaaagcctctgactccagccaaatcaagccgattgctaggccttatctagattcagtacctttctattccctgctcatgtgatacccctccgcctgaagggcccatctaccacacccattccccttagttttcccacgccctataatccctagcactttgggagaccccaggcgggaggattgattgaagacaagagttcaagaccagtctaggcaacaaagagagaccttgtctctac

SEQ ID NO: 269824 - DNA, 411 bp, Homo Sapiens
tagtaaatatagtctcaaaacacatttggcggcaaaatctgaacctcacatgagattatttatagtctctatatatataatctcaattaattttcaactggatatttttgctacagaaacattcataatatttgactatacagggttctatcccaaacctcactggaggtgttatacaagttatatgcaccataatgcctttctaaaattcaaaaaattagggattctgggaacatctgggcatgaataatttcttaaaagggcatacactctcaacggggggcaatatcatacccaaaggggcaaaatagggtttgtcggcgagggagaaaaaaagttaagacgttagaatggtgcgtagccctccatagctcaaccttacccaacaaaatcttactattacatgagcag

SEQ ID NO: 269825 - DNA, 435 bp, Homo Sapiens
  misc_feature (19)..(19): n is a, c, g, or t
  misc_feature (31)..(31): n is a, c, g, or t
  misc_feature (63)..(63): n is a, c, g, or t
  misc_feature (74)..(74): n is a, c, g, or t
tggaaaacccaaaggttanaaacagggaggnaaaagggccccaggtttagggcccttcccaanaacaacaaaanacttcctaagagttgccccattccctgttatgttccttggacccctaagatacctccctgtccccttttaaatcccagattaagagaaacgtccaggaagagctctttgaagccctcaatatttgttggagggactggactcctctccagctccccaccctctgcctccagtcaccatgtgcaagagaggtcctgtacagatctctctgggctctcctttctcctttggaataacttgttcctatttcaggaaagggaaatggtgtcactcaggccctgggactgcttctgcagccaggctggggccacaggtcccactctagtgaaggtcaatgtctcagaataaaagctgtatttttaa

SEQ ID NO: 269826 - DNA, 446 bp, Homo Sapiens
  misc_feature (340)..(340): n is a, c, g, or t
  misc_feature (355)..(355): n is a, c, g, or t
  misc_feature (392)..(392): n is a, c, g, or t
  misc_feature (412)..(412): n is a, c, g, or t
  misc_feature (425)..(425): n is a, c, g, or t
  misc_feature (430)..(430): n is a, c, g, or t
acttttttcaatacgtaaacatatatcgcaataatatataaacgtaagattggataaacatatataacaacaacaatatataaacataagattggatgataaaaattttaattactttgtaatgataaaaagtctgtagaggaaaccatgattatgttaaaaggatgttggttgtgcataacaggggcaagttgaaatttgtcttactaatccaaggtttacaggtaagcttattgagtgttactcctaagacatgacaagtgataattattctttgggccttttgcgaagtaaaataatgcatgaacataggagtttatgtgtttgggcaacaccgcgngccccttctccgggncggagctggggcctctgtgccttttggagttgttccnttggcttcatgagtgttccncaggggatggggncaggncctgctccctgagcac

SEQ ID NO: 269827 - DNA, 558 bp, Homo Sapiens
  misc_feature (512)..(512): n is a, c, g, or t
accccaaactcctaaccttgtttaacttttaattttaaggtttcggcctccaaaagagggtaaactcctgaaggccttccaccttttttccatccttccatatcctgccttccaatggcaacagcggccgtcccccctggttccctcccatccctagatgacaggcagagaaagaaagggagcatgagttggtcaggagacaagagacggtgcaacagaaaagttggggatttggtttcttgggggagagggaagagaatcagcagaaaaatccagagggatgaggggcatatttctgtcttcccacagagtggctaaagaacacctggtagtttgtgagaggaaatgtaggatggaatatcttgctcatgcccactacagaggtccttggaattcacctagggtcccacagaataactattagtcatcccacccaggcccaaatcatgtgcaaaggagcaggagagtaaaagaaaggtaggagagtcagaatgggcaatgggtagtgaggntcttgactaacatacctgtccaactgttggtccctataagaaaggc

SEQ ID NO: 269828 - DNA, 445 bp, Homo Sapiens
  misc_feature (11)..(11): n is a, c, g, or t
tccctgacccnaacctcatgcctcccccttccttcctcctgccctgtccatccctaggatgggagggaccccccaggggacgcccgctgtgccccttgaagccagatatgaaagatgaaaaagtgaaagccctcagagttacccctctttgagcccgaaccctaaaataaaagtaaacaagatagagcttgggcttgcgggccccagttcccagaggtggaagttacagaagaggaggtaccctgggccacacgacatgagctggaaaatctctcttagagagttggagtagcacaattgcctgttttagggcagaaaccatgggctatgttaatgtcctaatgtgtagctagcagatcgtagctagtttgtattgtcttgtcaattgtacagactttttaaaaaaaacaaccaccagtgaaatgtgtgtgtatacaataaactg

SEQ ID NO: 269829 - DNA, 517 bp, Homo Sapiens
  misc_feature (432)..(442): n is a, c, g, or t
tgatggggtcgctctgtctggagcataacccacaggcgtttttctgcaaccccatccctgcatgcctgatccccagttcctataccctacccctgacctattgagcagcctctgaagagccatagggcccccacctttactcacaccctgagaattctgggagccagtctgccatgccaggagtcactggacatgttcatccctagaatcctgtcacactacagtcatttcttttcctctctctggcccttgggtcctgggaatgctgctgcttcaaccccagagcctaagaatggcagccgtttcttaacatgttgagagatgattctttctttgccctggccatctcgggaagcttgatggcaaccctggaagggtttaatctccttttgtgagtttggtggggaagggaagggtatatagattgtattnnnnnnnnnnnggtatatatgcatatatctatatataatatgacgcagaaataaatctatgagaaatctatctacaaactaccctc

SEQ ID NO: 269830 - DNA, 248 bp, Homo Sapiens
  misc_feature (18)..(18): n is a, c, g, or t
  misc_feature (35)..(35): n is a, c, g, or t
  misc_feature (114)..(114): n is a, c, g, or t
  misc_feature (198)..(198): n is a, c, g, or t
ccccccggggggaaaccnccataaccgaatgtgtncccctttgttgaagactttggaaaaaagagcccagatgggtggaaaacagccctgccctgtagtagctgtgtgaaaaanttatgtgaacctcctatcctatatatagatgttacccttgactatggtttattttccctatcctttattttcatttacctgccnttttacatcttttttaatatacccactctattaggtgcattctttaaaaa

SEQ ID NO: 269831 - DNA, 270 bp, Homo Sapiens
  misc_feature (247)..(247): n is a, c, g, or t
taaaaattttctaagaccgagatcaagtttcacaaacacaaataagtccatctaaaattagtaggctatcatattggtatgtggtaaatgaaagtaaagctagaaactgacaagaggagagtgaaataagtaaaacaacaaaatattttactatatacatctatatttccttaggacattgaatgaggaactgagagtagttgtgggaatattaagtgtataactgtttaatgaagacctctagggnatttataaaaaggtcaaatgggg

SEQ ID NO: 269832 - DNA, 720 bp, Homo Sapiens
  misc_feature (42)..(42): n is a, c, g, or t
  misc_feature (315)..(360): n is a, c, g, or t
  misc_feature (395)..(395): n is a, c, g, or t
  misc_feature (451)..(543): n is a, c, g, or t
  misc_feature (556)..(556): n is a, c, g, or t
  misc_feature (706)..(706): n is a, c, g, or t
aggccacaaggtcccaaactaatccctcaaaaaaaaggacanccctctttatgcctgaaaataggaactttaaaaggaagctcttcttgtaagtccaaatggacgtaccttgtggtatggctgtaaggactcgattttaccgcttgtgtattcctaactatagctaggcctgtcacctgctgttcctgtgatctcagctttacctagaagagctcctgaaacagaatgggtacacggaaatctggaatgaatagctatctgctcaaaaacgattgtttaaaaacagatgattggggccgggcgcggtggctcatnnnnnnnnnnnnnnnnnnnnnnnnnnnnnnnnnnnnnnnnnnnnnngaggtgaggagattcgagaccatcctgggcaacantggtgaaaccccgtctctacgtaaaaatacaaaaattagctgggcgtggtgatgcnnnnnnnnnnnnnnnnnnnnnnnnnnnnnnnnnnnnnnnnnnnnnnnnnnnnnnnnnnnnnnnnnnnnnnnnnnnnnnnnnnnnnnnnnnnnncgacagagccaanctccgtctcaggacgaacaaagaaacaaacaaaccagatgactgggagattgaagaggaaaaaagatgggagaaaacgtagggaaaggatggggcctcacagactcagctgtgggtgggggggtaatcattacctcaggagaagccgcanagctgtgccgaact

SEQ ID NO: 269833 - DNA, 423 bp, Homo Sapiens
  misc_feature (21)..(21): n is a, c, g, or t
  misc_feature (64)..(64): n is a, c, g, or t
  misc_feature (77)..(77): n is a, c, g, or t
ctgaaaagtagttgtggaatnttcaagtgttataaaatggtttcaatgcaagaccctcctaggnaatttcataacanagttcaaaatgggtaaaacaaaggacatggcacgttaatggaatcaagaatgctactctctaatagacaaagacactggctatatattgggcagatagcatcttaagtaaccaagtgagcttttttataaagtacaactgtcaattaaattctatattctagaagcacaaactgaacacaaaagcagaaaggttcaaaaccaaaggaactatcatcaatcagatccttaaactggaaactcggggggaaaaaaaagaccaggtaatgagtcatatcctttgaaaatacaggctcaccttccttagccaacctaaaatctaactttaatcttgattccagtgagatc

SEQ ID NO: 269834 - DNA, 382 bp, Homo Sapiens
  misc_feature (363)..(363): n is a, c, g, or t
aaaaagttaaaaattatctaaagaaatatttagaaatgtgcactgtcaaaagaatacgtaaattttagtgttataatacttaaaagtcagaagcaacctaaatgacccagtcggtgataaagtagctaagtgatagtgcatcttagtgggataaaatgttttacccattagtcatgttttaacacctctttgaagggacacacagggaaaatgttttttatatagtacaactctaattttttcctatacatttcacatttggaatgccaaactattggaggttatccataggctgtttcagttaaaagggggactaaaaaacttacttttctggtaatttcccaaataggtcctacatgtttngccttttattattaaaggt

SEQ ID NO: 269835 - DNA, 487 bp, Homo Sapiens
  misc_feature (14)..(14): n is a, c, g, or t
  misc_feature (36)..(36): n is a, c, g, or t
  misc_feature (67)..(67): n is a, c, g, or t
  misc_feature (70)..(70): n is a, c, g, or t
  misc_feature (83)..(99): n is a, c, g, or t
ctttaatgaaattngggaaaaaaccccaattttaanaaaaatccccccccattttgggaaattaccngangaccaactccctnnnnnnnnnnnnnnnnnccgggaagtttaaaaaaagggccgccctcagtccattttttaacaatgtaaattacattggtaattacaccttattacatttacattgtaattacattacattaaaagaaatattgacacaatgcctacaatatgggtaactcttgagaaggcaaacattatgcctaagtgaaaaaagccagacaaaaaaggctgtgccatattatgattccatttttatgaaatgtccagactaggcaaattcatagagacagaaagtacactagtggttgggagggagtaggggaaacagggagtgactactaatgggtacaggatttctttttagggtgatgaaaatgttctagaattagatactggtgattgttgcacaattctgtgactatac

SEQ ID NO: 269836 - DNA, 598 bp, Homo Sapiens
tcagtgccttaagatggtctttcccaaggagcatcccccaagccttcaaatttgccttccagtttagacaggaagctggcctctgcctttagggccgtatgaggactcactccttgtctctttctgccaaagcctgacgactccctggagcctttctttgactctctggtaaagcagacccacgttcccaacctcttctccctgcagctttgtggtgctggcttccccctcaaccagtctgaagtgctggcctctgtcggagggagcatggtgagtaggtcctcagagaggggaggtcctggcattgagggagagatgggtgccatcctctccccttcctgaaagctacaccacagttttggctccgatacttagaatcaggaggaacctctttatattccctacccttactttatttttccattcttttcttttttgcgttattccagaaaggaatcaaggcacctatggtaaacttggaaaggaaggcaattaggaaaatttcaaaggaaatgaaaataagacctgttgaattaaaattattcagtttgatggtcagaaggcagagatataagaagtttgtctatttattaattaa

SEQ ID NO: 269837 - DNA, 420 bp, Homo Sapiens
caagcgtttcagggttgagtgagcttgagaaaagtctccggaggaattgtgaagcattgtgggtgcagacaagctgttgggtgccatgttccttatatttggagcaggtggttctgattcctcttccggggaatattctgggattggtttagcaactgacttgggtatggttctgattcatcaacctccacaggaatgcttcgattcattctagtttcttgaagctgaggaggcatggaagcaggccacctgtgttctgtacagcatcaccaggctggaaatctgccatggctttccttcacgccatcacaagaggatacagatgaggcttagatccaccacggacagacagactgggcccggagggtagtcggctctcggcggcttctcgtctccctccaccttctccgggctcgtgcc

SEQ ID NO: 269838 - DNA, 362 bp, Homo Sapiens
  misc_feature (18)..(18): n is a, c, g, or t
gccagcctagcaggtttncctgggatgtcggggagccccagatgacccctatcgggtgcaatacctagcctaagggtaaagcctagaaaccctacactgtcacctttacctgagatttcctgagtatacttttcatattgcccttaatgtagcagtaatgtgtttatgcatttgtttctttgcacagacattttgtcaaatattaaaactctacttttttatggcacatattagcatataagcctttattccaagaggtatttattttttcacttgtaaaaaaataatgtttccacgtaaagaactctgttatatcctagaggactctgtcttttatattcgggataataaagactttaaag

SEQ ID NO: 269839 - DNA, 142 bp, Homo Sapiens
ggtgtacaaatagacaagtagtttaataaagcagaacaaagagtctagaaacagactcacagatatatggtcaattttcaacaaaggtgcaaactggacatcatcaaaattaacctctctctgctctttgaaagacgctgtt

SEQ ID NO: 269840 - DNA, 341 bp, Homo Sapiens
aaagccttatttatatttcaggcttccattcactttttcaacaaatgttggttcagaacctattacatgaaaaaacaaaacaaacaaacgaacacacctcaaatgtctactaaggtataaagaagaacaagacaaaattcctgaatttctggactctcagagatggtagttcaggctattctgagcacactgcctatggggtagctgtcctcctcaaggaggagttatctcccaccgcctgcaaaaaaagtttggcctctttaataagacagccagaaatacttaaagtacaatgtgataaattctaaaatatactgaaaaataaaagaggtgttatgggg

SEQ ID NO: 269841 - DNA, 534 bp, Homo Sapiens
  misc_feature (14)..(14): n is a, c, g, or t
  misc_feature (76)..(164): n is a, c, g, or t
  misc_feature (195)..(195): n is a, c, g, or t
  misc_feature (453)..(453): n is a, c, g, or t
  misc_feature (515)..(515): n is a, c, g, or t
atcatacagagttnctgtgtgggcttcattccttcttaaagtttagtcactgaaatttttgtttgtttgtttgttnnnnnnnnnnnnnnnnnnnnnnnnnnnnnnnnnnnnnnnnnnnnnnnnnnnnnnnnnnnnnnnnnnnnnnnnnnnnnnnnnnnnnnnnncaaaaccaaaacaaacctttacccacttctnctaaacaacccctaaaaaactgctctgaaaagcagggaatatcattgtgcaaagtaagttgtttttttccacggggctgtctgcgtaaaacttgccacttagagccctgcctgcaccgtcgtcacggcccagcctgcaggtgagcttcctcgcgcccccgcctgacctgagtgcccttccctgagtcagacacagtgtcgtcgccctgcaggaagccagggggcccgtctgcttgctcgtgggccaggctgggctttngggtgcccgacccccttccagaggcaagccccttaggatgcccggcaggttcctctctaccnttcccatccctgggaggtt

SEQ ID NO: 269842 - DNA, 364 bp, Homo Sapiens
  misc_feature (163)..(211): n is a, c, g, or t
  misc_feature (239)..(239): n is a, c, g, or t
  misc_feature (317)..(317): n is a, c, g, or t
ctagcaccatgataccctggaaaaaacctctatgtgactggccaggagtagactgacatgtttttggcacaagaaatgttgactttagaaaggcctgaagggaaatgaacaactttctggtctcccagcaataatcaactggaaaacatgaagagttaatttnnnnnnnnnnnnnnnnnnnnnnnnnnnnnnnnnnnnnnnnnnnnnnnnnccattcacaacagttacaagcatataanatacttaggatttaattcagtaaggaatatgaaggcttggtaacataacactaaggggccatgctttgttcaccattnatggactgtaatgacctacagaggttctggcacaatgcaaacacttt

SEQ ID NO: 269843 - DNA, 305 bp, Homo Sapiens
  misc_feature (262)..(262): n is a, c, g, or t
ggctaagctacttacataaaaatacactgttttaaaatctctaatttaaatctacttcgtatctactactttatgtctattagactaccgtctaatttaaatctactgctttggtactactgtagcaaagaaagcaaataaaaattgtgttccaagggttttcaaaaaaaccctctatatccaatctagggaaagagatgagtaggttctttaactacatttatacaaaaattattctaaatgtaaagggcaggttgtagancaaaacacaattcataatatttgctatgggtttgaggtgtgtg

SEQ ID NO: 269844 - DNA, 191 bp, Homo Sapiens
  misc_feature (24)..(24): n is a, c, g, or t
tgactctgacccttcctgccctgntggttctcccccagaagcagccataaaacctgggaaggattttctgaccttcccctgaagtagatcataagactgtcatgtaagaggtgctctccctggcacccagagaaaaggagcatccttacctccaaaagcacagggacacaaagaggaatctaaacaaacag

SEQ ID NO: 269845 - DNA, 118 bp, Homo Sapiens
tatttacaagtaaataagttctatatcttgcttcaggtacatacatacatgccaaaaattcactgactgtacacttaaggatttgtgcacttaaccatatggcatgttatgcctcatt

SEQ ID NO: 269846 - DNA, 436 bp, Homo Sapiens
  misc_feature (279)..(279): n is a, c, g, or t
  misc_feature (406)..(406): n is a, c, g, or t
ctaatgagaagaaaagctttactgggagaaaatacaacaaattccagagtgcatggtttttagcccaccctatcaccccaccagcaataggaacacagaccactcgatcaccacacattccctacctcagggagtaagtacagcagccaacatctggtctcagagctgctgggaaaaggggcaggaggaagaagtatctgggaataccattctctcactcttttcccctccttcctgggcctgatttagaaggaatctgactgtcccgggatacagganttcttgggttgggatcttgtgggaactgggggggcaaaaaaataggcagcaaaaggcactttaaggggcaaggattttcagctgggggactttttcaggacttcaggtggacccagttgattaaggncaagttgccccaaggttcccggccacttgt

SEQ ID NO: 269847 - DNA, 360 bp, Homo Sapiens
ctgactaaaacagaacttggtctgaacttttaaaacatattctccaaggcttccagcataccatttctgccatattttcaagatcaattgtggatgaccgtaatagagccagactctggcaccaatgcacagaggaaagagtttacaaatatttataaagaaaaatgattgaaactaattttttttgtcaaaatgaaattcaagatgaagactacacccttccttttaatcagaaggtgcatgaggtttagggagaatgcaatgaggaaatgaaattcacagggacttgctggcttctaatcttccttaaaaaataagaaaattaaaaagggaaatttaggctttttatcaggccaattc

SEQ ID NO: 269848 - DNA, 462 bp, Homo Sapiens
  misc_feature (73)..(73): n is a, c, g, or t
  misc_feature (132)..(132): n is a, c, g, or t
  misc_feature (344)..(403): n is a, c, g, or t
attcggcacagggtaccactggatttaggacagaagaaattccggagttccccaataagacagctatagcccngcttggtcctgtgacctccgtttcctaggcagaggcctaggaactaacagaaaaaaacngcaaacaggaagaagaaactttgcagatacatttgtaaatgattgttcaaggatggagtacactccttcccgtgcccttggtcctccattaccccagcccctgtcaatttagacaaacctccagaaagaaggaacttggctgacattgaccaagattaaatttcagttcccagggcaaagtgaggtcttaaaatagaaactaatctatatgnnnnnnnnnnnnnnnnnnnnnnnnnnnnnnnnnnnnnnnnnnnnnnnnnnnnnnnnnnnncacttggagaccacgagttttgagaccagttctggaggaaccttaatggagaccctgtt

SEQ ID NO: 269849 - DNA, 454 bp, Homo Sapiens
  misc_feature (424)..(424): n is a, c, g, or t
  misc_feature (441)..(441): n is a, c, g, or t
agaaacagcttgctaaagccctctccacttgcaagataacaaaactgactgaaattggctggaactaatatgaccaactagagtctgtgcagactgagcttgctgacatcacagcccaaatttccacatttcattccagctactccagaatttgcacatgtggcccataaagaggcatgaagagacaactgtgcacgtccaaggacttttcagacttcctctttccttccccagaatctaccccctaaacctttcctaataaacatactaccttaaggccaatttgcggggagacagatttgagctggactcctgtcttccttgttggttatctaagtaaagctttcctttcttcaaaaacctgggtgccccctaagtttgggaggttttgcttgagcccagggagttttgagatttagcctgnaggcaacatgggcaaanccccacggtgtta

SEQ ID NO: 269850 - DNA, 399 bp, Homo Sapiens
caattaactacaggtagtgccaattctcagctagggttgagaattttggcttgaattcttagagatgaaatatgtaaaattagacgacctgaaaatattcacataaattgttagacaagaaatatgaaaaatgagacaatctgaaaatatttgtataatttgacttgtctaatttcagtaagtttatatacgcaaaattaaatttctgcggacagaaaagttaaaatctgcagcaaagccaaaaatcactttcggtataagacccaaagaccaataacatttcaatacaaaaaataagtttctttagttctttagttaggtgacttaaaaatctccattagtatacatagcctaaagaggatgggtaaatatcttggctaatacacttaaacgcatatt

SEQ ID NO: 269851 - DNA, 414 bp, Homo Sapiens
  misc_feature (201)..(314): n is a, c, g, or t
  misc_feature (358)..(358): n is a, c, g, or t
  misc_feature (392)..(392): n is a, c, g, or t
attaccctgggtcagggagggtgtagggaacagaaccacacatattattagtataattgtgcatagctaagatttctacagaaaacactctgccagtattaacataaaaatgcagcctactttcaccctcccacttctaaaaatgtcttacacgtgtgcaaatgtctgtgcatgccaagatttcgtgatatattgtgaatnnnnnnnnnnnnnnnnnnnnnnnnnnnnnnnnnnnnnnnnnnnnnnnnnnnnnnnnnnnnnnnnnnnnnnnnnnnnnnnnnnnnnnnnnnnnnnnnnnnnnnnnnnnnnnnnnnatctgtatgtactgatgtatttcatctccagcataagtggaaanagcagtgttttcgggatacgttagtgtttttctngaggacaaattatgttaaatgg

SEQ ID NO: 269852 - DNA, 324 bp, Homo Sapiens
  misc_feature (36)..(36): n is a, c, g, or t
  misc_feature (129)..(129): n is a, c, g, or t
ctggcctccccaaagtgcctggcattagagccggtncccacctgtgcccggccgtcagtccggtattaggaaaagaatttaagaacttttaataaatcagcaaaaatatcatgcatttaaaatgtttcnggaagaaatggacaaattcttttgatgaggtgtcaagaaaatagtagattccattaaataaacactttgattagaactgtgaaaacaggtttgtgtgtaaggcatttcaaaagtgaaaactagtcatcatatgacaactaggatcatggaattgtgggctatttttaaaagtgttactgttgcaatgatataatt

SEQ ID NO: 269853 - DNA, 363 bp, Homo Sapiens
caaacccctaaacaaaggactaaagggttgtgaccagtaaagggtaagcttactagttatacataatgcaccttgtttccctttaagaaaattactctcaagttattttcaatatactggattggaatatcctagtctggagaatttacacatattcctaagaaaacataagagaaagttaagccatacgtgggctataaaatctctgctccaaactctaaatgaacaatctgaaataatacattcagtgtttctcactattaatgaaagcactgtggaaatctctctcatcatttgtatttggacattaacaatactatcaataaaaactttttcttctactatacttaatactatttataa

SEQ ID NO: 269854 - DNA, 360 bp, Homo Sapiens
  misc_feature (178)..(178): n is a, c, g, or t
cagagtgaacctactccctagggtcacttcatcccattcgttctctatattgcagccaaagtggtctaaaatgctaacttgagcacgttactcttctacttgcagctcttacaaggctcctcatagctcctgaaataaagtctgtactcttaaacatagctgaaaaggctctgctggntctgggccctgcctcatggcttaacattcccatcctatatctcttcccaccttgcgacctatgttccagaaataataacttgtttcatttccctgaacacctttgggcacttgctgctctgtccggcatttccctaatcatacattaccccacggtattgtaaattgttcgggtttaatttt

SEQ ID NO: 269855 - DNA, 405 bp, Homo Sapiens
  misc_feature (379)..(379): n is a, c, g, or t
aatatcaaatctaacaccaaggtcctatcccattagctgcatagacatttgttttcaagggcacttctcctcatagagtagcacaaaagtcccagagttttatgaaaaccaagatatccaagggacccctctgatattcatccatgctggccaccacagatatgtttcttgtccaaacacaggcattcccttgaaatccacgcaggcacatcatctctcccaggggccagcctcctggggtctagtactcagtccttctccaggggacccaccgcttctgggggcacaggctgcagctttcccacttacttcaggcatgggtccggggccctcacactgggcttccaggacacctcctttcctggccctcctggggttntgaggacttttggaccccttcccttt

SEQ ID NO: 269856 - DNA, 793 bp, Homo Sapiens
aaataataataggctttctgccccaactaaaggaattttaggcttctgcaacaagtggaggaggcattttgaagatgggacacaaagaagtcttctttctccagatccagaagtcaggccttgtaagaattcaagccaaaaaaagttcatccatgggaaaaacggttcttctatcatccagcacgtatttgtgccaacagagctgagggacttgagtaattcaagaggctaggggttggggggcagatgtgtccagtggctcccacagccccgccgtcctgaaagtcacgccagttaatgtgcctcggggtggatcagccctcccgacagatgactactaggaaattaatccccagttaataatgtgctttggaccaagtaagtcaagattatttttcctacaattatacaaagatatgcttttccagaagggaacttctggaaaaagaacaaataacactatgcttaaaatattattcacatatttagagaagaaagaacttaaaatagcagaagacctgaataccatgatccacggtgcccaccccggggagcatgtctttgtgtgagacaagacctagcacagcagggctggctttctaagggtacggtgaggcaccactgaactcatcaaggaactatgcctagtcttgcccctctggtttatgtcaccagtatcaaagagagaggacctctggatgcctgaatgaggcaagaactaatgtgaaggcctcagctgccttaagagaattatgccctgatctggcacagtgacgaatgtctgtggttatac

SEQ ID NO: 269857 - DNA, 512 bp, Homo Sapiens
  misc_feature (432)..(432): n is a, c, g, or t
  misc_feature (443)..(443): n is a, c, g, or t
tcttaagagactatatgtgttctggctgggcacggcggctcagcgtgtgttttctatatttctatttatttataggagctctatgtatattatttttagtaaccgattttttcagtttccgttaaataatatacacttacattcatcatctcaccgtgtcctataaaaacacttaatggtttgtattacttctataggctgtgaaaactgaaggataaaaaaggtgaaggcagtttgtccagggttatacagtaggcacagcagggaatttgaggcccatccctgtctgactctaaagccgagagttcttaataaaaagaggaataaaaagggactctataaggaattctttcaacaggtaaaatactaaatatctctatatatgcaatttatatatggtatatacatggtatgtctggtatacatctgccngtaaatgctcnattatctgggccttatattggtaattattatttttaaggccctaaccttagggcatttggggtccaatg

SEQ ID NO: 269858 - DNA, 423 bp, Homo Sapiens
  misc_feature (167)..(167): n is a, c, g, or t
gctggcctgaaaattactggtgtgacttttaattagttcaggtctaatcaggtttctttattgttcccttatgtattcaagcttaaggaaaaattgcattgctgtttacctctttgctgataaatttggcagtaattacagcattgccaggaaaaacaatctgttantcccagtcttaaatttttctaaaagaagacaatattttagaactgaagcattgagaacttcccttgcaaattatttttaaaattctatcttgtttttctatgtatttctttctgactagacttgtgatatgcgtgtgtttatgtacagaaatttttagtgtttttgttatgttctgttattgacccaaaggccatctttattttctataactgttcaaaatttatattaaaatctacttaggagataatttcttta

SEQ ID NO: 269859 - DNA, 316 bp, Homo Sapiens
  misc_feature (12)..(12): n is a, c, g, or t
gttaaaacatcnacccaaaacacagaacaaagaaaactggttaacccactcccagttagaacacagaaatatgacactttgcataacaaggagaaaaggttagataagcaatgaaatcatactttttgttgggtggttggttggttagttgggtggttgtatacaagaaagctgagaactcaaagaacgtaaatgaactaaactccagagaaagagaagcccttgctaagagagaaaacactccaagcccttttcatccctgggtcacagtggaaagaagagtaaactgcatgctgaaagcagggcaagagaaacc

SEQ ID NO: 269860 - DNA, 395 bp, Homo Sapiens
tacacgttttgttacacgagaacgatgggtaggccccatctggcgtcttggggagaaaagcaagttccccgatttattgaatgttccctgtttgcattccccatgccaggcagggcttcctaactcgtctcacaggtctaatacaaagtctctcctgtttaatcttcattcccactacggattgccacattgtgctataccagggatacctggggaggacttctcaaaggcaaaaatgcccctcagtgaggctgggagtgcctaactcccagtctttccatcctttaaataaatgttccctcttcttttctgtagggcaggggtactgatttgttttttgttttaaaggggaaacaatgatttacccataatgggtaatttaaagggggacaaaa

SEQ ID NO: 269861 - DNA, 493 bp, Homo Sapiens
  misc_feature (16)..(16): n is a, c, g, or t
  misc_feature (26)..(26): n is a, c, g, or t
  misc_feature (35)..(35): n is a, c, g, or t
  misc_feature (56)..(56): n is a, c, g, or t
  misc_feature (400)..(400): n is a, c, g, or t
cccacagtaaaccaanccacaaaggnaaaatctgnaacaatgtaccggccttcctnaaaaacctgtgagggctctcccattgtcctagtgtttcctcaagacattccttaagctacagctcacctgagaaatatgacttacagtaaattggcaatgtggcgaagaaccctgggaaagtagtaggggtaaggggaggacatcagcatccccatcgtggtcagaagcatacataatgtggaaaatttgacagcaattctgataccttctcttttacttctaccctcatccctccataagaacaagtaacctggctcgcaaagcactttatagcccagctactattttcttttcccacattctttcttactatgccagagttatcatgtatgactgttcaggnattgcactgcacaactgtactatactgcatgtagtcctaccttctgagcccaggcccactcaacaaattactcactccatagatattgtgaac

SEQ ID NO: 269862 - DNA, 522 bp, Homo Sapiens
  misc_feature (56)..(56): n is a, c, g, or t
  misc_feature (436)..(436): n is a, c, g, or t
gttgtgagagttctatatacgtgtatcccggatgcaggacttctcagctgagcgantttgcaccacctgggatgttttcagcgtgtaatgccagtgcatttccttcccgtctcttctctctggctagattcacagccaccgctagataaaaataaagctgtgaggatactgtagatacagttgaatatcctgcttctgcacttcatttttccgtttttttagaaagcatgatttaaagtacatcactgggctgttgtaattcattctagccatttccgcattgctgagcgtttaggtcctttccagttttcatgttgcatagataatgcagtgatgttcgtccttggtccataaatcttcatgctcatcacacgggtagccttcttagaaaaaattcttaagaaggtgattttaccaggtcaaaggggaaggaacnattggaagtctcagatactggctgtgcccacattggacagtgagtgttgagggctagggttctgtcgtcatagtcaccactgtagc

SEQ ID NO: 269863 - DNA, 337 bp, Homo Sapiens
  misc_feature (84)..(84): n is a, c, g, or t
  misc_feature (101)..(101): n is a, c, g, or t
  misc_feature (127)..(127): n is a, c, g, or t
  misc_feature (163)..(163): n is a, c, g, or t
tgaacaacccaatattttaacaatttattgcatagagctactaataatattaaataaaactatggaaaaaaaggacattttacnttgtgcccaggtatgcntctaagcatagttctacatcttaacntctagtccctgtctacatattttcccttatgtgtangccttagttatactattttggtattcttttctgttttaaaatatatataaactctttcctgttcttttacataagataaataaacttaattttttagctgcatagtattttctcatgttaatgtattgtagtttactaagtcataactttatttttatttaatttgtgaacaat

SEQ ID NO: 269864 - DNA, 263 bp, Homo Sapiens
gtgcatgccatggtgctcagttctaggacttctcactcaccaaggagcaggtcactcagcccacgcttctcacagcgcctcttgcctgtctcctgtctccctgctcagccctcccccatggcctccgaatccctgtcacaggacagccaagattaaatccaaactccttcccagcacctctaggtacccagaaggctcttcatgcccatccagccacatcccagacctcttgccccttggctccctgtgttccagccaccctg

SEQ ID NO: 269865 - DNA, 460 bp, Homo Sapiens
  misc_feature (315)..(315): n is a, c, g, or t
  misc_feature (345)..(345): n is a, c, g, or t
  misc_feature (381)..(381): n is a, c, g, or t
  misc_feature (395)..(395): n is a, c, g, or t
  misc_feature (407)..(407): n is a, c, g, or t
  misc_feature (414)..(414): n is a, c, g, or t
  misc_feature (420)..(420): n is a, c, g, or t
  misc_feature (430)..(430): n is a, c, g, or t
ctctaaattctctggctaggacttccagaactatattaaatagatgcgagagttcaaatcctttcttttgtttctaactttagaggaaagctctcagctttatatcactaagtatgatattagctgtgggattgtaatacctagtctttattatgttgaggcacattccttgtatacttaatttgttgagaggtttcttttttaatcatgaaaatatgttgaattttgtccagtgctttttctacatctatcgagatgatcatataatttttggtccttcattctggctaatgggggtgtgtcatgtttatagantcacataatatttgaaacagccttgtatcnccagggataaaatcacaattggattggtgggggtantgatccctttaaanggttgtggttgnattccanggggcnaggaatttcnagaatttccttggcatccaatcctttaatc

SEQ ID NO: 269866 - DNA, 466 bp, Homo Sapiens
aaacaagagcaggaattgccacaaattaacctcaataatgctgtgtgttcctcaagaagctcccttagtgaggccgatcttaagatggccgattctgcccgttgaaggcatccctgggaaagaaaacaagcatcccagcgggcatctcacccacgacttctccctggagtcctcacacggtcactgacaactacagtcagttttaggaactagagtgccgtatcatcagacttaccctgtcctgccccaccttccctgctaacatcgaggtgtgtgcagttaccttctgagcttggaacaagcagactggaattttcctctgctacctcttgtgtataaaatcttgtttataaaatttcaaaaggaagtagatacactagggaagaaccttaattctaaatttggttcatgtgtggcaaagttcttagcttctaagagtataaaataaatttttcaaaaagcagga

SEQ ID NO: 269867 - DNA, 443 bp, Homo Sapiens
  misc_feature (19)..(19): n is a, c, g, or t
  misc_feature (37)..(37): n is a, c, g, or t
  misc_feature (87)..(87): n is a, c, g, or t
  misc_feature (122)..(122): n is a, c, g, or t
aaggctgtgtggttcctcnaaaaaagctcccccttanttaaggccgaatccttaagatgggcccgatttctgccccgttgaaggcanccccgggaaagaaaaacaagcattccccagcgggncatcctcaccccacgaccttccccccggagtccctcacacggtcacctgacaacctacagtcagttttaggaacctagagtgcccgtatcatcagacttaccctgtccctgcccccaccttccctgctaacatcgaggtgtgtgcagttacccttctgagcttggaacaagcagactggaattttcctctgctacctcttgtgtataaaatcttgtttataaaatttcaaaaggaagtagatacactagggaagaaccttaattctaaatttggttcatgtgtggcaaagttcttagcttctaagagtataaaataaattt

SEQ ID NO: 269868 - DNA, 195 bp, Homo Sapiens
gaaatgaattattagtgagtgtgtgtagtttgaaggataaatctctaatattctagagtacaactagtttgtcttctattctagaaatgaaactatcttccccttcttataattcaaaatattagttcagtaatacagtacttttcactgaaaatatgacatgagttctataagttttcctgttgtatatttgta

SEQ ID NO: 269869 - DNA, 432 bp, Homo Sapiens
aggtaggagaataaatagagtctggagacagggaatccatggctgattcactgacttccctagaacttaatcaaaaggaaaacccccacctctcccacaccccacataacaaaaggatcagaggctactccttttacacctgcatagcccgatgaaaaatggaaagtacccctgattggtcccctcctgcaaccaatcagacaggtcgtggcccaagtcttcatgtctaactttgtaacttcacttcagcctctgaatggtcacctcctgtgaccagagtggtcgtcggccaagtcttcatttatggagagtgtaaccaagtaaccaatgggaaacctgtagtgggtatttaaaccccagaaaattctgtaaccagtgctcttgagtggagtgtactttcatttcaataaatctgtgctttcattgcttaaa

SEQ ID NO: 269870 - DNA, 422 bp, Homo Sapiens
  misc_feature (257)..(257): n is a, c, g, or t
  misc_feature (342)..(342): n is a, c, g, or t
gagagagagagagaaagaaatagaagagaagagccatcttggcagggttattttatatctgagcaaggagtttaaatgagactagtttagattgtctgctgatgcagccgtccatagcagtacccctaaaatcccaccagaatacgggtccctctaacccagtggctggaagaaccactgtctagagcaacttttcttggaactgtcccagctaccaagtcagacaccaaggtttatgccaccaggtaacacggganttcacaggtacatgttcgctccggttcagattagttgggtttggcccctcggaccctgtggcagggagctagtttttcagcttgncagctgggaagtttccctttttaggttcctttagttttaggagggggtttgctgggcttccttttggacctgggtttttt

SEQ ID NO: 269871 - DNA, 429 bp, Homo Sapiens
cacttcaattgactgaaaattctgccctttagattaaaaaaaaataccatatgccatgtggcaacttaaaaattatcatagaaaatgagtagtagaaaagagcttattaggtcccaatctggtcccctcccctgggggccagggcaggattattcccttcagtgtactctctcgtgctttgtccaggctggtggtgagtgttttggagatggcattctttgcagtgatttccacaacactgtagacgtaatcttgtggctggtgtcaatttggccttcagcatggagtttttatttcacatactattaaaaagagcctcttggcagaaatgagaaagaactattcagcgattagtttgtcagtttgcatgtcaactaggacgagctgggcacgcatcagtcaagtatgttggaccaaggcagcaaaaaa

SEQ ID NO: 269872 - DNA, 415 bp, Homo Sapiens
  misc_feature (15)..(15): n is a, c, g, or t
  misc_feature (38)..(38): n is a, c, g, or t
  misc_feature (51)..(51): n is a, c, g, or t
ggggccctaaaggtnaaatggccccctatagtggaagnaagttaataattnaaaaaatggcctacctaatataggaaaattttataatccagaaaaaattaaatattcaggggagctcacccagaagaataaagtgctctgcccagttattaaaggattactgctggtgaattaaatatggcattccccaagggaaacagagagattcttctggattatgttcaatatttatttcacaggattaactgttttaggaacagatataaacgtcgccacggaagagatggacaaagcacaaagacaacatgataccttaggaagcaacactaccctttcaggcataaaatttggagaaatgcaacattatgcttcatgaataatatgtagaaagaaggtctgatgaaaatgacatcct

SEQ ID NO: 269873 - DNA, 306 bp, Homo Sapiens
gtgggcaacggttattgccctggtgggtcttgaagcatatgacagaatgggactcctgcctgttattttattggggaacttccccagttatctgtaggtcctttaggtttgggcctctcaatttcttggaaaggaatcctccaggagtgtaagcctagatgtctgttttgaaagccatttaggggcagagggctagacctttcactgttaagtataacactataactaaatcccctctttacagcagtgcctgaggttcaagaatacaagaaactctctagttgagcatctccagagaataaactt

SEQ ID NO: 269874 - DNA, 497 bp, Homo Sapiens
  misc_feature (393)..(393): n is a, c, g, or t
  misc_feature (442)..(442): n is a, c, g, or t
  misc_feature (448)..(448): n is a, c, g, or t
  misc_feature (480)..(480): n is a, c, g, or t
agaggcaggaagctgcggagtctatcttgtaaagagtttagcatcactgtgagagtgtgtgtctaaaattaaattaaactagaagcagcaggtgagtatttggtaagtacttctgtgactcgcctcaattcccactggccagggcatcctcaactgcacggtgaatcaagatgctggtgtcatcctccttggaaaaaggaaatgttaactcatggttaaaactaagtacaatgattcccaagggatcactttcttatttttttaaatgacattaaggagaatcttaagaaagcatcagagaaagacatgtgcatgtgaagcaccctgattctgatgttagggaaaacttaaggcgaacaggacctgctggcacacagccccattgtctttctntccattttctctttatcctttcaaatccaggcaacatgtggccctcctncttcancacacttttttccctttgtcagtatggctctncccggttagtgttcgtt

SEQ ID NO: 269875 - DNA, 409 bp, Homo Sapiens
  misc_feature (332)..(332): n is a, c, g, or t
aaaaagaatccaatgagacatgcaactgatatttgaggttagatgcaggcccattttggtttgcagggccctcttccacagggacgctgtcacaaggctctagcttaaacatcttccagccatttccccaagtttcagcttctgtaacatctctgatggatgcattttgactggagcaggaggctcagcagcataatggcactaacatttctctgccgccttttgagttatagctcggtgggcttgccttttcctatttcatggatttgctttctccgtttgttcttacttgattaggaaattgctgtacacagaacttctccctgtccatnaaatatcacccaagttacacaggcatgggggagagagctgctattgtttggttcactgactttggggactttttggc

SEQ ID NO: 269876 - DNA, 540 bp, Homo Sapiens
  misc_feature (11)..(11): n is a, c, g, or t
  misc_feature (59)..(59): n is a, c, g, or t
gtatatatagnggtccaaacacaatatgtatccaaattaattattcaatacccaattangaaacaaagagattcctaagttttattaggaggtcactttttttgcatcaattttataaggtcacccatcttaatctctttttcttataacttgagatcatgcttgaatttaaggactacagcaggccaaataatgtttggaggaaaaaaatttaggagtgaaaattattcctgtttttgggaaacaaaatcaggaactagagaaaatatccaatgatttgggaaaattacaaaagaatttcctagctattccctattgataagtcccaaatgcaacttaattcaggacatctttccctctaccctcaaccaaatgcaatttctatctcctctgatcttccagaaacctacttgcacttctcaggtggtacctgccacattctttgatttattagggtcatttcatttgctttggtttctggtaggcactctgaatgagcgatacgttttctcagcatcccaccttatatacaatggactg

SEQ ID NO: 269877 - DNA, 498 bp, Homo Sapiens
  misc_feature (23)..(23): n is a, c, g, or t
  misc_feature (47)..(47): n is a, c, g, or t
tcaaaaatgaaccaactcttccnaggtaagccctgtccataactgtncactgttgtaacctacattaaaaaaaagtccatcaaccaggttccattgactgtaagctgtccagcaatccaagtggttaccagcaaagtgaaaacgatggtcattgcagcaaacaatataagcaacatgatctgaaccgtataatatacacggtggacgatcctgatgaacctttacagtgaggacggcaggtgctaggggtgcggaaggcgttgtttccataggaaataaggggactagaagtggcaatttcactcctgattttgggctcctgagagtgcagtcgccagcgatgatatcccagtgtggatcatcgccagcatttcaaggtcatgtcccacacaatctcttggtgaggatgtgggcggagagaaggtgagaatagggtaggggaaacagtaggacaggaagtattcacgtactcaaaaccaatggtagaacatcacattt

SEQ ID NO: 269878 - DNA, 621 bp, Homo Sapiens
  misc_feature (71)..(71): n is a, c, g, or t
  misc_feature (84)..(84): n is a, c, g, or t
  misc_feature (106)..(106): n is a, c, g, or t
aaaaaaatccaccagcgggttccattgaactgttacctgtccagcaaatccaaatggttaccccagccaanttgaaaaaacganggtccattgccagccaaacaantataaagcaaacatgaacctgaaaccgtaataaataataacacggtggacgaaccctgatgaaacctttaacagtgaaggacggcaggtgcctaggggtgcggaaggcgttgtttcccataggaaataaggggactagaagtggcaatttcactcctgattttgggctcctgagagtgcagtcgccagcgatgatatcccagtgtggatcatcgccagcatttcaaggtcatgtcccacacaatctcttggtgaggatgtgggcggagagaaggtgagaatagggtaggggaaacagtaggacaggaagtattcacgtactcaaaaccaatggtagaacatcacatttcaaactgcaagaccattggaaccgtctgaagtttgccactcgcctctgtccgtttctctaagggtacagttctgctcttaagtgctggcccttccatcttctcagtgtgtttgacaaagccactgccaacctccagcaagtcacagaataacaatgaagtctgacca

SEQ ID NO: 269879 - DNA, 375 bp, Homo Sapiens
  misc_feature (128)..(128): n is a, c, g, or t
  misc_feature (168)..(168): n is a, c, g, or t
agttcaggaaatttaaaaatgatttataaaaggcactgaagttagcaaaagcattggtgggttttcattttggattaaacactggaaatgttcacagagaaacaactgtgtgagcagttgcccgtaanacccaggaagaaaccgacctccaggcagcacctcctgaanacctcagcggctccctcacacattcccaacccacagaccttcattcaagtcaaggtgaaggctacagtcagcacggcaagaaaccaagatgggactcaaacctctaaatgcaacactctgcatacaggagatcccaactgaaatgagttccaaaaataacggatacctttatcgtataatcatttatgctcaacaaagcctcaggat

SEQ ID NO: 269880 - DNA, 416 bp, Homo Sapiens
  misc_feature (97)..(97): n is a, c, g, or t
  misc_feature (99)..(99): n is a, c, g, or t
  misc_feature (352)..(352): n is a, c, g, or t
tccctggagcgccgggcccgcccaatgtgcgcctgttgctgctggtggcctttgcccctggtggtcgtcctgttccacgtcctgcttgctccccatnanagcccatcttccacacccacttctatgacaggcttacaggacgcgggctctcgcttggcccgagctctacctctactcgagggctgacgaagtagtcctggccagagacatagaacgcatggtggaggcacgcctggcacgccgggtcctggcgcgttctgtggatttcgtgtcatctgcacacgtcagccacctccgtgactaccctacttactacacaagcctctgtgtcgacttcatgcgcaactggtcncgctgctgaggccattgctccatctcacctctgctccagaaataaatgcctgacacctccccac

SEQ ID NO: 269881 - DNA, 437 bp, Homo Sapiens
  misc_feature (21)..(21): n is a, c, g, or t
  misc_feature (49)..(49): n is a, c, g, or t
  misc_feature (59)..(59): n is a, c, g, or t
  misc_feature (61)..(102): n is a, c, g, or t
  misc_feature (176)..(176): n is a, c, g, or t
  misc_feature (324)..(391): n is a, c, g, or t
ctgtagtgcaatcatagctcnactgcagcctcaaactgcggggctcagncgagcctgtnannnnnnnnnnnnnnnnnnnnnnnnnnnnnnnnnnnnnnnnnntcacctgtacaatgtgctcagcccaaccacacgttgttttaaaagctatttaccagccaatagagctacatctntcctccttacttttccttttcagagtttttgttatatcttttcctgtttacactatcaattgcttttagaatcattctattaaattttaaaataatggaatacacagtagtggactaaaacctaatatattaattgaaaattaatttnnnnnnnnnnnnnnnnnnnnnnnnnnnnnnnnnnnnnnnnnnnnnnnnnnnnnnnnnnnnnnnnnnnntgtatcacgaggaccttttgttttttgttgctattgtgaaagattt

SEQ ID NO: 269882 - DNA, 301 bp, Homo Sapiens
  misc_feature (36)..(36): n is a, c, g, or t
tggaagaatacgacaacctgcagcgacaagcagtcncaggagctagtctgagccggcgcgagggcacgggctgtggcagtgaaggcggtggactgaaggcatgagatgccctttgagtgtacagcaaatcaatgttttcctgcttggggctctcttccctcatctctagcagtatggcatcccctccccaggatctcgggctgccagcgatgggcaggcgagacccctccagaatctgcaggcgcctctggttctccgaattcaaataaaaaggggcgggacgcttgttggttgtgcgtaa

SEQ ID NO: 269883 - DNA, 482 bp, Homo Sapiens
gtctacttgagtccgcagtggcactcagtggtacctactgctattgctaatgacagtcttctgagttgagcacatagccaaatcctgatttaaaagtttactaccacttggaagctctatggaaacagtcttcagaaagcatagctgttaaatttcttaatttgatatcgagaagaaatcttggctataaagaagcttttaaaatggcacatggtctataagttggatcgctcccttcataaatttttgttgttgttgtcagtcaatatgctgctgaaaggccaagtgtggtgactgctgctgttgttgtgatgcctcagtcagttgtgacaaattaaccactgtaccatctgactgtaatatctctctagactgagtttctcttgtctgaaactgtgtagcctgctgcaatagtgcatcgctgttgggcatctgactagaagcagaaactgctggaaaagtaccaggctgtgagatgtcct

SEQ ID NO: 269884 - DNA, 430 bp, Homo Sapiens
  misc_feature (317)..(317): n is a, c, g, or t
  misc_feature (367)..(367): n is a, c, g, or t
  misc_feature (395)..(395): n is a, c, g, or t
  misc_feature (401)..(401): n is a, c, g, or t
aataaacggcctacgtcaccatactctaaaaggaaaaactcaaaagtcactgttttcccatccagctgccccttcctgcctcttcaggaagcctgctctcccatcccgcagccgtccaaacctgccattttagcaatgagttatgctccactggtcagattttctagtcatttcctgtgtgtcaggcagtctaaagtccctagtgagaaagcaagctcccttttaaatagggatgtattggtccatgtatctcatcctctttccagacatgaccaggtcatggttgaggagtaagggaaagggggtgacttgacctnttttgaagcagcaattttggagtggtgctagcaggagaggctaagagggnttggggttgaccaggggagggccagagntataanccatcgcacgatgggttctggattaatga

SEQ ID NO: 269885 - DNA, 450 bp, Homo Sapiens
caggtggttgtgctccgcctacccagcacagcaggtgagatggtgcaccctcagtggactgaagaggccatgggatcccacctcagccggatagcacgctggccttcaccttcattgtgccatggcagctttcgtgtgagccactgactcgtgtacatgttagactccttggtctataagaaagcatcttgtatggtaaattgttgttctaaagtaaaataactggtttgttcaaaaaggggatgctaaggagaagtcagaaagtcaaagcatgttgtaggatggtctggggaaagtcgtgaaagggttcgtgaaaggaaatttaaggccacccaaaagtaaaagttgctagtttaccattattaacatatggatttgaaactactggaaaaattagtttttacatggggaaagtgtgttgaggaggagttgaaacatgtttttttgggt

SEQ ID NO: 269886 - DNA, 402 bp, Homo Sapiens
taatttatggaaaactggaaaatacccctttaaatttagtcaacgtgtttgcacacagaattttttttgcaagattagtttttacaaaccttccacaacttgttcaaaccgtgagcttattcttatctaatttaaaaatcacataaccctctcaactaggtgaaatttgacattctcctgccttttaaaaatattttaccaaaaacatgtttcactcttctcacacactttccatgtaaaactattttttcagtagtttcaatcatatgttataatggtaactagcaacttttacttttggtggcttaaatttcctttcacggaaccctttcacgactttcccagaccatctacaacatgctttgactttctgacttctccttagcatcccctttttgaaca

SEQ ID NO: 269887 - DNA, 479 bp, Homo Sapiens
  misc_feature (339)..(339): n is a, c, g, or t
  misc_feature (399)..(399): n is a, c, g, or t
  misc_feature (405)..(405): n is a, c, g, or t
  misc_feature (431)..(431): n is a, c, g, or t
  misc_feature (438)..(438): n is a, c, g, or t
  misc_feature (456)..(456): n is a, c, g, or t
ccccaactaaatccttaaaggaccctaggttgttagggccagacgggactccggagatgactcagccttacccctcattccataagtgagaacattgaggcccacagaaaggattcaactcattcaaggtcgtgctgttagtgagagtctgagttgagaccagaacccagttcctatcccttcaggctttccatgcccgaaacaagggctcctcccaccgttgagcctcagtttatatgaagtgaggataataacagtagtttttccattaggattgtgaaggtccagtgggtgtaattaatgtgaaaactttgtgaaactctggcagagacgtgggtnggtgggtagttatccaactcttccaaaactgagttgatgttcagcactcagttttacttnactttngcatctgttccccggagttagaattntcagtgntttgacaaataggcaggnccttggtaaatgttttgtttgat

SEQ ID NO: 269888 - DNA, 355 bp, Homo Sapiens
  misc_feature (69)..(69): n is a, c, g, or t
  misc_feature (72)..(72): n is a, c, g, or t
  misc_feature (279)..(279): n is a, c, g, or t
  misc_feature (281)..(281): n is a, c, g, or t
  misc_feature (284)..(284): n is a, c, g, or t
  misc_feature (296)..(296): n is a, c, g, or t
aatacaacaaatcaatgggtatgtgtcccaatctccttcttcctcttcctttagtgcaacatggcgcanagncctcatggataaggtctgatttcaaaagacattcctgaaacctcacctacagcagcactctaggggtcccattaggggtcggctctctttttcttctgcagccgattctgaacctttcgagattttactactttcattctcacctcaaaaacttcatgaatggccttccggaagcaatgaaaattatagtcaattagcccgggagangngancaaaaatatttntaaatgttcacgtggaaataattctcccatcttttcatggggcccctgggccggggcaa

SEQ ID NO: 269889 - DNA, 365 bp, Homo Sapiens
  misc_feature (54)..(54): n is a, c, g, or t
  misc_feature (140)..(140): n is a, c, g, or t
  misc_feature (172)..(235): n is a, c, g, or t
  misc_feature (247)..(247): n is a, c, g, or t
  misc_feature (258)..(258): n is a, c, g, or t
  misc_feature (265)..(265): n is a, c, g, or t
  misc_feature (282)..(282): n is a, c, g, or t
  misc_feature (296)..(296): n is a, c, g, or t
  misc_feature (318)..(318): n is a, c, g, or t
ctctacgtacaaacacaccaggttgagacgttgaggtgtctcagcaacagggtnttcggaggaaactattacaggatttcacctgtagttgggtgatttgggggatgatctaaggaaggaggatttggttctagattagnacgcacgctggagcccagggaggtcgaggccnnnnnnnnnnnnnnnnnnnnnnnnnnnnnnnnnnnnnnnnnnnnnnnnnnnnnnnnnnnnnnnncataaaaaaagnttaggacgctntgggganggaagagggtaattctncagcttatgatccnctgcatgtgacagggtgagctntgcgtttccctgctttaggaattcaaggaaggggtctttaggttcct

SEQ ID NO: 269890 - DNA, 403 bp, Homo Sapiens
  misc_feature (20)..(20): n is a, c, g, or t
  misc_feature (39)..(39): n is a, c, g, or t
  misc_feature (56)..(56): n is a, c, g, or t
aaaaagattcctttcaaacnatttctggccccactaacnaatgccccctggtcacncccaaccaggtcttgatggagatgtacaagacgactaatgttggttccctgcctgctaacacaacatccgttctgcagcccatgggtcaaagagtaatttcaactttcaagtcttattatttaagaagtgcatttcataaggctatagctgtcactgacagtgattcccactgatggatctgggcaaaatatattgaaaaccttccgagaaaggattcaccattcaagatgctctaggctgctctggtctgtaactttccattccaacagtaaaaaatctgggatctcctacttttcacctcagaaagctacaaatgtaaaaggaaaaataaatttgttttgagagg

SEQ ID NO: 269891 - DNA, 479 bp, Homo Sapiens
  misc_feature (320)..(320): n is a, c, g, or t
ctgtatcagaagaatatgaacatttatttttgctttcaaagaaaaagcaaaccctaaattctcctctccattcttaaaatccactaacacaacctgtcagaaatagactacacacctgaagtacagaagacacatagcctacaggtcttgtgtatttttagagaactttggtgtttatattaccactcgcagcccctttctcagttggccttgaggcttgcccattagctggtaaacgtttgaaagggtcagtgtgtccagaactgggaatttccactttgggaaaaagcacagagggtacctgacatatgttcctggangggcctgcactattacctttcagacctggcaaaattcctacttctgcttgatggcaggcaggtcaaagttgtaaaacctccagtgggtactcctgcctgcagaatagaacacagtgtccaaagacccctggtttctgactcctagactagagagtgtcc

SEQ ID NO: 269892 - DNA, 466 bp, Homo Sapiens
  misc_feature (161)..(161): n is a, c, g, or t
cctcacaaacaactgtggtaacaatacaaggtggtgaattatcaccctgccttggaagactgagggaccccaaaattggtcaaggccctagggttcaaaagcccagctcccatctggagcccaaaatcactcccctttcccaatgaggaaagatcaagccntgaggcctccgtaccttctccccatctgtagaaacgatcagcttttatgatcatgtccacccaggctgacatggttgctgcggacggccactgccagggcggtttttccctgctgcaattaagaggcaagaagagaagccagagtttctacaggaggggtacacaagggtttctagcactgaggacaaaccctcctgcccacaggaaagtgctttccagcagtctacgctgagagcagaaaggttttctggttttctgggcatgaaggggatatggaaaagtcacaaatagaataaagcaatagc

SEQ ID NO: 269893 - DNA, 199 bp, Homo Sapiens
gcatgagccacctcccctggtctggtccaactttttaaaagcattattctgcctgttgggtggagaatagactgtaggtgggcaaagaatgaaggaaactagtggggttcaggagctcgagctagaagtggtgagaagggtttggatttgggggtctatgctgaaggtagagccgacaagattttgctaggatttggat

SEQ ID NO: 269894 - DNA, 145 bp, Homo Sapiens
  misc_feature (92)..(92): n is a, c, g, or t
tgaatcaccatgcccagccccatcaaatttattcttatcagtttcattttattctagtgtaattttatcttattatattccctatggatggnttcaaaacactttccttcactcattcatatattcatacattaacttaacatag

SEQ ID NO: 269895 - DNA, 352 bp, Homo Sapiens
  misc_feature (276)..(276): n is a, c, g, or t
atgagccacagtgcccagccagggacaaatgtttgcattaaatctcccctgttcagcttactggtgaggcttcatttcctgtctcagattttccacacatctataagtgtccattctgtacaacttgaatcagctcgtgggtcctgagcactcaagtacgtcatgtattttctttcaactgggcttgtgggttcccactcagtccttcctgctttgctactattatcaaaaggcttttcgatttccacataaaaggtaaatgggttacacgaaaantaaatttcagtaagggcacagggcaggcgcagttccttttcgacccgcgggttgttcgggagaggaaggcaggggt

SEQ ID NO: 269896 - DNA, 368 bp, Homo Sapiens
  misc_feature (181)..(181): n is a, c, g, or t
  misc_feature (326)..(326): n is a, c, g, or t
actgaaccctggagatgggaagtgccttatccatgctcccctagatgttcattacagagccaggactagagagcaggtttcctatttccctctctagaactgtattttattaccctctaagccatgatgctgttttaatagcatggactgttgagactcagagaacacgttgacctcttgnagctctctgggtgcctgaaattcagtcattttcagtccatgcgaggagagaatcttcccttttccctctgctttcccctcacagtacagtcccaggagaccactgaggacatgataggatgacatgcccaaacttgtgccctctnctgctcaaaagggagaagagctggcattcaggacccacctgt

SEQ ID NO: 269897 - DNA, 469 bp, Homo Sapiens
  misc_feature (33)..(33): n is a, c, g, or t
aaaatttttaatactaaaaaaaaggtaaaccancctaatgggaattccgcctgccttcccttcccccgtgaagtccctcccagtcccagaacatgtccctcagagctgcccacttcctgatgtacctcccttgcagtgccttaagctcccccccacagtggagccttggagggtgcctgtccttaacatcctctccttcccatgatagggatctgccccatttcaggggattccttcctgctgccttcaaactgagcctcatttttggaggtggtagggatgaaggagaggggatggaggggttgtaagagctgaggagtgtgaggacttgtgatggagtttcagagttggggtgagaagggtagcccatgaagagggccagaagagggactatagacagcatcataaagaaatttaaatttctttatatttggtaaaagtatttagtgttataaatcattatgaatga

SEQ ID NO: 269898 - DNA, 506 bp, Homo Sapiens
  misc_feature (422)..(422): n is a, c, g, or t
atgcaataatgttactttggacacaagcaactttgtttccccttcatgataaataaaagtaagatcttttattatattctttcttttagtacattcattcataatgatttataacactaaatacttttaccaaatataaagaaatttaaatttctttatgatgctgtctatagtccctcttctggccctcttcatgggctacccttctcaccccaactctgaaactccatcacaagtcctcacactcctcagctcttacaacccctccatcccctctccttcatccctaccacctccaaaaatgaggctcagtttgaaggcagcaggaagaatcccctgaaatgggcagatccctatcatggaaggtagagatgttaagacagcaccctccaagctcgcactgtggggagctaagcactgcnaaggagtacatccagaagtggcagctcttgaggacatgtctggactgggaggactcacggggaagggaagcagcgaattccaat

SEQ ID NO: 269899 - DNA, 496 bp, Homo Sapiens
  misc_feature (16)..(16): n is a, c, g, or t
tattcagaattcgaanccgcaaggcatctggaaaagggaaaaagaaacggggcttccaagtctgggaggcacaaggagcagccgaaaggaccagcttggtggctttatggtggtggctgggggcagcggtagcgggaattgtggggaggtggcttcaggcctgacactgggccccccaggtactgcccatctctaccaaggcctgggccctgtggtgctgtcagggcctgttagccacctcatgcctttccctggacccctactgggctcacccacgggctccttccccacaggccccatgccccccaccaccagcactactgtggtggctccgctcagctcatgagggcacagagcatggcctccagaggaggggtggtgtccttctcctcttgtagccagaattctggacaacccaagtctctgggccccaggcaccccctggcttgaaccttcaaagcttttgtaaaataaaaccaccaaagtcctgaaaaaa

SEQ ID NO: 269900 - DNA, 349 bp, Homo Sapiens
  misc_feature (17)..(17): n is a, c, g, or t
acaaggagtacccttgnctttgcccacatgtcaaggctgaagaaacagtgtccccaacagagctccttgtgttacctgtttgtacatgtgcatttgtacagtaattggtgtgacagtgttctttgtgtgaattacaggcaagaattgtggctgagcaaggcacatagtctactcagtctattcctaagtcctaactcctccttgtggtgttggatttgtaaggcactttatcccttttgtctcatgtttcatcgtaaatggcataggcagagatgatacctaattctgcatttgattgtcactttttgtacctgcattaatttaataaaatattcttatttattttgtt

SEQ ID NO: 269901 - DNA, 472 bp, Homo Sapiens
  misc_feature (201)..(201): n is a, c, g, or t
  misc_feature (300)..(300): n is a, c, g, or t
  misc_feature (410)..(410): n is a, c, g, or t
atactgaaggcaaggaaattagctccttgatggaaggcacactagtagaacacatcagcattatagaacccttgaaccttaaagacatcttatctcagcatattattattacaaaacttaaaggagccatcacaatcttccatttgtttaagtttcctcttcaactaccatgggtcacacaaaatgatgggtaataagaantgcgattgttgaaaaccaaaccaaacctcatcaacattgttatcagcctcactgaggaaacaagggatcaaatttacatctacctgtgtctccttggantaggtctaacaattttactttgccatttggctatcaaagaagctgtaggatattgaatatagaaaatacaagtctgcaatgcttgagtgaaatttcaatcactgcagacngtaaaagttttgcaataatcgttttgtaagaatgaaaataaatatagatatatatggacata

SEQ ID NO: 269902 - DNA, 279 bp, Homo Sapiens
actttataaaatactgattttttaaaagaacatattttattagagtcaatctcaccattctttgtcataaagatattttatctaactcaagtttttgcatacccatttacagtcaattccattgttttgcttgaagtgaactttctattatatttttctagattatgtaagcgagctgattatgcaactaagagtgtggtaaatataagaattattataggatcaccatttttacacgtgacagctctggttgtttgtggagtaacaaagggaatatga

SEQ ID NO: 269903 - DNA, 730 bp, Homo Sapiens
  misc_feature (186)..(195): n is a, c, g, or t
aaactcaaagaagaaagaatacacatgaaaacattcagctctcacaatccaaaaagtttgatgaaggagaaaattctttgggacagaacagtttttctacaacaaacaatgtttgcaatcagaatcaagaaatagcctcgagacattcatcactaaagcagtgatcgggaaggctctgagggctgnnnnnnnnnnttgatgttaacagaaaccaatcttagcaccttttcaaggggtttgagtttgttggaaaagcagttaactggggggaaatggacagttatagataaggaatttccctgtacaccagattgggaaatggagtgaaacaagccctccccatgcccatgtccccgtgggccacgccttactgtaagaatatttcccatatttccagtgggcactccccaacctcagcacttgtccgtagggtcacacgcgtgccctgttgctgaatgtatgttgcgtatcccaaggcactgaagaggtggaaaaataatcgtgtcaatctggatgatagagagaaattaacttttccaaatgaatgtcttgccttaaaccctctatttcctaaaatattgttcctaaatggtattttcaagtgtaatattgtgagaacgctactgcagtagttgatgttgtgtgctgtaaaggattttaggaggaatttgaaacaggatatttaagagtgtggatatttttaaaatgcaataaacatctcagtatttga

SEQ ID NO: 269904 - DNA, 429 bp, Homo Sapiens
  misc_feature (326)..(326): n is a, c, g, or t
  misc_feature (348)..(348): n is a, c, g, or t
  misc_feature (384)..(384): n is a, c, g, or t
  misc_feature (397)..(397): n is a, c, g, or t
aaaacctaacttcatctctcgctaccgaattcaggtcggcaagaatgaacctgtggatcctgtgaaactgcgccagtctatccgcacagttcttttcaaccagtgcatgatatctttccccatggtggtcttcctctatcccttcctcaaatggtggagagacccctgccgccgtgagctacccaccttccactggttcctcctggagctggccatcttcacgctgatcgaggaagtcttgttctactattcacaccggctccttcaccacccaacattctacaagaaaatccacaagaaacaccatgagtggacagctcccattnggcgtgatcttctctctatggnccaccctatagagcatgcagtcttccaacatggctnaccggtgatagtngggcccatttagtaatgggttcccacttgttc

SEQ ID NO: 269905 - DNA, 523 bp, Homo Sapiens
gtacatagctctcatttccttgcacgccctcatcatggtgggattccacttcctgcattgctttgaagaagattggacaaagtgcagctccttctctccacccaccacagtgattctccttatcctgctgtgctttgagggcctgctcttcctcattttcacatcagtgatgtttgggacccaggtgcactccatctgcacagatgagacgggaatagaacaattgaaaaaggaagagagaagatgggctaaaaaaacaaaatggatgaacatgaaagccgtttttggccaccccttctctctaggctgggccagccccttttgccacgccagaccaagggaaggcagacccgtaccagtatgtggtctgaaggacccaggaccggcatggccactcagacacaagtccacaccacagcactaccgtcccatccgttctcatgaatgtttaaatcgaaaaagcaaaacaactactcttaaaactttttttatgtctcaagtaaaatggctgagcattgcagag

SEQ ID NO: 269906 - DNA, 472 bp, Homo Sapiens
  misc_feature (40)..(40): n is a, c, g, or t
  misc_feature (63)..(63): n is a, c, g, or t
  misc_feature (212)..(212): n is a, c, g, or t
aacaaaaattgcaactcctttcttttccaacccaacccanaagtgaattctccctttatcccngcttgtgcctttaagggcccttgcttcttcccctcatttttcacatccagtgatgtttgggacccccagttgcactcccatctgcacagatgagacgggaatagaacaattgaaaaaggaagagagaagatgggctaaaaaaacaaaantggatgaacatgaaagccgtttttggccaccccttctctctaggctggccagcccctttgccacgccagaccaagggaaggcagacccgtaccagtatgtggtctgaaggaccccgaccgcatggccactcagacacaagtccacaccacagcactaccgtcccatccgttctcatgaatgtttaaatcgaaaaagcaaaacaactactcttaaaactttttttatgtctcaagtaaaatggctgagcattgcagagaaa

SEQ ID NO: 269907 - DNA, 388 bp, Homo Sapiens
  misc_feature (352)..(352): n is a, c, g, or t
cattatcaactgcagaagtttgaaaaccaggttcatttacgtgagattgctaaatgcatgggggaaagcagtggtcctagcatccatcttgtattcagcttatcattattgcagggaaaatgcttttaatttaaattaatttttaattcttttggcaagttgatggcaaggacttgattgtgtcattaagcaaaagaatgtattggaagttgatggaaagacaaattcatctgtagtagtaactgggccgattgctaaagagttcataaggaggtgaggaagtaatttttttaaaggagaaaaattttttgggcttaggatttaaagtaaattggaaatgtttttaaagganaaaagtattccacaggtttaatacccctttaataat

SEQ ID NO: 269908 - DNA, 162 bp, Homo Sapiens
ccggggcaatgttttatttttacacggttagtttatcagagttgcatatgaataggtgaatgaatcaactcaagtccacaaagacactggtagggtagaaaaagtagctggactggagcaagcacagacggacttggacttgtcctatacttggagctagtt

SEQ ID NO: 269909 - DNA, 289 bp, Homo Sapiens
  misc_feature (140)..(208): n is a, c, g, or t
  misc_feature (212)..(212): n is a, c, g, or t
  misc_feature (230)..(230): n is a, c, g, or t
gctgggattattgagttctccaagtgacctgcacatgaacttggcaccagcaaaatgccctcaaggatacaggcagataccacagctccagttcctgctttgtaaacattttacacttctattatttctttcgtgagtgnnnnnnnnnnnnnnnnnnnnnnnnnnnnnnnnnnnnnnnnnnnnnnnnnnnnnnnnnnnnnnnnnnnnntggnttgcaagcgattctcttngcctcagcctctacgagtagctgggattacaggtatgtgccaccacacccagctaattt

SEQ ID NO: 269910 - DNA, 133 bp, Homo Sapiens
caacacaagttcattgtgaaagaattcgaaaacgaaccctatctagagacatatttcggtgtatatccttggacattttatatcctagtggctacatgtaagtgcacaccataataaaactgtacaaagtcaa

SEQ ID NO: 269911 - DNA, 605 bp, Homo Sapiens
  misc_feature (366)..(366): n is a, c, g, or t
  misc_feature (383)..(383): n is a, c, g, or t
  misc_feature (423)..(423): n is a, c, g, or t
tcataacccccaaagagagcagtcagccaaatcagaaagtttcagggagatatcaagatagaaaaggctagatacccagtctgagaagtcagacaactccacaaaactaataataataatgtcaccattcataggtattattattcatatgtagaatatagaggagtcaggatttggaggcaggcctgggacctaggttcaaatcctggtcatcaccacctacatctgtgtggcctccatagggtactttggtaataatacatattcaatgaggtcatataagctagtgttggcagaggcccagcccatagaaagctcacaaccaagagtggctgtctttattgtcacattgattttcagtctaanaagttgcaactcagaanacaataagtcatctatgttgcaaggctgtttgctcttctnccatccagaaagtggctgttagagagatgagactcacactgaccatgtggtctactccttgctaaacatttcccatgtgcagccttgagtaagcctccaagtattcctgaagttattgtgaatatgaagaaattgaggctccgaggcttagattacttgccccaggacagataaccgagatg

SEQ ID NO: 269912 - DNA, 342 bp, Homo Sapiens
  misc_feature (21)..(21): n is a, c, g, or t
  misc_feature (28)..(28): n is a, c, g, or t
  misc_feature (99)..(99): n is a, c, g, or t
caccgtctcggtttccccggnagccggnaaaaaccctcctgaagtaagtgcccctctggctgcttctgcagagagaagtgaaccactagtgcagtaaanccaggagtcaatttcctcaaggaaagaccaatgtcacaagcaagggggaaaaagtaataaaaacaaagggagcaaagggaacggatttttaaatggcaatttgaatatgagatgtgagagcctcaagattctctgcttttatgtgcaacaaaatgtcttaaaaagcttagctaaaagaacttggctcaatgagaagggtacaatgaaatactcaacttgggaaatttcagacatatcctgttc

SEQ ID NO: 269913 - DNA, 404 bp, Homo Sapiens
agatgcagagagacctgctcctgcttgcccggctacaggggcccactgtggaagtcacactgaaggctgtgaccggccataagccccaggagagcccgtggcagctgtgccgaggcgcccaggacctctaagcggaagcttcccaagctaggaatggagcaacactgcaatgaaatgtgtccaccaagctcattgttcctcccgggcgcttataaagctcagatgtatagtgacgtatggacaaatacaaaaaagcattttttaaaaaggaaaggcatgagttttcccctttttgataaaaagcagcctgtgatgaagtctggagcacaagagagatgggtctcccatctggaagcctttcgcacgcagctataaaatgtaaaaactgaccgttggtaaaaagt

SEQ ID NO: 269914 - DNA, 471 bp, Homo Sapiens
  misc_feature (112)..(112): n is a, c, g, or t
  misc_feature (459)..(459): n is a, c, g, or t
ataaccctaactcacactgttgttgaaaggttctatgaactaataaaagtaaattcaaataacaggtactcagccaaatcctcctagtctggagggaatccctgtttaattnacaggagccctggtcaaggtggaagaggttttaaataaaaacaattataggttgaatatctgttatctgaaatgaatgctagttatcccttatctaaagaaagttaattccgcacaacctgaagcatgtacatgttccatgcagggggctggcacacctgttctgatgacatggccactgcatacaacattcacattatgacctcgagagaaaaaaaacgcactattttcttcttccagagtatgaaggaagcgctaggtaattattacatggcaatagctacttctcaaacaccttgttcagaaaataccttgtttcaaatacacaatttaggctgagaaggaatnctgtgccgaact

SEQ ID NO: 269915 - DNA, 587 bp, Homo Sapiens
aaaggtcctgccatcagtgagtgtatgtcctggtagcctttaatacacttcatgtttatattatgaaacagtttatagtaagataatatatgaagtatacatgtattaatatatgttatatattttatatgctttaggtttaagttaaagtttttataaaatgttcctcagcttaatgtaactataagtaaaaatgtaaatggttttatgtgggatatgtttgtttctacgtctgtgaatttaatagtaggcctcaaatgattgaaaataagagtaaaatcatacgtgagatttatatcaacatcagactaaaactcattattactaagtgtggatttttctcataattttccttaagccaaagttaccttacttaagtaaccttaattccttccccaatccaataaactcctaattccaatgggggagtttattggatgaaaaaggatttggaaggcaccttggagggataatggcccctttttggccgattctcgaatccaaaggttgtttggccaatttaaaataagggccaatggaaatccatttatatccaggaggtataaattaaaggttctctaaggaaa

SEQ ID NO: 269916 - DNA, 385 bp, Homo Sapiens
ttgtctgaaatttctatgcaataacacataataaacatggattattacttttaaaacaagggaagcttattgtttaaaaatggaacacataattgtatatgcaatgtgattcagttacataaaagatacataaaataggaaaatgttcatgggagaaatgtgagtgacgtttttctttatatttttcaggtttttacaaatgtgctggctctgagagccataagttgtttttatgaaggtggttcagatagggaaactgagggcatggcagggttgggcaggaagggctttctgggctcccaaacacacatctctggcctgcccggccctgcaaggaacctgaggcagatgcggttcgatcatccccagaggatgccctgcctcc

SEQ ID NO: 269917 - DNA, 475 bp, Homo Sapiens
ctcatcttgcaggtgctgaaccaacatcatcagtttctattctaatcaggccccttcccaatctccatttctctgccaagcccatttacccccacctcatgcatcccaaggctctactgggtccctggacctaaccctgctttcatcctggtggccttaactacagtggaggtggaacttcccaggaggggaagggacagaccagccccagccgctgggccaacttccaatcattccagctagaagagcttccccctgacaccctgtgactgagcctgtgtcctgtctgcctgcccagccatgctccatcggctgtgaaggcagtgcccggagaggccagagggttggagctgcagggacccgtttggacccacagcctctgttctagagatgcttgtataggctgttaattgtgatgaataaacgttcaaccctccgcctgcagccagagtagccaggccgcgcaccccaaaaa

SEQ ID NO: 269918 - DNA, 349 bp, Homo Sapiens
  misc_feature (12)..(12): n is a, c, g, or t
  misc_feature (25)..(25): n is a, c, g, or t
aaagaagagacnctagccatgtgancagtgctataaaactccccagtgtgccttttgtccaggggtggggtgggaggtgcctaattacccatacaagggcatcattcccactgggtatgcaggggcagaaccacagtagtaaattctaaaattatttcaagtatgttcgtataacggaaaatcctcactggatggggccgttttaagaacgcttcttagtgatgatcctgtctgtgggacataaggaagaagcattggaaggcactattttgaaagaatgctgcacaggtatggcaacagccccaagcacattccttcctcacgagtcccaggtccagctttattacct

SEQ ID NO: 269919 - DNA, 433 bp, Homo Sapiens
ctatttttattcttttttcttgcttaatttagggtagtgttgggatagaagatacactttataaaaagcagaaagaccaatcattgagttattttagagacaatatgccagatccatacctttagatttaatcttacctttttttttagtttctcttcattcaagccgaggtagaaagccagtggtggaaagctgtggtattgcataggctacaaacattgtattgtcaacttgaaagtatagctacttctaaggatgttgatgttcattgtagttttttatttatagtaggctaaaattaggaaggcaacttaaagcttcccaaaaaggaggaaccaatacttttggaaaaattaagggcacatccctactttggggattgttgcaccaactattaaagtttggggtttccaaagagtgtttaaaaggcacc

SEQ ID NO: 269920 - DNA, 293 bp, Homo Sapiens
gcatttactaggaccttgtaggcaaataaaatgatagagaaacttgcatagatgaaggatgtgtcccattccctgaagtcaagggaagcagagctaagattggttatgcagaccatgggctaggcactccctacaaagtcactttaatcattcccaacagtcttgtgagtagagagaggcagagcctttagtggaaagagcatgagatttttaaaacctaggaagtggttggccaatggtgggggccaaatctggattgtgtgtgggatattcaaataagtgggattttcctt

SEQ ID NO: 269921 - DNA, 448 bp, Homo Sapiens
taaacacgcacacattctccaagcagtgcctgacagccttctttgcatcaaggagcacttacaaatgatccagagaccgaggagaatactgtctaggcacacctgctggagactcctccccgaaactctccaacatccctcttgccagatacaatcaacatgtgaagataatgaagaccaagaaaaaagcctcctagggcataggatacagctgatcctcctccctacattcagcgattggcctgctctgctctcgctcctccgacagcttcacctgctcctcttcatgttcctgtgcctggggtccaggggctcatcctgttgtggtcgtggtgggcggctttcagccctttaggagctttcccttgggctctctccttcagggacagcttaaggaggcaccagtgtgggagttcaccctttcagtttcaaatggcaggttcagttc

SEQ ID NO: 269922 - DNA, 521 bp, Homo Sapiens
  misc_feature (72)..(72): n is a, c, g, or t
  misc_feature (100)..(100): n is a, c, g, or t
  misc_feature (124)..(124): n is a, c, g, or t
acactgaccaggttggactttcccaccagaattgcttgctccagcttaatccccataatattccctttcccnttagattggttttctgtctccggtaacnttttcctctctgccatataaaatntcatgactaaaataactttaaagtaccagagattgtatcttgttgaaggaatgcattgggggggctttgggcagacttagcaaaatgtttgtatagcaaaaatgttttcttgctaaaaactgatttgcaaacttgaacgtctagatgtgtgtaggaagattttaaaatttaggcaaattgtctctaaagagaccaattttgcttcctttgtcttggttccaataaggatttagtaccaaaaagttcagaaggctggcttcccagaagaattgtacatactcctctgaacccccaaaagcaagggaaaaatacactctaagcttattatttatctcaggtgtaaaaactagctaccttatatttaaataaagcagccataatttatttatttattttt

SEQ ID NO: 269923 - DNA, 505 bp, Homo Sapiens
  misc_feature (404)..(404): n is a, c, g, or t
  misc_feature (419)..(419): n is a, c, g, or t
  misc_feature (478)..(478): n is a, c, g, or t
tcagaaatggtctgacatgttgtctgttgcctcccatataagctccatgacaacagaccctgtctagcttactgccttcgtttctagcacctagcgcagtgcctgacacttagccagagctcagactattatttgaaagcttcttttggttaaaagaaacattcccagtggattttgcttaagactttgtaagtgtctctggcctcatggagttggagggctgagtgggaggggatctaccagcatcacagtcacaggaggtcactcgtcccttgccccagccatcccattacttcacaagacagccccttccatccttgggacaacttctggatggattaggaaaattctttcctgatgttgggacagaggacctgctttccccatcgctgggcacttcgttnattccactggccttncctttaggggaacaactgggagttggaactttcacattttggacagtcctttaaaatanttggaaaccaggctatatctgttaaaa

SEQ ID NO: 269924 - DNA, 360 bp, Homo Sapiens
gagacccacatctggggctctgccaggaaaggagtgctgtaacccaccttttctgggtcctaccctgtgatcaacccgggtgtgactgtggacatcagactgaggaggagtgcctacatttgcctgataccttagtatgcagtattggtagtgtagaagcttagatcctctggaatggcagaaattcccagatttatattgatagggactagatttctggaaaaccatatcactgggaatatagacacccttttttatggagagggaattatggatttttaattttaaaagtctagtgtaatatatagtgtatattgagacatgaatctttccacttatcatcattcactaatttctgtt

SEQ ID NO: 269925 - DNA, 471 bp, Homo Sapiens
tttttttaacagaaattagtgaatgatgataagtggaaagattcatgtctcaatatacactatatattacactagacttttaaaattaaaaatccataattccctctccataaaaaagggtgtctatattcccagtgatatggttttccagaaatctagtccctatcaatataaatctgggaatttctgccattccagaggatctaagcttctacactaccaatactgcatactaaggtatcagcaaatgtagcactcctcctcagtctgatgtccacagcacacccgggttgatcacaggtagacccagaaaggtggttacagcactccttcctgcagagcccagatgtggtctcagaagtcttcccagcaaagtgccctagacagctagcccccagtggaccccaagatattcctggttcgaagatactcattttcagattgaaaaaaaccaatgggagtctaagtaat

SEQ ID NO: 269926 - DNA, 402 bp, Homo Sapiens
gctcaccctcaggcatctcggactggagggccaagcagaaggtcagcaacttactcttaaaacgcattgtttcggatcatattgatctctttccatttttccttttgtcctttcactgtatgacttgaatcagttttgaattctatttgtaaagtgtttcgttgtcgtgaaggcaccgtgcccatgtctgttgcgttttccctcggcagcgtgtagggcttcagcttccctgggttttcacccttcctgcaggcactgtggggtcctgagggccagtgggtccatttcacctcttgctgcatgatggtcagtagctgatctgttatggcattcacttccagattaattttccgtgtttgaagtatgtgcatatgtgctttacagaataaaacatctgaattt

SEQ ID NO: 269927 - DNA, 461 bp, Homo Sapiens
  misc_feature (442)..(442): n is a, c, g, or t
gaggtgctgtcatccagccttcatggttccatttctagagactagacagtagatttagcatcattcttaagggccttaggatttttggaatggtaaatgagcactggcttcaacttcaagttaccagctacattagcccctaacaagaaagtcagcctatcctttgaagctttgaagccagacattgtcttctcccctctagctatgaacatcctagatggtatcttcttccagtaggagacggttttatctactatttttgtaaacaaaaatctattgtttagtgtagcctccttcatcaacgatcttaggctgggatcttctggggtaacttggctggcagctttctgacatcaggcacctggctggctttcactttggcacttttaacggattgtgggagatgggcttcttttctttaaaacctcctgaaccaactttnggctagctttccaattttt

SEQ ID NO: 269928 - DNA, 427 bp, Homo Sapiens
  misc_feature (82)..(82): n is a, c, g, or t
atcggccctgcaaaccttaacctgaatgtaacgcccagtgaaaagagtaacagatgttaagaaaagggaattttagcccccnggctcttttatccaatttgccagatgacttttaagaacgaacccacagcccttcagccctgttttcccccaactgcctaaaacaaagaaaataccctgtccctacattcctcatcaatatgactgagaaaaaaaggtttggaatcagtacaacaaacacttggaagaaaaagtatacaagtgcctatttttgtttttcttacacacttgtatatacatattaataaggcaaattcaagttttaaaaactttggtcttagtgaaatcagaagaatatattttcccccaagtttcagacacatatatacctcagaatgtggatgctacagaaaaaatattccaaaat

SEQ ID NO: 269929 - DNA, 336 bp, Homo Sapiens
  misc_feature (29)..(29): n is a, c, g, or t
  misc_feature (39)..(39): n is a, c, g, or t
  misc_feature (81)..(81): n is a, c, g, or t
caacctaaaagttccattgccccttaaancccccccggnaaagtgtaaaatgagccttccctccccccctgccatattatncccttagaatgtccccactgtcctggcatttggtacctatgacctttttaatgtatattcaaaagatgattatattcctatttgttggtttgtaaagacagttaagaagaatgtgtagtttggtagtggtttggggacacttcagtggtgcttccgaataatacctctcatatttatctgtctcaatggtttctactgggtcagcatcagtagaagtttaagaaggtgatattggccagacatagtggcttatac

SEQ ID NO: 269930 - DNA, 489 bp, Homo Sapiens
gacctataaaaagtcatttaatgcatattccagatggccaatacaagctggttaggtaattagcccttgaagaattcttttataatcatataaaaatgttttgtcttgtttaaaaaaagtctactctaacaaaaacatccaccaatgggcttgcattttttccatttgcaggtttgtaagatcataaaaatatacacatatgcatctctgggcatatctctgtccactagctaatcagttttggcaatacactgcataggggtatactaccattggtttctgacattaagttagctttaagcttattggctattccaacaactgggaggcagcttagaacccaatccctgggaaagcacttgcaggattaactacccgtttccctgacaccttgtctatggtggtgagaggtctggggacagacttgctaatccaagggtgtactaatgcttgagctggggtcaagcgggcagaggggtcccagtgaag

SEQ ID NO: 269931 - DNA, 422 bp, Homo Sapiens
aatttataaaggaaaggtttaattgactcacagttctgaatggctggagaggcctcatgaaacttacaatcatggtggaacaggaaaaggcacatcttacatggcagcaggtgagagagagaggagcgaaggggaaagagccccttataaaaaccatcaggtcttgtgagaactcacttgctatcacaagaacagcatgggggaactgcccccatgtgccagtcacctcccaccaggtctctccctagacatgaagggattatggggattacaattcaagagcagatttgggtggggatacagccaaaccatatcaccaggtaaactgtcaccagagaagtgcatctcatgggtagtttaagcccagcatgtcttggcttccagaagtaaatccaaagcagcaatataaatttgctgatgat

SEQ ID NO: 269932 - DNA, 352 bp, Homo Sapiens
  misc_feature (18)..(18): n is a, c, g, or t
  misc_feature (85)..(85): n is a, c, g, or t
  misc_feature (234)..(234): n is a, c, g, or t
aaatgtgtagaacccctnagtctgttaaacccctatgagaagcatgaacctcacttattttgcctcactactctaacttcaatangttagaggtgttagacaatgaaagaactttattacagacatggccaaagatagaaaatagtgctttttaaagcatggaaacagtcagaaatcttgcccaaaggtgccaataaaactatttaagctgacaaaatcttttcaggtttacancatgcccacaagagttttcaacatatcgtatgaagtgagaacaagaaattatgtggggaaaaagagatgctaaaaaatttaaaatgccaccaacatggccaagcgcagtggctcacac

SEQ ID NO: 269933 - DNA, 476 bp, Homo Sapiens
gaggcacctgagttctctgctgttatcctgcccaagggcctggccgagcctctacctgaagcaactctgctcttcctgtcagtctcaaagcacaaggaggttcagcccaggaggaagccagctgcaatgtggagacacgtcctcctccccaacccacctcatgccaccgccaaccccctgccccaggagcgggcctgagccacgtcccctaggagcagctggagatggccaaaagagtgagctcaggactactggatcccatgcccaggtgtccagcagacctcaaggcagaagggtcacctaacccaggagtccacagactgatgtgacctcaggttcccacatcagtggccacacaggcagggcccacctggtagaagtgttctggatatggccagggtgggtgtgtggctaagtgggcctgaacagagggaaccctaggcccttggccaatgtgattaaagctgccatcttga

SEQ ID NO: 269934 - DNA, 459 bp, Homo Sapiens
  misc_feature (15)..(15): n is a, c, g, or t
  misc_feature (155)..(155): n is a, c, g, or t
  misc_feature (159)..(160): n is a, c, g, or t
  misc_feature (171)..(171): n is a, c, g, or t
  misc_feature (175)..(175): n is a, c, g, or t
  misc_feature (237)..(238): n is a, c, g, or t
  misc_feature (267)..(267): n is a, c, g, or t
ccgggccaggtggcnagccgtcctgtggtccttggcctactcgggaggcctagggtgggagggatcacttgaaccccgggaggccagaggttgcattgagcctaagatcgcacccactgcactcccagcccgggtagagtgagactcccatctcnaaannattaatgaatnattnttaaatacttatgaattgtttatttctcaaactttccattaatattttccagccaaggttgnncctgggtaattgagacagggaaagagaanccacagataaggagagactactgtataatgatattaattagtaaggtttaagtaagtatagaatttgattgtctgtacataatttaaaaagataaagctggttattcagaattatgttgtgtgtaaaggtgtaatgagaaaatgaaaatcatcaattccaaaaatgatcattaactttttcgtacctatgga

SEQ ID NO: 269935 - DNA, 463 bp, Homo Sapiens
  misc_feature (408)..(408): n is a, c, g, or t
tcggccaactgagattgaaatccaagtgctggtttctagttctgaacatcaactaaagagttttggaaatgacagcaatttataacaagttcatattgacttcctctctatggcaggaagacattctgtgctgttttgaacagattaaagatttgtgtagtttgtgggaaattgacgtttttgtttaaattccacccgcgtttgtcttttcctaccacctgtgggccaggtgctcgctggccatcacagttgcgattccatgagtagctgctttatgactgctttttgtactatctggatgtgcccagagttacttctgtacaagctctgtatctgtgtccgttgaggaacattattttaacaagaagaacaccaacagtaggcatgaaatataataactgttttatnaattctaaagctggctgttaatttatgaagtacataataatctaatgtaaactgc

SEQ ID NO: 269936 - DNA, 402 bp, Homo Sapiens
  misc_feature (19)..(19): n is a, c, g, or t
  misc_feature (36)..(36): n is a, c, g, or t
  misc_feature (57)..(57): n is a, c, g, or t
  misc_feature (85)..(85): n is a, c, g, or t
  misc_feature (155)..(155): n is a, c, g, or t
  misc_feature (221)..(221): n is a, c, g, or t
gaagtacataataaacctnaagtaaacggcagaagncagagcaagtgccctacattntggtaattttggcattactacagagccntgtacaatagaaagcaatgcaagacttgtaaactctcaccacttcttgtaatatcaaatgttccccctcnggttattttgcttatggtacccatgagttgcctctctctgtacatagataaattgttccaatattntcctttgatgtttggaactacagatagtcaagggctggaaattttagttttcaatataacttccagcttagcaattacctctagtccaagacaatatttgattcctagttctgtttggggcaaattttcatttatctaaataaaatgcaatctaattaaatgccatggattttctttctgt

SEQ ID NO: 269937 - DNA, 449 bp, Homo Sapiens
  misc_feature (40)..(40): n is a, c, g, or t
gctggcagagacttttatccctaggccgtcagcccggganttatttagaaaaataaatagtgaaaaagccctggcctaaagtcaatattgccggttttctatttcttctaccccacaaaaacagggagccttatcctgccctttatataacccaagtggcaattatccctgcccaggatcaacgtccagggtggtagcacccatcatgccatgccatggccccctacccactccttatcacagaatatgtggtatgaagcatgccctcctcacacccatccgtggaatttcagcagcttttactgacagctttgttcaaaatgaccaaaactacaaatactggaaatagtatctgctgcagaatgatttgctgggctgcttaggaaaacttctttatttagttgaactactaaattgaggaagacaagtctgtatcatgagacaaccta

SEQ ID NO: 269938 - DNA, 469 bp, Homo Sapiens
  misc_feature (21)..(21): n is a, c, g, or t
  misc_feature (72)..(72): n is a, c, g, or t
  misc_feature (80)..(80): n is a, c, g, or t
gattacatctaaggacctccnaaaaaccatgggaaacatctgggtgtgccctgtgtaccgaaccatgtctgnacaagcantcttctttgtatatgaggatggttcaggtgggcgatgccaacattaatactcaggaccccaagatacaagaaggaaatcatgcgtgtgatcggaactcaggtttacacaaaactgagggggccccagccctcgtaccacccctgttaccccaggatccatctgccctcataaaagtgttcaggtacaacagctgaggctgccctgaggaatcaaggggccattaccaaggggcaggaaaaggatatgtaagaggtggccttcatggtagagcttgacccaagaactactccacattcggatggcccagactgactccatcccctgactttccctttgacttcaccctgtttgtaaataaaacaataaaatggaaggtgctgtggactgg

SEQ ID NO: 269939 - DNA, 432 bp, Homo Sapiens
ttaataatactgtcatgtcacagttggtctataacaagcatcacaaaaatgtcaaataatctgtgccttgtaaaatccactaatgtaacatgaaaagcacaatttgacatcaacccgtgcagtgaacccagctgtgttactatagaatccttatctgctctttggaattactgatctctcaaaatctgactcagtttacttctagcccaaatggaaaagtcctcaataagccaggaaacagccctccctttgggatgtgtgtctagtctacaaaggatggccttctgggggtaccatcttgtgtctcccagacctttccctgtctccctcagtgtctgtgccccacaatacaacaaaggccacctgggacacatctctccttacctggaacccaaagcagctctgcctccatggcctgccttgggggagcta

SEQ ID NO: 269940 - DNA, 316 bp, Homo Sapiens
ttcagttgagagaagcaagactttaatgaagaatgctacaagtatggacaataattagttctcaccttttaaaaaaagattacagaaaacactttactgaaattttttgctaaaaagacagtctttaagggtgtccgggagagacagcaagcacaacacagtacaaaaggagaagggaatgttgaattccagtgcaagacacgaacacagcacaattagggaatcaggaggaagcaaccatttcacaaggaatgaaattaggcatttatattcaatcggattttttttaagctttaaaagtccagccataagggaa

SEQ ID NO: 269941 - DNA, 491 bp, Homo Sapiens
  misc_feature (239)..(321): n is a, c, g, or t
tattgactggatctctataacaccaaaaaagtgaggaacaaagtggaaaatcaaggacagttatatctttgttttgaaatgatctcagctaatggaactgattggcttttcctccattgaatcactcagttgttttgacatcagtgctgtagtcgtagctttaacctggggaggaagccgtggtgcagtcttgttttgaatgtgagcttcagaacaggacaggactgggagattttgannnnnnnnnnnnnnnnnnnnnnnnnnnnnnnnnnnnnnnnnnnnnnnnnnnnnnnnnnnnnnnnnnnnnnnnnnnnnnnnnnngataacttaccccaaaactaggtaaattgagagtgctgaaggagctgactccataaagtgcttatctcaatgtttggcctatggtgagctctccataaataaccatacacactattattactatattcttcagaagacaaagggccatgtttagcttgggacttaattga

SEQ ID NO: 269942 - DNA, 450 bp, Homo Sapiens
tatcatttcacgatctccttttaatgtttttctttcagtttgcactgacagtctggtgaacaggtgctgccagggtgcaagttacattgcaatgttctaaaccttttgaagtgttcttagcaaaagcctttctttctgggtgtttttgtccgaatgagtctatgaagactcaatgcatccatcttgggctgatcatgccacagatctcattccagctatagtactgccaagaagtgaagtttatcattgaattttacctgtgttgctctcttttaaagtaatgactttgagatgcatgctttgtatcatattgaaaagtatgttttattttccttaaagttgtaatattgtgtgtgaaactgtacatattttaaatgatgtagctttggcaggttttatttggttgatatgattttatattaaaagagaaggctgctttcatataaaata

SEQ ID NO: 269943 - DNA, 366 bp, Homo Sapiens
  misc_feature (263)..(321): n is a, c, g, or t
  misc_feature (341)..(341): n is a, c, g, or t
gaatttgttgttatcccacttcagagctcattaatgcccacatttgtcaacatctccgttgagaaatccacaatggttttgtaacctgctatgcccatcaagccccctgttttactttcaagccctacacacaatagacgttattccaattttaaatcctcttttccattacttgctaaactctatccaactaagttcctcactctcctatcaatagtttatgtacagagttgcccacgatgtttcattaatatcgttcctgnnnnnnnnnnnnnnnnnnnnnnnnnnnnnnnnnnnnnnnnnnnnnnnnnnnnnnnnnnncacaaggttaggagtttcanagccagcctggccaagatggcgaaa

SEQ ID NO: 269944 - DNA, 368 bp, Homo Sapiens
  misc_feature (17)..(17): n is a, c, g, or t
  misc_feature (27)..(27): n is a, c, g, or t
  misc_feature (37)..(37): n is a, c, g, or t
agagttccccatgcacnccgatggttncctgtatcanagccccaaagaggttctctggtgggcccacagctgtgtgcctcagtcagtgcactgggcaagctagaagtgttggggggttaatgtcccccggagcagcaaccctgagtcaataaggagcaggacctcagcttcattgtccttgagcaggacaattctgaagtgtattctacataaactctcagaggatgcccagcaggatggagtcccagttgcccccagcagtaacccactcattcatgtacttcctgcgggggctctcccttccctctcttccccactccccgcccttgggcttcctgggatggctcccaaataaacctcttgcaccc

SEQ ID NO: 269945 - DNA, 398 bp, Homo Sapiens
  misc_feature (18)..(18): n is a, c, g, or t
  misc_feature (40)..(40): n is a, c, g, or t
ttacaatgaaaatgttgntgttaatggcccatgccattgncccattaaaatgccattttaatacctcggcaaaatgagatttgaaactcattagtttaactccttaaaacatagtgttgttaaacagtattttttgggggcgggtggatagctttttgttcctatcttgtacagaaaacagtaatggaatcactcatgttcagaaccttgtaaatatgtctgtaatattaatgcttccctttattaagacaaatatacattcaaaaagggagattttatttagacacacattttcttttcaccctaatctatttagattcatacttattgagacgggaaaaactcgctgtaaaataatgccaacctagataatgctataataaattattttgtacaca

SEQ ID NO: 269946 - DNA, 607 bp, Homo Sapiens
  misc_feature (473)..(473): n is a, c, g, or t
  misc_feature (518)..(518): n is a, c, g, or t
  misc_feature (559)..(559): n is a, c, g, or t
  misc_feature (567)..(567): n is a, c, g, or t
  misc_feature (575)..(575): n is a, c, g, or t
  misc_feature (595)..(595): n is a, c, g, or t
ggcacgagcgccccaagtggctgggaatcccacctgctactatcactgtgaattataagagcatctgtgttgtcatttgcatttgcagtgttcccaaacattttcagtctctaacttgaacctaccaactctcttccaatttgctcattgacattcccagcccaaatgcgtttttatatttgcctatgcacactaatcatcacggctaaactttccattgtggacattgcttgatagtttgaaaaacagatttgcacatgttattcatttaatccacacaggaaccttaggtacatgagtattgctaatgcccaattttacagatgagggtagtaaggcaaagtggttgaatgacttcccccaaggctacacctgatgagaggcagaactgagaactgaatgtacacctttcttgactccaaagcttgcttttagatcatgctgttctttacctgaggggttgctctattgtntcaccagcagcaagacacatgctttaagtaagtttttgcaaaaancatgatctgtttgagccaaggtcatcctttatcctcacatncaggattnccttggtntccaggacacacaagctgtnaagagtggttgg

SEQ ID NO: 269947 - DNA, 557 bp, Homo Sapiens
  misc_feature (28)..(28): n is a, c, g, or t
  misc_feature (79)..(79): n is a, c, g, or t
  misc_feature (93)..(93): n is a, c, g, or t
  misc_feature (236)..(236): n is a, c, g, or t
  misc_feature (278)..(286): n is a, c, g, or t
attgggtcccccatccccaaaaaatttnggccctgcaaaattaatggaaaatttgagggggaaattccaggtataaagncaaaggacggaatnttggcacaaggtgatatattccctatggtgtaatgcaaggtacaaagtatataatatggtccccctggcacattcattttctcagttggaagaagagaaaatttgaaaatgtccttatgcttttagagttgcaacttaagtanatttggtagggtgagtgtttccactcaaaatatgtcaacttnnnnnnnnntaggccctttcataaaaaccaaactctagcaagatgcaaatgcatggcaaatcctgtcggtctccagttggttatctgaatagtgtcaccaattccaccaagacagtgctgagattggaaaagggcactcatttggattgccttacttctcttgccttaaatatatcccatatatttaatatgtcaaaaagggcttgaggtgaatttcattaaatggaataatatgatgccactttgcagctaaaataagctcagtgatacctccttgtta

SEQ ID NO: 269948 - DNA, 524 bp, Homo Sapiens
  misc_feature (18)..(18): n is a, c, g, or t
  misc_feature (33)..(33): n is a, c, g, or t
  misc_feature (40)..(40): n is a, c, g, or t
  misc_feature (48)..(48): n is a, c, g, or t
  misc_feature (55)..(55): n is a, c, g, or t
  misc_feature (78)..(78): n is a, c, g, or t
  misc_feature (83)..(83): n is a, c, g, or t
  misc_feature (346)..(346): n is a, c, g, or t
aacaagttaatggccttnaattggctgaccccngaaacanccttaaantttgaancctaatacctgtttgaaaaaccnacccnaaaaacccaaccttttggcaagaatgaaggaaaactgaagggccccagggatggggaaagtgccctttgccctacttgttcccttagagaagtaggtatccaggcaggctggcaggaacccctgtgaagtgatttcctccctcccagtccccagctcctgtaccctattgaagtggttcccagtggctggatgccagccccaaccctggttactgggtatctttcagtggcccagatcactaatttgaatatctaacatttcncctgccaaggcgctttgttcttaagaacaaaactgtccccaaaactctcactgcagattttaaacccagctgctacaacagaatagaggtactgatttttccacaataactgttaacaaactttgaaacaaaaaactgtgccttgacaagggctgtaattactaagcgctgtgccgaa

SEQ ID NO: 269949 - DNA, 330 bp, Homo Sapiens
gtgggggagacgggtgcacccacagcacagaaggagtcttccttaggctgcatgggtctggaacagcctcagtgctcctagggagaaggaggagatgtcagaaatgcctcctcctggccagggagggagcgggttaggaggtggcaggaaggaggaactcccagcacccactatacatccaagagctgttctccatgttattggctttatttgctgacctggaatcagcttaagtttgaagctattacctgtttgaaaaccacccaaaaccaaccttttgcagatgagggaaactgagggccagggatgggaagtgcctttgcctacttg

SEQ ID NO: 269950 - DNA, 392 bp, Homo Sapiens
  misc_feature (20)..(20): n is a, c, g, or t
tacaaaaattgccattaaanacattttgccagtggtgtatgccaagtatgggaaagaaaacaggaaagctgaataaaggtccatccagccattggttttggccccagggccacaagaaaggaatgttgccttaacacttgtcagggtgcagtccctgagggcagcacccatcaagggacacatcagaaccccacaggttgtggcagcaaggtcagaagtgtgcatccagacaaaggtgcaaattagacaggaggatcgcttagaaagcctcaaagcatttcttgttttacatcttggttcagatataaagaatctttggccgcatctcctcactggttctactatctggctattaaccctttaccaactccttgagtctgggtaaaactcag

SEQ ID NO: 269951 - DNA, 445 bp, Homo Sapiens
  misc_feature (408)..(408): n is a, c, g, or t
  misc_feature (431)..(431): n is a, c, g, or t
ggtgtttcataacaaaccatctggtgcctttccacacagaactggcaggagcctcgtgtcctgctagctgtctctcttgttgatttccgtgaaaatgcaagtgtttgaagtctgctcattccgagggtgaaacaaaatccaaccctgtcagaatcatgctgttctctttgctgacactgtgacccggggtcgggacagaccaggcaggcaatctgtctttaggaatctctttccttcctcccctttttgcccccgtgggttcccccgggcattcctggaaaggccaggcaaagccttccaggcatctttttccatcctgagggtgcctcccagttggcctggggtttgtcgggagcaagttttcattcagccctagggggaaaacaagggcccttctgggggaacctncttacttgggagtaaccggacantttaggacggagtt

SEQ ID NO: 269952 - DNA, 439 bp, Homo Sapiens
  misc_feature (21)..(21): n is a, c, g, or t
  misc_feature (194)..(386): n is a, c, g, or t
ccacataccaaaggtttttcnccctcatttccccccaaaaaagtacctaagagcccgtctaagacccttttttttggtcttgacttgaggtgagattttcttcaagacttctctgtagaagaaaatgaagagacttgcagaacctgaataaaatgtctgaatttctgtcttgttgattatagagttccccgagnnnnnnnnnnnnnnnnnnnnnnnnnnnnnnnnnnnnnnnnnnnnnnnnnnnnnnnnnnnnnnnnnnnnnnnnnnnnnnnnnnnnnnnnnnnnnnnnnnnnnnnnnnnnnnnnnnnnnnnnnnnnnnnnnnnnnnnnnnnnnnnnnnnnnnnnnnnnnnnnnnnnnnnnnnnnnnnnnnnnnnnnnnnnnnnnnatgggggagggatgtctttgagccttggggggttcaagggccacagttgagct

SEQ ID NO: 269953 - DNA, 403 bp, Homo Sapiens
aaataattttaaagacccaccatgtcacaagaagtcaaagcacagtctcatgggggcagagataagccctaaaataggtgaagccaattttttccttcatggagaaaaattatcccatccaattctattggtttcaactactcatttacttatattcattatttagagagtgagagagtatgtgtgtgtttatcttatgtactatgtgaagtgcttggcatagaaagattgacaggaatattgttccttgaggagccttcagacttctgagaagagaaacatacccaatagctacttatgtcattgtttatccgtgctagactagtgctgtggactcagtcctatgaaagcccaaagaggataccattactactaaaattaaaatgtacagtgcgaggagcct

SEQ ID NO: 269954 - DNA, 502 bp, Homo Sapiens
  misc_feature (65)..(125): n is a, c, g, or t
  misc_feature (158)..(175): n is a, c, g, or t
  misc_feature (294)..(449): n is a, c, g, or t
agacaggatttcactctgtcacccacgctggagcgcagtggttgcaatctcagcttactgaaacnnnnnnnnnnnnnnnnnnnnnnnnnnnnnnnnnnnnnnnnnnnnnnnnnnnnnnnnnnnnngaacgcaccacaccatgcccagctaagttttcnnnnnnnnnnnnnnnnnngtagagatgggaacttgctatgttgcccgggctagtctccacctcctggactcaagtgatctgctcatctcggcttcccaaactgctttgattacaggtgtggccaccatgcccaactnnnnnnnnnnnnnnnnnnnnnnnnnnnnnnnnnnnnnnnnnnnnnnnnnnnnnnnnnnnnnnnnnnnnnnnnnnnnnnnnnnnnnnnnnnnnnnnnnnnnnnnnnnnnnnnnnnnnnnnnnnnnnnnnnnnnnnnnnnnnnnnnnnnnnnnnnnnntgagaaagaagggtcaataatgtcaaacatttagagggagttttgaaaaaagg

SEQ ID NO: 269955 - DNA, 519 bp, Homo Sapiens
  misc_feature (371)..(371): n is a, c, g, or t
  misc_feature (425)..(425): n is a, c, g, or t
  misc_feature (433)..(433): n is a, c, g, or t
  misc_feature (441)..(441): n is a, c, g, or t
  misc_feature (457)..(457): n is a, c, g, or t
  misc_feature (471)..(471): n is a, c, g, or t
  misc_feature (498)..(498): n is a, c, g, or t
tcatcctgtagcagattgggtttcaaaaattcggatgtaaacattgacatccagtttccagccattatgtctcagccagatgtcctcttacttgttcaagaatgtttaaagaacagtgactcctttattgatgttgatgcagacttccatgctagggtgccagtggtggtgtgcagagaaaagcaaagtggtcttctgtgtaaagtgagcgcaggaaatgaaaatgcttgtctgacaacaaagcatttaactgcccttggaaaactagaaccaaagctggttcctttggtgattgcatttaggtactgggcaaagctttgcagtaatagatcgccctggaaggaaggaggtctggccaccttatgtgtttngccctggatggccattttctttctttcagcagagggaaagaaccccttttgccngtatatcnagggtccngggtttgaagggtttntcattaaggcaaantggggattttcaaccttcaaggcatgnaaaaggtgtttgtgatcttgg

SEQ ID NO: 269956 - DNA, 552 bp, Homo Sapiens
  misc_feature (77)..(77): n is a, c, g, or t
  misc_feature (89)..(89): n is a, c, g, or t
aaagaggacccaaaagcatgaattcgaaaggtgatgcagttcatggaaagaaaggtgaatgaaacagtgctagatanaattgtccagangacgtcatttgagaaaatgaaagaaaatcccatgacaaatcgttctacagtttccaaatctatcttggaccagtcaatttcctccttcatgagaaaaggaactgtgggggattggaaaaaccacttcactgttgcccagaatgagaggtttgatgaaatctatagaagaaagatggaaggaacctccataaacttctgcatggaactctgagcaagatgtaaataaaattaaaaggtggatggcaagagtgcaaatactatcttcaatccttcagtcccagccagaagaatctctgaaagcatattgtgaatgtatacaatgtagtacaaacaatctctgtgatgattaacagtatgtcaccacttcattttttaaaaaggatcacgtctaatgcccattttcccaactattctttccaaagtaagatataaggtagcttaataaactaagtaaaacgtaaaa

SEQ ID NO: 269957 - DNA, 410 bp, Homo Sapiens
tacaaatcccagccttctaaaccctctgaatgcaattacatgtatttcaggaacattcctaaagaagtaataaatcatcatcccagatgtacaaacaaaagatgataagcctcaaaaactcagttttggcccaaggtccctggtgctaccagttcagctgcaaatacctgtaaggtacagccacttactcttaaagagactgctgaaagttttggaagcccaccaaaagaagaaatgggaaatgaacacatcagtgtccaccctgaaaactcagactgtatccaagcagatgttaactctgatgattacaagggtgataaagtataccatccagaaacaggaaggaaaaacgagaaagagatagtccttgtaaagaaaataaaataaagaagcggaaaggtgagcacttt

SEQ ID NO: 269958 - DNA, 386 bp, Homo Sapiens
  misc_feature (68)..(68): n is a, c, g, or t
  misc_feature (137)..(137): n is a, c, g, or t
aggaaagaattgaaagggttccagtgtatttttaagatggcataaatggcctgaatcctttagggtanttaattgccatgggattttggaaataagatagtgtaaccccagttaacggtttgcctttatatccatantcccactgtttttaggtttaagaattttgccttgaaatgtcaaacccttaggccttgacttggggtctgttacaaaaatattttgtgggggagaaatcatagcttttgtctttgaggttcatcagttatagttacccctgggggcctgggatgggaaggagacctattttcactgtgcaccctgttggactgttgaaattatttaaccaatatgtgtatatttccatatcaatattttaaaatttttca

SEQ ID NO: 269959 - DNA, 477 bp, Homo Sapiens
  misc_feature (318)..(318): n is a, c, g, or t
  misc_feature (353)..(353): n is a, c, g, or t
  misc_feature (368)..(368): n is a, c, g, or t
  misc_feature (385)..(385): n is a, c, g, or t
  misc_feature (398)..(398): n is a, c, g, or t
  misc_feature (418)..(418): n is a, c, g, or t
  misc_feature (424)..(424): n is a, c, g, or t
aataaattgtggtaacatacacgtaaagtaatatttaccacttagactatttttaggtgcacagttagggacattaagtatattcacattgttgcacaaccttcatcaccatccatctccagatgctttcatcttgcaaaactgaatctctatttattaaacaataactccctatttccccttctctccagctcctgggcaaccagcattctaatttccatctctacaaacttacactgaggatctcatataagcagaaacatatggtatttctcttttgtgactggtttgtttcacttagcgtgatgtcctgaaggnttcatctatgtgtaggcgtatgtcacagcgtcctnccttttaaaggctgntcattattccattgttntgcataggacacntgttgttttacccctttcancccttnatgggtactgggggttgctttcactttttgtgcttttgatagggattgctgcc

SEQ ID NO: 269960 - DNA, 580 bp, Homo Sapiens
  misc_feature (150)..(150): n is a, c, g, or t
  misc_feature (535)..(535): n is a, c, g, or t
  misc_feature (551)..(551): n is a, c, g, or t
  misc_feature (565)..(565): n is a, c, g, or t
taacaaagaatggctacttcataggcagagagccacttttggctaatttttaacatccaaagctaataaataatcaagaagaaatagagaacattaacaaaataaattatgttctatttgggaatacctaatatcagatactaacaagtngtacagtgataagaataaaaaagataataatcacacataccttctaggttagtagaaaagttaggaaaagatattaaatttaaagaaaccaatattttgcatgcacacaaaaaacaaaggaacttcgctcatgatgtgggaaatcatgacccaggcaggcaatccgtcttccggggtccagatcactggaaggcccgggtggggcccccctgggggaaggcccacggcagaaacctgctgggactttaactcgccagaaaaatcaccacccagttcaggaagtttgcagagggaaacctaccaatgggtccacggatatgactttccctggctcctggagggctccctctggaagaggcttgcagcattccagtcatagaatgtnggtgagcactacagcngggcagcctcccanacctgcttgggtgta

SEQ ID NO: 269961 - DNA, 473 bp, Homo Sapiens
  misc_feature (24)..(24): n is a, c, g, or t
  misc_feature (47)..(47): n is a, c, g, or t
  misc_feature (56)..(56): n is a, c, g, or t
  misc_feature (65)..(65): n is a, c, g, or t
  misc_feature (344)..(344): n is a, c, g, or t
  misc_feature (375)..(375): n is a, c, g, or t
  misc_feature (409)..(409): n is a, c, g, or t
  misc_feature (438)..(438): n is a, c, g, or t
  misc_feature (454)..(454): n is a, c, g, or t
ataggaaatagagattatggaganaaataaaaataaattataacatntaaacatgnaataaaatnctagacatgaaaacaatggctagaagcttcctatttccaggtgccccagaatcactggcatcagaaacctgctctaggcagcaagccttttgcaggatgctgttcctcaggagctgagaaagatttttctgtgccattttgaagtcctgaggctggttctctcaccagctttgtgctatgctggctgtgctctaagccctttctggcttaatgtgtaatgtctttggacttttctgtttgtttagttttttccttctaagcttttagtaaagttttatnaaaaagtatccggtatgactattgggacttntcttttagttgtcaaacgggtgcctaaaaggganttctcctcattccaccttccagacttttnctctggtgttcaaagnaggggtgttcaaaaacaca

SEQ ID NO: 269962 - DNA, 405 bp, Homo Sapiens
  misc_feature (66)..(66): n is a, c, g, or t
  misc_feature (370)..(370): n is a, c, g, or t
  misc_feature (376)..(376): n is a, c, g, or t
tccaactcctgaccttgtgatccgcccacctcagcctcccacagtgttgggattacaggcgtgccnccgcgcccagccaggactttgtatttttacggtttcctttattgaagggaagaagtgtttgtgaagttgaattattcgatatttagtttggcgttaacttagggtgtggaacaacaataccaaatataatgaattgtgggtttttctaaccagtgaattcatagttagaattagatagtatttgaagggtttcagttgtatttttaggatgggcataaatgggcttggattctttagggtattttaattggcatggggattttggaaataaggatagtgtaatcccgttaacggttttgctttnatatcntattcccctgttttttaggggtttaagga

SEQ ID NO: 269963 - DNA, 442 bp, Homo Sapiens
  misc_feature (32)..(32): n is a, c, g, or t
aaccttgaaatgcctcccatattggaagactnaaagcccactcccggggcctatttgaggtaagaagcaaaaaagagccaaaggactgctgaaagtgggaaagctggggattgaggtcccagatggccagaggctaccacaaaggaggaaacagcaggaggcacttgggtcttaggaagcattaaaacaaagtcaaaacaagagtaaacactagtctatgacatggctgccttggggtttataactcaagcagatgctaggcatgaaaaggattttcaacttcagaactgtagagcaagcgcaggagacaggttcagggtttgccagcagatccacttggccttctggtttcctcaactctctttcaacctagtatgtgtgcgcagtgccaagttctcagctacctccccagctgtatgtagaaaaatgtggtttttcagtt

SEQ ID NO: 269964 - DNA, 636 bp, Homo Sapiens
  misc_feature (318)..(318): n is a, c, g, or t
atattcacagtagggtattattttatattttataaaatataaacaaagtagaaaactttagaggctaaaaagttaactataagtagaatttctcatattttcttcctgtcatggagcagtcatcatgtgcacccctgaagtgtgtgcagggtcatgtggggggcagctggtgcagagttgaatgctaacaaaacaggctacagagtctcctgccaactggtccactttgttctgtcctgtggtttctcaccagccatgctggcttactatcttattcactgactcactgagtggggattaactgagaatggaagtaanaaggagataatcctataacaaaccttttaaaaaaagacccattaagactgcctgtgaattgtttccatggttgaaggaatggagggatggatggatggacagatgatgcaatgaaactcctaaaatactgaatgccagtctaggttcatgagctacgggagctgtggcctcatcctaggaaggtcagagactggcatgtcaatgagttcttggaggaacagcacacatttttgactcatccagttttgatcttgggttgggtggctttttgaatttggttgtaactcttttggcttggtcaaagacagcaaaagattt

SEQ ID NO: 269965 - DNA, 522 bp, Homo Sapiens
  misc_feature (415)..(415): n is a, c, g, or t
  misc_feature (462)..(462): n is a, c, g, or t
  misc_feature (482)..(482): n is a, c, g, or t
gcccttggttcctgtcacagttcagaccttatggattctccttgctgcttgcctgaagctctgaaactttcttgccatacataggccctaggaaccaagatgagtttcccgctcaaacagagaaaatgttcaaaaccccattgcttctgcctgttcccacctcatttccaaaaattaggcaaaagttgcaaagcatctggcagcctgttttccctgtcattgtctctaattccttcccacaaacccctaagatgtatactgctccatcctgctatgtaggacttatcctggggcataaaaactttcttatccagagaaataagcatcatgccatagatgttcataagatatagaacagacattcataggccattatctacaggttggcaagagattaaatatttcccttattcantttaaaaacgtgtattttctaaatcttctattaattaaaccgggtantattaatacctatattcctnaaaaggaaaagtgtttaccaattggcacaaattaggtggg

SEQ ID NO: 269966 - DNA, 372 bp, Homo Sapiens
  misc_feature (304)..(304): n is a, c, g, or t
tagatgtctggagctaggccagcagtctcacttctcttgaatttatcactttgggatgctatctaggaactatagttaattatacaaataatgctacacagaatgttccagataaaaacagtatagcatagttcccaacttgtctgagagttatgagaatttatattcaagtcaagggctagatgaagagacaaatctggacagtttttcattttttcatgttcttaaaattgaaccctttaaaattctgctattcaactttttcctctcaaaatacgctgatcagctctgcaagaggtccttncatttaaaaccttgggaaggtttgggtccctacaggatgtaacaaagtacattcttaccggggactag

SEQ ID NO: 269967 - DNA, 454 bp, Homo Sapiens
  misc_feature (26)..(26): n is a, c, g, or t
  misc_feature (78)..(78): n is a, c, g, or t
  misc_feature (91)..(91): n is a, c, g, or t
  misc_feature (118)..(118): n is a, c, g, or t
  misc_feature (127)..(127): n is a, c, g, or t
ccctgaagatgccttagtgactcccnaagggaacagtagtaacctcacagtagacacccacccctagctatgcggtcnatccacccagaanatggtgcatgccagctcgtagccctgnatatcatgncactgagaactcggcatcactgctgtggttttcttgcccaaaatgtctcttgtccaagtactaaccaggctcgaccttgcttagcttcccaaaatcagacaagatcgggtgtgttcagggtgatgtggctgtagactcttgcccaaaatgtgtagcctgaatctgatcatgaggaaacatcagacagaccaaagggccatgctacaaaataattgccagcacccttcaaaagtgttatgtaagatgttatctaggggaactggttatacaaactctgtcctatttttccaactttttggaagcctgaaattatttggaaatgaaaag

SEQ ID NO: 269968 - DNA, 543 bp, Homo Sapiens
tcatccaaaaacagaaccagtaggcatgggcatgtgcatgtgtgtgtgtgtaaagtgggggagttaaaaagaattggctcacataactatggagtctgagaagtctcaagatccgtagttggcaagctggagacacaggagagtagatggtgtagttccagtctgagggcaagaaatgactgcttgacctagctcaagtagtaccagtcaggccagaggagccccctcctttttgtcctattccggtcttcaactgattgattggacaaggcccacccacattagagaaggcaatctgccttcttgcagtttaccaattcaaactttaatctcatccagaaataccctcagggacactcccagaatagtgtttggccgaaagtctgcaccccatggcccagtgaagttaacacataaaagtaaccatcacataaccctagactactgctctcccacaccatccacatctacgtgacacaaaatccagttggtttcaccttctaaatatttctcttgtctgtcatgtctgcactccagcctggg

SEQ ID NO: 269969 - DNA, 368 bp, Homo Sapiens
  misc_feature (47)..(47): n is a, c, g, or t
  misc_feature (316)..(316): n is a, c, g, or t
  misc_feature (343)..(343): n is a, c, g, or t
  misc_feature (349)..(349): n is a, c, g, or t
cttcttaggaatatttaaattactgtcataattcagtttaagctatnaactgtgtgtcccagtaggaggtcaagaaaacctccacagccttctggatgaagaacctgttttcaaatatactttgcagatacagaagactagtagagttctgccactctaagctgttgtggattttcctgtctccatgaaccactcccattcccccgtccccaatgtgtttgtgagtttccagttgatttgtagcaaatgcctacttagtttctttgtggattattctagacttataatttttttagctgccatttaaggcattccngtgggcacccatcaccatttcaatttnaattgntttaacttttgaagcggtt

SEQ ID NO: 269970 - DNA, 434 bp, Homo Sapiens
  misc_feature (149)..(149): n is a, c, g, or t
ttccctttgacatagtctaccttaatgagaaggaaccagaaaaacaattctggtaatatgacaaaacaaggttctttaacacccctaaaagatcacccttgctcaccagcaatggattcaagccaagaagaaatcctctgaattgccanaaaagagaattcagaaggtcaattattaagcctaatcaaggaggtaccagagaaaggtgaagtccaatttaatgaaatttaaacaaatgatataagatacaaaggaaaaaatcttcagtgaaatagatagcataaataaaaaaatagcagtttctggaaataaaggacatgcttatagaaatgcaaaatgcactgaaaagtcttggcaattgaatcaagcaagcagaagaaaggacttcagagcttaatgacaaggtttttgaattaacctaatccaacaaagac

SEQ ID NO: 269971 - DNA, 529 bp, Homo Sapiens
  misc_feature (73)..(73): n is a, c, g, or t
  misc_feature (163)..(163): n is a, c, g, or t
  misc_feature (201)..(201): n is a, c, g, or t
gccagcagacctgactggagagaactggatgatgagctcatgaaagaagctgtgctgtacgtggattcccagnaggctgccctgaaggagtctggagatgtcctgctgtcaggggccgagatctttgctgagctgggagaagtgattaagggagtgaaaccangccccactgtgagaagaccccacggtgttccaagtccnttgggaatggcagtggaagacacagttgcagccaaactcatcctatgaatcccggtcatctggtaaataaaacaaaggaacttgatgttgagatggatgcttgaggaatattgctgctggttctcataatttctagagtaaatgagggagtccagtccccagtgaactctccttttgtgcttatcatgttttaccttaaatgctgagatcctcatttatgtttgtagttggaaagcaaagctaggtagccatttcttctgttctaccaagttataatagcattcatttccctttatatttccctgaaataaagcacattccaattgtg

SEQ ID NO: 269972 - DNA, 250 bp, Homo Sapiens
acaactgaatattttaataaaatactctttatcaatttttccaaagacaaagaatcccaaatggccttgtgtaatatggaacataaaacatgaacatgataagcctctcatataggcataataggagggagtgattaaaagaaagaactaccagttttagaacagacctaatgttttatacacataaatcagatgggtcttccttcacaaattcatactgtaggggtgtgtttatacatatatatatata

SEQ ID NO: 269973 - DNA, 462 bp, Homo Sapiens
  misc_feature (25)..(25): n is a, c, g, or t
  misc_feature (147)..(147): n is a, c, g, or t
  misc_feature (269)..(269): n is a, c, g, or t
tttccttaagctggcaggaacaggnagcagccctgtgtcgggggctggaatagttctggccagaccccgttccccttcctctatgaaggaataagttggacccaagggaagtcggggaccgtaaaaaatgaagcaaaacaatgccangggtgtctccccgctttactcttcaggaatggtgtccccaagttggaggctttgtgtcagctgcaaatcctaccagttatgtccaagaatggctttccctcgggcaggtggcagcggccatnctaccactgggaatatggcgtagtatctccggtccattccttggatgctaaggactgcgggaatgagggagtcagataaagaacaaacctcgaaacgaacagttaaattgaaatgctatgtgcctgacccaatggtaggcacatagtaggcactcaactcatatgtttaattgaattgaaaatatcccttagg

SEQ ID NO: 269974 - DNA, 436 bp, Homo Sapiens
ctatattaaatagctttatttttgccttccagaataatgccatcatgcattccagggagaaccccatttctagaactcaagggtcaagatttgggagaaattcccagttcctccctttacagctgtgtgaggtgcgtgttttcttcatttaaatctcctgttggagattgaaatgcccagaatggggggtgagcggcgctgaggggaggtctaacgccaggtctcatcctgactgtggcccgggctgtgtggctgagctctttgctgccctagaagactgcctggcagtgaatggctgaagcatgaggccacagtgcatgtaaagtcagcacctgtcagtgatttgtcatcctgtctaaaagctaggggcccaggtctacgagaaaagagatgtctgggtgtaatttccaggggcagcaccccgtcatttagttat

SEQ ID NO: 269975 - DNA, 293 bp, Homo Sapiens
  misc_feature (25)..(25): n is a, c, g, or t
  misc_feature (31)..(31): n is a, c, g, or t
  misc_feature (54)..(54): n is a, c, g, or t
  misc_feature (60)..(60): n is a, c, g, or t
ctgtgactgactttggcctatatanaccttnctggggttttgtttgttttttanttttantttgattaccgagggtatttggggtggggttgttttttgagatgtgtaattcttttatggagtttttaaaaagaattttcatattgtttttctaacatggcttcattaaacgtttaagtattttaaaaatatgtaatatttggaccagatgttgtgaataatagtagagataaagctattttattctgtatttttaaaactgttccgtacaaataaaagctctcctggacaca

SEQ ID NO: 269976 - DNA, 376 bp, Homo Sapiens
  misc_feature (177)..(177): n is a, c, g, or t
  misc_feature (181)..(181): n is a, c, g, or t
  misc_feature (187)..(187): n is a, c, g, or t
  misc_feature (200)..(200): n is a, c, g, or t
cccaaaccagggctcttcaacggcccccccaaattcacactagtcccaccagcaatggatccaagccaagaagaaatccctgatttacctgaaaaagaattcaggaggttagttattaagcttaattagggagggaccagagaaagcaaagcccagtacaaggaaatcccaaatttngttncagganttgaagggagaantattcaaggaaacagatagcttaaagaaaaagcaataaaaaattcaggaaactgtggacacacttttagagatgtgaaatgctctggaaagtctcagcaatagaattgaacaagtagaagtaagaagttcagagcacgaagacaaggtcttcaaattaacccaatacaataatgac

SEQ ID NO: 269977 - DNA, 569 bp, Homo Sapiens
  misc_feature (45)..(59): n is a, c, g, or t
gaaactgagacttatagagagattattacattattaaaatgcacnnnnnnnnnnnnnnncgtgctgatgggatgggtaaaggcttggggagtcctgaaataaggaaaggaaaccacagagaaacttgtgtcttcctgctctcctctccggctgcctggcagttattaacctaaacagatagccacaaaaggttgggaccaaaggagggtaaaggccccagaaggaggttcaaccctccgactcacccctccccatctctgggccctctgctgacacttggatgcctattgttgggtggaaagataaatgagagtggagaggtggaggaaagtgactaggatgcccatttaggaaggaatgtctgatcatccccgggtccctggaggggacaccttttaatctattgcctagcattaatattttctctccttctatctctgaaatgttttatgaaatgagtgttcttgaattagaaattctgtgggatcaatctttgatggtgagggttttagaaaggaaaaatatagtaaaatgtgtaatttgtcttaataaaatctatctctacatct

SEQ ID NO: 269978 - DNA, 304 bp, Homo Sapiens
ctcttcaaagtttatataaattatggaaactcttaaagtaaatctcaactgagttttagaaattgaaggcagaggatttgttctttccagctgactagtcccagtgcaggtggtttctagttgtattcaggcacaaagaaatgtacttactgccttttgatgttctgtaacatcctttgtcatgtttccttcctttcttgttgtgtttattcttttatgattagtaatgttatactgtatggattggagtagagacttcccccatgactcaaggaccacacagataaaaaggagggaagacatt

SEQ ID NO: 269979 - DNA, 766 bp, Homo Sapiens
gccaacatgagaatccaggatctgaaagtcagcctcaaacccctgcactcagtgaacaaccccattctgcggaagaggaagttacttggcaccaagccaaaggacagtgtctatatccacgaccatgagaatggagccgaggattccaatgttgccttggaaaaactccgagatgtgattgctcagtgtattctcccccaggctggagagaatgaagatgagaaactgaatgaagtaatgcaggaggcttggaagtataaccgggaatgcaaactcctaagagatactctgcagagcttcagctggaatggtcgtggattcacagataaagtagatcgactaaaactggcagaaattgtgaagcaggtgatagaagagcaaaccacgtcccacgaatcccaataatgacagcttcagactttgtttttttaacaatttgaaaaattattctttaatgtataaagtaattttatgtaaattaataaatcataatttcatttccacattgattaaagctgctgtatagatttagggtgcaggacttaataatagtatagttattgtttgtttttaagaaaagctcagttctagagacatactattactttaggactgtgtagttgtatatttgtaagatgacagatgatgctgtcaagcaatattgttttatttgtaataaaatatacaaaaatcacttgccagcagtagaaaaaggaccgactataccgacctttctgattagtaaacagttgaatcaaggactctg

SEQ ID NO: 269980 - DNA, 508 bp, Homo Sapiens
gggtatacccttttctttagcactgctatcctttttgtcttcagcacaaataagatgttcaagtgagccagaagcaagaagagccattttagtcttcatagctattggctaagagagataatgagctgatggtctattttaaccttgaaagtaaaaatgtatattttttcactacaagtacattgaacagtaaaaagtgtaacagcaaagtatatatttgatgccttctgtcttttcatgataatgtgctaacaagttgtgttaatattttactcagccagagtctcattcatttgctaagcattgggaacattatgtatattgaccttaaacataggtgtcctatatttggattgtgacttgtagactcaagctaaccttactgcctctttttcacacttgttgaaaggtctgtgaagaacatagttaaagatctccaactttggaaaatatacatgatgtgaaactggggtgctatgttaaaaataaatgtatgataactaaatat

SEQ ID NO: 269981 - DNA, 430 bp, Homo Sapiens
  misc_feature (53)..(53): n is a, c, g, or t
  misc_feature (62)..(62): n is a, c, g, or t
gaaccccctgaaatataaacctatggtgaatatggtttggcctgtgttccccnaccccaaanctcacccttgaattgtaataaaccccccatgtgtccaagggtggggcccaagtggagataattgaatcatgggggtggtttcccacccatattgttcttgtggtagtaagtctcacgagatctaacggttttataaatgggagttctcctgcacaagctctttttcttgcctgctgccgtgtaagacatgcctttgcttctcctttgccttccaccatgattctgaggcctccccagccatgtggaactgtgaatcaattagacttctttgctttataaattacccagtctcaggtatgtctttattagcagcatgaaaacaaacagacgcatatgggaatctaaagtcaagggccaagaaatctgtg

SEQ ID NO: 269982 - DNA, 273 bp, Homo Sapiens
cagctaggaggtgggactaaaaaattagtattgacttaataggcacatccaaagaagcatttattctatttagatcattgccaattattaatattataactgttaaaacaagtataaactttgaacctgcttttgaactgtaatatcataaagtaaagattttcaaaattgatcaagtatattccaggcatattgctcttactccattactgctactgtgctaggcaaaatggtttgttgggcacttgagtacataaggacaaacaattttag

SEQ ID NO: 269983 - DNA, 517 bp, Homo Sapiens
  misc_feature (15)..(15): n is a, c, g, or t
cctaagaagttcttnaataaaacatgtggtacctaagaaagtaaaaagaaataaatcaatatattctatggatggtaatttcctaaccaaatctagttattttttttaagtttctccaaatccgcccaccctaattcccatagtctgaaggtggactcctattttggtacagcccttgcccacatacattttttattttaatgtagcactaactaagccttggcacactctccgttgtatccagagagtaatgtccaagggcgcctcgtgccaaattccccagaactctactgttccttctaaagtaactatatcatctcctcagttcacgaccccttattatgggacatcttcagttactcttggaagagtggagactcagcatccagagattcaaggtaaccttttggccgagggacccactgtcaacagactgaacacgtacaaactctgtgctttgctggaattaaaaaatgaatgaagaaccttggaatccatccctgtcctctaagtcaca

SEQ ID NO: 269984 - DNA, 617 bp, Homo Sapiens
  misc_feature (460)..(460): n is a, c, g, or t
gcattttgcattttgatttgaattttgcaaattttggggtaataaatatgtactgtttctataatcagaaaatatgatccagccccctcctccccacagtacaaaaacatcacctttttccttgaataaaactgtaaaataaattctgagctttgtgggtgtttgagttctggggaaataaaagtttatgtggaatacatttagaacttaaaaagtgaggggtgaggggtgtgggcacttcatcttctttatacagggcagactcagtcggtttgagggcttttgccgacacagcttgactgcaaaaccatcagaggtcaagaagcaggagggtacacagtgcacctggagagaaaaacctcatgcctgcaactgcaatgatgttgtaaaacatcagcacctagtctgattctagaacaatctgatggtttgcctgatggccttagaagcagagccgtgnctctatcggagcacacaatcaggagcatagcagaaaagcgccaccctgtttgtaaaaacaaggcccagttcagagttcaagcagtgccaccaaggaagctatttttaagtatctaattgcgtttgtagcatctggcattttgcacacttcctgtgcc

SEQ ID NO: 269985 - DNA, 429 bp, Homo Sapiens
tgctctagaaagcaaagttcagttgaacagtacagaaacacagaccatgagttctgggtttgaaaccctggggagcttgttcttcaccagcaacgaaactcagacagcaatggatgactttcttctggctgatctggcctggaacacgatggagtctcagttcagctctgtagaaacccagacttctgcggaaccacacacagtctccaacttctaaaactaacggtggagtccatgtgtgaaatggcatctaccatttcctctggattaaaactacggactggggacaacagtattaattcgattgaatgtggctgatgatgcagttgcttagcttctttgtgtttctttgccttttgtacttgtaaacagaaatttgcgtataaatgtgagtgtattataaagtttgagatgttgatctaaaaaaaa

SEQ ID NO: 269986 - DNA, 323 bp, Homo Sapiens
  misc_feature (24)..(24): n is a, c, g, or t
  misc_feature (44)..(44): n is a, c, g, or t
  misc_feature (198)..(198): n is a, c, g, or t
tactgtaggaatacattatcgtcntgtaatcccatacccatganttatatatatcattatctttttgggcagggaaacaacattacaaatgtactcttccctagaagaaaatattttgtctgagaatcttgagacctgcatttcccaatctaaggcaaaactctcaaagggcattattccaatgtcttcattatcatnagtctacacttggaagtgtggcacgtactataagagaggagaacctatttacccaagggtgggtatataggttaactgcttggctataaatgctacagagaaggtcctaggccagcttctccaca

SEQ ID NO: 269987 - DNA, 853 bp, Homo Sapiens
  misc_feature (31)..(31): n is a, c, g, or t
  misc_feature (74)..(74): n is a, c, g, or t
  misc_feature (79)..(79): n is a, c, g, or t
  misc_feature (90)..(90): n is a, c, g, or t
  misc_feature (115)..(115): n is a, c, g, or t
tttccaaccctaaaaaacccttggtgccccngattactgaatccttggccacatccaagccccccattgtgggncaaanaattagaccangccattcttggctccagggctcganaccccaagacagccctctgcttctcagcggcgccacagagagcctgggcttcagccttctgcatcaggacatggcctcgtccactgagggcacgatttaaacatttgacatcagaagctttatttgtaaacctcacacagataaggaccaagggctggcggtgtggccagaggacaggggaagctgaaggccccgtgcttgagctcggcagtcctgctccttgcagtgaagccaccatgggtgaccgtccagcctcacccggtggcctgcacagtgagggaagggcttcagggccatctgctcccagggcaggggacaggccaccaaggacctttggcaaatgaaggtttacatttctgtagtttgtttgttttagagcttaatttgtagttttttagctattaaaaccatttgaatttttaacgacctgatgagggcatcaggtaaattaaaggattttgggaagattcttattttcaattctaatatctgacagatgccatcaagaataagcattaaggtataaaaaatactgtgtgtataaaacaatgccaaaccacattcctacagcaaatgcactgtgccatttataaccctgacatcacctcccaaggctctcaaggaagatttattttaaataacttaaatagaagtcctagatgatattgtttaggaatttaagagggtggtggatatggtcctgtgaatagcacttcccctgaagccagctcatggtct

SEQ ID NO: 269988 - DNA, 322 bp, Homo Sapiens
  misc_feature (26)..(26): n is a, c, g, or t
  misc_feature (41)..(41): n is a, c, g, or t
  misc_feature (72)..(72): n is a, c, g, or t
  misc_feature (175)..(175): n is a, c, g, or t
  misc_feature (177)..(219): n is a, c, g, or t
gaacagttcccccgccaaaggtccantccctaaccttttgnaggtccaatgttgggtccataaggtaactgncattgtgccaaagaagtcagtcctgcctaacttttatgcaaagatagaaactgccacggtattttttaaaattagtttttaaaataaatgcccaagagtaggncnnnnnnnnnnnnnnnnnnnnnnnnnnnnnnnnnnnnnnnnnnnttccatactcaaccacaacttcctctgtactcattgtttactacagtgggggacatcaagggttggaaggattataaagctttaaggctgggcgtgagtgtca

SEQ ID NO: 269989 - DNA, 429 bp, Homo Sapiens
  misc_feature (298)..(298): n is a, c, g, or t
  misc_feature (373)..(373): n is a, c, g, or t
  misc_feature (382)..(382): n is a, c, g, or t
gcctaattgctctggtcagcacttctagtactgttaaatagaactggtaaaagcaggtatccttgccctgttcttataagaaaagttttcagtctttcaccattgaatatcatgttcactgtgggtttttcatatatggcttttattacattgaggtaattccctactattccaagtttattcaatgtttttatcatgaaagggtgttaaattatgtcaaatgctttttctggtcaattggaaagattatgcagtttttccccatcattttgttaatgtgggcatattacactaattngattttcctatgttaaaccattttttaacattccagggattaaatcccatttggatcatggtgtataatcccttnattcatgcngccggaatgtagcctcacttatatttgggttagggttttttgcatca

SEQ ID NO: 269990 - DNA, 447 bp, Homo Sapiens
gaacgcccaggaagtccatactctcaaacccctttctgcccactcaccttcaggtccacagcactttccagcgtcatctgaaatagcaaaggtgatgtgcagcatcccagtgatgtgttcctgtgttatgagaaggagtctggggttctggatgcctcaggaacagaatatggaccttaaagaccaggctgagagcctggcctgggcacgcagcctgcccgcccccgcgcccttcctgtccaccgcgggctctctgcagcagggctttgccgaagagactgctcccgacctcttcatgtcatcctgcatccagagaacggcagcatatcaagccgtttaaccctgattcacctcggttcccttgaaaccaggcctcagttaaccatgaccacagctacaggcaaaccgctgctgttgctgcctgcttttgctgaagaatggtatctt

SEQ ID NO: 269991 - DNA, 391 bp, Homo Sapiens
tttttttgacattattctaagtgctcattcgagtgtgttgaactgttgtaaacatcacctctgaaaaatcagttctgctctcttttgcagggagtggagggaaggaaagagggagctacaaagtgaaggaacttatgaatgttaccaagtagtccagagctcaagaaaacaatcactttgtgaaaagtctgcatatgccaaaaatagcttattatttttatgtcaggaacaataaaacaaaaagccaaaaacagtgtttgtttattccttggatatgataccagaatctatgctgtcactgaaaactatcactaggaaaaataacagtcaccacagctcacagctatagaacagccacatgatgaatgcagttctctttggccactggtgt

SEQ ID NO: 269992 - DNA, 429 bp, Homo Sapiens
  misc_feature (19)..(19): n is a, c, g, or t
  misc_feature (22)..(22): n is a, c, g, or t
ttgtgttttcctaaatccntcngaggaatcactatctatcggcagctagggccttaagacacgtattttgtaaaataataagacttcaaggttgaaagtattccttgatccatgggctgcagaatggatgttgtgctagcaggcacaaaaacaacataaatctccttgtacatctccctcagaactcttgcttgaccagatgcattgtcaatgagcagtaatattttgaaagaaaacttttctggagcaggtctcgagagttataatattcagtaaaccatgctgtaaacagatgtgctgtcatccaggctttttgttccacttttagaaaacaagcaggatagacttagcataatccttaagggccctaggattttcagaatggtaaattctttaggttggcttcaacttaaaggcacctgctgcatt

SEQ ID NO: 269993 - DNA, 451 bp, Homo Sapiens
  misc_feature (227)..(227): n is a, c, g, or t
tgagccaccatgccgagcctcacaattttttttaaggggctcttataacacatgctttatgagaacaggacttactctgtctcatcccactatagctatatatctatccccaaggcctgggaacatactagtgctcaaaaatatggatatctctttaaagaatttgggctgagtgtaggaaatgtagggctctatgggcacgctagtgtaaggagggtcaggtttgnagtgactgaaaagctgcatgccataactacttacatgaattcatagagtatttactaagtgtccactacctgtcaggtgttccaggtacagaatcatgttgacctccaagttggtttagtgggtaaacaagataagcactaccaatagcatagtaaatccaaggccaggaaacacagggtgtaatgaaagcacaaagaagtacccaaactaggctgagaggcct

SEQ ID NO: 269994 - DNA, 268 bp, Homo Sapiens
tttttttaataggaaagtgatgtgcttcagagaagggttcctccttaatgttgaggttttttaaaaataaaaatactgtttttaagctctttccttattggtttgcatgattattggcatctgcttacgatggctttaatcactcagagctaatggcacctttcctatttagcctcattttagaatgcagtcaacacatgtagacttttcacaaataaatgaacaacttcaaccttggttttcaagatgtgtcttctgcgtatttgaa

SEQ ID NO: 269995 - DNA, 327 bp, Homo Sapiens
  misc_feature (305)..(305): n is a, c, g, or t
  misc_feature (313)..(313): n is a, c, g, or t
aatcattataaaatgatagcactttccttatactcacattagggcatggtaagttaggcaaaatttatctcaaaggtcacaaaatgtcatcaatggaaaaatagttattaatcattaaataattatagtaattttaatttgactaaaatatttactaagcaagtactaaactggaatttccaaaatgtggctttataatcccttcaaatacctttagtgtactaaaatatacgtgtttaaaaataggcaattcaagtaggcagtttactttaaatctgggttttcagattctaattcatattggnttttgctnttaatttcaaaatt

SEQ ID NO: 269996 - DNA, 487 bp, Homo Sapiens
gagcaattattgaaagtagtgatataattaagagttatgtgtaggtgaatggggagattcatttgcctttgactataagaagaagattattacaacatttataaggttcattacaagtcctagaaaattataaagtgagaagaattctttgtgagtagctcccaatctctccctatctgcccaagtagtagcataatatgtacatggaagtactactttttaaacaaaattattccttctctctttccatctccaccttcaaaattaaattgttcattcctgtctttggagaaagaatctgataaattagtttacactagagggttttgatgaccaattctggatatacatattattcctaccagggctttatttacatcacaaaagtttttggttcagagcttaggatacataaacataaataaattatgaaatttttatttaaacattccaggtaaagagtgtttttagcagaaagagcctcccc

SEQ ID NO: 269997 - DNA, 672 bp, Homo Sapiens
  misc_feature (640)..(640): n is a, c, g, or t
ttgtgggacttgtatgtatttattagagaccattgagacgtagcactgggcattacttttgtggcaaaggcaccagggcagtaatcattattaatggatttcattatttgggagagcattttactgactatagagaattcattgcattgatctattgtgccacagttttattataccgggtagtttaaaatgatattctctaaactgttaggctgaaaaattgtccagtgttggcagttatcccatcagtaagacattccttttactaccgaaaatacatagttctgtcgaaagagaccttttgactggtccccagtgccctgactgtgtttaaaatccctcactagtgaaatagggaggattactacttgccatcattgttctaaaacaaacttccttttggaagataacagcagcggtaaatcagatgttgaagaaagtaccagcttaacttcactttgctttaaaagggtttcctctttaattgacaaagtgtcatgtataatagggcatggcaactcacatagtaaacccttgtgtgggggctgcctgctggggttggagttcttaatgaacatacaagtgaatacactgaggcaaaaaaattaaagctctccaactgtgggggtattcattctgntcactgtgggccagtgtggtgatcagtactgg

SEQ ID NO: 269998 - DNA, 409 bp, Homo Sapiens
tatttttgaatttaaagaaatgtccaccatgactattttttaataagcaaaagacaattaatacattttaaaagaataatagttcttattatgccacatataataataaatcccagttggatataagatctaagaaagccaaccaaaatcctttcaatctttgtataataatggaagaaaactagcatgacattctgtaatcccaaaagataaaatggaataaaaaagattttcaacaatgattaaatttggagataaaacacaaatgtgataaatgtaaaaagattctttagaacaaggtgatttttaatttacaaaaaaattattataacctggtccaaattgggccattataaaactggcatttggtggggaaaaggggccggttggcccatggatattgggtgga

SEQ ID NO: 269999 - DNA, 368 bp, Homo Sapiens
ccttagctgggaaggatataaaggatttttaacccatagttggccatattgtttgtgccacccggatccgcccctcaaatagttccagacaaaaagaatgtaaaccccagttatagaatgaggtaaaaattttaatccatcaatatatgtacaggattaagaagtactatagaggtgatttattctgtcagggtcagcttaacaaagaagttgtcatctgacttgatgtataaaaaatgggtcattgattagggatagaaaatgggatgaggaaggaaaaatggggagtgattccttaatggttacagagtgtgggtgataaaaatgtttggaaatagattgtagtgctgagatacagtggcttacac

SEQ ID NO: 270000 - DNA, 592 bp, Homo Sapiens
aatcatttttattgtattacaaagtgaaaatattgtatgatttatgagtgagttatggtttgacagcaaataagatttatttggaaaatctatgctttattgcatttgtagttgatttcaaatagctttttatttcatgtagctaagctagaagcataaggttacaaatgtggcacctttgatttttattccgtgaataaatgcatgcatttgtttgctaatacgtccagggatatttttaatgtagtgatagttttctgtttgattctactctgacttctcagaagaaccatgacatctagatctaggatctgttgccgcccctgccacatttctcacagtgactgttccacgtatcgctatgcctggaatggacttgcaaaataaccagaggggaggaggctgtgatagagaattgggctgatacacccaactgaaagtccctttagcctctttttcatatgtggttgaatcaagttttgaagtatcagtgtaaataaggtagttttatggttttaataataagcatctaagagaaggaggcaaggtaaggataataatagaattggtttaacttgcagtacagacaaaa

SEQ ID NO: 270001 - DNA, 285 bp, Homo Sapiens
gtaacacagaacgaaataccctttgtattattgtgattagttgttgcttattattttatactcagtaataatgtggtacactgttaatttttttgcttttgtaaattatattctaatttattgccatgtttcctaacacttgtcctacattcattctcctgcttgtaatgaaaatgaaaaaatcattgtaacacttgatggagtgaaattccacgccaggcacagaatttttttgacatagataatttagtaaaataaaaattcagcttataataatgaaaaaaa

SEQ ID NO: 270002 - DNA, 397 bp, Homo Sapiens
  misc_feature (36)..(36): n is a, c, g, or t
  misc_feature (72)..(72): n is a, c, g, or t
  misc_feature (78)..(78): n is a, c, g, or t
  misc_feature (83)..(83): n is a, c, g, or t
tggcacctccccccatctccttggctcccctcctcnatccaggggatatgactggccttccccctttgcccntctgtncatgnattgggaagtttccctgaggcctcaccagaagcagatagcaacaccatgcttcctgtacagtctgccagaacggtaagccaaaataaaccacttttctttgtaaattacccagctgcaggtatttttttatagcaaccccaaaacagcttaatacacttggggagatgagaagggtgaacacgaatggtggggataggaaaaggaagaaatgaaatccttatatgccagagaagggcaataaataacgcctaaaactgaaaaatcaataaagtaatataagcatgttatttagcaatttggaggtaaatactga

SEQ ID NO: 270003 - DNA, 514 bp, Homo Sapiens
  misc_feature (316)..(316): n is a, c, g, or t
  misc_feature (432)..(432): n is a, c, g, or t
  misc_feature (485)..(485): n is a, c, g, or t
ccgcctttgcccctcatttttttgttggtccataaaacccaagttatccctttttattttatagatgaagaaactcagccactgagagatgaaacagtttgccccaagtcacacattttcatccaggcactgacagtcttccactggttttattagactttggaaagtggacaagatttgacaagaggaaggagcactgggaaggctttttctccatggtttctgtgttagactgtagtgcctggctccgctggtgcgagcctctgaatgtcaaccaggcatacattttgatccagtagtttcccaagacttgaancggcttggatgtaatttcagcatttataaggaatattcttctgtggatatcactgctaattattcattgtgcattgtatttcagagattttttttcctacattttaaactgaaacncagaatcttttacacattcgtagtttcagagccaaagcaagtcatctagttgngccagccccggttcttcacactcgctcag

SEQ ID NO: 270004 - DNA, 476 bp, Homo Sapiens
  misc_feature (347)..(347): n is a, c, g, or t
  misc_feature (380)..(380): n is a, c, g, or t
  misc_feature (437)..(437): n is a, c, g, or t
  misc_feature (460)..(460): n is a, c, g, or t
gacccctacagtcccctaccgacgacctccagcgtaaccctacagtcccctactcaccacacctagtgtaactctacagtcccctactcacgacccccggagtaatcctacagtctcctactcacgacgcctacagttccctattcatgaccactagcgtaaccatacagtcccctacccatgagccctggcataaccctacaatcccctactcaccacacctaggcataaacctacagtcccctacccatgacccctgggagtaaccctacagtcccctagtcactacacctagtgtaactaaccatacagttccctattccatggacctctgggcgggaaccctnacaattccctaattgaacaacccctaggtgttnaaccctaacagttttcctaacccttggaccctgggggggaattgttacagttccctnatttagggacccttacaattttnttaccctggacctggg

SEQ ID NO: 270005 - DNA, 426 bp, Homo Sapiens
  misc_feature (42)..(96): n is a, c, g, or t
  misc_feature (117)..(138): n is a, c, g, or t
gctactcgggaaaccgaggtaggaaaattacttgaaccccannnnnnnnnnnnnnnnnnnnnnnnnnnnnnnnnnnnnnnnnnnnnnnnnnnnnnnagagagcaagactctgtctcnnnnnnnnnnnnnnnnnnnnnngatattaagcagagtttttgtggatttaaccatccctgctggcttcctggaaacatttaattattaatatcacacctgaatggtaaacttttgcactaagttccaaagcttgggcagctacactttcattaaaccctacacaagaaacgaactgcatgtttgaaagagaggctgtgagccgggcgccgtggctcaacctgagcagacatattttatagggctccaggatatccttacccctccccaccatcaccttcttaccatgacctgcagctgtaccctgcagat

SEQ ID NO: 270006 - DNA, 444 bp, Homo Sapiens
  misc_feature (13)..(13): n is a, c, g, or t
  misc_feature (21)..(21): n is a, c, g, or t
  misc_feature (37)..(37): n is a, c, g, or t
aaccttgtcgccnccctggtncttcaatgaaaagcanaacacttaaaaggctggtcgggaaatggggaaggtccgccccttgggagggcaggcgttggttcccaaagccggttccccgtcccctggcgccctggagtgcacacagcccagtcggcaaccctgtggctggaagccaccctgctttagatcactcgggtccccaccttagaagggtccccgccttagatcaatcacgtggacactaaggcacgttttagagtctcttgtcttaatgattatgtccatccgtctgtccgtccaatttgtgttttctgcgtcgtgtcattggatataatcctcagaaataatgcacactagcctctgacaaccatgaagcaaaaatccgttacatgtgggtctgaacttgtagactcggtcacagtatcaaataaaatctataacaga

SEQ ID NO: 270007 - DNA, 441 bp, Homo Sapiens
gacacgctggcctctgcaatgggttaccacattctcatctggagccaggaggaagccaggacacggaagtgagagacactaaagaaggtgtgggccagacaaggccttggagcccacacatgggatcaagtcctgcaagcagaggtggcgatttgttaaagggccaaaagtatccaaggttagggttggagcaggggtgctgggacctggggcactgtgggactgggacacttttatgttaatgctctggacttgcctccagagactgctccagagttggtgacacagctgtcccaagggcccctctgtatctagcctggaaccaaggttatcttggaactaaatgacttttctcctctcagtgggtggtagcagagggatcaagcagttatttgatttgtgctcacttttgatatggccaataaaaccataccgactgaa

SEQ ID NO: 270008 - DNA, 446 bp, Homo Sapiens
  misc_feature (27)..(27): n is a, c, g, or t
cctaggaaacctgcagtttaaataagnacccctggctaaatcagtgaatgtggtctgcaaaccatactttgagaaacattgagtggatagcctttatttaactcctgagacagaaatgtggggggaaccttcaaacactgaccaaccgacactgcctatccatgctattaattcaagaagggctagttttgcatgcactttctctcatgtgcagagcaactacacataggtgagtcaagtttcactcacaggatgacattctgtctgttccgggctcatcatgtgagactacagaggggtgacttactcagcctctaaaagttcagccaacagaggaaaaactggcacagctgtgaataccactatccccttggctctcactcttgtaacacaaggcagtggagattcagagaccaaggaaccccagagctgtgtaatggatcagg

SEQ ID NO: 270009 - DNA, 382 bp, Homo Sapiens
tttgctgcactgcttagaatttccagtacaaggttaaagagtaacgggttaaattttgctattattatagcaaaaatgtcatgtttgtgatattaataaacatcagctaagttttcattgatacacctgctagactaacactaaaaagtaattgcaaattagatatttaaggatctataaatatcttttataagtagaatgtattaactagaataaatttgttaggtatgctcattatgtcaatttcatgtataaatttctcttcctttctagggtgattgacatatcccttttgtccataaaatcaaatttcaaatgccaagaccctattatttcaatgtagcagtaaaagctagcaatcactgaagggaagccaagttcc

SEQ ID NO: 270010 - DNA, 505 bp, Homo Sapiens
cgacgcccggcccaacaacttaatcttttattagctttgcttaagagggccaattaaagcaaagccctttagttccctttaacagggactggagttatgatgcatgtgttacgacttttggcccactgtccatgcaactctaagtgcaggttgatttgctttccagaaatcccaaagggcctgctcttggatcaccgaagagccttacctatatcaaatcaaaaagacattctgggtcagattagactatgctcctgggccctgacagattgcacataaactatcataaatacagctttttcagggaactagttctaaaactcttacctactgagaataagtcttaacactaagatgactgtattatatcaatttattattagaatcagacttatacctagcacaattaactattgtgtgggcaaagaacatttaaagggcatagtagaggtaaggagagacacatactcagctagagataaaatactaagttgcactgatactt

SEQ ID NO: 270011 - DNA, 451 bp, Homo Sapiens
  misc_feature (22)..(22): n is a, c, g, or t
  misc_feature (31)..(31): n is a, c, g, or t
  misc_feature (41)..(41): n is a, c, g, or t
  misc_feature (47)..(47): n is a, c, g, or t
gttcccaaccaaaaaccccccnaaaaacccnatatacattnaaaagncccggtttaccataacccccctccggggtagaaaagggaaataccttaaccctttgccattgggcccccttccaggccttgaaccaacagtggctgtatcctgcaaccgtggggttgcctggtggtagaacactttggtgttaggaaagtttggaaaagaggatatccctgtattaggcccattatgattagagataagcagccctgggagaaacatacaagacctgtggctactggtagagaattggaataagcttccaacaatggactgtagagattaatggagattgtttagtgggcccatggctaggtggggtattaatacagttgaagttatgttcccttggcacagatctttgagaatctcatacatctgtgaaaaagataatgtgaaataaacagta

SEQ ID NO: 270012 - DNA, 380 bp, Homo Sapiens
agagaaccctgaaacttagtacttggcacatataacaaaaagttgatttatccattgcttactgaggtatccttgagaagtgatcttaagcaggagcagtgacaatgatagaattaatagtggtcatgaattactaggaaacaaagtgggcattgagcagaaaagaaagaagctgttgccacaactttgggatatataaaaatggattatatcttgtgtattgtgggataaaacgacggggctaaacgaaaactttgcaggaggtctctcccacgtgggcatttacggtacgcgctatgtttgaggatcaaccaaaaggcgggtgagttatttctgtcctgtttccccatctaagagttcttcttgcaattattggggac

SEQ ID NO: 270013 - DNA, 550 bp, Homo Sapiens
  misc_feature (174)..(174): n is a, c, g, or t
  misc_feature (420)..(420): n is a, c, g, or t
ccatcacactgcaaggtctcaaacctgcaacgcgacgttccataggatcaggtctgagcggggccaggagatgggaagtaggccatgggggaactggtctagaatgttgcagcacctagttaatcggcagccattccatcacattaaacatccagccgtcatgtattacccttncaaagtgaaaatgaataactcccattaagagcaaaaagggtttgcaagtcgattcgagacagattaaaatactgttatgaatgtgtgtgttgggaggaggaggatctgtgtgtaatatgctcgtccttgtactttttaaataataggatgtcctacaaacttatgtagaccaggttaccaagatactggggttaaaggtcacaagatgtgcactctgggaagagcatcaacttcctggaatatatntcctgcatttggcaaatttcttttcaaaattatattgtggccttatgattttaatgaataaaattgattgtctaaaattgtttattaaagtaatgacagcatcttggtgtccacatcagaacaaatttca

SEQ ID NO: 270014 - DNA, 362 bp, Homo Sapiens
  misc_feature (189)..(199): n is a, c, g, or t
  misc_feature (235)..(235): n is a, c, g, or t
  misc_feature (335)..(335): n is a, c, g, or t
actcttatattgccctgcaaagagaacgttattgtcccctagaagggagacaaactttaccttaggaaagctgattacatctgttaagtggcagagctggtatttgaacccagtccatggattcaaagcctgtttattttccataatgtctaactcattataggccttcattaggaatgtgtgataagnnnnnnnnnnnaaaaaatgacattatactctgtatagtttataattnttttactttatgaatatggctgtcattaacatttttcatgggcattggaatattcttcctatataacttcctaatgggttacacaggtttcttatatatnaatggaaaaactgtatattgggatggg

SEQ ID NO: 270015 - DNA, 424 bp, Homo Sapiens
tcccccaatatggacctttggaaagaaagcctgaaaccttactgaacttttgaaaagcaagtccccaacatgtatgcaggatccctaaaacaaacacgaaatgtaattttacaaggaagatgcaagttcaggaatgcctgacagtaaacattcctcaatgttgtccttagcagttattccttactcttgacattttatgcattattattctctatcttaattagcagaactaatgacttaatagaacagaattgaactgtttaacagaattgtttacgattttcaattactgaatggggaatcaagcacaagagagaggttttacactatttacacccaaaacattcacgtaataaccaacaaaaagtttaaacagaaaaatctaaaagcattaatatctctatttttaatataaaataattag

SEQ ID NO: 270016 - DNA, 370 bp, Homo Sapiens
  misc_feature (44)..(44): n is a, c, g, or t
  misc_feature (114)..(114): n is a, c, g, or t
  misc_feature (345)..(345): n is a, c, g, or t
acaaactgcccaggagtgagtagctgctttcggtccgccggcancaccggacagatagacgtgcggacggcccaccaccccagcccgccaactagtcagcctgcgcctggcctncccctctcgcaggtccatccgccatgtggcccctgtggcgcctcgtgtctctgctggccctgagcaggccctgccctttgagcagagaggcttctgggacttcaccctggacgatgggccattcatgatgaacgatgaggaagcttcgggcgctgacacctcgggcgtcctgggacccggactctgtcacacccacctacagcgccatgtgtccttttcggctgccactgncacctgcgggtggtttccaaaagtt

SEQ ID NO: 270017 - DNA, 429 bp, Homo Sapiens
  misc_feature (34)..(34): n is a, c, g, or t
  misc_feature (39)..(39): n is a, c, g, or t
  misc_feature (44)..(44): n is a, c, g, or t
  misc_feature (72)..(72): n is a, c, g, or t
  misc_feature (78)..(78): n is a, c, g, or t
  misc_feature (97)..(97): n is a, c, g, or t
  misc_feature (408)..(408): n is a, c, g, or t
acatgcctcaatctcattccaagtacccttaaanggtanaaggncctcttccctagtccctcaaagaccagnaacagncaaactttcccacaaatgnacagaaataagtggcacgctcaaaaggcctgccttgggaaagccactggctctctgacggcccttctctttgctgtcactgagagagataaatggctttactacggctccatgatggagacagagaggcccccccttccattcatcactcctttgggtctggcaagggactaagagggttcctgcaggaaacaaatgtgcaaaaggtaacccagacttaaaggtatctaatttcccacaaaacaaaaaatttaacatagtccaattaaaaagttacttccaaaaagtcatgttgaatacttaaataatatnagcgaaaatcaagattatggt

SEQ ID NO: 270018 - DNA, 556 bp, Homo Sapiens
aagtgggatgcagaaaacaagggtgaccatagaagacacaagggagcccaggaggctggtgaaagggtgccctagaatgtaagtcggcagagaccctgggaaggcatcagctcagactacagcccactgctgaacgaccacctgagagtctttccctcaggaaaatggcattgagaggccataggaggcagggaaataattgtcataaatacacagaaagtcaagcagatgaaagagatgttgttaacacagcagagggagaggtatataaggaaaggagacacagtcatagtacttacttcattcaccaatgaaaaatattgatatactcaatgtaaaccatgaaatcaacttaacccaaaactgtgatctgtctattctaacagaatagaagaaggccaagtagaatcatcttaagtaaaactagtacatttaaaggctaggaacctaaagtcaacttttcaaggtctggaaaggtcatctgaagctccctttcacagctttggtagccttatccaagggttaaaagccaagcactgccagccatgccttcact

SEQ ID NO: 270019 - DNA, 416 bp, Homo Sapiens
acagggaacttcccccaacccatggtcgggtccatgaaggagctcacagtcttttgagaaaaggaaagtattctttaacaggctccctggtttgcccaacattccttctgccctctttgcagctcccaagcacattttggagggagatttcacaaagatttctaaattgagttagaatttcaagtctattgtgacatgcaaattagtcctgcttgcccattggcagcaatgcagctgaagtgcctagagacgggccataaaatggaaacatcaaagtgattaaatgtgcccgaagagcataattgagtgcatgaataagagaaaataaaacaaattgattttctccagtgccagaaaaacagaataattgaaaacaaaataatagactttgaagtaatcaaagtgaggaatgctaa

SEQ ID NO: 270020 - DNA, 493 bp, Homo Sapiens
  misc_feature (20)..(20): n is a, c, g, or t
  misc_feature (34)..(34): n is a, c, g, or t
  misc_feature (48)..(48): n is a, c, g, or t
tccggctctctaagttcccntggaagggaagtgnactccataaaattntgcctgctgacttatttgtccactcctttgaagtatttaacattaatttcacctataaatcattggcacctcaatttttccattgaagtatccaggactgttaaagacataccccggatgtgccccggaaaaaaagatttgggaagcagatcccactaatttaactgttattcacgtgcatcgttttggttgaaaccaatccctagttaccgtcaaagttctctaactcaaagtccgttttctttcctagtttgtatttgtttgtgcatataattacagaaaacacattttagatggaacaccagcttgcttttttcagtttctttctgttgcattgatacatcttctaatggggaaagacatatgatggtacttggaaaaatgatgacagccgtaactggaataataaatgctaccgggaagattttatcaaatgtaaaaaaaa

SEQ ID NO: 270021 - DNA, 271 bp, Homo Sapiens
gtgtgagccaccgtgccaggcccttgcagtgactcttgaagtttatggggcgggtagaaaagtaggagaccttaatgggaaatggaatggtctatatgatccggggagatcttcgttgtatttgtggtcccaaaccatctttcaaaaagttctccagaacagtggcaatccacattagcgatgccgggtgtaataaaacggtaggcaatgaactcttgcttacacacctcttctccaaaccctctcagggtccatagaatcctttcctgaa

SEQ ID NO: 270022 - DNA, 292 bp, Homo Sapiens
  misc_feature (143)..(143): n is a, c, g, or t
  misc_feature (178)..(178): n is a, c, g, or t
  misc_feature (220)..(220): n is a, c, g, or t
  misc_feature (232)..(232): n is a, c, g, or t
  misc_feature (251)..(251): n is a, c, g, or t
  misc_feature (259)..(259): n is a, c, g, or t
gatctatttcctaactacaaagacagctgacacagacatcaaacgtttccttttcaatgacagtcccctgagaaaggctgcacgtgactcctacagtgccgggtgcagggtacccagccgcaggtgggacgcggccacacgtnttcacggttacgtgcagaccgacgggatggccttnaggttgtttctttccgtgagtgagacacaagagacgcgattntgccggagcgcngggtacaggccgttccttntgcggganccatttctccatcagcgacgttctgttcagtga

SEQ ID NO: 270023 - DNA, 123 bp, Homo Sapiens
cctcccaggcattctccttagcctggcaaaataaatttctaagttgattaaaacctgtcatagatactttttggtttccaaaatattataaatggtggttctattttcaggccaaaagcctag

SEQ ID NO: 270024 - DNA, 455 bp, Homo Sapiens
ttaagtgccaccccttcttggaagacccccctccagaagcatactggaagcccacctctggaaaaaccctcatatggtgatatgcccaaaattatttatgtcaatgtcccaaacaaagtcccaatgcccatgagactgaagtctttgtggaaaccactgttacagacaagcttatttcccaaagccacctcatttccaaacatctcactcaggaagggaggctcaatgtaacctcaggggccagttttagcatttgaaatggttctgcttggaaaatgatgccctgcaactaaccctggtctttcccatggcaatttaaccacatttggaaggcactgccttcagctgagtttatgaacaatgaatgccaaccttcaggttctagaagattggttgcactcccaaacctttattctattatattactattaaaatattctaattttgctattgaa

SEQ ID NO: 270025 - DNA, 803 bp, Homo Sapiens
  misc_feature (248)..(248): n is a, c, g, or t
  misc_feature (383)..(383): n is a, c, g, or t
  misc_feature (386)..(386): n is a, c, g, or t
  misc_feature (391)..(391): n is a, c, g, or t
  misc_feature (401)..(401): n is a, c, g, or t
  misc_feature (403)..(403): n is a, c, g, or t
  misc_feature (406)..(408): n is a, c, g, or t
  misc_feature (413)..(413): n is a, c, g, or t
  misc_feature (415)..(415): n is a, c, g, or t
  misc_feature (420)..(420): n is a, c, g, or t
  misc_feature (422)..(424): n is a, c, g, or t
  misc_feature (428)..(428): n is a, c, g, or t
agaaaacagtctgattacttaagatattttaaaggacatttgaactatattactaaaaattaaatttggagtcaaaaacgtatttaaatgctccttttccttgagagcaactccacacagagggccacaggaattcctgcccagctcacaatctaagtttcaatactctgcagctcagacagaaagtttggcctgtgttcctttaggtcctaggactaaaatttcactttaggcacaatgggtagaanccgggctatgaggtcatcttcctctggcaaaacaatgaaaggtctagttcagtgggaaaaaaccgacttcagttgccagttcattgaactgttcaaattaaggtcaaaatactggagcaggagcgagggagtctnctnttggngggggttttntnttnnntttgngnccagncnnngttntggccctccaaccaagtcttgaatttgcaaacggttagaataggaagcaccctggtgccctcctaagtaggggtcagagaacgcaagtgaaaacatgaaacagatccaaatccagtttcatgagcatgcctttcaagtaatgccaaggaaaaatatatcaaaaacatgatggagtgtacagcttcagcttaaatatatttcaagtaccatgatgaatataatgtttgatttcctaccctagactctacctaaaagagcccattatcaacagactaggtttttataatttttacagaatttattattccatttatttacctggaactattactatagcttgcaaagaactttaaaatgtgtaacatcatgaatcct

SEQ ID NO: 270026 - DNA, 437 bp, Homo Sapiens
cgaattgtgccgggaaccgccagggtaaaaggcccgttcccttcctgcggggagcccctttcctccccatccagcgacgttcctgttcaagtgacttccacagccggaccctccccacccgcaggtgcaattccaggcaggttcccataaggggggcattaattccctaaggcacgagttcaggtcaaccgtgtttcaatgaataaacccatgctttttggttatatggaacaatagatcgctgcgagtaatcatacgtaataagcaactaattgtacagagtgcccagcaaggcctacacgaacctacctgttaacagtaactcatctgaaaacacacaaacgcagggctgagcattaaagtggcgtttttggtattggttttcttagatgaagcagagagtggtaaggcttctgtgaaacaatcctgtgccgaat

SEQ ID NO: 270027 - DNA, 164 bp, Homo Sapiens
actatctctaaagaaaagaaagtctcctttctaaatttataaatcatgtgatttttcagttggcactctaaaggttagaaatcactgtgaaagttctgccagaaactgaatatgtctattccatttatgcattcagaaactgccaaaataacccatgggtattg

SEQ ID NO: 270028 - DNA, 484 bp, Homo Sapiens
tgaagtactaccccccccactaccttcagaatgagacttcatttggaaacaggatcactgccagatgtaattagttaagatgaaatcatacaggagtagactgggttccttttttcaatatgactgctgtctttataaaaagggtaaatttagacacagaaacatgccacatagggagaatgcccatgtgaatatgaagacggagataagggtggtacgtctacaagacaaggagcacccaaaagactgccagcaagccactggaagctaggagagtgtctctaatgccttccgaaggagcacagccttgttgacattttcatcttggacttctagcctccagaactgagagaatacattttgttgttcaagccatgcagtttgtggtactttgttacagcaaccccagcaaactaatacaacatgaaagagatctttgatacaccctagttgctttgtctatctacttaaatctttaaaatgt

SEQ ID NO: 270029 - DNA, 234 bp, Homo Sapiens
  misc_feature (156)..(156): n is a, c, g, or t
  misc_feature (179)..(179): n is a, c, g, or t
  misc_feature (197)..(197): n is a, c, g, or t
ggttgctcaaatttctcaagcttgcttccattacccccagctatagttgatatttgcactttgaatgtttctgcaatgttacttttctcttattttgtaccctgattccatcagctcactcttacaatacttctgttgtcttcttttatttctcgnggcttttatatctcatctttganctctaggtttcagcgggngggtatgtctcacccccaccttccaccataggggact

SEQ ID NO: 270030 - DNA, 421 bp, Homo Sapiens
cattcatgtccctggtcaactgaaggctggaagcttggcgatgtctgcgtagtatctctccacccagctcttgtaagctggggatgtccttggcatagaagcagcttgttggagggggagtccttgcccagccggtgctctgacgttgaacaagagtccatgaaggtctgggccaccacagagaggcaggcgtccgtgatgctgcccttgtggatgtcaaacacgaactgggggttcttaatcacgttcacccagaagcgcagagggaggcagttgcttttcccaggtgtgccgcacatctgtgtcatggatgctgtgcctgtctgcctgctcatctaggaaatcaaacatgtacttgatggccagggggagagcgctgccccggtgcacagtgctgaacaaggtctcaaacaagtcgtct

SEQ ID NO: 270031 - DNA, 637 bp, Homo Sapiens
  misc_feature (460)..(460): n is a, c, g, or t
ttaagtgctatgctagattaacaacacctgccttggatgcaggaattaggtggggctgcacacgtgcatggtattttctatccctatgctaggttttgttcctgttggctgtcttcactagacttgagatgacttgatttacagtaatccctatgtgatgtaactagtctagaccttcccttctccgcaattcccagctccaggtttcagaaagtatgccacactcaacccttctctccagttcatcctgtattaatttcttcccatattaattcaaagggagtggacaggtccctggctgaaaagaaataaagagatccccaaagtggtggggtcttccacgtgcagttgactaattttcacttaacttttggaggctagacatgggagagagaaaagcactgcccagtcacaggttttgggaagggagtactgctagctggagaaaaccatatagaanaacatgatgaccatgtttgagttgttggggccgaggctgtgaaccctttggcttccctctgatggccctcttgagaacaatctgtactgttcttataaaagattctttctcccagaattatatctcctcagagcaacagcaaggttctcaggatcgaagcctacttcctgtgccgaa

SEQ ID NO: 270032 - DNA, 579 bp, Homo Sapiens
gctgggggttggcagtctgcttaacaagatgctggggaccacctctgaattagtgaatcagggagctgctgtgtgatcccctcctccaggctttcttggagtttgtctctgccacttcctcaagccctttaaaaaggctcctgtgctttagagagttaggatgttaatgaccgttcttttttcttgtactttattaagtactagtcttactagactagtgcttaagtggcagtgtctgcctttgccttctcccatctctttatgctcctttctcccaacttctcacgtttctgtttctcgcacggccaggtgtccagcatcccatgctgacttgcggttggccaatcccctcctcgtagatttcctccacattttcctcttcctccttttcctgtgggaagttctttttctgggctgtggctggtcttacgtagttcggtggaaaaagtattgaggtagtgttagatactgtgctgcacctccaggagtgtccaatcttttggcttccctgggccacactggaacaagaagaactgtcttgggccacacgtaaaatacacggacactaacgatagctga

SEQ ID NO: 270033 - DNA, 129 bp, Homo Sapiens
acttgcagatatagtcataaacgttttaagatccataagcaaactaaagcaattatgccaataacgactaaggccactgcttcctcaattgagttctttgatataaaagcttcacttgtgttaattacc

SEQ ID NO: 270034 - DNA, 540 bp, Homo Sapiens
  misc_feature (431)..(455): n is a, c, g, or t
tgggctcaagagatccttctgcatcagcctcctgagttactgggactacaggcatgcatcatgggtgcatagctatctgaaagagtttgtgtaagattagtcgaaaattatttcttccctaaatgtttggtagaatgtaacagtaaaaacagtctagaattttctttctgggtgattttaaattactgtttcaatttcattaggaagatatagagatattggagattttatttcctcttgtgttggtttgctatttttcaagaaatttgcccacttcatccaaactatcacatttgttgacattcatatattcccatattattcttttaaggtctatactgacgtctactctttcattcctggtattggcaacttgcttggttgttctttctttccttaatcagttttgttagggacttatcaatcttatnnnnnnnnnnnnnnnnnnnnnnnnncccacccaaaacaaactcttgactttgctgataatataatctatttctacttcattgatttctgctcttatctttttattttctt

SEQ ID NO: 270035 - DNA, 574 bp, Homo Sapiens
agcatttatctgaaaggtgatgtttgagtggagatttgattgacaagaagccagccatgcaaagatctgcattaaagacaatgaaaatattaagtacgactgcaagaagtaggaataaactcagtacattagagaatagaggaaaaaggctagtggctggagtgtggagagtgatgaggggtgaggtgggtgcagtcagagaggacatagtgccagacccatgtccaagacctttgtgcttgtctataagggaagttatagtgtttggcttgaggtgaacttcaaaattcctgctgtctttattcttcagctgttcccagggaagaaaccagggttctttaggccactggagcattccacaaagccctgagaaagtcttaatgattccttttgcacaactaattttcttttattgattttgtaacagtgtaccttaattttttcttattctagaacctgtacaagcttataaaatccaagatttttaatttttataacaacaaaaagaatttgtgccattttgtcttttgtcccacacttaataaaatacaatggagattgttttaatttaaaa

SEQ ID NO: 270036 - DNA, 415 bp, Homo Sapiens
  misc_feature (41)..(41): n is a, c, g, or t
  misc_feature (57)..(57): n is a, c, g, or t
  misc_feature (83)..(83): n is a, c, g, or t
acttggggggacggccccgcttgcgagggagggaggccttnagtgtccgatttgagnaggtggctcccccaggaacgaaaccnctcgacggcccccggggaacaggaggagataaggccagaggtttctcttcctccccgggcaaaggcgaaggcaacgggtctgggctgggggtgtccattgagcagtggggggcttgggtctgggcactggagccagctaagaggagagaggggcagagtcagtgctcacagggtctagagcacccctgtgtcccccaacacctcgcccatccctctctccaagtctcttgacaaaggtgtgtttgacattcatccagatacacaattttagctatgctggtgggtaaaacagtgagatgatcttgtatcagctgataaacaggcacttccct

SEQ ID NO: 270037 - DNA, 413 bp, Homo Sapiens
  misc_feature (153)..(153): n is a, c, g, or t
  misc_feature (158)..(158): n is a, c, g, or t
  misc_feature (355)..(355): n is a, c, g, or t
  misc_feature (368)..(368): n is a, c, g, or t
  misc_feature (403)..(403): n is a, c, g, or t
ggaggtgaaagaaagggacccacctgctagtcgcccctcagagcatgatgggaggtgtgccagaaagtcccccctcgccccaaagttgctcaccgactcacctgcgcaagtgcctgggattctaccgtaattgctttgtgcctttgggagcgnccctnccttcttttcctaacatgcaccttgctcccaatggtgcttggagggggaagagatcccaggaggtgcagtggagggggcaagctttgctccttcagttctgcttgctcccaagcccctgcacccgctcggacttactgcctgaccttggaatcgtccctatatcagggccttcagttgacctccttcttgcaaagtnggcagggaccggncagagctcttacagggcctgtcagccccttaagtngcaaacacag

SEQ ID NO: 270038 - DNA, 302 bp, Homo Sapiens
tacaggtgtgaaccaccatgcctggcacaaaataccatttcattctcagattaattttgtaccatggagacaaggggaagttttctcttttctttgtagatgaagcaacttgaggacagatatttggaggtcttgtctgaggttcatttaaaatggggcagaggcccagggcctttctaactctccatccagttctctgtaggtaggcccttcctaccccagctttgggtactgatgtcaaccccagtgtttcctcatttactgaggcatgtgtgactttcaaaagggctctgttaactctc

SEQ ID NO: 270039 - DNA, 541 bp, Homo Sapiens
  misc_feature (46)..(46): n is a, c, g, or t
  misc_feature (57)..(57): n is a, c, g, or t
  misc_feature (113)..(113): n is a, c, g, or t
ttactttccttccaaaagttagggtcaaaatggccaatttggaacnggaggcttttncagggaatcactgttgagccaggacccggagatggtctgctgtatggtggagagtnacaatgtaggaaaatcacattggagcgagtgttgtgctgaatgctgtttatagctgcaatggcccccccaagcctgtcttcagatgcagcgatgaccacaggaatctcctcttgtctcccatctactgcatgtcggagagcatttgggacaaagtctataggttgaggccctacaattcctgaatctgtaacctcattccttaacaaactgctcaagctgaggaagttatggtgcaaaaccagtaagaagagagcaacagccaggaccaagatgatgatgtttactttacggaatgacatctttttcttctgtcatataaatattagtttttaacccttatctacagaagctggcagaggggagctgttcggacaaagccccaacatctgcctgcgatgaggcaacttccaccaccactgagaaaacg

SEQ ID NO: 270040 - DNA, 356 bp, Homo Sapiens
  misc_feature (27)..(27): n is a, c, g, or t
  misc_feature (39)..(39): n is a, c, g, or t
ttatataataggaccaccctatttggnaaaaatgttttnccccctgctgtacccctcatttttaggaggtgtgccatggatgccaatatatgaaaatgggaccattcctggaacctgcctggtccaggggacctttgtccgcccctgtgcacctaaaagggcccagattttcagcagcccaaggacatcccataccccaagtgaatgtgatgggacttaaaagaagtgaactgagacaattcactctggctgtttgaacagcagcgtttcataggaagagaaaaaaagatcaatcttgtattttctgaccacataaaggcttcttctctttgtaataaagtagaaaagctctcctc

SEQ ID NO: 270041 - DNA, 623 bp, Homo Sapiens
  misc_feature (313)..(313): n is a, c, g, or t
  misc_feature (385)..(385): n is a, c, g, or t
  misc_feature (392)..(510): n is a, c, g, or t
gattaattttttgtaaaaatttttatataaatatatatttccctcctctttgataaaagctcttaatatcacagttggcttacttctacctggaagaactccccacctaagttggataaggtttagaagtgaagtcattaggtgagaaaattggcagcagtctcgaaatccttttcccagctatgtagcagttgcttaagcccctagcttcctttccatctttgtcaggtgaaatgagtgaatcaattagagaaactggtattatttaccacggtaaactcaagaaaaatcagttgcacctaattgtaggctnaaagatagacccacgtttgaaatctccccagttgaaaaattattttaaaaacagacatgaggctgaatgtgngtgtcannnnnnnnnnnnnnnnnnnnnnnnnnnnnnnnnnnnnnnnnnnnnnnnnnnnnnnnnnnnnnnnnnnnnnnnnnnnnnnnnnnnnnnnnnnnnnnnnnnnnnnnnnnnnnnnnnnnnnngtgggtgatggtatgcccctgtagtcccagccatacactggcatcctggccaacacaacgaaaccctgttgaaaacaaataagtaaaaacagatgaaatgtaattcaccacat

SEQ ID NO: 270042 - DNA, 1019 bp, Homo Sapiens
  misc_feature (614)..(614): n is a, c, g, or t
tttttttgtgctgaaatgtggcaaagcttttagtaatagctcaaatctcaccaaacacaggagaacacacactggggagaaaccttacgtgtgcaccaagtgtgggaaagctttcagccacagctcaaacctcaccctccactacagaacacacttggtggaccggccctatgactgtaagtgtggaaaagcttttgggcagagctcagaccttcttaaacatcagagaatgcacacagaagaggcgccatatcagtgcaaagattgtggcaaggctttcagcgggaaaggcagcctcattcgtcactatcggatccacactggggagaagccttatcagtgtaacgaatgtgggaagagcttcagtcagcatgcgggcctcagctcccaccagagactccacaccggagagaagccatataagtgtaaggagtgtgggaaagccttcaaccacagctccaacttcaataaacaccacagaatccacaccggggaaaagccctactggtgtcatcactgtggaaagaccttctgtagcaagtccaatctttccaaacatcagcgagtccacactggagagggagaagcaccgtaactttcaagcgctcctgttngttgtcgttgttttaaactttagaatctgaaaaccagaaagaagtcttgtcattgcagcagcatcgattccggtgatagagtttgtatcactcaacatcaggggatgcctgaggagtgcgagctccacagcaacatgggcaggcaggaggtcctcagaaggtgtcaggaggttccacactcgccagttcactggagcagagtcccttcgccacacttagggtcccagtaagccatgccagcattaccttttgcgtagttaaacagacgtgtatccagtctagttaaggaagaaacattaagattgtttaatttttaacatatattcaagaattttaatttgtaaagaattgagccacattgaacacaattgaatgagattcagaataaacttataacatcttgta

SEQ ID NO: 270043 - DNA, 385 bp, Homo Sapiens
attacccgaatgggcctccctactcctcctggggtgtgggtggccgcatgccctgtaatcctcagcacttgagctggggagggtcaagggctgcagtgagccctagggtaaggccactgcactcccagcccgggacacaagagtgagagagaccctgtctcccaaaaaaaatgatttgatcatagcctcatatatgatttgactgcccccttgtggtaatttacatttgtcaatggtttagggagacttgcctgtataccgggatatacaaatttatgcaagcacgaagacagtttaatttccagttttaaacttttgacttgtgtaaaaccttatccccttcctaaaatattactcaaaatcattatctctgtttactttttta

SEQ ID NO: 270044 - DNA, 485 bp, Homo Sapiens
  misc_feature (403)..(403): n is a, c, g, or t
  misc_feature (417)..(417): n is a, c, g, or t
  misc_feature (422)..(422): n is a, c, g, or t
  misc_feature (432)..(432): n is a, c, g, or t
  misc_feature (445)..(445): n is a, c, g, or t
  misc_feature (471)..(471): n is a, c, g, or t
catgagcttcaataccctgatgcttacaagtagagaaaagaacttttaccctaactaaccaagtcagagacctaaaaatgtaccagtaataaagctacttaacctttcccctccccaccatgctaaaacaatgccttaggaacaaatgactggacaccgatatacagaaccaggaactccaaatatctgtatttttactgaaataagtacctctggaaagactttcaattaacagagaaattagcaaagactaatttctcctagtatgataccatatgatcgattctgataacaatattcaaaagatccttcctatttatacagcaatctttagtctaataaaaaccactttttagtcctgctgatggtaaatttctggaaaacttataaaggattaggggantcaaacttgtatcnacttntctatgctcngggtggaaaattncaaaattctggaaaattcactaggcngggctattttatta

SEQ ID NO: 270045 - DNA, 466 bp, Homo Sapiens
  misc_feature (386)..(386): n is a, c, g, or t
  misc_feature (423)..(423): n is a, c, g, or t
  misc_feature (437)..(437): n is a, c, g, or t
  misc_feature (442)..(442): n is a, c, g, or t
tggaaggaagggacaggagagaaaagggaaaatgacgaagagccggcacaacctaaaacacccacagtccctgcggccttctaactaaggggccacagccacacaccactccacagaccctgaggatatgactgtgaggacaaagtcatgaacatgcatcagatgttctagttccaatgctaatttttgctgttttagtgtttgtagtgtaactacaagccatttagcctccctcaacctcagcttcttcaatcataaaatgaagatagtcaagttgcctttccagatctccacgttgaatatgaaagcagtctaagaactaaagtgtgataacatgtacaggtgaagaatgttatttaattaaggcggccgcaagcttatttccntttagtgaggggtttaattttaggcttgggcacttgncccttcgtttttancaacntcggtgacttggggaaaacccggg

SEQ ID NO: 270046 - DNA, 441 bp, Homo Sapiens
  misc_feature (25)..(25): n is a, c, g, or t
  misc_feature (49)..(49): n is a, c, g, or t
ccagccagatcagacctaaaggggnatctaggcctcttgtactccatancctgtcttctcttccccccatttgcccatttgacttggggactccagaagcccttgaggagaggcagcatggagggtaaaagaggggaggaggtccccaggccaaaggagatgccatttctcccctccaaacccacccacagccctctggagagaaatgagagaattacttgttaacatttacatggccatcttaacatttgcaaggaaatactgaggtccagggggacagtaatctgcccgaaatcactcagtcttcctgagtgagagccagacagaaatccaagcctaccgactcccagtctcatactcgggaaatggctggatctgccagccagtaagcagacctcagccctgtaggaaaggtggcctagatttcatgaaagaatggac

SEQ ID NO: 270047 - DNA, 821 bp, Homo Sapiens
  misc_feature (299)..(299): n is a, c, g, or t
  misc_feature (777)..(777): n is a, c, g, or t
gacactggagagagttgctattccagtcaatcatgtcgagtcactggactctgaaaatcctattggttcctttattttatttgagtttagagttcccttctgggtttgtattatgtctggcaaatgacctgggttatcacttttcctccagggttagatcatagatcttggaaactccttagagagcattttgctcctaccaaggatcagatactggagccccacataatagatttaatttcactctagcctacatagagctttctgttgctgtctcttgccatgcacttgtcggtganttacacacttgacagtaccaggagacaaatgacttacagatcccccgacatgcctcttccccttggcaagctcagttgccctgatagtagcatgtttctgtttctgatgtaccttttttctcttcttctttgcatcagccaattcccagaatttccccaggcaatttgtagaggacctttttggggtcctatatgagccatgtcctcaaagcttttaaacctccttgctctcctacaatattcagtacatgaccactgtcatcctagaaggcttctgaaaagaggggcaagagccactctgcgccacaaaggttggggtccatcttctctccgaggttgtggaaagttttcaaattgtactaatagggtgggggccctggacttgggctgtggggctttggggagggggtaagctgcttttctaggatcttttccccagtgagggctggggaggtgttttctggaattttgtctaccntcacaggggtgttgtgagggcttgaaaagggtcaaaaatgattg

SEQ ID NO: 270048 - DNA, 431 bp, Homo Sapiens
  misc_feature (28)..(28): n is a, c, g, or t
gcatccccccccaaaatttatgtccctnccctagaccctcagaatgtgactttatttagaaataggatcattgcagatgtcattaagttaaagattgagggcattgctggagaggggtgggccccttaatcccaatatgacttggtgttcttataagaaaagaagagacaaagaggcacagagagaagaatgccatgttaagacacagatgcacaaaagcaaaatggccatgtgacaatggaagcagagactggagtcaagcagcttccagcaaaagaacgccaaggactgccaacagccagcagaagcttagcgagggacacagaccagactcttcgcccggagcccggaccaggctctccccaggagtccccaagaagtaaccaatcctgctgacaccctgactttggacttctggcctcgggaagtga

SEQ ID NO: 270049 - DNA, 452 bp, Homo Sapiens
  misc_feature (18)..(18): n is a, c, g, or t
  misc_feature (106)..(201): n is a, c, g, or t
ccccctttggtcctcctncctttcccttataaagaaaccccccagtccataattgggattaaggggcccccaccccctctcccagcatgcccctcaccctaacctnnnnnnnnnnnnnnnnnnnnnnnnnnnnnnnnnnnnnnnnnnnnnnnnnnnnnnnnnnnnnnnnnnnnnnnnnnnnnnnnnnnnnnnnnnnnnnnncagtataccctacatgactttcaatttaaagtaggctgtgttattggagctatacagtagtcctcccttcttcgcgggggatacgtttcaagacccccagtagatgccagagatgtcggttagtactgaaccctatatatagtatgttttttcctatacatacatacctgtgataaagttttatttataaattaggcacaataagagattaacaacaataatgaataataaacaactatgacacattaaaa

SEQ ID NO: 270050 - DNA, 442 bp, Homo Sapiens
  misc_feature (272)..(272): n is a, c, g, or t
  misc_feature (354)..(354): n is a, c, g, or t
  misc_feature (397)..(397): n is a, c, g, or t
  misc_feature (416)..(416): n is a, c, g, or t
gcaaaaaagtactgctcctgttaagacaaagcttgatcctcctcgggaacgttctaaatcagactcttacacacttgatccagataccctccgcaagaagaaaatgcccctcacagaacctttgagaggacggtcaacgtcaccaaaaccaaaatcagtaccaaaggattctacagattcccctggatctgaaaatagagctccctctccccatgtggtacaggaaaacctccacagtgaggtggtcgaagtctgcacctcaagtactttanaaaacaaatagtctaacagacagcacctgcgatgacagcagtggatttaagggtgtgggatggaaggtttcaaataaagttnctttttaggcttggggaaaaggcaccactggaaaggttgaacngggaattgggaggcttttncccaaattaaggttcggaaattgtgg

SEQ ID NO: 270051 - DNA, 372 bp, Homo Sapiens
  misc_feature (63)..(63): n is a, c, g, or t
aaaattggacattcattggaaatatcatcctgcactgaatatgtttaatattggcacccccantggacccagatatatcctaagatggggtagcatcaacaaaaacaaggtattgtcctatgccttaaggaacccacctctgcatgaaaaatgtgaggatgggaaaactgagacccacttttgaaatgtcccatgcataacacaatgaagtcctaagtctcctcttcccttaactttacaacatttagtggctttttgggaagacatctctttggctactatcaaagctgcttcccagaatatgatttttccaagtcctggttcctgtgcagttcttaaaaagaaagagtgtgagaaagagaataagaagtc

SEQ ID NO: 270052 - DNA, 433 bp, Homo Sapiens
  misc_feature (33)..(33): n is a, c, g, or t
  misc_feature (74)..(328): n is a, c, g, or t
gatttttttccccaaatttgaaagggagaggangtaaatgtcctaatcctattaaaagttgttttttcatgttnnnnnnnnnnnnnnnnnnnnnnnnnnnnnnnnnnnnnnnnnnnnnnnnnnnnnnnnnnnnnnnnnnnnnnnnnnnnnnnnnnnnnnnnnnnnnnnnnnnnnnnnnnnnnnnnnnnnnnnnnnnnnnnnnnnnnnnnnnnnnnnnnnnnnnnnnnnnnnnnnnnnnnnnnnnnnnnnnnnnnnnnnnnnnnnnnnnnnnnnnnnnnnnnnnnnnnnnnnnnnnnnnnnnnnnnnnnnnnnnnnnnnnnnnnnnnnncaaacttgcacctgagtacatgagcaagtaattcaatggtatcatatacaggccatatttaaacttccccaaaccaggattgattgttttgaaaaactcaagcca

SEQ ID NO: 270053 - DNA, 437 bp, Homo Sapiens
  misc_feature (418)..(418): n is a, c, g, or t
agtgactagtcattgattcgaagcatgtgagggtgaggaaatactgactttaacctttgtgaagaaatcgaacctccacccccttcctatttacctgacccctggggtttaaaggaactggcctccaagcgcgaccctgtgtgctggagccgcgggggagctttctgatggggcagcaccgccatctagtggccgtctgtcatcactgcagctggactcaggacccagatgttctttttcttcaattgttcagaaaattcctctcaactacagtggaaacctccagaaattcttttctagggagtttgttaagttagttacgcttaatgcttaatgaactttgccttaagtatttggtagtcttaggagtcacggaattacgggcgtgtttcaagctaaaaaagcttagaggtagtantatttggcgtaatgttgtt

SEQ ID NO: 270054 - DNA, 816 bp, Homo Sapiens
  misc_feature (72)..(72): n is a, c, g, or t
  misc_feature (135)..(135): n is a, c, g, or t
cctaaactcaacataatgggcaattacccccttagaaaagggcaaagatttatttgaatgacattctcccanccaggtatttaagggctaataagcacttgaaaaaagttgttccaatacccattactcatccanggtcaagccaaatcaaatacccacaatgagaatacccactttaacaccccactatggtgactataatgaaaaagatagacaatgacaattgttggcgaggatgtggagaaagtggaaattcttcccaggttgctggtaagaacataaaatagtgctgcaaaactggaaaactgtgtgtttactgtgtttgagcagttactcagaaagttaaaggtacaacccagcaattctactgcaaggtatacagccaacagaaatgaaaatacatatccacatgaaatcttttacatcaatgttcaaagaatcattcttcacaatggccaaaaagtggaacaaccccaaacgtccatcaacagacggataaagaaaatgcaatctaatcacacaatggaatcttgttcagccataaaaagaaatgaacttctgatacatgcctacattatggatgaaccttgaaaacattatgctaagtgaaagacaccagacacaaaagccaaatattgtatgattccaattatacaaaatgtcctgaataggcaaatccataaagacagaaaataggacgccagaaactggggggagaggggaatagggagtaagtgctaatgggaatgggacgtgagggtgatgaagtattttagatttaaatagtggtaatagttgcacactttgtgaatattc

SEQ ID NO: 270055 - DNA, 310 bp, Homo Sapiens
  misc_feature (18)..(18): n is a, c, g, or t
tctgccctgtatgtcccnagtcaacccacatggatggtctttgtgaaaagttttaacttcctgcagagttaccgagtgctcagcgattgagctttgacccacacccgtgtttgttcctagtctgttccccagccataagcatctccacaagccctctgtggcttgtgtggcctgatgtccatgccaccaagggcctctcaccatacgcttctccactcaacctttggagagacacggaccaccaaaggcttgatttttcttcatcctacattatattcaaaacaaacaggctgggtgccgtagctcacac

SEQ ID NO: 270056 - DNA, 312 bp, Homo Sapiens
  misc_feature (231)..(231): n is a, c, g, or t
ttgggaaatacagtgaagtctggcacaatacaaaaacgtacacctgtatttaattttacactgatctttttaaagcatagggtttaaggtacagatttctctgcaaacacagtttagctgcatttcacacattttgatatgctgaatttgccacatagtttataatttttctaatttctcacaaatttcaaaaagtgttttgatcaaaggttgaaatcccagagggtttanggataaaattttaaaaaatacttgacattgaggattcccttgaagtaaatgatactagaagaaataaaagaactgacacct

SEQ ID NO: 270057 - DNA, 381 bp, Homo Sapiens
  misc_feature (24)..(24): n is a, c, g, or t
  misc_feature (50)..(50): n is a, c, g, or t
  misc_feature (55)..(55): n is a, c, g, or t
  misc_feature (60)..(60): n is a, c, g, or t
  misc_feature (103)..(103): n is a, c, g, or t
  misc_feature (112)..(112): n is a, c, g, or t
  misc_feature (129)..(129): n is a, c, g, or t
cccggagcagaataggtggcccangtcaggacaaacccgggaccccccgncaganccccncccaagaacctccttaacaaaacccactcctggcatccataantggtggcantttcccctcggctgtanttttaatcaactctttttcaatctgaacagtatttggtctcattagctgtacctacatgtttggcttccttttcttagtctttataaatcttgtgattacttgctcagaagttacagttttgctgtattattttcatttatgtgctgaggtaaagccataagaaactaatgcatttgctatacttgcattattggaattggaagtctgtgtttagaaaagaattgaaataaatgataactgcatgtttctta

SEQ ID NO: 270058 - DNA, 318 bp, Homo Sapiens
  misc_feature (13)..(13): n is a, c, g, or t
  misc_feature (103)..(103): n is a, c, g, or t
ggcccaatccccnaacctaaaattaaccccctcactaagggaaataaaccttacggcccccttaattaagggcccttatggttgtatagaagaatgtcccccnctaattaggaaagcacgtgcctaaaatatttaggggtccaagtgtccttccatgtcctgtgcctttcaaatggttcctagataaaatgaacatgtcagaatgctaataattgatgaatataattatggatgtcctggtgattattatacgttttttcaacgttactgtatgtttgaattttttaataataaatttggggtctgggcacagtggcg

SEQ ID NO: 270059 - DNA, 389 bp, Homo Sapiens
  misc_feature (266)..(266): n is a, c, g, or t
  misc_feature (297)..(297): n is a, c, g, or t
  misc_feature (306)..(306): n is a, c, g, or t
  misc_feature (317)..(317): n is a, c, g, or t
  misc_feature (323)..(323): n is a, c, g, or t
  misc_feature (342)..(342): n is a, c, g, or t
  misc_feature (352)..(352): n is a, c, g, or t
acagaatatttgataaactttattgaaacgatttatcccagtatatattggtaagtcctaaatgcttccagtacatagtcttcaaaagaaacttcactgtgctgttatgaatttggataatattttgtattatttaaataccagtgttaaaattcattgcttttatacttataaaaatggaaaaatagggcaattacaatgttggatattttagcattagaaaaaaacgtaaatacctgatttcatgtgacaatgaatgacattcnaatgattgttaagaaaggtaattttcaagcntttaaatgnaactaaaaccnaatatnataattcctcccaaaaacnggaaaaaagnccttttgggaatttaccaaaaattttaatggtaatac

SEQ ID NO: 270060 - DNA, 217 bp, Homo Sapiens
acagggccttgctatgttgcccaggctggtctcgactgaggtctccattcttataaggagaaacaaaaagtattaatagggaaaggaggttatgacttcaccatcagcatacccaaatgagaggctgattcctccatagtttcaagtgactattaaaaaggaataacacaagccatggaagactgaattagcatcaagaaatctacatcatactgtg

SEQ ID NO: 270061 - DNA, 967 bp, Homo Sapiens
tcggcacagctagcattaaaaacatggctggaacatagctaagcagttaacctaattagtagacttattgttaacgttcagtcctaaaaatgaaaagcttcagttgggagtagaaaatatactatgctggtatatagagcaacaaataccctgatgagataaaatgaagtagaaacttaccatttgacattatttgactttcatacatgctactgaaaagtctaggtttagctaagaagcataaataatggcagtacttgtagaggaaagaacataccagctaaaacaagaactgtaatgaatataatggaaagtgtttggagcttgaatacttggcttcaaaaatctggctttgcatttttactgttaaaaaaatatctgagaatttatctcaggctgtaaaacagagaagtcataccaatttcaagaataaaatatgatataaagaattgttgaagccaaaatatccagaaataaacagaatggaaggtatcattgctataattatcttttcagaataaaaaatagagtattctttatcctttctgttgtctcacatgacaagcatgggatggtgaggaaatggcatattgcctatgttcgccgccccacccccttagttccaccaccccttcaccgtcacccccagttcactagtgtatcagaatgcatcttcagaattacacactgaagatacaaaaggtccagttggtaagctcatcagtaaataacaaggctttgaaatctgacaaattagctatttttgtaggaagataatagaacagcaagatggaagacaagtgatgagtatcatctgttttgaggttgacaaggtgtgacataaccctgttaatagacacaagtaaaagaaaatcatactaggattggatattagtgagcgagcaccgaccagtagaaacaacaacagcataaatctgttatttaagtatcccaataatgaggttaa

SEQ ID NO: 270062 - DNA, 484 bp, Homo Sapiens
  misc_feature (415)..(415): n is a, c, g, or t
cctgtcatttcaaatgttcacagcatcttcaccaggagtagattccatctcaagaaagtatgtcagctatagctttactaaataactaaatatatttcttaaataataagactcataagttgaaatgacttcttgatccacaggctgcagaacagatgctgtgttggcaggtatgaaaacattaatctccttgtacatttccatcagagctctcaggtgtctagggttcattgtcaatggacagtgatattttaaaaggaaatctttttttgtgaggcaagagggtctcaacagtgggcctcaaaatattccaataaaatcatggccattaaacaggtggtggctggtcatctaggctttgttgttccccttataaaagcacaggcaaagtataattttggcataattccttaanggtccctaggggtttttgggaatgggtaaatggagcacgggcttcaacttaaagtcaccagctggcctt

SEQ ID NO: 270063 - DNA, 443 bp, Homo Sapiens
  misc_feature (397)..(397): n is a, c, g, or t
cagagaaaacccagtaataacacctaaaacagaaatttcagttgtgataaggattagaaaccagataacaaagataaaggagcattcaacattttgaggtaaatggcattgaatgggtagtaatgcagattagaattttgggaatgagaaagaaaatatacacaatgtaaggctgctagaaatgaaaacaaggctaacatcatttttcatgtttttaaatgaagactgtctaaaactctctcacacaatgcagagggaggagaaatgttagtttccttttgaagggaggaaaaagcttacaaatatttacatggaatgacaggaaggggagcctatgggggatatccggttatggggttgaggaggggaaccacttccatgggaaggccaggttaangcccccggaggagggatgccggttaaggccagggggttttccattt

SEQ ID NO: 270064 - DNA, 420 bp, Homo Sapiens
  misc_feature (27)..(27): n is a, c, g, or t
  misc_feature (71)..(71): n is a, c, g, or t
  misc_feature (76)..(76): n is a, c, g, or t
aagctgaaccacattggccagggctgntggctgggagctcagcttgtaccctgtagcctacagaacagagnctttncattgactgtaatacagagttgagtcttttgatatcagcagtgggtgcagcaaaaccccaccgattttcttatcaagttttccatttgtgtcagtgaagcaaatccaatttaaaatacatcttcagaagaaggagggtcaatgagttcaaatagaagaatatttgctaactggattaggaaaactcgctttgtgctaaaatgtttgaggaaaatcctcttagcacaattttgcaggagccaggcatgtgaaaggatcgtttcctcactatcatcccctgagatcagggctctggctggatgaaatgaggcaggagtttattagctgcttagttgattagagcct

SEQ ID NO: 270065 - DNA, 365 bp, Homo Sapiens
  misc_feature (46)..(46): n is a, c, g, or t
  misc_feature (57)..(57): n is a, c, g, or t
gatcccattgaaattacctgcctcatgtactcaggtgccaagtttnggtattgtggntccgccgggagaatgcccttattccttaggagttgcaagctgaagaatttaggggtgaggtgctgctatctgcaactgccatccaaaaggttcagaaaaaatgttctatgtatgtatctctttaaatagagaaaaagaaagaaaggccaaactttaacaactggcaaatcttgctgaagggttcatggatatttattgtgctctttttttcaactttctgtagattagaacatttcccaaataaaaacatgaaaaaacaacttttaatagaatagacatttacatcctctccccattcaaaatttggg

SEQ ID NO: 270066 - DNA, 860 bp, Homo Sapiens
accataagacaaagcacgccagttggatcgagacgccctttggaacccctacacctcaagacaccgtgatacggcaaaccttacggagggctcaaaggagggagcgcgctttccagaggtacgcatatagggccagattcacactttaagtcgctgcacaataccacaacgatcgtggcgtataagtattatctaagcattttacttcgaatttatgtagcacgattacacgtccttctagcctaaacttgaatagcctcttcagatataacgaataattcgactttagaatagcacgcatgccttatgtcaagtgcagtggaccctctccaagcaccagacttccgagtgttttcagatggatgtgttgcactggagccagtaaatgcgacgattagaagcatctgcttccgttatccatctggacgcgatcgaaccggagatgatatggaaaaatgcagtgatacaaagggtataggaaaccattctaaagctttttcagaaaaccagaagatacagcaataatttaatagaataaaactttcaaaagatcaagctcgaagccctggaaacccgaaaggcggggggaatacagggtgggaacgcaggaaaagcaggcagaggcacaagagcatgatgtactgaactctctattgtctggaaatataaagtcataactgatttttataaaatataactcctaaagctactataaaattcaggtctttaaagtacctactgatgtgtcaaacaccaaatagatattttccccaaaaagaaagttttcatagtattttaaacccttcttaggaagtggacattgtgacatgggaaaagaaaaagctataaaccttttttta

SEQ ID NO: 270067 - DNA, 522 bp, Homo Sapiens
  misc_feature (459)..(459): n is a, c, g, or t
  misc_feature (497)..(497): n is a, c, g, or t
caattaagcacccatgcaggggccaaatactgtggctacctaataaaacatttatatttcaagcaggagaaactcatgcatttgccaaaaataattatagattataccacaagtaatttcattccttatctaaaagttgccccaaatgagatggctggagggatttacacaacataatattcaggttgtggtacaatgtatttttcataagcacctgaaattggagcacaatttattctacttccaacaaaaaagattgccctaattcttaaataaaatgattcatacacaaactgtcctatgtctagaaggctttaagaaatgtgtttagcagtattttgaagcctttaggaggcaaattagcaagaaagtagagcagaagcgggggcagagggcagggcacgggaaaaggaaggacacaggtgatgcagagacactgccaggaccaaagaagtcgcnttgtggagcttccccttgattcctttcatcctatatcncagtaggcctgattacctccgcttg

SEQ ID NO: 270068 - DNA, 655 bp, Homo Sapiens
gatttcctttaacagtattctgtttcagcataaaaaagaggggggaagatcaggtcatactatctactctcctcatctctaacagctcaggatctcttagcattttaattagatgtaattgtttgtctttaactgtcaaaaagtttggttctgtgtctgtgttttaataagacgagaggacgagcgattgaggtgtatggagagaaaacagacctaatgctccttgttcctagagtagagtggagggagggtggcctaagagttgagctctcggaactgcatgctgctggacagtatcactgtctttcctagatggcagtcactgaattccattttttcaaggtaatttcttgtgcctctaatagcccaagaatgggaggttgatcagatctgacatgattccttcctgttctgaactgtggggtgcacatctctgcttgagtcaggtttgagtagaggcttagagacagttgggtgagaacaaccaaaatcttatcatggtctcagtcataatcattagggggaactctagccaaatggtttaacttctgcctgtggaactggggattgggtgggcaggaaaaggtgatatccattctttctgataactagatggtgctgagaagcttttgaataaaaactttgctaaatgaga

SEQ ID NO: 270069 - DNA, 408 bp, Homo Sapiens
  misc_feature (13)..(13): n is a, c, g, or t
  misc_feature (24)..(24): n is a, c, g, or t
accccggggggantgggccggggnagggtgatgggaataacccagtgaaaaagccgcaggcaacagttcaagtcccctctgaaatcccacagcctacatgcacagccttcagagcaatacaaaacaggtaatttaattcccataaaattatcctttcctacagttcgttttttcctcctagccctactgaaatgtacacaccatgagtacaaagtacaaggtgctgttcagctgtaattttacttctgcacatatttaatgtgctaatgggatgaagcatttcatggttcctgtgcttagcaaatgaaataaatcaatgtgttaagagaaagcgattttgttcttgctgtttggggaaagtgctctttactttcctattaacaaaaacttaatgaaccatttcacatt

SEQ ID NO: 270070 - DNA, 344 bp, Homo Sapiens
  misc_feature (183)..(183): n is a, c, g, or t
  misc_feature (210)..(210): n is a, c, g, or t
  misc_feature (265)..(265): n is a, c, g, or t
  misc_feature (289)..(289): n is a, c, g, or t
  misc_feature (305)..(305): n is a, c, g, or t
  misc_feature (333)..(333): n is a, c, g, or t
caaaacaacactccttcagacagcaatgtattaccttcaaagcactctgcaaaaactgaaaatcaagataaaaatttttcatatatatgattctgttataaattactcctaaagttaaactctccaaaccacagaatgtcaaattttactttaggaaaaatttttaatattttggtataggtnctaagaatttaatcagtgtattctggncattccttatctttctgccaaaacttctttttcttcctttcctcaaaattttgtnggaaaaggctttccaaaattattngtgttcaacacctttncaaatattcaaaatgttattcttacctnggattataact

SEQ ID NO: 270071 - DNA, 448 bp, Homo Sapiens
  misc_feature (260)..(364): n is a, c, g, or t
  misc_feature (377)..(377): n is a, c, g, or t
  misc_feature (382)..(382): n is a, c, g, or t
  misc_feature (394)..(394): n is a, c, g, or t
  misc_feature (400)..(400): n is a, c, g, or t
  misc_feature (418)..(418): n is a, c, g, or t
  misc_feature (429)..(429): n is a, c, g, or t
ttaagagacagtggcatgatcatagcacagtgtaaccttatactctggctaaagcaatcctcctgcccccccgagtagctagaactgcagatgcacacccaccacacccggctaactttataaaaacaatttttgtagagaggggggtcttggtatgttgcccaggctggtcttgaattcctggttcaagtggtcctcccatcttggcctcctgagtagttgggattacaagtacgtagtaggccactatggcccagccnnnnnnnnnnnnnnnnnnnnnnnnnnnnnnnnnnnnnnnnnnnnnnnnnnnnnnnnnnnnnnnnnnnnnnnnnnnnnnnnnnnnnnnnnnnnnnnnnnnnnnnnnttttaagtttgangcccntggttcatttancctttnccaaaaacccttgggggncccttaagganttttggcaaaattttactt

SEQ ID NO: 270072 - DNA, 808 bp, Homo Sapiens
  misc_feature (508)..(508): n is a, c, g, or t
  misc_feature (545)..(545): n is a, c, g, or t
tgacacacggtgcctagccaggtcttgttttgaaaacctcactgtgggagattcaggcatcctccctaagccagctggccgctgtgctaaagcctgttcagagttaataataatcattagctgaatggtgctggggcctttcagcttcagatctctaagcacttgcaggctgagtcagtcagccctcaccttccccctccttcctgggctgcagagtgtaacagaatgggaaggcactgtgggaaggaagtcaggaatcttgctgctagccacgccttgcagtgacttctcgtctgggagtgggcactgagtcctctcagtaaactaataagacttgcacctgacaaaggtcaagatatgtagggaacacagtgtatgctaggctgagacctatggtggtggcaggggtggctgttgagcctgaacttccaagtactcctgcccttccttctgtttaccctggcttggcctaaaagggggcacccctggtcttgatgcctcaagcccnagcatttctgggtcccctctgcaagctcagagagcangggaaggcttctggtagtgctcttgatgctcctgtgtctggttggcacaaagatcctgtgtaacatgaaatgaaaggtgcatcagcttgggggctgggaaacctgcagtatgggtttactccgtccctatccactggtgtggctgtgggcaaaccacttattgcctgacctacctcacagggatgttgtgagggtttgatgagagaatgaatgttaataggaattggaaaattcaaagcattaaacacatgtaaacaggtggt

SEQ ID NO: 270073 - DNA, 494 bp, Homo Sapiens
  misc_feature (18)..(18): n is a, c, g, or t
  misc_feature (137)..(173): n is a, c, g, or t
  misc_feature (361)..(361): n is a, c, g, or t
  misc_feature (444)..(444): n is a, c, g, or t
  misc_feature (473)..(473): n is a, c, g, or t
gtactctgccctgttccnattaatctatctatttttataccaatattttactctcctgattttagtaagtcatgagattggatagtgttagtagtgtgaatcctctgtgttcttccttcttaaaattgcttggactnnnnnnnnnnnnnnnnnnnnnnnnnnnnnnnnnnnnnggagaccctgtctcaacaaaagaagaagaagaatgaatgaagcacccacaacttatccctttaggcaaaactttgagacagaaaacacacaagtcatgttggggtaaaaaacaaggcaggcatccaggaacaagtgtggggagagccatgggtgttgcaaagagggaagcccaggggtccagggcatnggcttgaatcacttccgacccccaccccaccccttcccaggaattcaggcaaatagcttattttccgggggcagagttggggnccacagccttcagttgggggactttcttnttggggcacatttttgagttt

SEQ ID NO: 270074 - DNA, 747 bp, Homo Sapiens
  misc_feature (22)..(22): n is a, c, g, or t
  misc_feature (36)..(36): n is a, c, g, or t
  misc_feature (98)..(98): n is a, c, g, or t
  misc_feature (128)..(128): n is a, c, g, or t
  misc_feature (155)..(155): n is a, c, g, or t
  misc_feature (164)..(164): n is a, c, g, or t
  misc_feature (171)..(171): n is a, c, g, or t
  misc_feature (379)..(379): n is a, c, g, or t
  misc_feature (667)..(667): n is a, c, g, or t
  misc_feature (709)..(709): n is a, c, g, or t
ctgccagaatcaactttcaagnaagttgcaaccccntctggaacttaactcctcaaaacttgcttctgcaaaaaccttctcaatctgtggcaggacgntgttgcaacaggtcccagctttccacaggnaggctttctggttgacaatgttccagnaggtccacnaccaccnacaggtcgttgatggccacagcggagtccaccgacgtcttgatgtcgcccatggtccacacagcccgcacagtgtccaggttcttgtggcggctggtgagcaccacacacatggtgtcgtggcctttgcggatctgtgacatggcatcctcgtccaccagctcggcctgctgggggatcttcacggcgggcaggaagtcggaggcctnccaccgatgggctcgttccgggtggcagggatgatggcaggctcagccttgggtgcaggtgtggaagcaaccactgggggccggggcaggacctccagatttggcaccgggaactgcacatccatggcagggctgggctttgctgcctcctttgctgtggctgcgtcgtcctctgggggtgcagggaagggctcacttctccggggtggcgtccgactgatgctgttcttgggctggaagatctcgttgtagtcctcggcgttctggatctccgcgcgggactccgtncggtccccgggtcatcctcgctgctgggggctgcggcgcttngctctctgagttcttgcttcaacctctgaggcttactt

SEQ ID NO: 270075 - DNA, 629 bp, Homo Sapiens
  misc_feature (44)..(44): n is a, c, g, or t
  misc_feature (53)..(53): n is a, c, g, or t
  misc_feature (101)..(101): n is a, c, g, or t
  misc_feature (105)..(113): n is a, c, g, or t
tcccagcgtagatggccagagtgagacccctatctccccaaaanattaaaaanggctccctatgtttgttaattccattccactgaaatttttttcttaanggcnnnnnnnnntctaccagagctcttgcctgattattcaataacaataaaaatcagaatggatccagtcaatacaatactagcaataagttgtcctatgttattccttaaaagattaaccttttctatcttaaaaatgcatttcaaaggcatgcttaatatattaattatcggtatcataaaacaaaaaagaagcctgttaagtgcttgaagcagtttacacatgcatagaaaagtagtccttaacatgatgaaattaaattaatattttcttacatctaaaaatccatgtctaataaaaatctgggtttccaggaagaaggtgaagacagaacttccctgaaaacacctaaacttcaagtaaagactgtagattcattaaaattcagtcagtcatccaaaaccaatatgctcttcctgttgatgtaaaacttaattttaaaaaaaatctgtttgaggaaatagttaaccaatgttgcactataatttcagagggaaacccatcagttataataaactcatatattt

SEQ ID NO: 270076 - DNA, 505 bp, Homo Sapiens
  misc_feature (383)..(383): n is a, c, g, or t
  misc_feature (428)..(445): n is a, c, g, or t
atgggaatgtctcatgttacaattgtggtgtaagcggacactatgcacaggactgtaagcagtcgtccatggaggccaatcaacaaggcacttacagactgagatacgcacctcccctccccccttctaatgatacgttggattctgcagactgaaacgagtaaagcttgcctacttaatacactcaagtgtgggggagtcatggggtgtgggaggggaggaaaggaaaggtattttgtttctttgtctatacatttcctagatttctatgcagttgggatttttcatttctcttgtaccaatgtccaaaacaagaaagaatgcaatgcttttgagcctctggtctcctgggttcaacaacaggcttatatggtatgatacangtaatttaaaccttcaggacaaacttaaatggttgggtgcgtgcnnnnnnnnnnnnnnnnnnacactgaatacttggctggtggggcaatgtttactggaatctttaaaactggggtatttg

SEQ ID NO: 270077 - DNA, 530 bp, Homo Sapiens
ttgcagacgtctcagcatgtgacttacgctcaccatttagacatttcaattgtttagatctgctgctattgttatttaaagcattattatagaaacatatattactataacacaaattcatttttaaaatatttggtcattgtatttcaatgtaattggttttctttgaaatactcccatgttctattttcatgcatttaaaaaacatcacagtgagaaggggtccacaggcttccctacttcaagaagtccatgggcacagacacacaaaaagggaagctcccttggcagagtgaaggcatttgggctctagtctcttttccaggacttgctagagcaggaattttgagattgatgggtttctctaggaagttggtaactagtgccaatgggagatctgcctggcttgatttgttgtgctgcacatggacaactgtggatgctgtcggagcttctgtggagtgggaagggagtccgcagtgtagaatttgaggagaagccctcctttgaaatcttgtaacaataagaaa

SEQ ID NO: 270078 - DNA, 863 bp, Homo Sapiens
gcaaggtaagattatcatctttataagaacaaaaaacaataaattaaaagtcaaccaaggcaatccactcacaatctgaatgtatataatgatccagcagggaaggcatgttgcagtggtctgtgactgacttttggaaggggtgtgaaggagcttttaccctccaaatccaaaagcttcatcaccttcattgggctagcgcaatccccaaactagaagcaaactgcccttaatatttcaggtaagtttttatagattagcccagagcttttgtattttcccagttcactgctgagatctccttgatttgcaatgggagtgagatgaaaattcagtattttaaacagatttcttttttcactgattgataatcaatagaacatttactgaccatatactgagcacctattctatgcctaccagtgcttttttaaaacctgggtgagggctggtatatcgtctttgaaaaacaatgactataaaagctacaggaaaggtatttctataaatcataacatgattcagtgtaagggagtatcaggcacttggcccacgccaggtgctctgttaaagtagcagctttattctaaaaggctaatgtggatctttaaaaggtttccgtaactgggagaacccaggttgaacaggatttttctcaccagcatggctacaccagctttgcagtggcagaatgagctgcagaggtttcctccctgctttacaatcccttattgaagtacacgcgtcgcaattcagggatggcctctcttgggatcttagcttgcaactcggcctccaagcttgtcacagacatgggaactcttctgaggaaacagggcacatcacagtggtgtagcatacac

SEQ ID NO: 270079 - DNA, 395 bp, Homo Sapiens
aaagtttggtttaataaaggcctatcatgttttcccctccaatttcccctctgtcacacttccttccccttgggtagtatgtgaaaagtaccagcagctctcagaatctggccaaagggaagtccaattggggctatactcagttggggtatagtgggatatattacgtgattcccagtcccttccatgtgtagttgttatctgtaaccattgtgatgaaggaatggcttggaggcacacctcagctgcccactgactcatccagagatgtgagaccagggattgtgttgcaatatgaacgtaccctgcagcacctggcactggaagtatggaagtagtggaggggagatgaagttctaaatatgcaatgccgaaaagctagtcagtctgtggta

SEQ ID NO: 270080 - DNA, 132 bp, Homo Sapiens
  misc_feature (51)..(51): n is a, c, g, or t
tctgtagtgctgtacatttttgtccctttgtggaatgtgttgcatgtaccnccagtgtttgtgtatttataatcttatttgcatcatgatgatggaaaaagttgtgtaaataaaaataattaaatgagcaga

SEQ ID NO: 270081 - DNA, 764 bp, Homo Sapiens
tcacagagtgcttcatgttggcggaaccattgtattgttgcttagtgaagatcaccacaggcgccttacagattgtaaagagagcaacatccctttcaattccaaggacagtcacacagatgaacctggaattaaaaagtgcttgaatcctgaagaaaaaactggtgcattcaagacagcgtcaacttcattcgaagccagtaaccacaaattcttagacagaatgtcaccatttggctccttggtaccagtggaatgctacaaagttagccttggaaagacagatgcgttcatatgtaaatataagaagtcgcactcttctgggactgtagcaggcttgctgccatcagccgggttcaggcccttgtaagttagctgtacagcagaagtttgctgtctctaggattcatatagcacccacagagctccaagtaaccaaattcccccaaagacaggaggtgtggctgatgggtacacatgcttggtaagagtttctgctttatattctaaagtacttaatgtttttgagaaaaaagttaccgaatattttttagacttaagttttatcttctgtcagaatgtgaaaagttctgcccagtttctgagcaaaaacttcaatttcaaaataaaggttttcaggggttcacttaagtgtatcacaatcaacaccagacgggatattttaactatcagattttcggaaatgtaaaaacctttatgtgtaacttcttttgatattaaacttgatttttgagcctgtaaaa

SEQ ID NO: 270082 - DNA, 365 bp, Homo Sapiens
  misc_feature (164)..(164): n is a, c, g, or t
  misc_feature (341)..(341): n is a, c, g, or t
accctcaagtaactcatggctaatgggaaaagaaccatgaacaattctataaatatctggaatgcctgccttaaccccacattcatccccagccgactgcagctgggaagcaaaggcatcagcccaggcataggatgatgagaccagaagtaaggccgtgccangcggggaagagaagaggaacgctggagacgtgctgaggaaacaactggcaggggcactagctgtagaaggcagggccaaggaggaggaaaggatgacatttacttcgcaacattgctagtgtgacagggaaacagtgcctttcactttaagaacgcaagaaggaattgctgtttttntgtgtgagggattttcaggagccc

SEQ ID NO: 270083 - DNA, 403 bp, Homo Sapiens
  misc_feature (17)..(17): n is a, c, g, or t
  misc_feature (242)..(336): n is a, c, g, or t
tttttaaaatccacacnatggtgtctccatgggaggcctgcaggacaccgtctgtcttacggcacgaagcccagggcctccgtagggctcacaggcggcttctagagaagatgcccgccacaggtgctctctgctccatctcaggtgaccactggccatctcggaagaaacccctgctctgattccttcccggccgtccgatgaagcctgaagtcttcccgttaaaacacctctgcttctgnnnnnnnnnnnnnnnnnnnnnnnnnnnnnnnnnnnnnnnnnnnnnnnnnnnnnnnnnnnnnnnnnnnnnnnnnnnnnnnnnnnnnnnnnnnnnnnttgggcctgggcacccgggatgtgcttgccaaatgcttttcgtgccgaatttttgggccttgaggtt

SEQ ID NO: 270084 - DNA, 574 bp, Homo Sapiens
aagatgctaagaagttctgactggttgaggcatattgggaacagatggaaaggattttgcagttacacctccctgcttaatgtaattatttccctgataatcattctctgataaatgtatggttaatttggtgctgcatttgaaacagaaggtactaaagggcccactgtgggagatgtagaggtgaatgcagcctttgcctcaatctaagcacataactaaaatttgccagccagttggtgggaaagcacggggtttgtgtgtaaaccccagcattttcagggttccttttcacattgacaagctggttcccaattgatgttattcatttagcaagttggcaggggtgtcaagaagagccagaagagtggggctgctacaaaggcctgttcccacgctaacacccctccttgccaaatcattgtctttactcccaggatttggcacagtctctttccacctcccacagtaagaatgctcacctgcatctgtatttcctcatctgcatacaacctagcagggcctagaaccctggctcccacttttgaaagactgctgatctttgatgttatac

SEQ ID NO: 270085 - DNA, 395 bp, Homo Sapiens
  misc_feature (374)..(374): n is a, c, g, or t
attcagtctttctatacaaatatctagttgaaaaatatactcaaaacttttaagaaatagattctggttattcatattacatcacaactgaatgtactaatattagaataacatttaaattaacaatcacatttgtgggatcactacataaatgtgtcaggggcacccaggggataaaatattctcctagagggtctgcgtgctcttattcttttttaatcgttacaattaatagtgaaggataaacaaaatcaatgaaggctgcaggaaggggcactttctcaagtcaaatggaaccttggaacctaaaaataaaggggacccttaaaataggtgggtggggtaaatgggaagccatctaggtattaaccaanaatttgaggggttgacattcc

SEQ ID NO: 270086 - DNA, 683 bp, Homo Sapiens
cttcatcactattcaggctttctatacaaatatctagttgaaaaatatactcaaaacttttaagaaatagattctggttattcatattacatcacaactgaatgtactaatattagaataacatttaaattaacaatcacatttgtgggatcactacataaatgtgtcaggggcacccagggataaaatattctcctagaggtctgcgtgctcttattcttttttaatcgttacaattaatagtgaagataaacaaaatcaatgaagctgcagaagggcactttctcaagtcaaatgaaccttgaacctcaaaaataaagggaccttcaaaatcagtggtgggtaaatggaagcccatctagtataacaaaaatttgagggttgacattcccctaaagcctcataaaacttcgcaaaggatggttattaaatcatgaagaagtcaacagtattctaaaaaatactttacacaaaaacactctcatgagtggccgcaaagccacaggagagatctcccatggccttgggacctgtctcctgagttggaactggctggagaagaacaacctgggagactcctgctgccagaagggagaggcaggtgagaatcactgaggcaaaggcaatctccacccccatggctggtttgtattccctaaattaactccattgatttcagaact

SEQ ID NO: 270087 - DNA, 476 bp, Homo Sapiens
gagatctttgcaagtatcgcaggcctggaatttgcatactcagctgcccccaagtccatgcagagtgcccataatgggcttgttctttttcttctctggcgtcgggtcgttcgtgggttctggactgctggcactggtgtctatcaaagccatcggatggatgagcagtcacacagactttggagacaagcaggcctctcttctcatcccaggggccaagcctgccctggccacagcccagcgagcagctgctgcagccaccgccccttacggggacgtccttgacagacaagcaccttctccacgcccgtccagctcagtcttcgtgaggcagctgaatctgtaccccaagcttccctttctttaacttggtggtgtactttcgttttcttttcctaacagcaccttttctgatacgaaaaagacaagatagatagtaagttacttttaaaaataaacatattacttgtgatcaa

SEQ ID NO: 270088 - DNA, 274 bp, Homo Sapiens
  misc_feature (45)..(45): n is a, c, g, or t
ggctcacttcatacagtttcaagagactgtctgcccagatgcccnaagtctaaaacccatagtttgtcctatcattctttcaagtaaaaatggtggtcggtgaaaaaagaagctgcctaaatcaatatgcaacttgaataatcgcccaaatgcttttccttgtgacaaccaccgtactctaccagtgtgcagcagaggcggtttatgcatatttcccatttcttcaaacaagtttaaaaagatgtactcaggatcaggcatggtggcccacacc

SEQ ID NO: 270089 - DNA, 294 bp, Homo Sapiens
  misc_feature (237)..(237): n is a, c, g, or t
ttatatggcctagaagttaaaattgctgtttactgaatccaggatattgaaaaatacatgaaatcctcttcatcctaatttcctttctgaagagctcataattaaataatataagattaaggtaaagaatatatactaaatgaaaacaaataggagataacacatttattctttaaaagggttatttccattaaaagaatataactttctaataaaactgcaagggtaataaaatanaaactaccacttcctaacagtaggaagcttaacaaactagggcaatttttacaactg

SEQ ID NO: 270090 - DNA, 1314 bp, Homo Sapiens
  misc_feature (47)..(72): n is a, c, g, or t
  misc_feature (98)..(156): n is a, c, g, or t
  misc_feature (249)..(249): n is a, c, g, or t
  misc_feature (1199)..(1208): n is a, c, g, or t
  misc_feature (1304)..(1304): n is a, c, g, or t
tgcttttagaaatgtagacataaacactccccggagcccactcaccnnnnnnnnnnnnnnnnnnnnnnnnnnaactttattccttgagggaagcattnnnnnnnnnnnnnnnnnnnnnnnnnnnnnnnnnnnnnnnnnnnnnnnnnnnnnnnnnnnactctctcgaagaagaggaccttcccacatccacgaggtgggttttgagcaagggaaggtagcctgggatgagctgagtggagccagggctgncccagagctgagatggggagtgcggtacaatctggaagccccacagctgtcggtcagaaacctccctgtgagacagatggaacccttcaaaagggcgcgctttggttctctgaaaatctcctttctcttctttgcttcaattgcttacccactgcctgcccagactttctatccagcctcactgagctgcccactacttggaagggaactgggcctcggtggccggggcccgcgagctgtgaccacagcaccctcaagcatacggcgctgttcctgccactgtcctgaagatgtgaatgggtggtacgatttcaacactggttaatttcacactccatctccccgctttgtaaatacccatcgggaagagactttttttccatggtgaagagcaataaactctggatgtttgtgcgcgtgtgtggacagtcttatcttccagcatgataggatttgaccattttggtgtaaacatttgtgttttataagatttaccttgtttttatttttctactttgaattgtatacatttggaaagtacccaaataaatgagaagcttctatccttgatttggggaagacattccttagcggaggctgtgcagcctcccgcccctgcatggcccaggcgggacagctgggctcgctcttttctgtccgtttcctgctgtgttttgcctctctggcctgtgacgtgctcctggcgacttcttcctcagtgccctctcttttctgtcctctctgtctcacagcctcgtctcctaagccctccgtcctcatggctctcttccctgtctgtctggccatgtggggacagaagcttctctcctggaccctggcagctcggtcggggccacagcagtgatgctcatgtgcgcctctgatgacagaagagtgagctgggacttactttcagcaagtagtgctccgcagtctgcactgctcaagtnnnnnnnnnnaattgacgcagatttattggcgggggcttttttcgaagatacctttggcagtaagaatagtggcaaatttaataaggggatatgcactgcttaagntgtccatccg

SEQ ID NO: 270091 - DNA, 477 bp, Homo Sapiens
  misc_feature (23)..(23): n is a, c, g, or t
  misc_feature (36)..(36): n is a, c, g, or t
  misc_feature (45)..(45): n is a, c, g, or t
  misc_feature (56)..(56): n is a, c, g, or t
ggaaggggaaccacaaattggtncctaattaataanaaatggcancgttttacaanagtacaccaacccggatgttttttctaaaatgtttacccgggagagctggggtttgtttgtgaggagaaagagtactgtggaaaacctctgcttgagtaccatgtggcccaggcctatgtggatggctactccgtgctgtgcggcttcaccagcggttgggattggcccagcttggagtgcttgtgtggtccaacctcagtctggccccatagtgacttttgccccatgattctgcttcactgttggaatcctctttgaagttccccctctctttgctaaagcagtgaaggaagagaacagagacaaactctttggactgtgaaagagaaggtagagaattccaggcaacagtctgaccaagggtgtaaaccagtttattatatatatatttttcctttgaattaaaacctagagtgttgt

SEQ ID NO: 270092 - DNA, 583 bp, Homo Sapiens
  misc_feature (521)..(532): n is a, c, g, or t
tatctaatatccattgacatgggtaagaaaactaattatgtctttttagtatgatgaaatgtgggcccagagtattggaaagaaagcaatagccctattcagtgtccactaggatggatattgcagaaggcatgagtttgtccttttttcccccttaccttaaataacacttcaatagctaactttttccaaaatatccatttaggccatctcttatttcttaaagccaaatatttcgtccccagtcttaactctgagttgcaagatcaggctggttggaagaatctttatatttagaaataggatggtgagtggtttgtttattctcttgtaaaattcctttttcagagacataactgcagggagagtcccaagagaactgaagaactgggattatatcattaaacacatttgtgttgtaggaattggggagtttcattttgaactgataagatattagacataaacccttgttccagcccacatgtgtcatccctgtgtacaaaagctctctggattcnnnnnnnnnnnngagacggagtttcgctcttatcgtccaggctggagtgagtgtagtggcttg

SEQ ID NO: 270093 - DNA, 464 bp, Homo Sapiens
  misc_feature (421)..(421): n is a, c, g, or t
  misc_feature (443)..(443): n is a, c, g, or t
gaagatgtgaaagctctggtcaagattgtccctgttttcttggctttgataccttactggacagtgtatttccaaatgcagacaacatatgttttacagagtcttcatttgaggattccagaaatttcaaatattacaaccactcctcacacgctccctgcagcctggctgaccatgtttgatgctgtgctcatcctcctgctcatccctctgaaggacaaactggtcgatcccattttgagaagacatggcctgctcccatcctccctgaagaggatcgccgtgggcatgttctttgtcatgtgctcggcctttgctgcaggaattttggagagtaaaaggctgaaccttgttaaagagaaaaccattaattcagaccatcgggcaacgtcgtctaccatgctgccgatcttgtcgctgntggtggcaggtgcgcagtactngctgattgggatcagcgagat

SEQ ID NO: 270094 - DNA, 351 bp, Homo Sapiens
tggtggaagaaacagatacatcagactagtccagcgtctcagtttccacacttcataacaatggggcaccgtgcacctagtgtctaacttaccacgctgcctttgggccacaaattccatactgtaacagccaattacccaaaacactaaatagggaatggctcaaaaaaggctgtctctgaaaaagcagcagcattttgatgagcaaaaatagtaagagaggattttttaaacttagaaaaacgaggaaagttgaacccagctaagaatatttctgagacaccccccaccccttgtggatttttctcccgctaggattttcccttgacttcgcctttttaggagactgct

SEQ ID NO: 270095 - DNA, 361 bp, Homo Sapiens
  misc_feature (89)..(181): n is a, c, g, or t
cccacatcagcatcccaagtagctgggactacataccaagtagctggcatcaccatacctagcttattctattctatttatttatttannnnnnnnnnnnnnnnnnnnnnnnnnnnnnnnnnnnnnnnnnnnnnnnnnnnnnnnnnnnnnnnnnnnnnnnnnnnnnnnnnnnnnnnnnnnngtgtaagccactgtacccagccctgtatttccttaaacgttactttagcaaaagttatctagctgcttcctttataaaatatacttgtacttatatttgaaatgaaagatatattcttcagggaattaattttgggaagttacacaaaaatttattccagtgatgctgccaaatttcttc

SEQ ID NO: 270096 - DNA, 107 bp, Homo Sapiens
cccaggggcatgtacactccttgagacagctactaggtagggcagggaccctcacccaccgggattcagacaccaaagcacatggttaacagaaaaggaagcacccc

SEQ ID NO: 270097 - DNA, 390 bp, Homo Sapiens
tgacgaccaggcccagtcccatctttctttttaaggacctcctccacttcccaccaccagtttctgcctttgttaactttacattttacaggcataatgcctcccagtctgcagatctcagaacactcaaccacctgtgtctcctgtgtcctcagtctctccaaggctctctctattatacaagaggggtaaactgaggcacaggatgtgggtaaggctaaaagccattattgtggggactccaccactgttcagaaactcccatgccaaggtcagctggccagctgttggtgcccgtctctgacatgtgtcccccaaacacctccctgtgggcataggtgggtatatgcacaggcgaactaaccaatcacgcacgtgtgtgtgagagcc

SEQ ID NO: 270098 - DNA, 389 bp, Homo Sapiens
  misc_feature (22)..(22): n is a, c, g, or t
  misc_feature (67)..(67): n is a, c, g, or t
  misc_feature (72)..(72): n is a, c, g, or t
  misc_feature (212)..(212): n is a, c, g, or t
  misc_feature (263)..(263): n is a, c, g, or t
ccccaaactgactgggatttanagacgtgcggccaccgtgccctggcccagaatgtaacatacttanggttntaatggaacatccctccagcaggcaaatatgttagggctataaaatgaacctcaataaatttaaaatgattaagtcaaagtgtgttttccaaccacaatggaattaaaagtaggaactcaatacagaccaaaaaaagaanggaaaaatcacaaatatatggaaattaaataacactcctaaataatgaagnaataataaagactagagtggaaataaatgaaataaagaacaggaaaacaaacacagaatatcagcaaagacactgcaagagtactacagaccctttaactcacacctgttagaatggctattatga

SEQ ID NO: 270099 - DNA, 346 bp, Homo Sapiens
  misc_feature (243)..(243): n is a, c, g, or t
  misc_feature (278)..(278): n is a, c, g, or t
  misc_feature (315)..(315): n is a, c, g, or t
ggtctgagcccagcgaccctgtggagctcgtggtgacagaattctaccccaaacccactctcctggcacagccgatccctgtggtgtttcctgggaagagtgtgatcctgcgctgccaagggactttccagggcatgaggttcgccctcttgcaggagggagcccatgttcccttacagtttcggagtgtctcagggaactcagctgacttccttctccacactgttggagcagaggactctnggaactatagctgtatctactatgagacaaccatntcaaacagggggttcatatctcagtatgccccttatnatctggggtgacttgacacattcccttaagt

SEQ ID NO: 270100 - DNA, 409 bp, Homo Sapiens
  misc_feature (31)..(31): n is a, c, g, or t
  misc_feature (58)..(58): n is a, c, g, or t
ccctcccccaggggtggaataccatgccccnggacctaacccaatgacaccctcccanctttcccacctatggtgactgggttaggtatgatcttgtgagttaagacaatgaagcccagagggaatttcaagacttatgggaatgctgggtagaagctgttttaattcccctgttgaatgtgaaaaaggtagtagtattccctgggtctttatgatgaccaccttgggccttgggatcatgaccaggaatcacgtgaagctgacaccactgaagggagagttgagaggcagaaagagatcaagtccttggtgaaattgtttaagtacaggatcaagccttgcttgagattggccttacctctggactttttttgttatatgagctaataaattctgtttacaaacttaa

SEQ ID NO: 270101 - DNA, 555 bp, Homo Sapiens
ttaaataaagtgtattgtgtatattaaggtacacaatatgacgttatgggatacatatagatagtaaaatagttactatgaaaaagcaaattaacatatccattatctcacataattacccattttgctgtttttgggacaagagcggctaaaatttactcattgagcaggaatcccaacatggtgcaattttattacctctagtcctcattttggataagcctacatgtgcaggtgaagagagacagggatacagaggcatccacagggctcactctgtgccaggcccatatcaacccttcaacaggctgaggatctacagcacctcacggggtagggcgtaagaggtggctattttgcagttgagaaagccacctttagagaaatgaagtaacctccaaaggatggcacggctaacaagtgaggagccaggagagtctaatgccaaggattgtcttcctcctacttcaccaccctgccctattcactcttcacccattccagtaatcaccactggagtttcagatactttatggtacttctacttactaatga

SEQ ID NO: 270102 - DNA, 904 bp, Homo Sapiens
cagtctcattctgctttcatctgaggggcagaaacaggagactcaagaggagaagccggggctcgagggctggcaaagccagcgttcgctctttccaggtcctgttgcagcatttcagatggaacccttggaagcccactgaccacatgtgtgacctggggaaggcccatcttttggaaactttgtatcacctgctttgcccattccttcaagaaacgctgatttgttgaaggaacataatttgttccactatgtacagggctttcttctgaacttagaaaacccaaaaacaaaaccacctcaaaaactgtgcatgcatcaagattcaaagcccagatgcattgcaggatgtttgtttaatttgcaaaaccttcaccatgaggtttctttcagtaattagctcccaagtgcatatgaaaaatattatagataaaaacggtttgtggaaggcaaaaaaaagctttaactgaatagatttagttatacttgcatgataaaaagtgtccaaaatgtttctagtgttctccttgcctttcatatttgtcagtgaattaatgacaacattattacctgaaaatgtcgttcggtagtggtagcatgattgtatacagtctaatggagggtgatcttaatatctacggtacattacaagcgagagatagggatgataatctacccaaggtggtgcgtagaggatcctatactggcatgcgtaatcttgtttagggtatctggcagagctggtggaatggataaatgggtaaaagggagaaaatgggtgcacccgggcgggaacccccccttggagatttcaaaaaagtttccgggctttggtttcgcggtagggcatcacggcctcggtgggcctctgggccgggggtaacgcctcccaggcgggggagct

SEQ ID NO: 270103 - DNA, 421 bp, Homo Sapiens
  misc_feature (43)..(43): n is a, c, g, or t
  misc_feature (52)..(52): n is a, c, g, or t
  misc_feature (109)..(109): n is a, c, g, or t
tgtgcccccaagtcagcatgcctcctggatggtggattccagnggataaatncatcccactttagtgacttgacctgcctagcaaaacaagtattccaatcctaagtgnccgtggtagcctccaaagttcctacatgtaacatgattaaaaattggtgagtcgactcttcatttgtccccagggctagccagtaaaatggcaagcagtttgattagtttataggatgatgaattaatgtgaagacttctatttactttgtgcagtaaaattaaatttcaaaatgagtataatacatacaatggaatactcttcagccttcaaaaggaaggaaattctaatgcaccttacagtgtggatgaaccttgagaacgttatctaagcaaaataagccagaaaaataagcccccccaaaagtcagaa

SEQ ID NO: 270104 - DNA, 342 bp, Homo Sapiens
  misc_feature (35)..(35): n is a, c, g, or t
  misc_feature (94)..(94): n is a, c, g, or t
aatatggggggaaaattagactgctgaaccccacntcacaaaccacctcctaaaaaatgaagggacacacatacaagtgatgtgaaaaagttantcaaaaacactgctcccaattttttgtaaaggcagattttaagtagacccaaactccccctttttcctaaaatccaaaagcactcctagaagaaaagtatatccccatactattaacaatgattatcacttggtagtgagagcagaggtgatttatattttattcttttgctaatacaggccttcacttttttctactatgaaaatctattatttatatcactttaaaaaaccaggccaggtgcagta

SEQ ID NO: 270105 - DNA, 387 bp, Homo Sapiens
  misc_feature (106)..(106): n is a, c, g, or t
  misc_feature (186)..(186): n is a, c, g, or t
  misc_feature (222)..(222): n is a, c, g, or t
  misc_feature (310)..(310): n is a, c, g, or t
  misc_feature (321)..(322): n is a, c, g, or t
  misc_feature (330)..(333): n is a, c, g, or t
  misc_feature (346)..(346): n is a, c, g, or t
  misc_feature (354)..(354): n is a, c, g, or t
gtagtcaaagtaaaggtttatccttgcatcagaatggtttaaatcttgcaatttgcatatacaaagagttcagcaacattcactggcattataatcagagcaagancaaattataaatgtaatcaaagaaaatatgatagttgaaactgtaataacatacatacattataaagactgcacataagnttaaacacaacttaggttaaacaaacaaacaaaaangtatcaggtaattatacacttaaaaggattaacatggggggatgtctccaaatgctggaaacacagggtgtcagggctcatttaaaanggtgtttaagnncacattannnntacctttttaaancttggggntggcctttcttccttcctttgggccctgggggg

SEQ ID NO: 270106 - DNA, 420 bp, Homo Sapiens
  misc_feature (51)..(51): n is a, c, g, or t
  misc_feature (64)..(64): n is a, c, g, or t
  misc_feature (219)..(239): n is a, c, g, or t
tccggttacccataccaaatgaccatcccttacaatttccggagaatcccnagggcctttaggnaaatggagatgaagaagcaaatatatatttcacaatatccacaaacataccccttgggaattagaccctctgatcctaatcctaggctcccctcacttgcccatttttgtgacccttgaacaagttgttcatcttttctggatagttctctgttnnnnnnnnnnnnnnnnnnnnntggtggctatcaggttgttaggaggactagataagagaactatgtgaaggaccctgcacagtgctagcaacaaagttgtttagtaagtgctatttcaatttattttgcttccaagctcatgtgagctccctcagtgtgtaccaccaaatcacatgatgtgtatcccagtcaaatcttactt

SEQ ID NO: 270107 - DNA, 1011 bp, Homo Sapiens
  misc_feature (188)..(188): n is a, c, g, or t
aggtggggaagaaaagaagacagactttcaaaatggaattaggcactggggagagatcagtttccccacatcagggagaagaaggtataggtggggaagggggtggccaggagcagaaggaagaagactcaagatggaaagggagccgctgtgcctgtgcaatgaccacttggagaggtcgacttcantaccttcaagccttttcccctgggcttttgattgtgtctgtgccccctttcttgtcctctctgcagatgcccagtagggcttacctcatcctcgtgctgttcttgtgtggctttctgggcagtagggatcttgaatttcctttctaacactgtgcccggcaaggcgggggagcattcctctgccctttgtcttgtgccaacctgggaaaggttgcagtctagatttcagtgagaaccctgccagctgagccctgttgcatctactacctttgacacagatgtttttcccactagaagctctgctctgctctcctggcccaagtaggggattccatgccttccctttcatggtcttagcaccagcagccctagtttcctcccttcccagagtctcccagggatgacaaattggattggagacaaacctcgtcagatgctcatcccctaaaaggttaattgtgtatttgtggctgcgtgtgcctttgtgttttcattctcttcccatttttgtacattttggtcttctctgtggttttatacttgggtcaaaagtacttcgtcttggtattggcactgttgtgtgcatgagaaaactgggggaaggctcactggtacaagaaaggacccctgacccctttccttctctgtggtccccggcattagattgggggttctgggagaggcaggtgaatgtcctaagtgaattgttctgtttgtaactggaatgtttttgaagtctttggtgttgctccgtgaaaggacatcgccacctggtgctcatgaggtgtctttgcagaacaataaatggcaaataaaaaaaata

SEQ ID NO: 270108 - DNA, 504 bp, Homo Sapiens
aagctgagtggccctggggggtctgtgagggagttcctccccagtgatgaaattctctccttccaccctcaaatccctagaccttgactgaaatgctccgtggtcgggagcctggtcccaaggaggaggagctgctggagaggccattgttcgccccttgctccattagcttagctcggatgtcccgtgtcagacaggagatgattgagaacaacccttgcctgtcactgtcctagaacaccctggagtttagtgttctgtgtcagagtcttgggagcctccttcagacccagatgacgggcctccctctgtccaaggagcagctgtaaaggagaagagggatttcatttggtggctgttaccttgtctgtaagtcaaacttggagttgagcagtgctttttaaacgattcccttttgcagctaaaatttcacagggctatttctaatacgtaagcaaatgttaccattgactttattaataaaatatagttttgctttgcaaa

SEQ ID NO: 270109 - DNA, 506 bp, Homo Sapiens
  misc_feature (69)..(69): n is a, c, g, or t
  misc_feature (175)..(175): n is a, c, g, or t
  misc_feature (403)..(403): n is a, c, g, or t
  misc_feature (430)..(430): n is a, c, g, or t
aaagaacatgtaaggaaatgtgatatgagactctgaataggatgacatcagcccagcatgagggtcttncatcactgttctgcaggattaaaagactaattaaattggcctatctaatttaaacataagcatgcatgaaaataggaaacattcatagagggtaccatattaaccncaagatgcttggcccagacctcctacaagagaaaagtaatgtatagaatttgtttgattagtgtttaaacaaagggggagaacctcatttcaatgtgcctatcatgaaaggaatccttatacaaggaaacaattactgtcaagaaatgcaagtacttattgcatgctcttgtaggccctttagggattgttaaactgtttagaaccgaggatagcttttattttgtgnaaagacattttaatcatgtatgcaagnaaaaacacagtgattgtgagctgttaagtggctgaattacagtgtgtttggtaccccattgcttctcctacctaca

SEQ ID NO: 270110 - DNA, 103 bp, Homo Sapiens
ccgtgggtttcactgggcttcttgaatctttggattagtattatttgtcagttctagaaaattctgagccattgtctcttcaaatactgtctctttcttccct

SEQ ID NO: 270111 - DNA, 654 bp, Homo Sapiens
  misc_feature (537)..(537): n is a, c, g, or t
  misc_feature (636)..(636): n is a, c, g, or t
tctgctcttggagcacaggcatgcaactcaggtacaatataagtcagcttgaggagtggcttcggggaagaaaccttcaccagagtggagcagttcagaccatggaacctctgatccaagcagcccagctcctgcaattaaagaagaaaacccaggaggacgcagaggctatctgctccctgtgtacctccctcagcacccagcagattgtcaaaattttaaacctttatactcccctgaatgaatttgaagaacgggtaacagtggcctttatacgaacaatccaaggcacaactacaagagcggaatgaccctcagcaactgctattagatgccaagcacatgtttcctgttttgtttccatttaatccatcttctcttaaccatggactcattccacatcccagcgtgtctcaatctggaattcctcaatgaagtctgaagatgcatgtttccagcattagtttgattcccaatgtgagcaagaaggaagtatatacagtaaagtaaattcaaggatctgttaaatctggtaanagtagatcaaatcagagattgacagcctgtggagggtgctgaactatacagaattagacacaactatgtcattattttttgtacctactgctcagaatnaaaacacttgaaatatga

SEQ ID NO: 270112 - DNA, 419 bp, Homo Sapiens
  misc_feature (16)..(16): n is a, c, g, or t
  misc_feature (96)..(96): n is a, c, g, or t
  misc_feature (110)..(110): n is a, c, g, or t
gccctttatacggaanaaccccccgggcacaacctacaagagcgggaatggaccccctcaagcaactgcctattaggatgcccaagcacatggttnccctgttttggttncccatttaatcccatccttcctcctaacccatggacctcaatcccacatccccagccgtgtcctcaatctggaattcctcaatgaagtctgaagatgcatgtttcccagcattagtttgatttcccaatgtgagcaagaaggaagtatatacagtaaagtaaattcaaggatctgttaaatctggtaaaagtagatcaaatcagagattgacagcctgtggagggtgctgaactatacagaattagacacaactatgtcattattttttgtacctactgctcagaataaaaacacttgaaatatgaaaa

SEQ ID NO: 270113 - DNA, 429 bp, Homo Sapiens
aaataggtggagtgcaagaaagggaaggtgactggcggagtaaaagactgttatcataggatgagacatttgaattttatttcagaaatgaagcacttctaggtgatggatgataaagttcaggatgtggccctgggagcttgtgtgtcaaagtgaaatggagctaaaggtcattggtgatttatttattttttaaggaggtcagagaactgtaaggctaggttgttggttgaatatcttatatgctccctgaagccagactcatggaattacttgggatagagaaggagactgaatcttgtgccaacattttaaatgaatgtgacaattattaatattagttaataaccaacagtggatgctaccttgccaagttaatttttccttaggataattaggttgtttaatgtggagatcatggctatgggt

SEQ ID NO: 270114 - DNA, 478 bp, Homo Sapiens
gaggaatatgggaccaaaataaatgaaactttcaggaaaagatttaaacaacagagatcttaaaaataggaaattgaggttgaagagaagatggcaaggctagataataagtcaaaaacattatttttaaagaaacaattttctttaaataaatgacagatactttttgtgtattacctgatatgatagattgacagtatacatgtgaaaacagtttgggattaataagttcactttacccatgagggtggggaagtcaaggggaaagccagggctcagctggctatttacatctctgacctagggctcttgtttgaccctaaggtctgtcttgatggcagcagcaccaagcccagccgaaggagggcagtgtccatttcgcccgtgaacgcagcacatttaggccgccaagcagtacgggcgccggcacaatgcaggggagtaaccctaacccctcctaaattggctcctcgggtta

SEQ ID NO: 270115 - DNA, 646 bp, Homo Sapiens
tggaagaaccaagatgtaaagcccttaagaaaatctcaatatacacatgtctacacagtcgtatacagtgtcatgccacaaatgcaggcgctggacctcattccttgttaaaggttttgtcatatcaggttatgaagtaagattattatgtcattattgtaaatggcagcttaagtattccgttgcagggggcgccataacctactacgttctctggccttagggagtaaagttgttaagtgtttttctctattgtagacacaacaaatgaatagtgtttgtcttggtcaagactgactcctactcccgcctcctgccctattacaagcagctcacaccttttggaggctctggagacgcctgtccagcgagctccgagattccgggtgctgaacttccggttttacttagcctagttgctgtaattacttctcttgaaaagcaaaagggcaatcttaattgttaaatgctcttataaagtacatactctgggatccttgtaagatgattgtactgcaacctttatgcactttttacttctttctctttttgttctttaatttgtttgtgtaacagagtaagcaggaaattcacaggaggtctgctcggctcagaaacactaaatacaaatctgctccggctgctg

SEQ ID NO: 270116 - DNA, 481 bp, Homo Sapiens
  misc_feature (19)..(19): n is a, c, g, or t
  misc_feature (120)..(143): n is a, c, g, or t
  misc_feature (385)..(385): n is a, c, g, or t
  misc_feature (410)..(410): n is a, c, g, or t
  misc_feature (415)..(415): n is a, c, g, or t
  misc_feature (427)..(427): n is a, c, g, or t
  misc_feature (442)..(442): n is a, c, g, or t
  misc_feature (467)..(467): n is a, c, g, or t
ttcggcacagctcggcgtntgtggtgcatgcctgtagtcccagccacctggaaggcagaggctgcagtaagccaagatcgagccaccacttcagcctgagtgatggagcaagactttctnnnnnnnnnnnnnnnnnnnnnnnncccaagggtaatcaaccccaattcaagactccattactttattattcaataagactcacaatgttgacgagaactaatctacaagtgattaagaaaataaaaataaaacaggcttatggtgatgattggccaagtaaataaacacgctccatcatcatcacagtgttcagaacaggcttccagggcaacactgggccaggaagtgaggagaaattaaagttccacgggtaaaacctgttaanttaaaataaaaggccgttcatgggnggggngggtctggaaantcaggcacattttantcattaaatgttttgttggggggtngtggatttgaagtt

SEQ ID NO: 270117 - DNA, 511 bp, Homo Sapiens
  misc_feature (496)..(496): n is a, c, g, or t
tcgtgtcgtcgctgctggcacttcaggctctgctgctcccactaggtctggatggaggataccttaaagtgaaatgacagaccaggagaataacaacaacacctcaagtaaccccctttgcctgctcctttttggctcccctggctgatgcccaaacagtttgcggcaatcccaaaaagagcagctgaagcaacaatctgatgaactccccagctagccccagatgactcggataatagcgtgtcagagagcccgggatgaattcgattactctgtggctgagattagccgctcattccgatcacagcaggaaatatgtgagcaacttcaacatcaatcacatgatccaaaggatcttccttatttactctgggacaacagtgatcccagcttgaaaagcgggaatggcatccctagccgttgtgtgtatttggaagaaatggcagtagagctagaagatcaagactggcttgatatgagcaatgttgagcaggcncctcttcgctcgctt

SEQ ID NO: 270118 - DNA, 434 bp, Homo Sapiens
  misc_feature (11)..(11): n is a, c, g, or t
  misc_feature (22)..(22): n is a, c, g, or t
  misc_feature (32)..(32): n is a, c, g, or t
  misc_feature (48)..(48): n is a, c, g, or t
  misc_feature (315)..(315): n is a, c, g, or t
aagctgtaaangaacctccccnactaaaaggncaaacgctgtccccgnacaatggaggggagagtcttgcgtcctggggaaagtggcttctcctttgttcctggaatggaaaaagtttgggaacaggcaagaacccctgcagtggacacctggggttggtctaaggggacaggaaaaaaacatgagcagggccctttcctgagggcaccctgaaaaggtctaccttaaaggtacttcttgatacaagagatgccagttagaccattaaagggcttcaaggattctgacagagggctcctagacatgaaccaaagncggtgcccctcgactttgacttcgaactctcaaataaatgaccagagaaatgtcaccttcatcgtagcaaactggctctttttctagggttcaggtgctgaacagaagcttacttccct

SEQ ID NO: 270119 - DNA, 448 bp, Homo Sapiens
tcaaacccttgtagtcaacttcagaatcctcaactgtcatccccacactaccctcctgatacactggtgatctagactaatgaaaggaccttataccacttactcaagttaagtacatttagaccaaaaataaagaataaagtgctcatcccaatagaaccaatgtcttctgactgtggttagctgctcactatcgaccaacagaagaatgctacaagaaggctgtgatgcagatctgggggatgcagcctaaaactgtggagcgtgctatgcttgagaatgcacagtgattctcagcttgtcagagtatgaatgagttcaaagctgacctcagagagggtactgaaattatgttaacatcgttttcctcgtttgttttttaatgaatgtctgtttatatactatatatattttgaaattatatatctcaaaataaatatgaaagctc

SEQ ID NO: 270120 - DNA, 331 bp, Homo Sapiens
  misc_feature (137)..(227): n is a, c, g, or t
caacattaatattttttattagctactacagcttagagtagctgctatgggagtgtggcctttttgattaaatactagctgatcaaccctagaatataaattcttgttttataacatttagatttaaataacaatannnnnnnnnnnnnnnnnnnnnnnnnnnnnnnnnnnnnnnnnnnnnnnnnnnnnnnnnnnnnnnnnnnnnnnnnnnnnnnnnnnnnnnnnnnggtaaatatggctggactttgctggaaggtatttaaggcaagttacaggatattatacaaggtaaatattttggggcacaagcacacttaatggaaacagtaaa

SEQ ID NO: 270121 - DNA, 400 bp, Homo Sapiens
  misc_feature (118)..(118): n is a, c, g, or t
  misc_feature (215)..(215): n is a, c, g, or t
gcttccctgaaacctccctggaaaaaaagcctcctgccctgaaaccacgtgaactgtcatcaccctggcaaccccagccccagcctcagccctgccccctttccctccttccctggantggtggcctacagaagcttggggccaacccctggctcctctttcccccagcttctgtctgtctcactgtcttccctcccctcccccagctgaggtgntgccctcaggccctggtgctgccttggagggctgggggaaggagtgtgtggaggagggaggagggtgaagactgaggctaggtgccagaatggactggagtgaaggcgtgtctagagtgtgggctggctgttgtgctggaaagctggggacaggttgatggtaataaactgctcaatgaccagaa

SEQ ID NO: 270122 - DNA, 385 bp, Homo Sapiens
  misc_feature (19)..(19): n is a, c, g, or t
  misc_feature (60)..(60): n is a, c, g, or t
taaaagaacccgtaagggnaagaaaccctatgttggagcaggtaggaaacagcatccccnggacagccccggattccgcaacaagcagttaaaagtatagagcctgcccaggtcaggggatggttactttgtgtaaactttgtagaacatttacaacattccttagaagtggtgaactgatgcccacctgaagagtctatactgaagcctatgaccttccctgttcccccaactgaggactcttctccttttaatcaaagcagtcaatttaattacatctacattgagaaagtatcactagatatcttttgctatcttgtttcctaggaggaaaatagatcataaagaaatgtgtcatataatccctgctgtcaaaacaaaataa

SEQ ID NO: 270123 - DNA, 197 bp, Homo Sapiens
atgagccaccacgtccggccaaattttacttcttaaaagtgcttttctctcagtgatatcaaggtcttctgtctactattataaccataagcttctttaggcattaaggagggaaaatgtttaataaaatgtaattaaactgggatggaatggtcagtgtatttaaaagtaaatatacttaaatgtaattaccgggg

SEQ ID NO: 270124 - DNA, 263 bp, Homo Sapiens
  misc_feature (248)..(248): n is a, c, g, or t
tgagttaaggtactgctatagttgaatatcactactacaaaagttatctgaataacttcctatatactctctttcaagatggggtgttatacataggcaacaactgggaaaacaaggaaactgaggttttaaaacaaggaaatgtgggcaacagggaggggatatggccataactaggaggggggaattgttcagggggccgggggccaattcaaatgtttacatttattaaaatggtcccataaccnttaggggaaggttta

SEQ ID NO: 270125 - DNA, 398 bp, Homo Sapiens
  misc_feature (349)..(349): n is a, c, g, or t
ttttggaaagggcctgccccttggcaaagtgaggtttccggagaaatgactgttgttccccaaaacaagagggaagctgggctggaagcacccactattccttctttaggcatcttgttacagagagaggcagggtcttcactgacatattaaatcctgttccctgaaccagcccctccctcttctgctcccacttcctcacctgtgcagagtcattttcaggtgttagccttactgatttgcactgatctttttgttccctgagctttttaaataccctgtgaaaattttctttcctcccttggtcatcatgcatctaattgtggggaaatgtttgtcaaaccaaacngcaaagcagcatggtgtagttgagaagaataaacagagaagactgggat

SEQ ID NO: 270126 - DNA, 408 bp, Homo Sapiens
  misc_feature (73)..(73): n is a, c, g, or t
  misc_feature (93)..(93): n is a, c, g, or t
  misc_feature (124)..(124): n is a, c, g, or t
  misc_feature (139)..(139): n is a, c, g, or t
  misc_feature (206)..(206): n is a, c, g, or t
tttgccaaaattggcccaaggccttggcgtcttcttttgggaaaaagccagagtgtgataccaaggcagagcntgcagcaatccatgcctccntgtgagcccaccatgagaccagaatcactgntttaaagggaacaangggatgttcactgtatgcctctgagcagagagcagcagcagcaggtaccagcacggccctgactgantcagcccagtgtccctgagcagcttagacaagcagggctctctgtatcagtctttcttgagcagatgattcccctagttgagtagccagatgaaattcaagcctaaagacaattcattcatttgcatccatgggcacagaaggttgctatatagtatctaccttttgctacttatttaatgataaaatttaatgacagtttg

SEQ ID NO: 270127 - DNA, 737 bp, Homo Sapiens
atttcggcacagcgaactttggctacacacagaagaagagagatggggtgagagctaaaggaatttatccgagaacaactggagctactccagaccaccggagcaatccaagggacattgccactgactgtccagaaggtgttggcatcccaagcctgccatggggccattaagtttaatgatggcctgagcttacaggaaagttgccgccttattgaagctctgtcctcatgccagctgccattccagtgtgctcacgggagaccttctatgctgccgttagctgacatagaccacttggaacaggaaaaacagattaaacccaacctcactaaacttcgcaaaatggcccaggcctggcgtctctttggaaaagcagagtgtgataccaggcagagcctgcagcaatccatgcctccctgtgagccaccatgagaacagaatcactggtctaaaaggaacaaagggatgttcactgtatgcctctgagcagagagcagcagcagcaggtaccagcacggccctgactgaatcagcccagtgtccctgagcagcttagacagcagggctctctgtatcagtctttcttgagcagatgattcccctagttgagtagccagatgaaattcaagcctaaagacaattcattcatttgcatccatgggcacagaaggttgctatatagtatctaccttttgctacttatttaatgataaaatttaatgacagtttgaaaa

SEQ ID NO: 270128 - DNA, 394 bp, Homo Sapiens
  misc_feature (305)..(305): n is a, c, g, or t
  misc_feature (327)..(327): n is a, c, g, or t
  misc_feature (332)..(332): n is a, c, g, or t
  misc_feature (337)..(337): n is a, c, g, or t
  misc_feature (351)..(351): n is a, c, g, or t
  misc_feature (357)..(357): n is a, c, g, or t
  misc_feature (364)..(364): n is a, c, g, or t
gggggaggtggaggtttacacttaagtgataatgattaaagtagggttgggtgagagaaaatcctactcctatatataggtatttataatcaaggtcataataaaaactgatattcttaggaaataagatgcacaaagccagtctagcaccctcagtggtcaagagcacgattctggttcactgactttcccgaggcatctttactattaatggagtaactgcttcagatgaaaagacacaaatctcaaacattagtttttttcaaagggaaaaaacagactgggtaggttcttacagctaaaantactctattccattccctttcnggggntaacnttttaggaaactgnttgtcngttttantatggatcccccctggttaggccagtttgt

SEQ ID NO: 270129 - DNA, 946 bp, Homo Sapiens
ctttttgcttcttctgaactttagatctccataacacatgtactgtagaatgtgatggaaaagcattgatgagaatttattggcagttcagattgtgttttcccaacttaggctctttattaattggttaaggttttctccaaaaagggcatttcaacaatgggaattatttaatgtaacagtgggcacagattacttatcttccttctctgctttgtgactcaccagcagtaacacacacaatccacatcttgtgcacctcaaatgaacagacttggtttccttgctttcttgacatttccatgactgtttcacatacaaactattgggtgaggtttttcagctgttaccgacccacgtccttgctgtctctgtgtggtcctacaaaaactgtccattcccacccctttgctttgccatttgcaagagtctggaattgtcaggtctcagcttcgaaaagtcctggttccactgacaggacacattctttagtgggaattaagacctacaaagtctagtttgtatgtaggtatgaagggaattttttaaataaattgaaaagctgtgaacagcattagaactttgtctatttcttaattttaaaatatgctgatatgccttaaactgtagttgtagatccttgtcattttgctgtttgaaaataaccaatgtgttttctaaaactgtcgtgtaatctactttcattgttaatgcagaattgtcatatatgtaagctgcatgttagacatttgtcttttttaaactaaagtaattgtattgatgtgaagcatatcattttttcaaatatgaaagtgatcacttagcaacatgcttggtaatttggcatctgttaaggtaggagagtggtgaacagataatctatgcatatatcactagtgccaagacataaagcgggggaaaatatatttttacccaaacattaaaa

SEQ ID NO: 270130 - DNA, 318 bp, Homo Sapiens
  misc_feature (289)..(289): n is a, c, g, or t
  misc_feature (308)..(308): n is a, c, g, or t
tagagagctagcaccatgaaataccctgctgccaaataaccttccccaaatacttgtttttatcatacttcttccttgcttaaaataaaatgataaaacataacaggatatagaatattcaagatttttttaattccagaattcaataattaagagaaacaatgtttttatatgaatgatgaagaaatatacatgtgtatatgtaacataaaagatattttcacgggtaagcaaatatatatataaagccctgtaatagctcaccatgggcagcttggagcaatagttngtattaagcacaggttctntttttggacg

SEQ ID NO: 270131 - DNA, 463 bp, Homo Sapiens
  misc_feature (443)..(443): n is a, c, g, or t
tgtaagatgttcacaaatatcacattaaaaatggagaaagatattgtattagttcattttcacactgttaatacagatatacccgagactgagtaatttattaagaaaaagaggtttaatgcactcacggttcacatgactggggaggcctcatagtcatggcagaaggcgaaggagaagcaaagtcatctcttacatgtcagcaggcaagagatcatgtgcaggggaactgccctttataaaaccatcagatattggggagacttactcactgtcatgaggaacagtgcaggaaaaacctgcccctatgattcagttacctcctgatgggtccctcccatggacacatggggattatgggagctgcaattcaagatgaggtttgggttggggagacagccaaaccatattcaggtataaacctcttttaaaggctgtaactnttaagggtacacagtgcctt

SEQ ID NO: 270132 - DNA, 663 bp, Homo Sapiens
  misc_feature (16)..(16): n is a, c, g, or t
  misc_feature (359)..(359): n is a, c, g, or t
  misc_feature (408)..(408): n is a, c, g, or t
ggtcagagacttagtntaagaaaattgggaatattaaaaagaaacaacattgtgactggtctatgatttatattactaatagtaaactgccattgctgaacatgcttagaaaacattttaaagaagctctgtagaacttaggctacaagactacaacctgtatcacttaaggaagttattatgctcataacattgccaactgaaggaatgtgcctctgctgacttgtacccaggccagcccacaccacagactgcagtcaagtcttctctgcatgtcttcatcagccccccaccctctgtttattaaggccacatggagccagcccgggaggaacagggctaggaaggaggggcgtggnatccaaggaacccagtacaaatcacatgcaattcctcactgtctctaanttttattctccagtgaagatcaatgtaggagagaaagataaatgcaaggagggcaccttggggagttaagggaaagtaatggtgctgactgcatgctctgggagttgttgtcttctcatatctgtgctagcagggcaattttcttcttgcaacaccacattcccctctaccttaacagtggatacctgaacagtttattttgccatttaaaaagatgcagaatactcctctcaatccttcaatcatacagattac

SEQ ID NO: 270133 - DNA, 231 bp, Homo Sapiens
ccacagagtaataataaactcattcaacattataaaaatacttttccaactacttttacatgacttaatgtttccaattatttgcgaaaccatgtccccgcaggtcttagctggtccttgtttaagattcttaatttcattttggcaatatctaaatttttatttacatacatgtgtactaaagcattacctatttttatgggttaaaacatgaactttagctggggcatg

SEQ ID NO: 270134 - DNA, 138 bp, Homo Sapiens
  misc_feature (86)..(94): n is a, c, g, or t
atgtccctgtggattctctctctccatatttagaataatcgatattaaaactgagaaattagaaagcgtatttatcaatccctttnnnnnnnnntcaaaccattatgcagtaacataaatttcataatttttcattaa

SEQ ID NO: 270135 - DNA, 733 bp, Homo Sapiens
tgagactgtgcgttcctgtaccagcgagtccacagcctttgtgcaggccatgatggaggggtcccacacaaaagcagacctgcgacgatctcttccagaaggctgctaagaagcaccagaatatgtaccgcctggccatgaccggggcagggatcgacaggcacctcttctgcctttacttggtctccaagtacctaggagtcagctctcctttccttgctgaggtgctctcggaaccctggcgtctctccaccagccagatcccccaatcccagatccgcatgttcgacccagagcagcaccccaattcacctggggcgctggaggtggctttggccctgtagcagatgatggctatggagtttcctacatgattgcaggcgagaacacgatcttcttccacatctccagcaagttctcaagctcagagacgaacgcccagcgctttggaaaccacatccgcaaagccctgctggacattgctgatcttttccaagttcccaaggcctacagctgaagcccttaggtacctgtgttttgtctgggaactcggaggccctccccctcccccagctcagaccacagaggtggcaagagaagggctgaagctggaagactgttcatgagggacttgtgtgacctgctttgaaatgtgtgactctgctgagtgacgtaggctctgagatagctgtccacgcccacgtgtttgcttggaataaatacttgcctgaga

SEQ ID NO: 270136 - DNA, 490 bp, Homo Sapiens
  misc_feature (302)..(302): n is a, c, g, or t
  misc_feature (316)..(316): n is a, c, g, or t
  misc_feature (396)..(396): n is a, c, g, or t
  misc_feature (439)..(439): n is a, c, g, or t
  misc_feature (455)..(455): n is a, c, g, or t
aaggaaaagtgggcgcaggggacccgcgtgcagcatacggaggacccgcgccggcaccagcctctgagttccctcagtatttatcgatcattatcgggcatttctgggagagcgggatgtggcaggacaatagggtaatagtggggagagggtctgcaggaaaacatgtgaacaaatgtctctgcatcataaacaagttagagaaaaaagtgctgtgcttttgatgtgcatatacataaacatctcaatgccttaaagagcagtattgctgcccgcatgtcccacctccagccctaaggcgnttttcccctgtctncagtagatggaatattacaatcgggttttacaccgaggacattccattggcccggggacgaggcagggacacagatgccnttcctctttatcttcaactgccaaagagggctttcctttcctnttttaattaatcctcntcagcacagaccttttttggatgttggggttgggt

SEQ ID NO: 270137 - DNA, 445 bp, Homo Sapiens
acaatgctgtatttctttagaaccttcctattccgagtgtggaccctgggcccagcccccatagacttcccccggggacttgtcagaaatgccataattttaggcccccacccccagacctgttggacccagaatccttcatttaacaagatgccccaggtgattcattcatgtttgagaagctctgctttaaatcactaaagcagttactgagtaattactaccatcatgactctgaagagctcctatagccttcaaatgcacctaactctactctaaaggcaaatgtcctcactgggaaatctgatctgctgtttcagagaagtgcagggctacacagtgtcttacactcctatctattgatgtttcttggttttgcctggtaatctgctgcttaaatggattatttgatgacatattgatattaaaacagtcctatttttag

SEQ ID NO: 270138 - DNA, 343 bp, Homo Sapiens
gttgattgacatttgagtttccttttcctttctggggctatcacaaataaaactatatgaacattcatgtctttgtatagacacccagtcatgtgtccgttaacgacccaggatacattctgagaaatgtgtcatgattttctcattgggcaaacatcatagactgatggtataacttactacacacccaggctatatgatatagcctattgctcctaggctacaaatctgtacagcatgttactatactgagtactgtagacagttgtaacacaacagtaagtgtttgtgtatctaaacctatctaaacaaaaagacacagtaaaaatgtggtatgaaagat

SEQ ID NO: 270139 - DNA, 425 bp, Homo Sapiens
ctcaaatgtatctctcattgattgcaggatttctgcacgtggccaatacataaacacagggtcaggcagaacatgcagggcctcaggactgtgcaggtttgagctgtggccttcgctgggggatgtagggagtgaggctctgtttatgttcatattctttgaggtgtggctgagggaaagttggatttgttcttcagggcagggttctcagccaccctggctgggtgtgtagcttttcctccgaaataaggatttctgtgccttgggggacaccaatcatgggccttttacttcccgaaaatctgggaaggcaccatagccatgagttacaataaatgtttcttgctgtttaggacagataggcacctctttagggaaatctgccccggatgacagccgcggttcccgtttaatttgtgtctccc

SEQ ID NO: 270140 - DNA, 327 bp, Homo Sapiens
caagtatttggcagtcttggagggcagaaaaggaggtggggaagatttttaaataacattttttaaaaagtcacattgtcctacaataccgatttttcttgcatatttaggaaattgagggtttttttctaaaacatgcggacatatgggaaataggatgcaacatttgcactaatgtttcagacacagttagaggtttccaagagattttgcgctggggaggctgcttgctacaagctcccaaagctctgggaggacatagtattcattcctccctcagcagaagcggtgaggcaagaagctctgggggagcacccagcgttggac

SEQ ID NO: 270141 - DNA, 419 bp, Homo Sapiens
  misc_feature (329)..(329): n is a, c, g, or t
  misc_feature (399)..(399): n is a, c, g, or t
attcggcacagtgctgtatgctttacactttcgagttaaatactattcttcagaaccaaacaaccttcgtgaggagtttacaaggtacctgtttgttttacaactcaggcatgacattctttctggaaaattgaaatgcccttatgaaacagctgtggaattagctgctctctgtctacaagcggacttggtgtgagtgcgagcttccagaacacacaccagagcttgtgtctgagtttcggttcattccaaatcagacagaagcaatggaatttgatatcttccagagatggaaagagtgcaggggaaagagccctgcccagggcggnaactctcctatctggaatgaaagcgaagttggctgggaaatgtatgggggtagacatggcacgtttgttnaggggggaaggagatgggct

SEQ ID NO: 270142 - DNA, 477 bp, Homo Sapiens
  misc_feature (324)..(324): n is a, c, g, or t
  misc_feature (350)..(350): n is a, c, g, or t
  misc_feature (439)..(439): n is a, c, g, or t
gtcgactggccaagccggtgctgtgcctcggaactctctgcacagccttcctgacaggcctcaaccgggtctctgagtatcggaaccactgctcggacgtgattgctggtttcatcctgggcactgcagtggccctgtttctgggaatgtgtgtggttcataactttaaaggaacgcaaggatctccttccaaacccaagcctgaggatccccgtggagtacccctaatggctttcccaaggatagaaagccctctggaaaccttaagtgcacagaatcactctgcgtccatgaccgaagttacctggagacgactgatgtgtncacaagctgttttttaaaatcatctntccaattctattaatttcaaaacacacagttggctcaatgttcaaactgtggatggacaaatattacgttttatcctaggttaggaggntaatgtttttgttacatttttttgtattgaggggaggt

SEQ ID NO: 270143 - DNA, 431 bp, Homo Sapiens
  misc_feature (16)..(16): n is a, c, g, or t
  misc_feature (58)..(58): n is a, c, g, or t
  misc_feature (72)..(72): n is a, c, g, or t
  misc_feature (81)..(81): n is a, c, g, or t
  misc_feature (86)..(86): n is a, c, g, or t
  misc_feature (229)..(229): n is a, c, g, or t
ctactgtaactcccanccctaaacagagtgagactcctatcctcaaaaaaaatcaatncagacaataagtcnaagccaagnaatgnatgtccataagaggttggtagacttaaaaagctacagaaatcttgttcctcccactgagaaaactattgaactgtcaaaaacttgtctgaagtaactattttggaattctcggagtctagttaaacactgggaagcatccaangggaaggagtttgataaagaggatgataaattttggttaatgttggtgaatttcagcctttccactcaataataactattttccataccccattattgcagggatccatgggaactgctgcccatgttcttgtaatgaattcctgcagccagggtgaacaataagcacctttttgtccaaatatcagggtatgaagctcatg

SEQ ID NO: 270144 - DNA, 904 bp, Homo Sapiens
acgatccgtggcggaccagcagatgtaaccaaggtgcatcccgggcctgatggatgcacctttttgacgctgccgggattcgaacccccactgtgggacggaccccgcataataaccgtttgctccccccccacaaggaaaatttccaaataccttgtccagaatctcgacattgtcgcagcatcctattcactgctggccaaggacagtcactctgctcatctctgaattccccactccgagggaaggctgctcctacgtttcaatatcagagtataaatgattaaatatttaagggctgaacatcatccttcttataatactctcacaatgagtcatatgataccttgtaggaataagcaagactttgcaggggaattaactaaaataactatattcattttcggcaactcatgtaacattacattgaaactctaacctcaaaccgccagctttgaggaagttttcacagaaggatttggcacagcttctggccatgtcatcatcagctgttggcatgagtttggagcttagaacctagggaacagataagcacaattattcatcccacacattttccagcagaaattactccctttactaaataaaacattccagacaacttgagttagaatctctttaaatgttgcacactgtttttcccccagaaatatgtagaagctgatgtttcacgataaaataatcacattttccctattctatttactttggaagaaaaatctttccgttctagagaaagctggtgtgttcttttcatgaaactggcaaacatgaaagtctcagaccctcaggcttagataagaacagataatttcatgtgatatgctagatatattctttagaaagatatacaccaaagttttataaaacagcccctcgtgcc

SEQ ID NO: 270145 - DNA, 660 bp, Homo Sapiens
  misc_feature (413)..(438): n is a, c, g, or t
atgacagttcgagagtcaatgtcatacatgatcactcagacacagaaaaatagctgtgattctaattaatcaatcaatgtgcaaaaataaacttaaagcaaaatagtctgctgaactcttggcacatcaattaattgattcctcgcgacatcttctcaaccttatcaaggattttcatgttgatgactcgaaactgacagtattaagggtaggatgttgcttctgaatcactgttgagttctgattgtcgaagaagggttatcctttcattaggcaaagtacaaaattgcctataatacttgcaactaaggacaaattagcatgcaagcttggtcaaactttttccagcaaaatggaagcaaagacaaaagaaacttaccaattgatgttttacgtgcaaacaacctgaatcnnnnnnnnnnnnnnnnnnnnnnnnnncaaatagatttttgattcagctcattatgaaaaacatcccaaactttaaaatgcgaaattattggttggtgtgaagaaagccagacaacttctgtttcttctcttggtgaaataataaaatgcaaatgaatcattgttaaccacagctgtggctcgtttgagggattggggtggacctggggtttattttcagtaacccagctgcaatacctgtctgtaata

SEQ ID NO: 270146 - DNA, 366 bp, Homo Sapiens
  misc_feature (223)..(240): n is a, c, g, or t
  misc_feature (352)..(352): n is a, c, g, or t
gccataggcggtggcagcggcagcagagaagggtgaattaggttagcccaatcgatttataaattggatcggatcacacaactgccttagaaatggattgaaggaaagtagctgactattatttatatttcataccttgtgttttcaagtgacattgtctggtggctctaagggtttaaccccttagcctaccatctctatagccccagctccctcacaggcnnnnnnnnnnnnnnnnnnagaggtcagttcccctccatctgcatacacctccctgtcttcaaataatgagatggaactaatttgttttacctaacctgatctttgggaaacaaacggaaataaagacacntcttggatgaaaag

SEQ ID NO: 270147 - DNA, 424 bp, Homo Sapiens
  misc_feature (45)..(45): n is a, c, g, or t
  misc_feature (109)..(109): n is a, c, g, or t
  misc_feature (117)..(117): n is a, c, g, or t
  misc_feature (413)..(413): n is a, c, g, or t
gaggaaaacctgaagccatgggagtgattaatccaacttatctgncctgagctagtgggggttgacttaggacttgaaccccagtctatttcccaggtccctgctttcnacaagcanccagcacttctgcctgtatagattagagcttagattgatatctttagatatccacacactgtaacttcaaagctggtaaaatattttaaattaaataaatagctattactttttagtatacaaaaactttaaatgttgggggatgaaaaagttatggtaagagattaaggcaatccaagcaacaataggaaaacattccgttattatgaagctttgcattgataagttccaaagaagatcacaaacgtgattccaggctgaaaagtagtaattttgtagacgttattgtacaatantctctcccagt

SEQ ID NO: 270148 - DNA, 508 bp, Homo Sapiens
atatctactgaagggcagcgtctgcatccgagggaaattcaacatgaaacaaccatcgttttagttgcactcagtctgtccatatgacatacacatgaagtgaatgtttccttatgttttcaggtctacaatgtttagtacatgtaaataaggaaaaaatttgataaatatggtaaattaagttatagcgtgtcatttgattcttattttgctgtctcttgttatttaattttcctaatgctccacatctaggttccttcctaggtggtgggaacaccttgcagacgtgtgtgcaccaggacacaccgcggcccaggcagccacaccgagaaagcacacatctccactgatggcagccacccgactctccagttaacctcttttactctttaattctgatttactgtgatgatttaataaagtggaaacacagcacttcagtgctatatgtttctctcattctcattatagtttataagaaaataaagttcaccctggcatctaataa

SEQ ID NO: 270149 - DNA, 538 bp, Homo Sapiens
  misc_feature (37)..(37): n is a, c, g, or t
aaaaccccgggaattaaaaccagaatgtgccatggtnccaccctttaaaccaaaatgtatattaaatttattaaaccctagttgtccacctttattttggaccctgcctgtgatcctcgacaggaaacgtgcccacagagcagtagtgccgcaggcaagacttttcagtgacgcccttgtggaacgcagttcatgatgtccctagcagctctcactaagggaactgtacattctttctttcttggctattcagaccttaccaagaacgttaaaggaaacaagtagaaatccagcagtggagtgtcctgtggtaagaaaacatgaactttatgcttcactgttagttgtttgtggaagttattttgtataacaccaaagctgttgtacatttccctactgcctgatttttttcatgtgtctgtgtttgtaatattgtatagtatcttgtgctaggtgaggaaattatttttaattttgataatttaatattcctagtgtgatcagcattgggagttgggtttcagtggggcatgtctat

SEQ ID NO: 270150 - DNA, 477 bp, Homo Sapiens
atcaagaagctactccaagaaactaagctcagtttttctgccggtatttccaaaatgtaagtcaaacatactttgttacttagatgatttttaaattgtgttaaatatttatagggggaaaagttgctactctaaggtaactatacaaaaagaagctattaggttttccaaattagggatacttctgtgccctcctcagtgtcaacacaggtcttttatggcacaaaacctttgcattctaattgtttcgcatgcttgatatacctccttcagtaacctgaaggtgatttacccacctcagtccccactgcctaagtctatgacttccaaattgctcagtaaatgctgagtggatatttagtaagaaacctatggacactagggacaaatatgtgttcattaaatatgcatcatatactctgcaagccacctggcctggtctcttcaaaaaggcagtattggccaggttgggtgtca

SEQ ID NO: 270151 - DNA, 287 bp, Homo Sapiens
  misc_feature (101)..(117): n is a, c, g, or t
tttgccggttataaaacgaaatattatacaaaacacattttgttgaaaaaagtcttaaaaagtacctacaaagcataaacagtattggattaataggtgannnnnnnnnnnnnnnnnctaaatttgccttcaatgaacatacattactttcaggggaaaaaagttaaagaaactaaatcattaacataaaggacaaatctgaggaaagtgtcagaatacaaagaagtggcatagagatgaaaacaataacagaagatgatatggaagacagagagataaaatatagg

SEQ ID NO: 270152 - DNA, 313 bp, Homo Sapiens
  misc_feature (190)..(190): n is a, c, g, or t
aaacatttattttcaaaaagattgaacactaagctatcaaattctgctctacagaaatgcatatgggataatcttattccttaccatcttgttacaaataaattctaaacattttctaaagatattcaaactgagttactacagacgagtgcctatcaagtgaagactctgtatagaggaagtcaggganttagggctgggcacggtgggctcatgactgtaatcccaggcgttttggggagggatcgcttgaggcccaaaaggtttcagaccggccggggggcaacacagtgagggccccatggcctctatt

SEQ ID NO: 270153 - DNA, 400 bp, Homo Sapiens
  misc_feature (16)..(16): n is a, c, g, or t
  misc_feature (275)..(275): n is a, c, g, or t
cctacaatgagccccnatttgagtccccctacactcccacccccgatgacaaagtgagccccctgtgtcaaaccaaaataccagaaagaatattaatttaaaattttgaaagaggagtgatcctgaaccttatatccttaaaaagatcattcctagggcatggtggctcatgccctgtaatcaagggctttgggaggctgagacaggaggatcacctgaggcccagttcgagatcaacctgtacagcatagagagactccatctctacaaaaagnaaaaataaatagctgggtgttgtgagttattcaggaggctgaagcagaaagatcacttgagcccaggagtttgaggctgcagtaagctatgatcccaccactgcaacacagtgagatcttgtctc

SEQ ID NO: 270154 - DNA, 622 bp, Homo Sapiens
ggagaggatagagaggtaaaaggtggcgacagtttcccttaggggtctgcctggcaggaaccacagctcaggagagttgtgagggatgggacggaggctggcgaccaggcgaggctaggcaggctcgggagacttttctgtgctcctttctacacatgccttaaaccttccttcctgtggggtgcctggactccttccccatctctggcagctcagagggtctctgctgctctcccctgggaaatcccctcatcctgccctctggctgcctcccaagctgggcttgttctctgagggaggttccggagactcatggacttggggctctgcctgtaggaaggaggctgggccggagggaccagccaccattgtctctgttcagccaagtgtgcaagtaggctgcccgccaagagggggcctctgctacccgcctggctgtgccggctgacacactgcctccccagccttcctgctaggccaccctcctcccttcccatgcttgtaaccagctctggggcttgcacctccacaaagtaaggttgcccttggaggccatgtttgggtcgtccgccagggcctagggctaggccccaagcaatgggtgcacaataaataacaggtc

SEQ ID NO: 270155 - DNA, 447 bp, Homo Sapiens
  misc_feature (425)..(425): n is a, c, g, or t
tgtctatagtaggaggcttaacattttagcagaatctgaacatctgagcatttagcctaaggcagttaactcctacaaagtgtccatgaaacaaatacatctgaaaaggcctatgctccaatgcagatctgtaatccatgagcagttttggagtacagatcagattaatgaagatactttaacaacatgccacctaatctgatgttaatagttaacgttacccctgaattggcaggaattgtcaaaggaaatagagatgcaagcttacatcaaatttaaaagtatggcaggatgattatgtaggataatgtgttaagtggttttcacagacaaattaactatggcacagttatatatttaacataatgccactgtattttaagtaaaactgggagggtaggtaaaagttaggccggggttatttntccagggactttggtttcccct

SEQ ID NO: 270156 - DNA, 543 bp, Homo Sapiens
  misc_feature (44)..(44): n is a, c, g, or t
  misc_feature (50)..(50): n is a, c, g, or t
  misc_feature (225)..(225): n is a, c, g, or t
gaagcactcaagggtcatctttaccgtcccggagctggccttgntgcgtntcccactagctgttaaacccaacatgccaaacctggaagaacgctaatacatcaagcattggtgtacagcaggccttcgcttattataacctctaaagagcagtgagcccatttcaggccctctgtgagaggtcacaaggacctctgaatgaaaaaatatcagggattcaaaaancccattctgcagaaatccaacagggctgatccctaaaacgtacatggaaatgcaaaggaccctaggatagtcaaaaccccaacattattttgaaaaagaggaacaaaaatggagactgtacactaccccaatttcaaaacttattcataaagttacaagtaaccacaataggcaacagacacataaatcaagggaacagaatggaaagccgagaaataaaccactacatttatgaccagttgattctgccaagggaattcaggaagaaaggatggtcttttcaacaaatgatgttgctacaactagaaatatgtgtgt

SEQ ID NO: 270157 - DNA, 392 bp, Homo Sapiens
  misc_feature (25)..(25): n is a, c, g, or t
  misc_feature (55)..(219): n is a, c, g, or t
attgccagttaagccgaatacacanccctaaatttccttcaattgttgtggcccnnnnnnnnnnnnnnnnnnnnnnnnnnnnnnnnnnnnnnnnnnnnnnnnnnnnnnnnnnnnnnnnnnnnnnnnnnnnnnnnnnnnnnnnnnnnnnnnnnnnnnnnnnnnnnnnnnnnnnnnnnnnnnnnnnnnnnnnnnnnnnnnnnnnnnnnnnnnnnnnnnnnntcacctattggttcatcagcatctctctgccctcttacaatatatttgttgaagaagttgtgttgtttaccttgtagagtttttcttagtttggattttggtgatagcatgctggttttttcatactattggttgtctctgtaatgcgagcagcttttgatctattaatttaa

SEQ ID NO: 270158 - DNA, 376 bp, Homo Sapiens
taggttaagccgggccaagacaagtccacagagacgagttaggaggccaggcaggaacccccggctgccagcctaataagtaagtgagcccaccgtcattgccgggggtagggaagaagagatggatttggaggttttggaggtgggttttataaggacttgttttctacagcaatcctttcttgggttttactttgctaggctaagcgggaagtacaaagatgaaattgaactttttccctcaaagagcacatctctttgtagataaaccatagtcaggaaagagtattttcagtatggttgataattccaagtaatgtgttagtgcctcatgttttccagacagacttccaaaagaggtcatgagtaaagttat

SEQ ID NO: 270159 - DNA, 519 bp, Homo Sapiens
  misc_feature (263)..(263): n is a, c, g, or t
aaagaaaaattgggcaaataattaacttcataagaaaatacatacattaaatgataataataatgtatacaagcacagaccacaggccaagaactcacctcagcacttcatgcacaggcagtcacactcccctcccagtctcaacccagcagctttccctgaaggtaaagcttcctgcatgggactgctgtgaatcacagaagtgccctagtggttctgagtcaactacaatgaatacgtcagtgatgtggcttggtaaagcnaccttggggacagagtgagacatcattatgcagcacggcaagggtgtcctgtgactaccgaactttgtgttcgttccgtgcagagacaggctcagtggaatcagagtgtgcttcctacccacagaggcagcatttggaaggaaaccatcaggcatgtggattttgaagctgatactttaggctactttaggcttatgatctgatcttatacatcagatacaaaatttctaaatacaagttaagaattataaaagcc

SEQ ID NO: 270160 - DNA, 205 bp, Homo Sapiens
aggaataaaggtgaattttgttagccattaaagcagtttgaacttatcctacccatcctcttttccatccctcaggagtaggggacatatatgtaatattgtagcccggggggtgggggagtgaggatgaggatggatgtgtgagtctggtttgtactcatcagtcctcactaatctataaccttcgttgaggtgtagtcattcc

SEQ ID NO: 270161 - DNA, 439 bp, Homo Sapiens
  misc_feature (240)..(348): n is a, c, g, or t
  misc_feature (403)..(403): n is a, c, g, or t
  misc_feature (409)..(409): n is a, c, g, or t
  misc_feature (417)..(417): n is a, c, g, or t
gagctagcacatgagcttcaataccctggccctagctgaattacagtaagtaaaaatcccatttttactaataatgaagttttaattacatagagtcaataatcacaacagtaatatgaaataggataacagtaatttgaagagagaatttataatcaataatactccatggataaataattgagaactgtaaaaattaagactcaatttgcttttttgtcaatctgaaggctacaactnnnnnnnnnnnnnnnnnnnnnnnnnnnnnnnnnnnnnnnnnnnnnnnnnnnnnnnnnnnnnnnnnnnnnnnnnnnnnnnnnnnnnnnnnnnnnnnnnnnnnnnnnnnnntgagcaatgcagccaagacctcatctcaagaaaacccaaaaaaagatttttttgntggttnaaaaaatntatatattccatattatatata

SEQ ID NO: 270162 - DNA, 442 bp, Homo Sapiens
  misc_feature (20)..(20): n is a, c, g, or t
  misc_feature (69)..(69): n is a, c, g, or t
atgcccccatctcccctacnattctcatgataaaacaaatatacaagcatgaatagaaaatccatgcgncaaattgaacagtggggattgcggcaggcccaggactcactaacataggcttccatcacaactgtttcagtactgactgagtggttaagttaaatattaaaagccagtgaccttatacaaaggctgggatgtaacaaaagcccaagagttttgcctaggactttcctgaaccttaaagcacgattaagtaagttttactggggggtctgaagagactccccaggcctccacaaacaagttgattgggggtctgaaggaactccccaaacctccatgatttagcaggagacaagataagggtaatcacctcagcacctggacccagttagattaagtaaatttactgaggctccagaggaaggtcttcaggact

SEQ ID NO: 270163 - DNA, 455 bp, Homo Sapiens
  misc_feature (429)..(429): n is a, c, g, or t
ggaattctccctaggtctcctgggagtcgagtcccaattcttggcttaagctgttttagtcagagaccacccaacttagcgtgcaggtcaccggagtgggtggagggtcagaggtcgggtcttcggccctgagaagtagaaatgcaggggccgtgctgtccctggtcccccagggaacagcaaggaaggaactgagccttctccagcagggcttcctgtcccgatgcttctgtctccactcggctttcccaaaaggcggcacccagctccttcaattcgaaggcattttgccttcccacccctcgggccccttcaagcccaccatcttgtttcttgagtgttcgcattagggattttcatttgtttatttttaaaagtgtttttaaattccttttgtttcccaggagaaaacaacccttttaggttttngggaagggggggatcatggaggaaaa

SEQ ID NO: 270164 - DNA, 491 bp, Homo Sapiens
  misc_feature (465)..(465): n is a, c, g, or t
tattctctgtaagcttggctaaaacttcccttttatattactcaccttaaccaatggccataatatcttaatgctatcccaatccattatccataaaatttttaactagagctttttccaatagtcatctacaatatgtttatgttacttcctaatattaaaataggcattttggattccatatttaaagtgctcatttgagtgaaattcaaattagaaagaaagatattaaaatgcgccttaacaaaaacctctctttcagaatccctattccttgaatcttgggtttgaactgcttattaaaggcaggcctaaactaatttgtgagaaatgaagaagttttagtatataattcttttaaaaaatatcaattacggctgggtgcggtgctcaggcctgtaatgccagcactttgggagccaaggcgggtgatcacctgaggtcaggagttcaagaccagcctgncaacatggcaaaaccctgtctctact

SEQ ID NO: 270165 - DNA, 618 bp, Homo Sapiens
gaatcactcagcgtggctcctgattgcacttcgtggtggaaagattgaagttcagcttaagaatgaacatacatccaaaatcacaactggaggtgatgttattaataatggtctatggaatatggtgtctgtggaagaattagaacatagtattagcattaaaatagctaaagaagctgtgatggatataaataaacctggacccctttttaagccggaaaatggattgctggaaaccaaagtatactttgcaggattccctcggaaagtggaaagtgaactcattaaaccgattaaccctcgtctagatggatgtatacgaagctggaatttgatgaagcaaggagcttctggaataaaggaaattattcaagaaaaacaaaataagcattgcctggttactgtggagaagggctcctactatcctggttctggaattgctcaatttcacatagattataataatgtatccagtgctgagggttgggcatgtaaatgtgaccttgaatattcgtccatccacggggcactgggtgtttatggctttgccttgggttttctgggtaaccaacacagtggcccttttgctgttgttccctttggtggggacttccacct

SEQ ID NO: 270166 - DNA, 657 bp, Homo Sapiens
gaataccaaaaccttcagcaaagattgggttggtattaacgggtttttgtctcagaactgtattgtggatcccggagtttcccccaaatccatctacatcaaatttgtagaagtagagagggattttctttccgcaggctctttagttgagtgcctggaaaaagccattggataccccttaaaatttaacaactgaatgtcatccttcataaggatttgggctcttagctccttcttctctactcacttcccattacccggaccacccctcatccagatgccgccgtcagactctttcatgggaaaccctttcttcaattggggccagtacgacttctaaggaatcatagtagacttgggccagaaaaaacagccctcccctgaaaatgctcattttgagcaagcaagatatatagcgaacttgcatggtgggtcagctatttcttttttaaaaacagaaaaacaatttttaaatggattttagagccctaatataaacaaatgtaggtacattccatattggccaaaacttatactttgagtttcatatgaaattgaaaaattgtatttttttcccaatgtttcatttttacacatctctatgtctctatataagtaatatttccacccctgaataaataagcaatagataatggc

SEQ ID NO: 270167 - DNA, 293 bp, Homo Sapiens
  misc_feature (132)..(141): n is a, c, g, or t
ataggtgcaggaccagatggagttgaagaaattaaaagacattcatttttctcaacgatagactggaatgtaagtatagaatgaaaacttgcttgaaatatttctttataattaaaatatgtctaagtctcnnnnnnnnnncccctccaggaaactgtataggaagaggaaattcatccgccatttaaacctggcaacgggcagggcctgaaggatacattctattttgatcctgaggtttactggcaaaaactcccaagggtaggggggaaaatgtggaaaatcccaaatat

SEQ ID NO: 270168 - DNA, 394 bp, Homo Sapiens
  misc_feature (20)..(20): n is a, c, g, or t
  misc_feature (27)..(27): n is a, c, g, or t
taacaagcccttccccctcnaaacccnatttgcaaagggatgctgtgaaagaagtgttttgcccgtgtgtccttgccataattccatggcccagttttatgaaagctttgggaaggcactatggacagaagctggtggacagttttgtaactatcttcgaaacctctgtcttacagacatgtgccttttatcttgcagcaatgtgttgcttgtgattcgaacatttgagggttacttttggaagcaacaatacattctcgaacctgaatgtcagtagcacaggatgagaagtgggttctgtatcttgtggagtggaatcttcctcatgtacctgtttcctctctggatgttgtcccactgaattcccatgaatacaaacctattcagcaacagc

SEQ ID NO: 270169 - DNA, 415 bp, Homo Sapiens
agggggcaggtacctgtaccacagtttagccacaacagaaatatcgttgggctaccaaaagatgtcagtccttaaaaatgttggcaagcaaagaaatttttctctaagcacatcttagagatactttagtctaaaggcacagttgatcagattaaagaagctaagattacattttggggctggtctaatcgataaatatctatcagtggccataaagttttatttcagtgttttctggtgtaaagggattaattttatgtactcaagtctatggagtttgttttcttccacctttaatcacctcactcggcttgctggtgtgcagtgctcatgcaaaacgtcctaagggagtgccccacttgttttaatttacttcctctagcaaaaacacagctagaggaaacacaaatcgttt

SEQ ID NO: 270170 - DNA, 423 bp, Homo Sapiens
ttaagatggaatttcagatcaatgctaggttataaactgaaaccacaggtgtcatgcttcgaaccgttaattacctggcattatgccgccaccttgtggctgatttactttatggatttcacgggcgaaaactatgtgagtcatttcagatgaaaggagcagagccggatactgtcttgagaggatctttgagctgagcattgaaggataagtaggtgttttccagaggcaaatgaaaaggaacaaacatgtttaaaagaataaagtgaaagaacatggcccattatagggacaataagtagttcattaagtccagtacatattgaatatgtggtgaagtactagaaaataaagccagaaaaatgacaccagaatcatgctggaatccctttggtgattatgagtgagttggacttagtagtg

SEQ ID NO: 270171 - DNA, 648 bp, Homo Sapiens
tgaaacacataaccaaaatggtttgattcactgactgactttgaagctgcatctgccagttacaccccaaatggctttaatcccctctcgggtctggttgccttttgcagtttgggttgtggactcagctcctgtgaggggtctggttaggagagagccatttttaaggacagggagttttatagcccttttctactttcctcccctcctcccagtccttatcaatcttttttcctttttcctgaccccctccttctggaggcagttgggagctatccttgtttatgcctcactattgggcagaaaagaccccatttaaaacccagagaacactgggagggggatgctctagttggttctgtggtccattttcctctgtggccaaagacagacagacagaggctgagagaggctgttcctgaatcaaagcaatagccagctttcgacaaatacctggctgtctgaggaggaaggcctccgggaaactggggagctaagggcgaggccttcccttcagaggctcctgggggattagggtgtggtgtttgccaagccaaggggtagggagccgagaaattggtctgtcggctcctggttgcactttgggggaaggagaggaagtttggggctccaggtagctccctgttg

SEQ ID NO: 270172 - DNA, 743 bp, Homo Sapiens
  misc_feature (18)..(18): n is a, c, g, or t
  misc_feature (68)..(68): n is a, c, g, or t
  misc_feature (99)..(99): n is a, c, g, or t
  misc_feature (119)..(119): n is a, c, g, or t
  misc_feature (215)..(228): n is a, c, g, or t
  misc_feature (513)..(542): n is a, c, g, or t
aacttgggaggccacgcngcagatgctgagctgaggagtgaaccacccgggcagcaggcaaaccccanctctaccaaaaatacaaaaaaattagcgggncaggtgcgtgtgcccgtagngccagctactgggtggctgaggcgggagtatcacttgagccccggtggtcaacgctgcagtgagcccaagaccaggccccactgcactcccagccnnnnnnnnnnnnnntgtctgtttgcaaaaatttcattttcctatcaaaaatgcataattacagaatatttagcccagtcctttgagtaaactgcctttgccaattgtgaattaaggctgtgattaaaacagacaattccaaaaacaaaaatcccaaatataatccagtgcattttaactcatcctgcaaaaaatgttcaaaccatcactgaccacttcaaatatggacataacctagcccgagattcaaaggttattttcagattaaaattttaactgctatctttgcaattctattgnnnnnnnnnnnnnnnnnnnnnnnnnnnnnnaagaaggtatacacgaactttcggttttattctccaaagtaatgtagtttttcaactttccagttaatgtagtttttcaactttccagttaatgggtcaaaatggacaggtcagaagacataatccagaggatggcagtgaaagatcagagaaaggtttatgtgcacactggatcacagagagagaaccacaacctttttt

SEQ ID NO: 270173 - DNA, 323 bp, Homo Sapiens
  misc_feature (27)..(27): n is a, c, g, or t
  misc_feature (46)..(46): n is a, c, g, or t
  misc_feature (243)..(252): n is a, c, g, or t
ctgaaaatcgggtgtttgaaaacccancccggcccaacatggtggnaaccccaatctcctacctaaaaatacaaaaaaacctagcccggatatggtggcgggtgccctgtaatcctcagcctacttgagaggctgaggccaggagaatcgcttgaacttgggagcagaggtgagctgagtgcagtgagccaagaccatgccattacactcaagcttgggcaacgagagcaaaactctgtctcnnnnnnnnnnttagccagatgtggtgacgcatgcctgtagtcctagctactcaggaggctgaggtgggaggatcacctaag

SEQ ID NO: 270174 - DNA, 533 bp, Homo Sapiens
  misc_feature (43)..(43): n is a, c, g, or t
  misc_feature (352)..(369): n is a, c, g, or t
  misc_feature (408)..(408): n is a, c, g, or t
  misc_feature (425)..(425): n is a, c, g, or t
  misc_feature (448)..(448): n is a, c, g, or t
  misc_feature (476)..(476): n is a, c, g, or t
  misc_feature (483)..(483): n is a, c, g, or t
  misc_feature (488)..(488): n is a, c, g, or t
  misc_feature (493)..(493): n is a, c, g, or t
  misc_feature (498)..(498): n is a, c, g, or t
  misc_feature (504)..(504): n is a, c, g, or t
  misc_feature (514)..(514): n is a, c, g, or t
aagaaactgcggtaatcaaagcatatagagcacagctctgcgngttaactacttttaaaaagagggcattttatggagatacaaggtattccaaaagttcagtgtaattttaagctttgatacttgtagaaatataaatgctacaaacctttacaaaaccttgtctgaacatttttcttctgcttttttctttgagacagggtctgggatgtcgcccaggttgggagagcagtgacatgatcatgggcccactgcaggccttgacctcctggggctctactgatcctcccaccttaggcctccagagtgggctgggggacttacaggacacatggccaccatatccaactannnnnnnnnnnnnnnnnnacagggcaggggtctcactatgttggcctaggactgggncttggaactcccggcantcaaggcaatcctcgtggccganttttggggctcgaggggcaaaatttccnataggtngaggncgtanttaanttcggnattcaagtcnagggcgttttcccgtgtgg

SEQ ID NO: 270175 - DNA, 504 bp, Homo Sapiens
ggacaaaaaaataccaccacctcaaaagtaaaactaaaaacattgaaatgccataggtttgctgcatgatttctttcagttcaggatcatttattttgagacaaaagccagtttgtttgagatacttcaactcttaaaaataatcaaggcattgatttaggtaatttagaataagcccatctaaatctttttattatatccatcagaaaactgaggccctgaaaagttcggttgccttgtacaagctgacagaggtattaacattgacttttgggctcacaagccaggggctctttccaccagagtgtgtcaccagtgggcatctcattcatagggagtgggccagctctaatggaaggacaatgacccaactattttccagatttcttttggatggctcaaaaaaatctttatactttttttaaaaatgatttttaaagatctagtgctatagtttggtttatttgtcgtctccaaatcttatgttgaattttatccaaagtg

SEQ ID NO: 270176 - DNA, 469 bp, Homo Sapiens
  misc_feature (15)..(15): n is a, c, g, or t
  misc_feature (405)..(405): n is a, c, g, or t
  misc_feature (424)..(424): n is a, c, g, or t
  misc_feature (438)..(438): n is a, c, g, or t
ccagacttgtgaccnttagaccatacctctcaccccccaatgcctcgactcccccaaaatcacaaagaagaccctagacctataatttgtcttcaggtagtaaattcccaataggtctgctggagtgggcgctgagggctccctgctgctcagacctgagccctccaggcagcagggtcccacttaccccctccccaccctgttccccaaaggtgggaaagaggggattccccagcccaaggcagggttttcccagcaccctcctgtaagcagaagtcttcagggtccagaccctttccctgagcccccacccccaccccaatttccttgccttaaccaaggcaaggcaggcccccagcttaggggttcaggacaggggttgaggcttcattacaggattgttgnctttgattgggccccagcntttggggagagganttttattgtttaaactggggaggattatttg

SEQ ID NO: 270177 - DNA, 330 bp, Homo Sapiens
tacttagcttctttattcctgttgctctctggcaatattcttgatttttagaaggttttatgcatatcaaccagtagagaaaggaccccaaaaccaggctggcctatcacattctgtgccatttggtaatgcctgacaaaaacattttaattttcaaattgcttgattaaaatggcaaacagtttgaaaattgtatacctctatatcattcagttaaaaaacaataaagtgacattcttaaaaacatcaaggactttcccctcaagggcacacgagattgttttagttactgagaatctgtatcccttcctttttaactttttaaggaat

SEQ ID NO: 270178 - DNA, 462 bp, Homo Sapiens
  misc_feature (13)..(13): n is a, c, g, or t
  misc_feature (44)..(44): n is a, c, g, or t
  misc_feature (77)..(77): n is a, c, g, or t
cccaaggaaaaangggccccccgggggaccaaatgcccccaaanatggaaccaaccctggttaaaaataggtggttnaataaggtccccctgtcaaccctggagcctttatggatgccgtgccataattccccaatgccgtgtgttgttagggatatatatacgccttttcccggcaagcacaatgttaggttattttgatgccatttgtgtgaatggcacagtgagagcagttgcctattaaaattacgtattagaatcaacccccagatagttcagcacagaaaagcaatggcatgattagtagtatcgtctttgaagatgaaagtgaactatttggtgaacctcccaacttgatatagaggagtttgactactttagcagagtttttctgtagttcatgtcactaaaagtgaggtagccataacaggggtttggggttagagagggtgaaaggataaat

SEQ ID NO: 270179 - DNA, 373 bp, Homo Sapiens
  misc_feature (40)..(40): n is a, c, g, or t
aaactggttacccaaaaaaaccccccacatattatatgantcgatttatatgaaatgtcccagaacaggcaaatcccatacaagcacaaagtagattcttggtttccccgggctggagatggaggagatgagggaagttaaggggtgacagctgaaagggtgacagctaaaagggatggaggtttctctgagaggctggggaagatgtgtgaaattgtactgtggcaatggttggtggcacagctctgtgaatatagtaaaagccactgagtggtacaattgaaaccagtgaattgtgtggtatgtgaattatatttcaataaaaaaagtacatatctaattgatataaaaagactggactggaaaaaaaatt

SEQ ID NO: 270180 - DNA, 405 bp, Homo Sapiens
  misc_feature (25)..(25): n is a, c, g, or t
  misc_feature (34)..(34): n is a, c, g, or t
  misc_feature (47)..(47): n is a, c, g, or t
  misc_feature (215)..(215): n is a, c, g, or t
cccaacattgccccaaaatacagtncccctatcngccccacatgtgncctccccaagcgccttaaaatgtgacgggtgtgacctgagaaagggaagttttatttttaacctaatgccgaattttaaaagcccacatgtgaagtagttggggacccatactggatactgccagattgagactatcaaataaaaatgcccacaacatttagtcaagntggccttaaaggcacccaactactgatgtattcattttagactcatttaaaaatgagtatgttcactcatgagccaacagtgctctgctaacagcactaggccaaggaaagcttacagtcacagacatttcagtagctctttctctccacaattaaggaaaatggcaaactattcctattgctgttggtg

SEQ ID NO: 270181 - DNA, 607 bp, Homo Sapiens
  misc_feature (529)..(529): n is a, c, g, or t
  misc_feature (571)..(571): n is a, c, g, or t
ttccagaagtaaggtaactttactcagataaaacacagatggtagcagatagaggccacaagctcatgggatgccattccagagggcccctcacccacagaggagcccctgtaggaaggaggcccaggcccatccgcacagcaagtcccggtgaggggctctaacacacccccactccagcctctggtcatggacacagcccatagcgggcacagcatcatgatggaatggactctgcaggccacgcatggctcctgggaacccccagcccctcccttctcctcccagcctttccagctgtcttcccaccaggagggctcggaggtcacagcacggaacgtcttccaagagcccctgcctatatttctgcctggatgtaggcaggagctggggctggtgcaggagccagggcaggaaccagagatggggtcaagcaaggagtcctagtccaagcagggcctagactgcggctaaggctaggctggattctgtgctaagaaacagcatagaaacctgcaggcagaggctncggcccagcctgcggagcacaggatgcagcaggtgatttctngcccagcacacaagctccggccttatcacattttcc

SEQ ID NO: 270182 - DNA, 457 bp, Homo Sapiens
  misc_feature (12)..(12): n is a, c, g, or t
  misc_feature (32)..(32): n is a, c, g, or t
  misc_feature (42)..(42): n is a, c, g, or t
  misc_feature (79)..(79): n is a, c, g, or t
  misc_feature (82)..(82): n is a, c, g, or t
ccccataggggntaacacccagctggatcatntacctagaanagtgggcctcccacagagaggggtgtcctggtacctnctnctcccagccctgcagccccccttagaacccatcatttccttgtgaacccagcattacccaaattacccgacaccctcagtcaggccatctctgaccattgtacatcttttgttatgtagactagggttcatttagggttacttcttgtagaattctttttctgacccatctttaattgtataagaatatttacaatatactatttgggagaaagggaacttatgaagattattttccatatatttaaaaaataatagaaataacccaattgtgtaataaggttatagaagatttggtcctaagaacttcttttttatttccattgtgaaatagtcaagggaattgagcaagaaaaagattaaaactatgtaaaag

SEQ ID NO: 270183 - DNA, 679 bp, Homo Sapiens
ataatttcaaatttaagagctccacggttcttctgagcagttgagaaactcagaatgacatcatcaggtcacattattgtttttctaaaagtgcactcgtgaaatgtatgaagattttacatgaactacttaaagcaccaaatgttatctatccaacttcaactagtgataaaagcagtatctcagacagttttcaatgatgcccgtgaatcagtcccacagctcagtgtctgtaaaacagcctgaaagggtgggggatgtaggacagctctccgctgtcacttaaatgcagaaaggcagaaccttcccacatgcacatcagtgggggtgaggtgagaccaatcacaattgcttcgaggagaaaatggattcagagcttttcttaattctaaaagtgttactttttccaattaacaccaatttaaaggaagaccacatctggtcacagtgaacctgaaacaatgacttccatgcaaactggcttgcttctgacagatcctaaactatatctcaatgaggacctgaagagatcataagggaaaaaaacctaaatagctattgctatctaaaaaaaagtcagttcacagtaaacttgcattgtaacagtacaatgttttgagtggcttaatattgaaaataccccaggattttcactttattctttgccttaaataactcc

SEQ ID NO: 270184 - DNA, 367 bp, Homo Sapiens
gtgtgagccaccacgtccattctattccaagaacttttataagattttgtctttgtattcttcagagtttaacaactcctttgtggatgccattgggttctgacccaggaactctggaaatgaggatgtttttgatatggagtacacagaagctgaagctgaggaactgaaaagaaatgctgaggtaattgttttcattcctgagtacagttggtcaaattcagtgtcactcttcccactctttacttcaaaggcccccactttcagtgtccactgcaggttcattttggccctttcagtagccattagatggtctcattttctcttgtcatttgctgttcatttttcacatacaagatttaaaaaa

SEQ ID NO: 270185 - DNA, 455 bp, Homo Sapiens
  misc_feature (41)..(41): n is a, c, g, or t
  misc_feature (56)..(56): n is a, c, g, or t
cgggggttatgcccctctgttcccaattgttaatttacagnaacctacccaaggangccaacatggtcaaatcactttctacttcccaaattcccaccctaataacctgaacccaaacaatttcaaacaatgacaatcccattgcccccttcaaccccagcaggcgaactctgacagggaagttgtgacccaccagtcctcaaggctgagtggggccttattgctggctctcgcgctttctgggagtacctgggtgccttggcccagggcagtggtgacagcagggtggaggcagaggtggccccggggacagtgaccctatataaggaagggggcggtgccaggagagattcgtttggagattggttacaaggaagcgagggagagcagagcagagccctttttcagatacaacatacttacttttcaaatgaacaaaaggcaatttctatgtt

SEQ ID NO: 270186 - DNA, 647 bp, Homo Sapiens
  misc_feature (20)..(20): n is a, c, g, or t
  misc_feature (43)..(43): n is a, c, g, or t
  misc_feature (93)..(93): n is a, c, g, or t
  misc_feature (105)..(105): n is a, c, g, or t
  misc_feature (210)..(210): n is a, c, g, or t
  misc_feature (213)..(214): n is a, c, g, or t
  misc_feature (233)..(233): n is a, c, g, or t
gaacttgtgattacgcagcnacccaaggctgtaacaatctatntgttctcaaggcataatgagtccccaggttcgaagccgtccttccacccnatgcatatcctntgcttcaacagcagtgaggatgcctccaggaagtgtattgtactcagggcttacaaatccaaaactggcttaagtcctcggatggagagaaacttccaaatgaanaannagttgagctaaacactganaagtttagtattttacttaaaaattttcagacattttccaagtatctaggaactctttggatgtgcctgaaagtggtgtaagtgagaagtgatattactctactcctgagtttctttctgttcttcccttcacttggtctgctcaaagtatggactcccaagcttcactaaaaatcaaacctggcaattaatacttcaataggcataacaatgaaattggaaaagagctgaattttattaactttttaggtatgtcgattttatgctgagaaattcaccagtactatactggtggtatttactgaagcttgtttagaatcacaaaatgaatgttcttttattttaaaaccaagctgcattttagaaagatgtgaagctcggaaggaaatgcagacgtataaataagggggaagt

SEQ ID NO: 270187 - DNA, 531 bp, Homo Sapiens
  misc_feature (402)..(402): n is a, c, g, or t
  misc_feature (452)..(452): n is a, c, g, or t
  misc_feature (481)..(481): n is a, c, g, or t
tacttaaactagcttacatgagaaaataacattataaagacataggagtgtttctacaccaagaactggaggtattgtttggtttcatgaaggattaaaatctgtaattcaaaagtagactcaggcagctgcacatcaatctgtgtctttctctctggtactgtggactctatcctgtctgacttgctttgttcctgggcatcattcttgctctggaaaacacactttccctgctcatttttttattttaatgcttaggttcaatctgctcatttttccctacagcagaagacagcttactgtgttccagcaaacaacagagcctgaccagcctctctgaatatggggcccccttctcactcacaagtattcttaacctgggggtccatgtgggggtttgtngaatttggatagggattttaaaattacattttcatttccactaatctctnaaccgaaattccagtctttttcttccaantgtggatgtagggcagcaagccacagtgggaacttgccgaaccctattaa

SEQ ID NO: 270188 - DNA, 498 bp, Homo Sapiens
  misc_feature (43)..(43): n is a, c, g, or t
  misc_feature (50)..(50): n is a, c, g, or t
  misc_feature (133)..(133): n is a, c, g, or t
tgcgggcccaaccctcaaaactcctttcccaactcagaacaanaggaaanagaagcccccatgtcctctcccttcaatgctgggaaaggccaagcagcctcctgtttgcactccaaaaggaaagtccccaggncttccgcacaccctgggaagacggcgacttcgactttctgtcctgaaccccgaaagaggcaatgtcccctgcctccctatctaatcctgctgctcaaaccctggtcagagcactggggctcagccaacagcccctgggacaaaccgcatgacgtggagcaggacagccttgagcctcagtaccctcaacgctgacacagaggcacagagaggaaggaaatgctctcaggatcttggccaagaggaaagcactggactaagtcaaggagtcccctacagttgagatctcaaaatacgaccttctcaaacccaggaacactctctatggtgtctgggaatcgagcatccccaggcacggaacccggc

SEQ ID NO: 270189 - DNA, 436 bp, Homo Sapiens
  misc_feature (76)..(76): n is a, c, g, or t
  misc_feature (104)..(104): n is a, c, g, or t
  misc_feature (118)..(118): n is a, c, g, or t
  misc_feature (124)..(124): n is a, c, g, or t
  misc_feature (346)..(346): n is a, c, g, or t
aaccaagagccgcctttaaaaaataatccaagaacctcctttgaatgccgaaaaatttccccagagtggacagtancccacagaaaaattcccatttatatagnaaagctattatatnagaaancctaaaatatgagtttgccttcaaaaacttagcctggtttaaggaagtttaaggttttaggggagtgggagtgagtgaaggaggaggttgtagaagagaatggaggaggaaattgagaaaagacaagctgaacaaaggaagaatttatctgtgcctctgagactagttcttcccgggaatcttacccctaccactggactgttttttcaaaggcaaagatcncctattgttcaactctgcatctcccacacagcatatctaccactatgtagagagtagttgcttgttgcttgataagtgtttaacaaatgg

SEQ ID NO: 270190 - DNA, 611 bp, Homo Sapiens
  misc_feature (61)..(61): n is a, c, g, or t
  misc_feature (71)..(71): n is a, c, g, or t
  misc_feature (78)..(78): n is a, c, g, or t
  misc_feature (97)..(97): n is a, c, g, or t
  misc_feature (103)..(103): n is a, c, g, or t
aagaaaaacttgatagacctaatcaaaattcagattagatatttaaccaagctctctgganaaatgtttcnactcctncattcccattcgtattggnccattntcacactgctaataaagacattcttgaaactgggcaatttataaaggaaagaggtttaattgactcacagttccacatggctggggaggactcacaatcatggtggaagcaaaggagaagcaaagtcacatcttacatggtggcaggaaagagagcattttgcaggggaactcgcctttataaaaccatcagatctcatgaaacttattcattatcacaagaacagcatgggaaaaacccacccctctgattcaattacctcccaccaggttcttcccacaacacatggggattacaggagctatgattcaagatgagatttgggtagggacacagacaaaccatatcatggcatgtggataagattaggacaagaggagatacccacctcacctcaggtgcttcagaggaaaaatggatttgaattcaaggtaaaaggttataaaaaaatgtatttctcatgaggaataggagatgataaaaatgaatctgattggtgaatgtgaat

SEQ ID NO: 270191 - DNA, 510 bp, Homo Sapiens
ggagctggaaattaaataaagtcagtagtgtgacatataacatactgcactactcggaagttaactggtgtgccaacatttctaagtgaaaggaggctgaaaagtttaaaagctaagaaattccaagtgttgactgataattgtccttaaaatagtaatgaaggttttttaaaggaactttcagaacctgcttcggagtcatctgtcataggaagaataatttaacagggaatccattgggactaaaatcaaaaccactgactcttaacctctgctcaaaaacacattcaaaactcctaggcttcattctctcctcctcatcaaggcgcttgaggtatgggcctgaaagcaggctctcccccagagttcctgaggtgccaccgtgctgagaagaggcctttggaagaagtttctagctttactcctggatgctctcttctttcaggaagagatgcttttgccaactcaaatgatgccaggctttaggcatggctgaaacaaaacgttttc

SEQ ID NO: 270192 - DNA, 279 bp, Homo Sapiens
aacaaaggaagttgctccctaaaaaagaaccctggaactagttacaatgataaacagacaaagaaaaatacacattcatatttatagttacatatgtcatggctaaaaataaattattctaaattgtataaaaccataagatatacagtgataactcaatagtatgttgtattagtctgttctcacactgctatgaagaaattctcgagactgggtaatttataaaggaaagaggtttagttgactcagagttctgcattgctagggagacctgaccgc

SEQ ID NO: 270193 - DNA, 401 bp, Homo Sapiens
atggtggtactggtatatgtagtataccttccaagcacacattcaggcagtgggcaggtagggaaggtgggcaacttcccgcagcagagaggaggaagaagttcagaccgttgggtaggataagtggatccaacccctttgtagggcaggtggtggagtgggcagataaagagccaagccctagtttgagtgacactgtggggattcaagaagacttttgtcacgtgtgtagtgcagtgactagctcttacctctggttcagtactaaccatgctaacagacctgcagagtaccagcttgtgggtgattatgtaccaaacacttgtatcacgtttattgaacagtatgctctaagtcactttgaaatgaataggatgaataaaaggtaagggaatttataa

SEQ ID NO: 270194 - DNA, 311 bp, Homo Sapiens
  misc_feature (290)..(290): n is a, c, g, or t
atatacaaaatatatatttagatcataagctaaaatatgaaacgcaaggggagagaaaacaaaaatataaaagatttagctccttaaagaagtaacagaaaatggcttccaacttcatgttgcaattaaataataactattattatattattgagacagagtctcgctcttcaggctggagtacagtgggcaagatcttgggctgactgcagctttgacctcccgggttcaagtagttctcctgcctcagccatctgaggtagctggggattacagggcgtgtgccaccnaggctgggggctaattttttt

SEQ ID NO: 270195 - DNA, 412 bp, Homo Sapiens
  misc_feature (401)..(401): n is a, c, g, or t
ttttgggtgggtaaatacagggtcttggtgtgtggtctaggctggtttcaaacacctgagctcaagggatttgcccaccttggttctccaaaatgctaggattacaggtgtgagctatcatgcctggcctatttctaatatttatacttaaattcatgactgtcttcaaatgcctgtccgggtctaaagttcatcaacccattaaagtatagaaaagatcatcttgttctggggaggccatttgaactgtgatacaagacccaaaaaatataaagtcaggattgacacattccacgacataaaggattaaggaggtcattgtcagaaggccccacacggcaaagtccaaagacggaacaacaaacgggggaaagcttgagccccggaacaagggcctggcntccccctattt

SEQ ID NO: 270196 - DNA, 471 bp, Homo Sapiens
  misc_feature (204)..(204): n is a, c, g, or t
  misc_feature (429)..(429): n is a, c, g, or t
  misc_feature (447)..(447): n is a, c, g, or t
  misc_feature (455)..(455): n is a, c, g, or t
attttacagttatcagtctttaataacttacaggcaaatgctaaaaaatagttaataacaataatacagaggacacacacagcttataaaaagggtcatggatctacaaatgtggggaggggttcttggcactttcacagacacaaaaataaaaactatgtgactggtattcctaggaaaagcagcctggggagactccccagnttgggggaacagaggaaggggagatagttatttcatcccaaacacattctccaagtcacttccatccccccggcccccaaacacatccaattaaaaatttttagccagagaagaaaaataagaaacaggggtcgagggtagagtcacagtttacatttacgtctccacagtccggcaggcgcccacttctccagagagggtggagagaggtatggcaaaggacancccaacgcccatccccancccagtgnggggaccaaaacgggg

SEQ ID NO: 270197 - DNA, 355 bp, Homo Sapiens
  misc_feature (91)..(91): n is a, c, g, or t
  misc_feature (101)..(101): n is a, c, g, or t
  misc_feature (108)..(108): n is a, c, g, or t
ggaaaacaaaagtccccgcccctgtaacccccaggctggaagtgccagtggcgcaaccccgggccccactgccaaaggcgccccctcaggntcacgcccantctcccngcctcagccttcactagagcagttttaagtaataggaatgattatagcatctttgccttgttctttgacacaagtgtttctagtgttctgccattaactattagatttattggttgaaggtttgagagatttcttttttcctgatgttaatgaacattcttaatgaagacctttccgttaatgaggaatgtttaaaaatcaagaatgttgaatttgtttctgttttttgagactgcctcgccaaaaa

SEQ ID NO: 270198 - DNA, 497 bp, Homo Sapiens
  misc_feature (417)..(417): n is a, c, g, or t
cggcacagggcctctcccagctctctgtgctgtgatcttttcccctattccctaccgtttctcagtgctttatcagaccctgctcctccttagcttaagctttaccttttccaccagttttgtgagatcagcccaccccagccagaactgtttttctactgttatttttgccctcctagccagttactagtcctcaatagaccatttctaagacctcttttgaagccctccccatcctcacccctaccttagtgtagtgctaggcacatagtggggctcttgggtgagtcctggggtggtcaggtgatgggataacatttttctcctcttctccctaggttgatctgtttccagctggcaggtggaacaccctaacggacgttattaaacggacaattacaagttggcaggaccagnaccagggtttcaattaagggcccagtttaggcaggaaattgtggagtcggacatttcagggaacataactgtggaatttt

SEQ ID NO: 270199 - DNA, 440 bp, Homo Sapiens
agtgtagtgctaggcacatagtgggctcttggtgagtcctgggtggtcagggtgatggataaacatttttctccctcttctccctaggttgatctgttcccagctgcaggtgaacaccctacgacgttataaacgacactacaagttgcagaccagaccaggcttcaataaggcccagttagcagaaactgtgagtcgacacttcaggaacatacctgtgaatgaaaaagagacccttgcctacttcatctacatggtgaagagtaacaagagtagactggaccagaaatcggagggtggcaagcagcttgagtgaggatgaagcacatcttaaaggaatgaagtgtaatgcttgatgcacaggtgatatctactacatttaagcccataaagactgttaaatattattgtaaataaaaaagtttgaatgatgaaaaaaa

SEQ ID NO: 270200 - DNA, 489 bp, Homo Sapiens
  misc_feature (57)..(57): n is a, c, g, or t
caaatgggtggactgagtgataaaacgcatattgagaacaagacggccttctggccnctctgcgtccaaggctgtaaaggtctcaggattgctgctaagtgagccatgaactggctgcgttttcaacctttccttgggtggtttcttcaggttccgtccataattaacagatttcctatgctgccttttaaagcccttcaactagggcaagaaatcgtgtaatctcactgaggctataccctggggaatctgcctgataggttccactgggggatcctcttcaggggaactgctctaatgccttaccgggaggcctggctcatgaagccggtagttgtccacatgagattgggctagagaaaaaactctttcccgttcatctggggagagggtagaagttaggatgacatttaagtctctccaggttaaattgtaggacagagttagatattggaactcctgtatatattcagtggggtctgacgagga

SEQ ID NO: 270201 - DNA, 368 bp, Homo Sapiens
  misc_feature (15)..(15): n is a, c, g, or t
  misc_feature (58)..(58): n is a, c, g, or t
aacttccaattgtgntgaaactactttaatagacaaagtaataaatcatgtttatccnattgatttaaacttcatcagttttgcatcctactgagaaatgttagtgattttgatacttaaatccttaaaagattgcctcgtttttaaaataacgcatgtccattttagaaaattagaaaatcagtcccaccacccaaagattattgtgcatgctgaaaagagtatgaaaaatcccctcagcaggcataggatagaaacgtattgttgtatatttccatttttgaatagggtcaaggagcccaagcaaatcatttctactttttcctttaagcataataataaaagtatacttttatggcgttataaaa

SEQ ID NO: 270202 - DNA, 603 bp, Homo Sapiens
tggcaaactccgctccaagggtaggctgtgtccaggactgtactcccgtgtgctttgacagaggtgcttcattttttgttctttcaaccccctgtgaatgtatttatcagcttctctcgctcccgctcgccgttttacaccgttgagccggcgaccaaagcagcagctccaccacctcccaccaaccagagcccacccccccgcacgcccgccgcccacccttcgttttggtttaatttttgttcttttaagctgcttctgcgcttctccatgtgctgtgatctataacctgcctctactgtctggcctcacagggtcctccggggtcacagccctcgccgcacgcacagcctccacctcacaatcctagcagcatgatgggaccccacagtcaggtaaacgcaccgtggcgctcccgcccgccggggacgcggggcgcggaggaagcagagagcccgcagaggaaaaacaaaaatcaaaatgtgctctagccactgcctgcgagtctttattgacaaattaaatttttttagaaatttcttttttctaaagatagtcttcagtcctcggatatcacacccagcttggatacgaaaccaaaag

SEQ ID NO: 270203 - DNA, 233 bp, Homo Sapiens
agaagattaatttgtaatcattgtaccctgtagattttgaaacaattttactagaaattactaatgctggttcttgagtaacctaaaaaattgtatttactcaaatttagaatgctatttatagttctaagcagttagatcgaaatattctgattattctaaagttgctttggtacaaaatttagaataaagcaaaactggcagcacccacaaccaaatgtggatcccttccc

SEQ ID NO: 270204 - DNA, 351 bp, Homo Sapiens
  misc_feature (281)..(281): n is a, c, g, or t
ggaaccccctcctctcacggaacgccctcctctcacacagaaccccctcctctcaccgaatcccatctcagtcttgagttttccctcgactctgttgcttccgctcacatcttagtgagtccccagggcctctgcggggcatggaatcacacgtgcagtgttccggcatgttcagcctgggtgtgtgacagtggggttccctgccagggcagcagtgtgctctgactcggggcagggaccagggttctgtgtagctttgtgcttcaagtggttgagcagantagaatcttcagcagatgttttgaaatgaatggggtgaaccaatgggttgcacaaatgaacgagcctgga

SEQ ID NO: 270205 - DNA, 1078 bp, Homo Sapiens
cacagtgactgtcccctttatcctgtgctgttgggtgctcccagagacacctttttggcttctctcagagggacgatatgaagaagcacaaaaaatagttgacatcatggccaagtggaacagggcaagctcctgtaaactgtcagaacttttatcactggacctacaaggtcctgttagtaatagccccactgaagttcagaagcacaacctatcatatctgttttataactggagcattacgaaaaggacacttaccgtttggctaatctggttcactggaagtttgggattctactcgttttccttgaattctgttaacttaggaggcaatgaatacttaaacctcttcctcctgggtgtagtggaaattcccgcctacaccttcgtgtgcatcgccatgggacaaggtcgggaggagaacagtcctggcctactctcttttctgcagtgcactggcctgtggtgtcgttatggtgatcccccagaaacattatattttgggtgtggtgacagctatggttggaaaatttgccatcggggcagcatttggcctcatttatctttatacagctgagctgtatccaaccattgtaagatcgctggctgtgggaagcggcagcatggtgtgtcgcctggccagcatcctggcgccgttctctgtggacctcagcagcatttggatcttcataccacagttgtttgttgggactatggccctcctgagttgagtgttaacactaaagcttccagaaacccttgggaacggactagcaactaacttgggaggaggctgcaaaactggagtcagagaatgaaagcaagtcaagcaaattacttctcacaactaataatagtgggctggaaaaaacggaagcgattacccccagggattctggtcttggtgaataaatgtgccatgcctgctgtctagcacctgaaatattatttaccctaatgcctttgtattagaggaatcttattctcatctcccatatgttgtttgtatgtctttttaataaattttgtaagaaaattttaaagcaaatatgttataaaagaaataaaaactaagatg

SEQ ID NO: 270206 - DNA, 432 bp, Homo Sapiens
aagtttaaaactgccactgggctgttccccatccacagtcccaggattcatgccacagaccagccccccaaaccccagcaggggtgccctgcccagaacctgtgctggatgccctaggagccacagaggacccactgccccgttgttggggctgcgtgtgccacaattccataccccgatcccataatcccctaagacaagaatggctgtcattgcccctgggttcactttctattcaaagaggactcatttggcacagccaatgtagtagttaaaatgcattttgagaaaaaataaatattctgtacaatgtatttacaaggatcaaatgttttgtaacccacccccaattagtttcccaattgggaaactataatttgataattaagaagcatattattggccgttagtgtcacgtcaacaaagaatgtg

SEQ ID NO: 270207 - DNA, 480 bp, Homo Sapiens
  misc_feature (441)..(441): n is a, c, g, or t
  misc_feature (447)..(447): n is a, c, g, or t
  misc_feature (463)..(463): n is a, c, g, or t
tcagctgtaccacctggaaccattcctccagcctttcccccacctactgctaatataatgccttcgtcgtctcatctctttggctcaatgccatggggaccatcggtgccagttcctgggaagcccttccatcatactttatattctgggaccatgcccatggctgggggaataccagggggtgtgcacaatcagtttatacctctgcaggttactaaaaaaagggttgcaaacaaaaagaactttgagaataaggaagcccagagttctcaagccactccagttcagactagccagccagattcttccaacattgttcaaagtaagtccacgggagagctcatcagcttctttggaagtcctcttccgatttgctcaacctggcatcttctttttcaagttggaaactggcctcttcaaggccattagtatatctcaccntaagtncaacaccaatctcttntttcaagagggaaattc

SEQ ID NO: 270208 - DNA, 440 bp, Homo Sapiens
  misc_feature (22)..(22): n is a, c, g, or t
  misc_feature (47)..(47): n is a, c, g, or t
ggccaatatccgaatggacggngttaacccccacaaatttggaaaanggagcccgccagattataaccctcaaataattggtcacagcatttgaaaactgtgacctgccagtgcctgtaaacttaactgttctttgcccagaacacaagacacccaaattgaactcactgccttttgaggcatctggaaatttttactttaaaaagtaaccagaatccaaggtatttttattttagcttcccttaagaatttttgaagtgactgggcaggcagcagaaattaaatgaatttttcttcctgattcctttaaatgaatatgaaacactacaaatttattcttggtgaagatgatacctgaagctgtcacctcttgattatctaaactaagcgctcattctattttataaaacaaataaattagtctcttttttctgaaaaaa

SEQ ID NO: 270209 - DNA, 240 bp, Homo Sapiens
  misc_feature (41)..(102): n is a, c, g, or t
caccacacccagcctcattggcatcatcattcttcgtgacnnnnnnnnnnnnnnnnnnnnnnnnnnnnnnnnnnnnnnnnnnnnnnnnnnnnnnnnnnnnnntcagtctccttactattttcccttattaattcatgcagcaaatatttgagcacctgctgtgggccagagtacaatcagccctccgtatcatgccattctgcatctgcaggattcaaccaactgtagatagaaaatatt

SEQ ID NO: 270210 - DNA, 447 bp, Homo Sapiens
  misc_feature (29)..(29): n is a, c, g, or t
aaccatcccggttgcccctctcccagccnggtcccccttttaattataattgatctgaaggattgccttttttaccatccctctggcaaaagaggattttgaaaaatttgccttttacctatacccagccctaaataataaagaaccagcccaccaggtttcagtggaaagtattgcctcagggaatgcttaataattcaactatttgtcagactttcatagctcaagctctgcaaccagttagagacaagttttcagactgttatatcgttcattatgttgatattttgtgtgctgcagaaacgagagacaaattaattgaccgttacacatttctcagacagaggttgccaacgcgggactgacaatagcatctgataagattcaaacctctcctcctttccattacttgggaatgcaggtagaggaaaggaaaattaaaccgac

SEQ ID NO: 270211 - DNA, 348 bp, Homo Sapiens
  misc_feature (327)..(327): n is a, c, g, or t
tagttattggatccaagatagcagccagcacctaaaggtgtttgtaaaacgaccaggggtcccttttcatcccttttatgtgagtggtgccttttcctgaatcctatcccaagctcaaaatatgtaattattcttttaactttaatattttatttactgtaaagagtaaactccagttgctacagtattaatatgtagtcaaatctaagtagaggccttttcagtacgtcatatccaagctagcacaaaaaataatttagtacaggaataaggcaggagaatcccttgagcccggtaggtcgaggctgcagtgagctatgttggtgnccactgcgcttgagcctgggt

SEQ ID NO: 270212 - DNA, 485 bp, Homo Sapiens
agttggctgacttccacacctagcatctcatgagtgccaagcaaaaggagagaagagagaaatagcctgcgctgttttttagtttgggggttttgctgtttccttttatcgagacccattcctatttcttatagtcaatgtttcttttatcacgatattattagtaagaaaacatcactgaaatgctagctgcaagtgacatctctttgatgtcatatggaagagttaaaacaggtggagaaattccttgattcacaatgaaatgctctcctttcccctgcccccagaacttttatccacttacctagattctacatattctttaaatttcatctcaggcctccctcaaccccaccacttcttttataactagtcctttactaatccaacccatgatgagctcctcttcctggcttcttactgaaaggttaccctgtaacatgcaattttgcatttgaataaagcctgctttttaagtgttaaaa

SEQ ID NO: 270213 - DNA, 434 bp, Homo Sapiens
  misc_feature (27)..(27): n is a, c, g, or t
  misc_feature (50)..(50): n is a, c, g, or t
cctaagggcaaatcaaataccccaacncctcacttaaaaaactgtctgangaaaattcaaggtaaagtgtgcaactgggcttttcccggctcctctctcccagtcattttccctcgtacccagcacaggcattccagaacaagttaccccactgtagaggttgggccttcgggtgttgctgtggacttacagcatatatctgtgttatgtttcagggatgtttaaaagcatgttaaaaatatgtcccaatatttctcttttcctcctagcttattccaagtctcaagagcagctacactgctcagtatcagttcagagaccacaggacagaggtaaacccagcccagccacccccagctgatcctgcagggcactgggaagccaccaaggtcattagaataagtacaggttttaggtcgggtgcagtggctcgt

SEQ ID NO: 270214 - DNA, 426 bp, Homo Sapiens
  misc_feature (321)..(321): n is a, c, g, or t
  misc_feature (409)..(409): n is a, c, g, or t
tgtctgtgatcaggacatttaagttctactctattagtaaatttcagttgtatcagtcaccatgccatgcattagatctgcataacttgtatttgatacattataatcattacatttgatatgtttgacttttctgatgtggagatgtttcaggtaatgacaagttcctagtgggtaatggagtgcaagtttgggaaaggccagtgagctaggtaggatgttgaatggtttatcaatatgggggactgaaatttaggagagtgggtgacagcactaagggaaggataaggcttactattagcccagatgtcccaattcccntaggtgtttgtgggaagggcaactccgaaggttaaggtgattaacctgggttaaaggtcgataggacctggggtgggtgagacccctngggggcccaagggattg

SEQ ID NO: 270215 - DNA, 462 bp, Homo Sapiens
  misc_feature (352)..(352): n is a, c, g, or t
  misc_feature (366)..(366): n is a, c, g, or t
  misc_feature (387)..(387): n is a, c, g, or t
  misc_feature (411)..(411): n is a, c, g, or t
  misc_feature (432)..(432): n is a, c, g, or t
ttaacaggtatattacatgttataggagggaaaaggaggtgggctgcctgggccctcaagacatgagaaacgggtggtggcttccaagcttccttacttcccccatagatccctgacaatgtgctgcagaagcctccaacctggaacagccaacaggaccagagcagcccaccacccgaccccagaaaaagccgagaaaagcccaactccgctagccaaagtaccaagagaaggatggcctaacatcagaaaacacttgcagtaatattcattctactccagccaggcgccaagggcaaaatcacaatcctcctcccaccctgggtctcacagaggcccagtaggaataggntctcccagcccggntcctcagggagaaaagctgtngcccactggtctaatttacacccngaggacatggcaccccacagnagaatattttttctaagcacccatggaaaa

SEQ ID NO: 270216 - DNA, 767 bp, Homo Sapiens
  misc_feature (419)..(419): n is a, c, g, or t
gtgattaacttaactttaattcagacctgaatataacgagaaaatgagtgattatcttgaagttgacacagaatataccacatcccacgaattacttaaatttactttccaatgaaaaaaatcagccattgggattataactacaacaactatggcagaaatgctttcaggctgaatattgctgcttcataaataaataaggacaattttaggcaactaaatccagacacaattagttgggagatgacttccaaaataggatggaaactttagaggatgggaaaagtgatttgggctgaggggatgatactccctatggccatctggcatattgggcaccctgctttggggtttgctgcagaaatggtgcaaatcagatgggatgtgaggaagcagttatggactggctcacaacttcntcagagaagctacactggaatctttacagcttaccagtttctcaattatgtcagatacagaataatcaccaaaaaaggctttagaggggaaaaatacctcctaatattttgaattttaaaaatagatttaatttacctttcctacttaccttcctagatggcataatctacacttaaatgacatttaaaattagaaattatattaacttcagcattgttttgtgtcctaaagagatattgacaggtaaattcaaaagttgtatttgtgacttaatcttatttttacatggctaaaagtggcctatgctcttctgtggagttttcctcttaatttcttctattcttgat

SEQ ID NO: 270217 - DNA, 580 bp, Homo Sapiens
  misc_feature (19)..(19): n is a, c, g, or t
  misc_feature (450)..(450): n is a, c, g, or t
  misc_feature (469)..(469): n is a, c, g, or t
attcggcacaggcctcggnaggatctgtccctcttggcccctctgtcctcaaatgtccaaaatgttggaggacctctgttcagatcccacgcctgggctcttgccagcagtggagttactgtagagggatgtcccaagcttgttttccaatcagtgttaagctgtttgaaactctcctgtgtctgtgttttgtttgtgcgtgtgtgtgagagcacatcagtgtgtgcaggctgtgtttcccccatttctctcctcccttcagaccccatcattggagaacaaatggaagaaatcccttccccaccaccctccctggcctccccaggccctctgcgggggaaacaagatcacccagcatccttccccaccccagctgtgtatttatatagatggaaatatactttatattttgtatcatcgtgcctatagccgctgccaccgtgtataaancctggtgtctgctccttancctggacatgaatgtattgtacactgacgcgtccccactcctgtacagctgctttgtttctttgcaatgcattgtatggctttataaatgataaagttaaagaatttaaaa

SEQ ID NO: 270218 - DNA, 402 bp, Homo Sapiens
  misc_feature (226)..(226): n is a, c, g, or t
  misc_feature (269)..(269): n is a, c, g, or t
  misc_feature (357)..(357): n is a, c, g, or t
  misc_feature (367)..(367): n is a, c, g, or t
  misc_feature (372)..(372): n is a, c, g, or t
  misc_feature (379)..(379): n is a, c, g, or t
ccagtgagagcgctgtctggccttgaacatgggctgggatgggaaagggtctgggagaagatgggcaacaaagagccagggagtcatggacatcgcagcgacgcagaccccagcaggttcagtcccgtgctgccaccagctgtccagctggggtgtctggagggaagagggcagaggagggtcatgtcccttcagctgggggaggggcccagtgagctccaaaatnttggaggacctctgtttcatattcccacgcctggggctcttgnccagcagtgggagttactgttagagggatgttcccaagcttgtttttccaatcagtgttaaagctgttttgaaactctcctgttgttntgtgtttttnttttnttgcgtnttgttgttgaggagcacattcag

SEQ ID NO: 270219 - DNA, 451 bp, Homo Sapiens
gaactggcaaaaaaaattggaaacgtcatggtcacaactagccggaatgttgtacaaacagggaaaagctgttggccagtcagttggaggagctttttccagtgcaaagacagctatgtcttcatggctttccactttcaccacttccacctcccaaagtctcactgagccaccagatgagaagccttgagcaaggcgtcagaggctgctattgctttctgaggtttaagtgtcccctgtctgtctgctgctcccaggctgttactagccacagatccacagcaggggaccatatgtcgaactgtttacatggatgttgctctaagtgaatgtttcgggatgccgaaatgatgaaatcacagccatagcagggatggctttccaggttggggtttcaattgactacttttatttcagtctgagcctgattaaaacatacagtgaaccttct

SEQ ID NO: 270220 - DNA, 376 bp, Homo Sapiens
  misc_feature (48)..(48): n is a, c, g, or t
  misc_feature (66)..(66): n is a, c, g, or t
  misc_feature (77)..(77): n is a, c, g, or t
  misc_feature (124)..(124): n is a, c, g, or t
cttgagcccccggagtttgagtcccagcctgtgcaacatagcaagccncctctcccaaacgaacanacaaacaaacnatatatgtagtactggaagtcctagccacaacaattagacaagaganagcaataaaatcatccaaatcaaaaagaaagaagtaaaattttctttgtttgcagatgacatgattttatacacagaagaatcctaaagacaccatcaaaaaactgttagaaccaataaattcaataaaactgcaggagacaaaatcaacatacaaaagtcagtagcatttctgcatactaacaatgaactatccaaaatagaaatcaagaaagcaatttcaatgacaatagctgccaaaacatacataaga

SEQ ID NO: 270221 - DNA, 759 bp, Homo Sapiens
  misc_feature (44)..(44): n is a, c, g, or t
atagctttcacaagcttcgcagcagggccgagcggatcggtcgnggccatcgacaatgcggcagatcttctcatattcgggaaggagctaagtgcaatagggtctgacacgaccccgctgccctcctggccgctctgaatagcagcacgtgggggtccctgaagcaggctctgaaaggcctgtctgtggaattcgcgctgctcgccgacaaggctgcacaacagggtaagcaggaagagaacgacgtggtggagaagctgaacctcttcttggatctgctgcagtcctataaggacctgtgcgagcggcatgagaagggcgtgttgcacaagcaccagcgggccctgcacaagtacagcctgattgaagaggcagatgatgtacgccaccgcgcagaaccgcgagccggagtccgtggagcagctggaatcccgcatcgtggagcaggagaacgcgattcagacgatggagctgcggaactacttctccctgtactgcctgcacccaggagacgcagctcatccacgtctacctgcccctcacctcccacatcctccgcgccttcgtcaactctcagatccaagggcacaaggagatgagcaaggtgtggaacgacctgaggcccaagctcagctgcctctttgcgggaccacacagcaccctgaccccaccgtgctccccgccggaggacggcctgtgtcctcactaagccctgaggctgaggtggtgctccctgcggccgcactaaaacctctttcc

SEQ ID NO: 270222 - DNA, 455 bp, Homo Sapiens
  misc_feature (17)..(17): n is a, c, g, or t
  misc_feature (34)..(34): n is a, c, g, or t
  misc_feature (112)..(112): n is a, c, g, or t
aacccccctaccttaangggccttggccccaatnttttaggcctaattccccccatttaccggacaagagaatgccccatttacccgaacatttaataagccaaaataatgnccttaccacaccttaccttccccttaaccttttgaaaggaatccccttattttttcaccccaatttggtatattaacagcacatactcaaggttcactacaaaacaaacagtccccgggtaatgatttaaatgtagttatagaaataaataatatgtatggagtcattacttctgaccttgaaatagcctgctggtgactggcattaacatacataactaactattcaattatttccattattaatgttgctgctgctacctttgggcctaaaaccaagtcacctgttgtgtatcaattaccttctttgataaaaggaaataaataaataatgttatcctatt

SEQ ID NO: 270223 - DNA, 306 bp, Homo Sapiens
atttcggcacagggaggaaaaggctggttacattcattcttgggcatgtacgtgcataccgtttatttgcaaattgaggtacttaagaaaattgtgcatgcaatagtcaggaactagtataaacattcagaagtcttttattgcacaatcaaaccttttaagaataagccttgtgtaatagggagctttatagtttttcctcatagtgaagcatgttgtgaagattttaataattgataattttttctatggtctttaattgtcaatcctatttttcattcagttgttgttggctttttttaaaaa

SEQ ID NO: 270224 - DNA, 429 bp, Homo Sapiens
  misc_feature (25)..(25): n is a, c, g, or t
  misc_feature (34)..(34): n is a, c, g, or t
  misc_feature (39)..(39): n is a, c, g, or t
  misc_feature (46)..(46): n is a, c, g, or t
aaacctcgtgaccatcctaggaaanacgtcatcnccgantcctcantccacgtgcctcaactaggtagtctgcgaaccttaggtctgcagtggttgggttaagcagcttcctgagttctggatcatggatctggatcagagcttcttcctacttcccacaatggcatcactgaggtgtttctgttgtcgaaaaaggatgttagtagctccagcaacaaacccccgaacggtgacatcggagagaagatgaatgctgctgcaatgccatgtaaggcaaacacagatatccctttgtgaagatggccaggggcatgccatactgatcctcttccaaacccgaaatgagccctggtatcaggactacctgtcccgtattagcttgaggttgtacagtaattggaagactctctccgtgccgaattcctgcag

SEQ ID NO: 270225 - DNA, 389 bp, Homo Sapiens
gccaggcaatcctgtgccagcagcccccccaaaatttcctaacaatcccggacataacacatacctttaaagttggtcccagcccctggttgccttgtgttacgaactcagaaagtaaaattccgtgatgttaaaggacttgagcctcacatctgcaactcttttagagaattttgactattttttaaatagctgtattgaagaatcattttattccctcctcttgagatgaacaaataatattaaacaccaggtataaggagttcttatgtctacatagatgagaaatattttattggaagctttagataggctgtagcatctatctgtgttgaataggccttaaaatatcctcttgcttctcatagaaattgagatgattgaaataa

SEQ ID NO: 270226 - DNA, 421 bp, Homo Sapiens
  misc_feature (19)..(19): n is a, c, g, or t
  misc_feature (50)..(50): n is a, c, g, or t
  misc_feature (56)..(56): n is a, c, g, or t
ggaaacaaatcctaatccnaccctcaaacccccagctgaataactcaacncccggnatttctgaactggggaaaacaaaggtccagctgccccttctctggagaggaggaggagctaattatatcaggcatgtgtgtaaaatcacatgggtagaatgggagacctagactttggactcacaaccaagttcaaatcttggcgccatcaatcaccatcaatgtaaccttgtacgagatacttgacctctacaagtctgtttgcacagcagcaaaatgggaacaagtatctacttcttagcaggttagaagctatgaaaaacactaaagtcttagcagccattgccaagtgctttccaaatggggtggagctatttgcgccccttaagaccagccaaaaagagcagccggagcagccattttac

SEQ ID NO: 270227 - DNA, 1011 bp, Homo Sapiens
  misc_feature (543)..(544): n is a, c, g, or t
  misc_feature (569)..(569): n is a, c, g, or t
  misc_feature (619)..(619): n is a, c, g, or t
  misc_feature (642)..(642): n is a, c, g, or t
  misc_feature (740)..(740): n is a, c, g, or t
tgagacagagtcttgctctgtcgcctaggctggagtgacagtgagacttggtctcaaaggaaaaaacaaattattttatacacaacattatttgtttgaagcatctatttcttcccaagacagatgcaggggtgcagtgtgccctgagcacacatctgctggtgtctgttgctgcctgggatactggggtaagaagctgccggctgaactaatactgggttattatacttgtttccttcagaactctgtggtcattggtccatcttctgacattgaactctgctatgaagtccaaggttaacctcatcctcccctcctcttctgtttggatgctttaatcattccccattcaaccctgaagctcaataacttcaccaggatatgctgctgctttgcattcacatcaacctccataattacgtttcaggctatatggattggttgaaaattttggccaaaaaattcccctaaaaccaaaagtcctcatcttactgggggtcctcctcactctgaaaggtaacctgagtctttcaggccacccanngcaactcccagtatctggcagtgtncacaaggacaaggactacacagtcactcccacccaccctcaccacggctncagaaccttctgaaagcatgtgntctctcggggctatgggcctctagaggtgcccacttttagcgctccttaccccagtgcagcgccctttcacgaagtacttgcaaatgactttgccttnctgtccgactgctggtggggcttgtcatgtcacgactccgtagctccaccacaccgtctgcatgacaaggtgtgacgtaatgggattgaaaggaaagttgagatggatccggttattataataccggcaagggatgaggggccttccaaattcaacaaaccctcgggggcttgtttaaccgaggttgtcgcctcttatcccccccgggggggtggttcttgtggaaaaaatttctctaaattgttcactccctaatctacaactgtgggaa

SEQ ID NO: 270228 - DNA, 325 bp, Homo Sapiens
  misc_feature (111)..(111): n is a, c, g, or t
atgcacaccaccatggccggctaatttttgtattttttgtagaggcagtgtttcaccattttgctcaggctagtctcaaactcctgcccttaagcaatctgcctgccttgncacccaaagtgctgggactacaggcacgagctaccactaccagcctgacatttatttctttcactcatttaactcatttattaatactatgtgcaggacacaggcacatttttaggttcaaatcacagcactgaaaaagccaaacaaagtctctactttcatagagcttatgttctaggagcatgagaaataaataagcaagcaaacaaacaaa

SEQ ID NO: 270229 - DNA, 266 bp, Homo Sapiens
  misc_feature (89)..(89): n is a, c, g, or t
atataatgagggctttcaggaaacctacagggagatttatagcttcacatttgaagctgatgtatatcaggaaaaagtgattaacaagntcctctcgatcctatgtcatactatatacaaaacttaactaactcaaaatggatattcaacttaaatataagagtaaaaccaataaagctctcaaaagagaacatagggagtaatccttcctgaccttgggattagggtaatgggtttctcaggatatggatacaaataagtgacaa

SEQ ID NO: 270230 - DNA, 133 bp, Homo Sapiens
aaggcatatacccaaaagaaaggaaataagtatatcaaagacgtatctgcactcccacatttgttgcagaactgttcacaatggccaaggtttggaagcaacctaagtgtccatcagcagatgaattgataaa

SEQ ID NO: 270231 - DNA, 451 bp, Homo Sapiens
  misc_feature (264)..(276): n is a, c, g, or t
  misc_feature (339)..(339): n is a, c, g, or t
gacaaatagactcgcctaagagggcctttctctccaagccctcgccagcacaggctgtgtcactttcttaggtggcacctaccgtctgttgcacacttgctgcagatgatttggcacaggatgtcgcttcagaaaaccttgtaggaagccgtgagtcgttaccgtccccatttcacagacaggaaagtgcaggccttagatgcactgcctgataccctgtggcccccgcgttcctagacagatacactgcctggtacactgtannnnnnnnnnnnngctatcgtttgcaagctggggttgaacccctgcaattcaatagacaaggttcccccttgagtnagccccccatctgcttaactgagggcttgtcctcggttataaatgtctgggtgggggtgggcactgctggctgcagctgtcaggactgggaatgctgaacctgcactgaggg

SEQ ID NO: 270232 - DNA, 416 bp, Homo Sapiens
  misc_feature (21)..(21): n is a, c, g, or t
  misc_feature (27)..(27): n is a, c, g, or t
  misc_feature (54)..(54): n is a, c, g, or t
  misc_feature (60)..(60): n is a, c, g, or t
  misc_feature (65)..(252): n is a, c, g, or t
gtctcacatattgtgtgtatnatatancggtgtggatatcatattgtgtggatntatatntagtnnnnnnnnnnnnnnnnnnnnnnnnnnnnnnnnnnnnnnnnnnnnnnnnnnnnnnnnnnnnnnnnnnnnnnnnnnnnnnnnnnnnnnnnnnnnnnnnnnnnnnnnnnnnnnnnnnnnnnnnnnnnnnnnnnnnnnnnnnnnnnnnnnnnnnnnnnnnnnnnnnnnnnnnnnnnnnnnnnnnnnnnnnnnacacacacacaatagctgggcattgtagtgcatgcttgtagtcccagttactcaggaggctgaggtagaaggataacctgagcccagggagattgaggctgcagtgagccgtgatcagtcgctccattgccctccagcctgggcgacagagaccctgtctccaa

SEQ ID NO: 270233 - DNA, 185 bp, Homo Sapiens
gcagcctaatgttctgtaatagtaacttgcttccaagtaaagtatgaaaagttagtggaggggccatggctgtggtctctgataggtcaaactatactattttggaatgcgtggagttagaacaaagtttttattttgttattaattagtaaagcaataaataaaattgtcttactaataaaaaa

SEQ ID NO: 270234 - DNA, 696 bp, Homo Sapiens
  misc_feature (114)..(217): n is a, c, g, or t
gcttggaagactctacagaagtagagatttggtattggtttcagacacttcatgggaagcagtagaggataggagaaatcacatagcatgtggaagtgactccatttaaatttnnnnnnnnnnnnnnnnnnnnnnnnnnnnnnnnnnnnnnnnnnnnnnnnnnnnnnnnnnnnnnnnnnnnnnnnnnnnnnnnnnnnnnnnnnnnnnnnnnnnnnnnacttataaaccttataaatctgaattacatgaagcatggtgccacataatactacacatgtactctgctagctcttgtctccttttctttctccccttactaaaatagcttaaagtgaatcatagattctatatggaataattatttataatattcatgacaatagtatttatccaataatttacactgagtattaaccatgcacaagccactgggctaaataaattctgtgtaggataaaaagtctctgtcctcaacaagcataaaatctggtagggctcatttacctgtgagatagggcagggtatgaaaagtgctagcacagtggcccaagatgccatggaagctagaggcagatgggagcagagctggccaaggggctacatgggtgaatcacagaactaattaccagagatggaaggtactttacagaagaggttcccaaacctggctgcacaccaaaactaagtggagagttt

SEQ ID NO: 270235 - DNA, 856 bp, Homo Sapiens
ataatgaattgggtaaggaacagttaataagaaaatgtgccttgctaactgtgcacattacaacaaagagctggcagctcctgaaggaaaagggcttgtgccgctgccgttcaaacttgtcagtcaactcatgccagcagcctcagcgtctgcctccccagcacaccctcattacatgtgtctgtctggcctgatctgtgcatctgctcggagacgctcctgacaagtcgggaatttctctatttctccactggtgcaaagagcggatttctccctgcttctcttctgtcacccccgctcctctcccccaggaggctccttgatttatggtagctttgggacttgcttccccgtctggactgtccttgacttctagaatggaagaagctgagctggtgaagggaagactccaggccatcacagataaaagaaaaatacaggaagaaatctcacagaagcgtctgaaaatagaggaagacaaactaaagcaccagcatttgaagaaaaaggccttgagggagaaatggcttctagatggaatcagcagcggaaaagaacaggaagagatgaagaagcaaaatcaacaagaccagcaccagatccaggttctagaacaaagtatcctcaggcttgagaaagagatccaagatcttgaaaaagctgaactgcaaatctcaacgaaggaagaggccattttaaagaaactaaagtcaattgagcggacaacagaagacattataagatctgtgaaagtggaaagagaagaaagagcagaagagtcaattgaggacatctatgctaatatccctgaccttccaaagtcctacataccttctaggttaaggaaggagataaa

SEQ ID NO: 270236 - DNA, 386 bp, Homo Sapiens
taagaagtgttgcctttgattgttactaaccacggatgggtaacggtccatacattaggcctagtgtttggtaggacaaaacctttttagagcctttgagaattgtcatccctgttggtcaactttgaaatacaaatgtttgccccggtaattagcaatgaactgatggcagtttcctcagctgtgtatatacggatctggcttttaattgatgaatcaacttctacagaaacttttgcagggacagtgttgatgaggcagtttagcttgccagggtgatgataaagcccaggtccctgcatgtatagtgctcttctaaagaatatgcattcttgaacaacttaactttttaaaaatcacaataaaattttcgattcaaaatttga

SEQ ID NO: 270237 - DNA, 223 bp, Homo Sapiens
gctagcactgagcttcaataccctgtactcagaactgtaagatatcctgggttggaaaaggctctgactaatttgcacattaaaaagcacacagacagaggaacccacctttttttccctttcccagtcaccctgggagagaccgtcttctcttcttcattcatgtgtggaatcccaattaagcgtagtaaacaaaggaaacttcttacattgtgattttcct

SEQ ID NO: 270238 - DNA, 348 bp, Homo Sapiens
  misc_feature (77)..(77): n is a, c, g, or t
  misc_feature (253)..(253): n is a, c, g, or t
agtcttggcctcaagaggtcctcccacttcagcttcctgagtaggtgggactacaggtgtgcactgccacacccagnctaatgtttaaaatttttttgtagacaaggagtctagctatgttgcccaggttggtcttgaactcctggcctcaagcaatcctcccacctctgcctcccaaagtgttgggattacaggcatgagcaccacatctgatccattttaaacatttttgtattgaaatataattcacatnaccataatattcataattttaaattatacaattcagtgggtgtatattcataaagaggtacaaccgtcatcattatataattccagaccgttttc

SEQ ID NO: 270239 - DNA, 426 bp, Homo Sapiens
  misc_feature (323)..(323): n is a, c, g, or t
  misc_feature (367)..(367): n is a, c, g, or t
  misc_feature (415)..(415): n is a, c, g, or t
gaatctagacggagcagctcttggagttccagagtagaacactttgaatctggctgggggaaaaagattaagttagaattaaccttcagcttttttcattgatttcagatttactgcaaacctttccagttattgttttctgtgtttgaacttagcgtttcaatgtgtaagtaatttgtaaactaggaactgaaattgatttcaattttatatttttatgattcaaacttaaatgaaagattatttctaaaaatcaagagagtgaataacatgaaaaaatttaaaaattatctcaataactaatttttcaaaaattgaggatnatgaggcaagttgagtagaatccaatgttttctaaattaatccntctaactaaaaggccttccccatggatattcgttaacttggcctctgntttggctttta

SEQ ID NO: 270240 - DNA, 517 bp, Homo Sapiens
  misc_feature (31)..(31): n is a, c, g, or t
  misc_feature (78)..(78): n is a, c, g, or t
  misc_feature (506)..(506): n is a, c, g, or t
gatgaaaactcctcaatcctgaaaaaagagnactcgttcgagcccaataggtccaaagaagggaaagaacctgctccnaaccagaaaagaggggaaaatccttcaacaacaacccaacaaacaatgcctttaaaacttcctgtgttccaaaccgtcaagctctttcggccttcccaatgtccctgtctttccagatcaaactccttcattgaagtactcatcaggcgtgatggctgtggggttgtttgcagtagcacattccgtggtgaggtccccttgtgcaccaaattggtgttccacagttcccagcaaagattccagcgggttcctgtctgctttatatctctttttttcctcctcggtcagatgttctgtgcgtattttggtgatcacattcacattgtttactgtgtaaacctttgcttcgtaaccattaacaacttctgctttatctgtcctccagccccagaatccggatttagttctttcaaaagcaatatttttanctgtgccgaat

SEQ ID NO: 270241 - DNA, 525 bp, Homo Sapiens
aaataattaagggaatgactagcttgtcattcctaccagaacaactggtacctgtactcatttctctaccatattgtttctctttagcatagctacagacctcctcagggcatgctatcccattttctgaaagtcaaataagacaaaatcaaacatccaagtgagagacacattagacagttctcattccccagagcatctccatggcacagatgcatgaaaaaaatgggaacagattcctcatttgcatagaagctaaatagctatattaaatcttattttaagagtttccttttacctttgcttcgtaaccattaacaacttctgctttatctgtcctccagccccagaatccggatttagttctgataaaaagtgaacaccacaaatttctacatgtacaatatgccattcagatttatatctgtagcctttatagtttttttccccccagcttaagttagtgaaggacacttggaaatcatggtcctattgtcacaggaggcggttagaatgacagatggc

SEQ ID NO: 270242 - DNA, 506 bp, Homo Sapiens
  misc_feature (338)..(338): n is a, c, g, or t
  misc_feature (445)..(445): n is a, c, g, or t
  misc_feature (470)..(470): n is a, c, g, or t
caataccctggttgtcagtgactgacaagcagccacatctgtgctactgctgtgccagtcatccaaggcacagatgccacctcttccacgtcacatccttccatctctccagatacttcccatcaccctcaggttctttgtctagttccccaatttggctctgtgactacccagccacctgcctttatttgacatagagatgaccgtggctctcactgcagttctcactgctcattctataatgttcatcattcctttggatttctgtccaactgctcattctctagcccctaaacaattccaatcttctctccagggccaccaccaactccaccagnacacctaaactagctgaaataccattcaaaagggaaaaaactgtcacttgttcacatgacagggataacatggggaaaaacagcatgagagttttaaaaaggtgggnaaatggaaagactcaaatggcattntcttacctagcatttgcaagtggattcaattaggag

SEQ ID NO: 270243 - DNA, 441 bp, Homo Sapiens
  misc_feature (104)..(104): n is a, c, g, or t
  misc_feature (385)..(385): n is a, c, g, or t
  misc_feature (404)..(404): n is a, c, g, or t
  misc_feature (415)..(415): n is a, c, g, or t
tttcggcacagcataatgttcatagcccttacaaatgcacaatctgtggaaaggcttttcttttggaatctctccttaaaaatcatgtagcagcccatgggaanagtttacttaaatgtccacgttgtaattttgaatcaaatttcccaagaggttttaagaaacatttaactcattgtcaaagccggcataatgaagaggcaaataaaaagctaatggaagctcttgaaccgccactggaggagcagcaaatttgataacacagtgtgaatatttgttctacaaaggtgtttgttggaaccattctttgtaagtatagcttatcagataggcatagttggatccagtagatggacatgtatgggtgtaccgtgtttcactgtcntcagttgtgttactaaggntgagcctttgntccatttttttctggtctctgtctat

SEQ ID NO: 270244 - DNA, 288 bp, Homo Sapiens
  misc_feature (90)..(90): n is a, c, g, or t
gggtgtaactagcccagtaccctagcctggaggtcctaagcctatgacttcctcactcccctgccttagccttccccttttaatacttgnccccctaattttttgtttcaagtgtggcaatttacttggtcctgaagtagaatccctactaataacccagagagctgggttgtctgggaaaaaaaatagttgaccttataactaggtggagccttgccagaaggccaagtccactcccaaccatggccttttgttcccacaacactcggtcagatctccacttacggc

SEQ ID NO: 270245 - DNA, 416 bp, Homo Sapiens
ggttcaaactgaaagtcagtgatcaaaagttaattttgaactctagctggttcaatagtaaatgtaacacaggcagtcaacaggttaggtaaatttgcaagtacaatgatcaccttggcagacagagactgtccagggttgcccaggaagaggctacgtgtggagacataagcatttctaactccatgtttcttcctttccaacgtcatccagaagaaagagcctttatggcctcccatctctttcagctggaagcaatcctccctaatcctgcagcactgtgacgggatgtgggggatgtgccttgggagacaggcacgaaattcgaggatctaggaaaggactctgtcctccattacaaaccagtgagtcagcaggttattttttaaaaaattaaattttgcaaaaagttttct

SEQ ID NO: 270246 - DNA, 401 bp, Homo Sapiens
ctggctgcaggcgctaaggtagttcacacaggtctgtcagacaagaggaaggacccctaaaagtgaattttaaaatatatttggaagaatgatcaaaagttacctaggtcaggggtgggagggaggagaactaggaagactacacgtgacagaagcaggtacaaaggccagaggttgcagattattcgagaacttcaaagtggatcagtgtagctacaggccctaggaagagccacgggaaacaaggcatccgaagtaggccaagttcaggtctgcagtgtttctgggccataaccatcatttcagactttatcctggggggtaatggagggccatggaaagatctgaagcagaagagtaaatctcatgagatttacattttagaaaaattgcccttccag

SEQ ID NO: 270247 - DNA, 359 bp, Homo Sapiens
  misc_feature (54)..(54): n is a, c, g, or t
  misc_feature (65)..(65): n is a, c, g, or t
  misc_feature (71)..(71): n is a, c, g, or t
  misc_feature (264)..(264): n is a, c, g, or t
  misc_feature (348)..(348): n is a, c, g, or t
cctctggttaacaggcgtgatggaggcacccgtctctcctttcccgacagagcnaagtcttttcnaagtcnacaaagcaggttagttacagggttagggtgaaacctggaagctaagatgaggaggaggagacacgtgtggtcacctggaatgtggacgttgaaggaaaccggggtttcaaaagtgacagcggagccatcccgagggagccgggtgccccatgtggcctccatgacgttcccttgggttctggggacgcaggancgaaggccaggcaccagctgctcccatcagctctatgggtctccagcacccctccagcttctggcaggcgtgtgaagaatgggnccgcccagggc

SEQ ID NO: 270248 - DNA, 430 bp, Homo Sapiens
cctacctttccatggtaggtttccagattttgccaagccctgaaccctaatcaccctttttccctaagacccgaaagatcctccccttgaaccttaaagattccgttcctttccatcgcttccccattaaaatggaggcttaagacaggtgcccagcagtgtttttaaaaattttcaccagtggtttggtcttagaacttaccccctgggcacagggtgtggtcacggcaaataggatgtgtctggactggatattttaattagacaagcccagagtaagaagaacgtggtgtttatggaaagcacttcagctgaattattgagtagatggtttttatgtaattgaaactggtctacaagtttatcagattcatcgtcgaagtgactcagtaataaagctttatcaaatacaagtccgccaaggaagaac

SEQ ID NO: 270249 - DNA, 729 bp, Homo Sapiens
  misc_feature (194)..(224): n is a, c, g, or t
aaagaggcgccgcccagttttgtgacgttcagcacggggcggtggcgggggctcccgcccattcggagggtttcctagtcttggagtggaagaattaatattcctcattggggcatgagcaggatgggggttacctgggagttgggaaccacaaaggggagccgatagccgagttgtattccaggtcacggccnnnnnnnnnnnnnnnnnnnnnnnnnnnnnnnggcccctcatttaattgggaagcttctcagaatgtttttgtaaagtcactaaccaagaccggacctttcagttcatattaaatggcccccgtagtcaccttactttcatgtagtttcagatttttgcagcctgtaatctaatcacctttttctaaggaccgaaagatcttccttgaacttaagattcgttctttcatcgcttcccattaaaatggaggcttaagacaggtgccagcagtgtttttaaaaattttcaccagtggtttggtcttagaacttactcctgggcacagggtgtggtcacggcaaataggatgtgtctggactggatattttaattagacaagcccagagtaagaagaacgtggtgtttatggaaagcacttcagctgaattattgagtagatggtttttatgtaattgaaactggtctacaagtttatcagattcatcgtcgaagtgactcagtaataaagctttatcaaatacaagtccgccaaggaag

SEQ ID NO: 270250 - DNA, 434 bp, Homo Sapiens
  misc_feature (120)..(377): n is a, c, g, or t
  misc_feature (379)..(379): n is a, c, g, or t
  misc_feature (401)..(401): n is a, c, g, or t
  misc_feature (414)..(414): n is a, c, g, or t
ttaagctgcaaatcttcagttaacttctactcattaatcaactggaaatatggatctccaagataaacttgttgctaagtttaacatattggtcagttggaagaaaagcaaatggtcatnnnnnnnnnnnnnnnnnnnnnnnnnnnnnnnnnnnnnnnnnnnnnnnnnnnnnnnnnnnnnnnnnnnnnnnnnnnnnnnnnnnnnnnnnnnnnnnnnnnnnnnnnnnnnnnnnnnnnnnnnnnnnnnnnnnnnnnnnnnnnnnnnnnnnnnnnnnnnnnnnnnnnnnnnnnnnnnnnnnnnnnnnnnnnnnnnnnnnnnnnnnnnnnnnnnnnnnnnnnnnnnnnnnnnnnnnnnnnnnnnnnnnnnnnnnnnnnnnngntgaggccaagattcacggccanttgaactggaagncccaggtttacccgaggcca

SEQ ID NO: 270251 - DNA, 187 bp, Homo Sapiens
  misc_feature (167)..(167): n is a, c, g, or t
gtgtgagccaccactcctgggcctctggggtccttttttaagggcactaatttaattcatgaggtgctctaacctcatgacctaattacttcccaaagtctctaggctcccaacatttatccgctttggggggttaggggttttcaacatagggattttggggaggncaacaaacatttttgtcctt

SEQ ID NO: 270252 - DNA, 508 bp, Homo Sapiens
  misc_feature (25)..(25): n is a, c, g, or t
  misc_feature (71)..(71): n is a, c, g, or t
  misc_feature (86)..(86): n is a, c, g, or t
  misc_feature (101)..(101): n is a, c, g, or t
  misc_feature (108)..(108): n is a, c, g, or t
  misc_feature (117)..(117): n is a, c, g, or t
aaacatagccaccctaacccacgcngaaatccaggttaccccctcgggtgaagggtaagtaccaggtaacngcacctaacaagggnctgtatcccctttgnttttccngggcacctncccacaaagccacaggcaccggctgtcctgagcctagtgtcacctcctatgtattggcagtcctgtagcttttcagctggtaacaaatcaaaattcctcacctaaattcttctaaaacccaagtcagcaaattcatcatccaaatctgcaacctataaagaaaggttttagagttctataacttgcatttactttcattaactattaatttgtccaaacaccataaacagacaatattcaaatatttcaagacagctaccttacctaggccaagcaactcttcacttcttctaaagagataaagaaaaatgtttttctttgaaaggaaaagaaatggaaaactaaagatactattaggagtttcctaaattcacagaaagccagatcctga

SEQ ID NO: 270253 - DNA, 355 bp, Homo Sapiens
  misc_feature (20)..(20): n is a, c, g, or t
caattgacctgacccaaaancccttctgcacatgaggcccagtataggcaaccgtcacatttgtttgtttcaaatatgcagtgtggtattttgtttactttgcatttaccgtgagcaaagatacttcttggaatggctgcagtgaggccgtgtcattggctcacaaaagtgactcataggtaatttctgtgtttgcattccactgctctgctccctaaggtccttgactttctccccaggaattcacttaaaaagggactgagcattgtgtcaacctgttgcagtgtttttcatatatgtgttcactctaaaaatgcaaataaagactgcttccttagagggtgctcatacaaaa

SEQ ID NO: 270254 - DNA, 406 bp, Homo Sapiens
ggaaacggtcccaagaaaatctaacacccaaattttcctttgatagatagatgcctttaaaagggctggtaatgcagttacattctaacagagaagtccaaactacaggtaaaaactacggcttgtactgtgaaaaatgtgcagcttttcagttataaaactagttgaacactggtttacaagataatccgtagaacagagagactgtagaaaaatattccagcacttgagttgtgtgtggcagcagcatttgagtccatgaatgctatggtcattaaaataattgattatactttcctaaagaaaagccattttttaatgcaaagtctactacttccaaatgttattccaaacattaaattttaacagtctatcaatcaataaatgttgaacattttttttctaa

SEQ ID NO: 270255 - DNA, 452 bp, Homo Sapiens
  misc_feature (99)..(99): n is a, c, g, or t
tctgcccctgtcctaggttaggtcttccatggtttagagtaaaacccgtgagggatgttaattatgggcattgaagacttaaaggttttcttaaatttntaagtgaagccagtgattggccttcaatacttgtgctgagaggaattttaagccaggggaagtgtaagaaaatgttcccattcaggagagattgtgttggagtttctttcttcctctgtatgtaatttgtggtgtccacctttaaccacgtttcatccaaaacgatgatgcagctttaacatgaatgttacatttttattttcaaggaattattatctatgttccctttgtaaaggaaagataatgttgtaaatctttttattagataatgtaaagatgtatatcagtatttttggatcatgttatagattatggatatattgtttaataaataaagtattttttggaacaaa

SEQ ID NO: 270256 - DNA, 288 bp, Homo Sapiens
  misc_feature (116)..(116): n is a, c, g, or t
attttttgtagaaacagggtcttgctatgttgcccaggctattcttgaactcctgggcctcaagtgatcctcccatcttaggcctctcaaagtgctgggaattatagggtgtgagnctaccatgctccaccaatgtttgcttttaaatgggagtccaattcaaaaataagttcataaaaaatatttcaactcaagggcagattttagaaagctgtctttacctcattgcttttaacggcagtaaaggcatatatattttgaaatcgagagtgtgatctgtgtgcctaa

SEQ ID NO: 270257 - DNA, 449 bp, Homo Sapiens
cccttctcagtagagagcctccaatcaggattaaggtcatcatagcctggagtctggtgaaattgtgaaaacagctgtggattatatcaagattcatcgcatcaactgccatcttcccacttactcttcattcatctacttaagattagtccaacacctgctcattttgaccccattccccttgttgcttcagagatggaatcgcccagatgctcagtttccctgagaagtgaatggctgccaggaggcatcccatctgggagaaaggctcatcttaaaaattccatcctgttcttgtcccgggcgactgtaaaacttgacacttaacatccttaataatcccagtgtcttcggtactgcagtaaccccgtctccaccattagtaacctgcttataatacggtgatcctgaaagaactctccaggcagaaaggccacagctagaagctt

SEQ ID NO: 270258 - DNA, 541 bp, Homo Sapiens
  misc_feature (93)..(93): n is a, c, g, or t
  misc_feature (103)..(103): n is a, c, g, or t
cacctggtgggaaaggccgggaaagatcagtttttggtggggagaggcttattccgacgggcgaggtaaatccacagagtgggtagccagatntggaatgtgngctgtatgggtaaggactggccaggcaaggttgtttaccagggtaggggaaacacagagagtaaggaagtctggccttgaaagcaggaaacaaaggacaaggaaacttaagcaggctaaacttttgaagaagaatttcttactgtatttaacaataattttaaacacttatgtggttatttctagtattttgtgataattcacctttaggaaatggtatctcaaaccccaaaatgccagaaggttacctggaagagaactggtgtctgaaagcaggacggtggccatgggcattgacacacaggcgccatctgccagttcaccatctcgctaacagacgcccaccattcaggcactattttaatagaagcaaatagtttctattaaaatagtttctaggcagggtgcggtggctcacacctgtaatcccaacactttg

SEQ ID NO: 270259 - DNA, 346 bp, Homo Sapiens
  misc_feature (16)..(16): n is a, c, g, or t
  misc_feature (34)..(34): n is a, c, g, or t
  misc_feature (80)..(80): n is a, c, g, or t
  misc_feature (102)..(102): n is a, c, g, or t
gccctcaccttttcanctcccaccttaccagagntaacttttgcaggcccacttcccttgggttccggggggatttggcngcataaatcaaattggtccccngggctttcccctttggtcaacttaaaaatcctcatgacttgagtcaacttggttttcatctgattttcagaatctgtattttattgctgttgtctgcccccagtgttctccattcttttggggttttgcccttgaaaaatcctttactgttatagtgagattcttagggagagaaagtagagtttatatgtgcaaatctgccatttttacccagaactccaaaacagtaatcttagtgcaaaat

SEQ ID NO: 270260 - DNA, 403 bp, Homo Sapiens
agtggtcagtgtttctggctttcaaactttactaaaggctcagagaaaggaaaacccaaggcagttggtggggaggaagagaataaacaaatagcaaaagtcacatagatatcaaaccagaaaggactctgcctgagctaggattgagcctgggccaccattgtaaaatggcggaggctaaacaaagcattgccacatggttacaggtcacacttccaaggacgtaaaacaagatggaggcctgcagcaaagtttgctactgaccatacagaaagacatggcaaagcacaccaagattggctaaagcttaagcccaacctcacaaatcctttttccataacctaaaacttttacagagaaagaagaagcagttttccttatcattcttggtctagcaaaactc

SEQ ID NO: 270261 - DNA, 462 bp, Homo Sapiens
tacacatctgcacctggcctcaaactgccattgttttaggcttctctaattacacattttaaaatgtataacctttctctggcagaatatatgggctgcctatttacaacagatgtatctattaaatcttcagaattttttctactcatatagaattttaaacatcttcattaatatatttgctttctctatttatatcacattgtatgcatatatgtaaccactggacttttttaacttaagtaatcaggaggttgagagttccgcacagtttgcataaatatggtgtactggataggaatgtgggatctggaattcaggagacatagactgcaatcctggctatcaaatttgctagttatatgaccttggtaatttacttaacctctctgttcctcacatcctcatttataaagtggctataacacctaccccatagagttgaataagaaatgaagaata

SEQ ID NO: 270262 - DNA, 502 bp, Homo Sapiens
accttactactggcacctgtaagctacctattatcactggtgttttaatcaaatttcttatatttcctagttggtaaatattatcaatgaaataaaaagaggtaaaaattccacttatgtttactctttagggatgaatataaaaatgttctcaaacagaaagcctcctctataatgatccagtttttaaaagaattaaaaagctttttaaagatctacttatccctctatttttgggatagtgtagccatcaggaatgggatggggattcagtctgtgattaattgggatcacatgatgcttaaggtatgccagcaatcttttgtgagtgaaagttaattttcttggggacttagggtataattctagaggaaataagtttttattttgttgtgctctttagcgtcacataaatgaaaacttgtactcacaggtaccatatgcaggctccactgtaatgacatcatctggaacttctcctcatctgtctctacatcgagac

SEQ ID NO: 270263 - DNA, 534 bp, Homo Sapiens
  misc_feature (14)..(14): n is a, c, g, or t
  misc_feature (25)..(25): n is a, c, g, or t
  misc_feature (43)..(43): n is a, c, g, or t
  misc_feature (76)..(76): n is a, c, g, or t
  misc_feature (115)..(115): n is a, c, g, or t
  misc_feature (123)..(123): n is a, c, g, or t
  misc_feature (143)..(143): n is a, c, g, or t
ccaccccactctcnggttattagtnggatcctacttcaaaccnaattaaattgcccacacttgaaacaaaaaattngggccaaatatttaaaagagaaggcctaaggccagggantgaagaantccatagcttagacctcccncctaggtactggcctagttacaccccaacatagaagttggtccaagtcctgccatagaacagattcccccacatcagtggcctaaaagaaaaggtaggaattagaaaatatttaagtggggcacccaaaaaaaggaggttgatacagagcaggcaatccttaattgctattgtctttatgattgagataaccaatgggaacacatagtagtggtagtaactctttgggcttctaatcttaaagaataagtagctgtaagccacgtgcagaaaatattaggggggcacagggtcgaaaaagggcattcccagccaagaaataatggggcaaagttaagagctggaagcaagagagcacagctggagcacagggtatgaagctcatgtgctct

SEQ ID NO: 270264 - DNA, 949 bp, Homo Sapiens
  misc_feature (11)..(11): n is a, c, g, or t
  misc_feature (29)..(29): n is a, c, g, or t
  misc_feature (70)..(70): n is a, c, g, or t
  misc_feature (108)..(108): n is a, c, g, or t
  misc_feature (131)..(131): n is a, c, g, or t
ccggaagccanccccccccaaccccggcnccccgtgacgggatgtggggaaggtccccgggagacggccncgaaatccggggatccagaaaggacccggccccccatnacaacccggtgagtcagcgggtnaatttttaaaaaattaaaattgccaaaaagtttcctatcaaaaggtgtttttaaaaaggccagagtgtgatgagcctaagtgaacatagtagagagaatgtgggtcatttttgttgtctgggacagagcagaaagcatgcttgtgaccagaataaaatttgtttgaatttttattacacaactatttaatataaaacacattctcattgtaaagattatagacctatgagagtaaaacacaatcattctcttttctatgtctcccttttgacattagtgtctatccagtccttttcctatgcgtttataaactactaaaatgttttaaccttattaatttaattgttagccctggaaaataaggatctagaaattctaaccctagcatctctgaaaacatcaaagatctgcccaaaagtggttcattttcccaaaccccaagaataaagattactttcttagcacagttaaccccacactttaacaagcattctttaacagtaagtaaaacccctcatggtgcaatctaagagagaaaagttaacagtaagtaaaacccctcatggtacgatctaagagagaaaagatggagaagggtgagactcatattaagcaagcaattgattttaatttgtgctgcagggaacaaggccaagttgggaggcaacaggctaggaggttccattaatcctctgctgtttcctaaatgcacacagcttccctgagagcttggctttagattaatgcaaattcttcagcccatgggtaagaattctttgggacagctgcatccttggaaatgtaaggatgctcgtgcc

SEQ ID NO: 270265 - DNA, 385 bp, Homo Sapiens
  misc_feature (17)..(17): n is a, c, g, or t
  misc_feature (39)..(39): n is a, c, g, or t
  misc_feature (203)..(203): n is a, c, g, or t
tctggcttccccctggncccaagaaggcttggtcaaagncccgtctggcaaggcaaatctggtaggccccatgattcaaggaacaagtgacattcagtggtccagtccactccctcagaggaggcgggtccagagggtgaaacaggctgtgttgatgacagactcccaggtggtggtaggtggagaccagttgggcagggggntctcgctgtcctggggctgtactgggaagggctctcggaaaaccactgtcagagacgtctttcctaagtgggagtccagaaacactagcacaaagcagtcagtgaacgtcgtgattcagcacaaccaggtacgtgagttcccaagtctgggctttggaaatggcgacagctctgggggaagc

SEQ ID NO: 270266 - DNA, 462 bp, Homo Sapiens
  misc_feature (14)..(14): n is a, c, g, or t
  misc_feature (23)..(23): n is a, c, g, or t
  misc_feature (48)..(48): n is a, c, g, or t
  misc_feature (54)..(54): n is a, c, g, or t
  misc_feature (160)..(160): n is a, c, g, or t
  misc_feature (177)..(177): n is a, c, g, or t
acccagtgggccanaaaaccccngtcatgctcctgaacccggcccccnggactnaaggaacaatttgtgaaaatcaattctgtgaaagggccgggaggaagcagtcaacctaatcctcctgccttcacagttcaaggtgaaaaccgttagcccgtatccnttgattccctgggggcntgccgggcccatgtgtgctcccctgcacacctgggtgcctttctgaggctggcagcagcggccggggtcaggggtccctgggctcctaggctcacacctcagctcacagttgcgtccttgcaggaggacactgggtgtctgacaaacacaaggcctcgacagcaggtctggaactttcaaccccagcaggatgagggggaatgggggtggatgtcaggtaagtaatttctggtcccactacaaaactttatttttgattagagtaccattctcaatctcttctac

SEQ ID NO: 270267 - DNA, 527 bp, Homo Sapiens
  misc_feature (89)..(89): n is a, c, g, or t
  misc_feature (158)..(158): n is a, c, g, or t
  misc_feature (179)..(179): n is a, c, g, or t
  misc_feature (203)..(203): n is a, c, g, or t
  misc_feature (220)..(220): n is a, c, g, or t
aaaaataagccccggcaacctttagggcccaatcctcaacctccccaaaaagtgtacaacatcatcaatatgaaagggaaccaccaggncagccaacccttcaagatgaaccccggtgaattgcccccttgaaaattcaagccctttttgaaagtcangctccccacaatgaaatgaanagctgtcctgtgtgaacaaacatnaatatggcaagaagtgnacagtgtatgaatttcccagacaaagtcataaaggatgttacggtttctgccttgctgcctttggtagcttgctctgagagtaagccatcatgtggggacactcaagcagcctcatagagagacccacatggggaggactatcgcctcccaccaacaaccagcaccaacttgccaattatgtgagtgtgacaccttggaagtagatccttgatcgtcaagcaagcctttagaggactgcagacttagaactgctcaactagccagccaagtttcccctcacccatacaactatgaagatagtgtttg

SEQ ID NO: 270268 - DNA, 515 bp, Homo Sapiens
  misc_feature (367)..(367): n is a, c, g, or t
  misc_feature (458)..(458): n is a, c, g, or t
  misc_feature (493)..(493): n is a, c, g, or t
agtgatacttagcttacaagagaaattagattcatgtctgacaactgtagggagtttacaagctaaattccacaacatggcaatatgtgattaagggctgaaatgaaacattcaggcagtaaattcagtgggtcagagaataggggaagtgtgtgtaggtagaaatatcagggcagatggagcctgagagagtcttcttgtgggcaagggactccacagggtccttttagagatgcttggggaaaacagtaagtagccttaagatcagagtggcccatttcacaaaacaatctgtgtgaaataacattgcctgatgaggaacccatttaaaactgagttcccattgccttgaagaatatgtcccacnttaggccttctcttaagcttgcctttattttaattatttgaaggagtagaagaaaagacatttgttttccccaattttttttcttgatttntatggacttttgacctgtttaaaactaaaactttnacaagctctgactgagggtgtg

SEQ ID NO: 270269 - DNA, 463 bp, Homo Sapiens
  misc_feature (393)..(393): n is a, c, g, or t
  misc_feature (407)..(407): n is a, c, g, or t
  misc_feature (414)..(414): n is a, c, g, or t
  misc_feature (422)..(422): n is a, c, g, or t
  misc_feature (429)..(429): n is a, c, g, or t
  misc_feature (436)..(436): n is a, c, g, or t
tggacttgagtgttgagctgaccatatgtggtctccaagcctgaccctctgcaagaacaggagcaggaaaagaagcagggggtggtgctcttccttgcccttcatgctcatttgtgttcccagctcacgtatgttaaggatatctattggcctaactagacacttgcacattattcttggctacattttttaaagtcacaggggttttaatttagttaatcttgttttgtctggttttactttgtttttaaacaccagagaggaaaaagaaagctcttagggtgaaaataccaattataaaatgagtgaatcctagagtttaattcctttacaagtttaatcattttacaagctttggatttttcccatgggcagatggaagttttgggaganccgggcttacatgntttaagntaggcttnttccaantttttgnatttcatagagttaatttagtgtaagt

SEQ ID NO: 270270 - DNA, 430 bp, Homo Sapiens
  misc_feature (20)..(20): n is a, c, g, or t
  misc_feature (179)..(179): n is a, c, g, or t
  misc_feature (200)..(200): n is a, c, g, or t
  misc_feature (250)..(250): n is a, c, g, or t
  misc_feature (338)..(338): n is a, c, g, or t
  misc_feature (353)..(353): n is a, c, g, or t
  misc_feature (363)..(363): n is a, c, g, or t
gactgcatagggctcggcgntggggtgtaagtgtgtgtgtcctctagaagaagacaacactgagaacagaaggagaggatcttggagatttgttaatttcctattgcagttagccttgtctggggctctcactttagcacttaaaataacatactcctttgcacagatgttattttttnctcttcatgtgtacaacttgnaattatccaatgggccttgctttgagggatatgcatcctatcttattgancctggtcactgtgtagggacaatgggaggaacacaggtaaaaaaccctcaatgggatactactttacactaaattaactctatgaatncaaaatttgaaggangctacttaancatgtaagccggggtccccaaaacttcatctgccaggggaaaaatcaaagcttgtaaaaggattaaa

SEQ ID NO: 270271 - DNA, 488 bp, Homo Sapiens
  misc_feature (446)..(446): n is a, c, g, or t
  misc_feature (466)..(466): n is a, c, g, or t
gagcacttagtcatagctagactggtcctgcaggggtggtggaaaatgactggattctggatatgttttgaaccgacatccaacaagaatcactgttgaattagacatcaagtgtgaacaaaagaaaggagtctttgaaagagtcttctttgaaaatactgcaaatgagcttttatttctgattttgatcctaatcctaggggagttcaacatgatggagacattgtttaggcattaggcattagactgttgtttcctaaattgcttcctgagtaaaccaattaaaattataatgtgggtctccagggagaaaagggaaggagccaaacttggtacaatttcacctctttaaatgccacttaacggcacttttctcctatttgcttggggtaattgaaatttctgggcaaatagggggcaaaattgaacacagggggccctcatgnaggcagcccatccctatttnacttacagctgtgattgctacc

SEQ ID NO: 270272 - DNA, 390 bp, Homo Sapiens
  misc_feature (201)..(201): n is a, c, g, or t
aaatggggggacatataactaagagaaagtggggactatgggaggggagacaagggcaagaatgagtagggaaaaataaatacaacaggggagggaccgtgcccaggacatatgatgatgacgtgcccatgattggttcataaaagtgattacaaattattttatcaaattcattattatggcaaactaggccctgcatgnataaggctgttacctgcctctccagcctcatctcattttactctgatcactatgctgtagccaagaaggtctctgccagttcctggaatatctgatcacctcagggactttgcacaggctgtccccttttcctatacattcgttctgtaattcttcaaaaaggtggttccgcctgggtgcagtgctcat

SEQ ID NO: 270273 - DNA, 487 bp, Homo Sapiens
  misc_feature (237)..(251): n is a, c, g, or t
  misc_feature (388)..(388): n is a, c, g, or t
  misc_feature (468)..(468): n is a, c, g, or t
attcggcacaggcagaagctgtgaaatgctgtattgccctttcacagcgtctttctcttgcttatgttttgtaaggttatttgatatgaatggttgctacaactaagtcatttctctgtcgtaagtcttaaaatctaatgttttccaccttttttgcatgatgggcattgaatgattggaataaaaagcaatgtccctgctttaaaatagacacttattgtctccttatttgtcccnnnnnnnnnnnnnnnatatattaatgtataaagatacacacacacatatatctacactcttgttaatgttttttattgttctcgccatataagtataaattaatgtcagaaatatttgggcaagaaatagggggtacaggaatactgcaatnatctaagaaaaatactacaattggttttacttaaaacagtaaatctatttgagattttaaaatagtgaacataaaaggtngggaaaaaaaggataagat

SEQ ID NO: 270274 - DNA, 497 bp, Homo Sapiens
  misc_feature (17)..(17): n is a, c, g, or t
  misc_feature (22)..(22): n is a, c, g, or t
  misc_feature (97)..(97): n is a, c, g, or t
  misc_feature (147)..(147): n is a, c, g, or t
aagggttgaaaaataanatggnaaaaaactcacgtcccttaaaaaacactttaaatacaggccatccataaaacattttaaagggcttccttaaaanccctaaaattaattcctatgaagtttgtacccctctttggttgccagtgnaaaggactgaattgtgtcacggcacaccaaatatgtgtgaatggcatagagtcatcaaaatctgcctagtgaacagaaatgacaggacagagcttcatttctcctgctgccaccgcctggaggcttataatccatcacagtgaggcggtttccatcctgcacccagtccacctttcacagcgcctttggaacaaacgtggaaggtaactaccatgtgtgtgcatgtgtgttccatatatatattacacatctctctatatacacacatatacacctatcatcaattcagaatcaaaagcttcttataaaaattgttctctgtacctgcccttcatcagaatctaaatttc

SEQ ID NO: 270275 - DNA, 412 bp, Homo Sapiens
  misc_feature (35)..(35): n is a, c, g, or t
  misc_feature (47)..(47): n is a, c, g, or t
  misc_feature (72)..(72): n is a, c, g, or t
gccctgaaatccaagccaccctttcctgatccccngtggtaccaaancctgaaagtccaataaccgggaagnaaacctagaaaacctccacaaatatgtgtaaacctaaacaaccctgcctccctcaacacccccggcagtaggtcaaagaagaaaccctaaagggaaatccagaaatataatgagacaaattaaaatggaaacacaacatattaaaacccaaacttatggggtacagtagaagcagctctaaaagggaagcctatggcaataagtgcctacattgagaaaaaagacatatctgaaataaacaacctaactttatacttgaaggaatgagaaaaagaacaaactaagcccaaacttagtagaaggaaggaaataacaaagctcagagccgaaataaattatg

SEQ ID NO: 270276 - DNA, 516 bp, Homo Sapiens
  misc_feature (12)..(12): n is a, c, g, or t
  misc_feature (452)..(452): n is a, c, g, or t
  misc_feature (461)..(461): n is a, c, g, or t
ttcggcacaggntgatttcataaattaattagaaagccatctttagcatattgcttatgtctggatccatgtttctgaggaaaaagacattctcaggtgatgtatttttttcatgcattagtatgcatttgtaaaaaataatgcatgtttctttaataattaattttcatcttctataagatgccatgtgaagaagttgtggaaatgtagaataaaaagctaaagctgccaaatttctgttgaactcttaaaaacagctcatgtttgtttgtcctctcgggttgtggcctagcctatttgcaatgtaatgaagctgcagggttcttgtatagctaaagcgttcaattgcatttcacgtgctgtggtggatgtggggtgctgtagacaggcttcttctcttcctgctctcaaaatacctcggcttgacatttggacagatcctgtcattggtnagctgagcnaaaaaccacacaaaagttgtgtaagagatgattaacaaaggagcgagagaaatct

SEQ ID NO: 270277 - DNA, 309 bp, Homo Sapiens
  misc_feature (42)..(100): n is a, c, g, or t
  misc_feature (299)..(299): n is a, c, g, or t
agtagagacagggtttcactacattggccaggctggtgttgnnnnnnnnnnnnnnnnnnnnnnnnnnnnnnnnnnnnnnnnnnnnnnnnnnnnnnnnnnntaagacacagtgctcagccccaaatgggaaatggatccatctatatcaatatggagaacactcccaataaacctaccaggaaaaataaaaatttcacctaattctttaagtaaacaatctacagcaaaagtaacaacaaactctgggcccagacattattttaaggctttaaatttattaatttttctatgtctaattnctcttacaga

SEQ ID NO: 270278 - DNA, 408 bp, Homo Sapiens
aaatatgccaaatccaagtatgactttgtagcaaggaacaacagtgagctctcggttctaaaggatgatattttagagatacttgatgatcggaagcaatggtggaaagttcgaaatgcaagtggagactctggatttgtgccaaataacattttggatattgtgagacctccagaatctcggattggggcgtgctgatccaccttatactcatactatacagaaacaaaggatggagtatggcccaagaccagctgatactccccctgctccatcacctcctccaacaccaagctcctgttcctgttccccttcccccttccactccagcacctgttcctgtgtcaaaagggtcccaagcaaatataacacgtcaaaacagcagctccagtgacagtggtggcagta

SEQ ID NO: 270279 - DNA, 191 bp, Homo Sapiens
ccatggaccagcaccagtcaagaattagcaggactagcatagacacggtatctggctcaactcctaaaggagcttccaaaaaaaggctcttgggattttatggacgctggagcaaggggaaaggaaaggggaaaggtctgggagtggaaaagtcctaaatattgagttagggtggagaaatgtttcttcca

SEQ ID NO: 270280 - DNA, 349 bp, Homo Sapiens
  misc_feature (17)..(17): n is a, c, g, or t
  misc_feature (78)..(78): n is a, c, g, or t
  misc_feature (122)..(122): n is a, c, g, or t
gccccaagcccaagtcncgtaatgcaagacagacactgatggttttccatcaaatactggcaaattttagtgaagtanccttttaaacctaaaccactcagagaaagtttttcacaggttancctctaattgataattattcctatagaggattttaccaaaaaacccatatttcttacccaggagtatcctttcaaggtgttccctccatactgcagtgggttgggttatataatgtccagagatttggtgccaaggatctatgaaatgatgggtcacgtaaaacccatcaagtttgaagatgtttatgtcgggatctgtttgaatttattaaaagtgaacattcata

SEQ ID NO: 270281 - DNA, 397 bp, Homo Sapiens
  misc_feature (23)..(23): n is a, c, g, or t
ttcggcacagaactggaagtggnttaaacaagattaaagtgttttgatatgtattaacattgaaacagtgaagtagaggagaatagggctaggggaaggtcaaaaaatattttagacttattcataatgttgaaacttttaacacaatgactacattaagatatgtcagtctcctagggtatcatttcctgtcctcaactttgccaattatataatcagatgctataagcaggtatatttagattctccagaaaagaagggtttgcttcattttcttaaaacaattttaggattgtgcagcatttttgagcttcaacaaaaattataaacctctctctaggaaagacatacacaaaatacagatatttttctaaattaataaatgtttagggagaaa

SEQ ID NO: 270282 - DNA, 517 bp, Homo Sapiens
  misc_feature (168)..(321): n is a, c, g, or t
  misc_feature (362)..(440): n is a, c, g, or t
gggtttaaagtcatagggttaagatggctcataaccaaatttagagactatttttatgcattgttaaagtggaatgctggttaaattttatactttattcacaagagtcactgtgaattgaattgtgaattcagttctgaattgtgttcccaccagcaccaccaaatnnnnnnnnnnnnnnnnnnnnnnnnnnnnnnnnnnnnnnnnnnnnnnnnnnnnnnnnnnnnnnnnnnnnnnnnnnnnnnnnnnnnnnnnnnnnnnnnnnnnnnnnnnnnnnnnnnnnnnnnnnnnnnnnnnnnnnnnnnnnnnnnnnnnnnnnnncaccagaggtttgtctctccacatgtgcacagagggaaatnnnnnnnnnnnnnnnnnnnnnnnnnnnnnnnnnnnnnnnnnnnnnnnnnnnnnnnnnnnnnnnnnnnnnnnnnnnnnnngcaccttggatcttgggactttttaatcttccagggactgttgaggaaaataaattgttgggttgttttaagccaaa

SEQ ID NO: 270283 - DNA, 404 bp, Homo Sapiens
  misc_feature (247)..(247): n is a, c, g, or t
  misc_feature (309)..(309): n is a, c, g, or t
  misc_feature (320)..(320): n is a, c, g, or t
  misc_feature (328)..(328): n is a, c, g, or t
  misc_feature (369)..(369): n is a, c, g, or t
agaggcatgagctgggtagagcattatttctaagtgttctgacacgacaaatcacaaggcaggaattcagcaggacggaggcaggctccaaaaagaatatgttcaatggacatccctcaaaatacctctctaggacccctaccaagggagagtcagaccctttgctgatctactttgcccggcattctcttctgggggcttttccaccgggggggccccaaacttcctggggccaaatcttcaggtnccaaatgttcccctcatctttcccggggggttacaagttaattttcccttttcatttcttcntcattaacatncctatttngtttcccttttttggggcacttgcttattggtggtcacttncacatttcattaggggggcagaggttcatgtcttt

SEQ ID NO: 270284 - DNA, 482 bp, Homo Sapiens
  misc_feature (182)..(182): n is a, c, g, or t
  misc_feature (280)..(280): n is a, c, g, or t
  misc_feature (350)..(350): n is a, c, g, or t
  misc_feature (409)..(409): n is a, c, g, or t
  misc_feature (415)..(415): n is a, c, g, or t
  misc_feature (429)..(429): n is a, c, g, or t
  misc_feature (444)..(444): n is a, c, g, or t
  misc_feature (456)..(456): n is a, c, g, or t
ttaaatgccaacaagtttattcattacccttcaataagatacagtatagaattctgtaaaaagagaatataaatgattaaaaacagtaaattttacatcttaccacaataaaaaagaatatagacataccttataggtataaataatatttccatttctttcaacatttaatacacgtaagnctctcataatcgttttctaaaacatctgaaatgataataggaggttaatactcaggcagaagatgggttaaaaacatatctaaccaatatattagtgnaggaagccaaatataaatatatactaataattctattatataaaacttaaaaacaggcaaaaccgaatcnccttttatttaggaagtaccaaccagtagtaacccttttaagggaagggagaaagcccntagtcnttggggaggtatcncccaggtgagccctngttacgtggttngggtaatgggttaatggtttttgggg

SEQ ID NO: 270285 - DNA, 394 bp, Homo Sapiens
  misc_feature (177)..(196): n is a, c, g, or t
  misc_feature (199)..(311): n is a, c, g, or t
cctttagccctaaaaaccctttccctttgtgccccaactaaatttgattatttggaaaaataatcaagacaaaattgtagaaccctactctttgctttgcacgaatgaaggccctaacaagcaaatcaaagttcaccctaaatgcagatggttatttctggagcttatcttgtcttnnnnnnnnnnnnnnnnnnnngtnnnnnnnnnnnnnnnnnnnnnnnnnnnnnnnnnnnnnnnnnnnnnnnnnnnnnnnnnnnnnnnnnnnnnnnnnnnnnnnnnnnnnnnnnnnnnnnnnnnnnnnnnnnnnnnnngctttaacctgggagacggagattacagtcagccaagactggccactgcactccagcctggcgacaaagcaagactgcatctt

SEQ ID NO: 270286 - DNA, 365 bp, Homo Sapiens
  misc_feature (21)..(21): n is a, c, g, or t
  misc_feature (32)..(32): n is a, c, g, or t
  misc_feature (42)..(42): n is a, c, g, or t
aaccctgtcatttacagaacnccttctcaggnaatggtcccnaggggtcaccccgggccttcccaactctcagcacaatgagaaaggaatgctggtccccagatacaagacccagagggcagactgtgggccttcagggagctcaattcctacaaaggtgaggctatttatgtctcgaattttcccctctatacttgtagagctagaaagggtgagagatctagcatctaaataggcatgcagacttttttgaagaaccacctaatgcctgtaatgccaacactctgggaggctgaggcagaaggatgcttgagcccaggagctcaagaccagtctgggcaatatagtgagaccctgtctctaca

SEQ ID NO: 270287 - DNA, 417 bp, Homo Sapiens
  misc_feature (35)..(35): n is a, c, g, or t
  misc_feature (59)..(59): n is a, c, g, or t
  misc_feature (65)..(65): n is a, c, g, or t
  misc_feature (115)..(115): n is a, c, g, or t
ccccagaatgggaaaaagagtgaaatggggacatnctgtaaaactgtcccctccctaantcccanggatcagaaaactccccgttttgctgactcattccataactggagaaaanaagctccattgaccgaagccacagggcagacatggaagtttaaattttctctaaaaattaaaaatgccaaggataaaagctggctgcttccaggagggggaagaggagtggggagtgaacgatgaaacttttccagatgaacggaccataaatgtgttactggctttgtgcctaaagctcattttattatgacctatatgctcctgataaaaagagatctgtgtactatatacttcccacttcccagaatcccttgtatcacctttaacgggaattgtattttctaataaatgacatttgag

SEQ ID NO: 270288 - DNA, 321 bp, Homo Sapiens
tttcacacaggggcatttctaaagccacagggtgcatggctgtgcttaactgtgttttccatcctagtctgttcctgtggacgtctacagaataagaattaaccatccttgtccactgctgggatggctcaggctgccaagtcatttcccaagaccagtatgagagagtcctttctcgggctagctgcttcagtaggaatcagtgatctggtacgtggggtttgctcttggtttctgcatttcttggtaaaaggaaaaccttttaaaatgctaagtcataaaacctttggtagtgaagccaagcggcattccctccagact

SEQ ID NO: 270289 - DNA, 206 bp, Homo Sapiens
  misc_feature (155)..(155): n is a, c, g, or t
  misc_feature (178)..(178): n is a, c, g, or t
  misc_feature (189)..(189): n is a, c, g, or t
gcaattaattttgtcttgcggttaagttaaagggacagtggcttctgctgcccttactgatctcacttagtggattaagttgtttaaaacccgaggctctacaaacaagcccaaagatgtcacttttggttggtttggggaagcaagggggagcnaggtgtaagatgggggaattgtncttgggggctnggcaggaaattagattc

SEQ ID NO: 270290 - DNA, 584 bp, Homo Sapiens
  misc_feature (53)..(53): n is a, c, g, or t
agagacacataagaaagctcctatctgcagccagactcttcaaactgccgccnagccctgaggccatgtagcctagcccggaatgggcctctctggacaagagccaccctttcactgtgcatatgatgctgatgcaattcctccatcatctctggacgtgcagaccagatccagaagaaaggcctggcgtgtggccaaacagcgtgaaaccttggcacaggactgaggatcctctcctccagaaaagccccctcgaggaaataaattagtgcggttctctttgacccccaaagacaagacaagcacttatttttattttcagaagacaaaagaaccaagatgccaactggctgcgaatgctctatctccagtctgtctctgtgtactggtagaggctgggaggagtagggggcagcctgttccatttctgatagtgcccttgctcttctgtctgtcatcttgcaggatcccgagggccagatgggcttagctaggccaaagtaacagactcaagagttattgtacattactgaccacgctcatttgttcaaaagttagaacatctggctgcaccaggttaactt

SEQ ID NO: 270291 - DNA, 652 bp, Homo Sapiens
  misc_feature (17)..(17): n is a, c, g, or t
  misc_feature (29)..(29): n is a, c, g, or t
  misc_feature (65)..(65): n is a, c, g, or t
  misc_feature (88)..(88): n is a, c, g, or t
  misc_feature (112)..(112): n is a, c, g, or t
  misc_feature (133)..(133): n is a, c, g, or t
  misc_feature (257)..(257): n is a, c, g, or t
agtttccagagccagtnctggaaatccanaactgcccctagtttgaacctcccaactgtccacanaatccttgggccttgtccacatnaggccaatccaaatcccttaaagnaagaaaaaacatccagaggtnagtaaatgcctgccatagagtttaaaaaggataatatgatacagaatcacaggatggctacttgagattgtgggcctggacatgaacacggccctatttgaggaggtggtgataaagtgaatancctgatggaaaggaacaaacccctggagaaggaagctcagagacaggaagcgggggtgaagggagggacaggaggaagagaattctccactgaggagagtagggcaaaagcaagctccaggtggataaaatgagatgctgcatgtggagtctagcataatggttggtgggtagagagagaggaaaagagggaagtagttgaacaaaaattagaagggaaggaaggagggaaggtgtgaatgaatgagaatctcaaatcctgtagggctgagctctctaggggactttactcatccttttaatcttgctttgaactgcattttctcttctcagttgcaattactactttgccctgttctgcttataagaggagctactattaagagcctagtgagt

SEQ ID NO: 270292 - DNA, 596 bp, Homo Sapiens
aactctatgcagcatttactacctctgatgttttttcttctttaaggatttgattgccttatgtgacaagcccaagatctgtgacagttggagctcaaactaggcagtcttgattccagactgctctgaactagtatttgaaggaactaatgaacatgacatgttaaatgaaagtttggggacgtacactcaggatggaagcagggggacacaacagaaatgaaagaattttctgtagatctgggatctggacacctgccccccgtcatgggaaggcagtaaacaagatgctaactgatggagtgaaatccccaggagatgcagaaggcaagtgcagctaactgaggcctcaggggcaggagatgcccatcaggatgagagctatgtctttctccagtgatgactctgcttctatgaggtcaccagcagtagaaccatatcttgctggcatacacttgggatggccccgcctcctggacttccatctgtcatcaggagaacataaccatctggagtcagtacagatcatcaatccttccacatatacaagttcattttaaatttttaaaaatataatacaactgagaagtcttcat

SEQ ID NO: 270293 - DNA, 169 bp, Homo Sapiens
gattctgcatctcgaaattggtatttcaaattcccaaaaacataaaaagatggaacataattctaattacaggaagcaaaggtttccaaatggctgatgtttgactttgtgacgtgtgcttttcctttttaaataggatgatgcattccaggatgcgctagtggttttc

SEQ ID NO: 270294 - DNA, 463 bp, Homo Sapiens
  misc_feature (367)..(367): n is a, c, g, or t
  misc_feature (422)..(422): n is a, c, g, or t
caggcaaagtttaataggcttgtggctctagcagcacaacggagcagagtacagaaaaggagtcctgatgttagctcccaaaagggcgctgctcttggtcattttaaggaagttgaggcaggaaaaaggagcaacgtgtaggcaatcgtttaggcagggtcttctctgcacctacacagtgaggtctcatgcccaaacatgaggcacatgtgtcagaggcatttgaaccagagtcactccatcttgaatgggggctgggtaaaataaggttgagacctactggggctgcattcctgagagattagggcattcttactcacaggatgagacaggaagtcggcactaagtacaggtcacaaagaccttngctgataaaaagaagttggtaaagaagccggccaaaaccagccaaaacccaccanaaccaagatggtaacaaaaatgacctcgggtcatcctcact

SEQ ID NO: 270295 - DNA, 453 bp, Homo Sapiens
aaaccacaaacacgctctcacccacgtttacgacttataactcaccaaataaacctgattcctataaccataaaacaaagccgaaatgagttggacatgtaccagcgaggagaagcaggaggcgggtggagattgccagagggggctctcagctgtggagtcgcggctctccgtgtggatttcggcatcctcagtcttgcagaaacttaatattccaatcagcacccaagcaaggcgttggaagccaaggagtgcatgagttgccccatagctgggggaatattactcaccaggtcatggtcggctgcgtaaaatacaaccctcatatatcattataactgccagccaacgacagttataattgagacggcaataactaggagagagttctttaatttaacatccaattattacaagttatcacttcttaataaatgtaatataacagacaat

SEQ ID NO: 270296 - DNA, 376 bp, Homo Sapiens
  misc_feature (233)..(250): n is a, c, g, or t
aggcatttccctcctgcccctagtggtatccaagaacatgctggagacattaagaactcctgaagaaagtgaggggaatttcctatgcctagggccccacccaccaacaagcttaaacctatacttctgaacttgctcaaggttaccctaaagtaaggaaaataagaaagttaaagaaattatttaaatattttgagtttatctttaaatctgaggaatatttgcacatagtnnnnnnnnnnnnnnnnnnggaatcaaaatgtataaaatgaagagcaacagtttctcactcattggtctcattgagagagacaagtacaggcaacaagggttaatttcagttctggtggctacctccaaaactctcatgcttatc

SEQ ID NO: 270297 - DNA, 355 bp, Homo Sapiens
  misc_feature (155)..(155): n is a, c, g, or t
  misc_feature (192)..(192): n is a, c, g, or t
tgacagcccatgcccggcctaggattctaaaatttttaaaaggcagtcataaaattataagcaacaaattgtttgcaaattattcaaattttctatgtctcacagaggtcacttctcctttctttttagcatggataaaattcatgaaaatgaanacacagatggtaatgggataattaaacagctttatcncagtgtttgtctgaacaagacaataaaagcttcatcacagtacttaatcactagttcccaccgtccccatataccccctaaacagtgcaaaacaggggaaaaatgtaaagcacccaccactcgattctaatttggcttataatttggtttacttaatatgaat

SEQ ID NO: 270298 - DNA, 365 bp, Homo Sapiens
  misc_feature (304)..(304): n is a, c, g, or t
  misc_feature (325)..(325): n is a, c, g, or t
actggaagttaactgagtaaaatatttcaagaagaaagtaatcaataataattacaattataatgctgagggcttcaggtgaaataataaatacttgacatctaaatcctttccaaggaagggaaagacaagagtatatacacaacacatacacataacagcatttttgcacataattgtcatgtaatcacacagctcttcaaactgcaatggagacattagcttaagactctgatttaacacaatatttatttctactatgctgtgctagcaagaagatcctgatttgtacatttgactaaantaaatacttttaaaaaataantttttggttgtgcattattgggtagtacatacgttttgga

SEQ ID NO: 270299 - DNA, 447 bp, Homo Sapiens
  misc_feature (63)..(63): n is a, c, g, or t
acaccccatgtaccccactggacgaacacccattcaggaaccacaccaccctctccaacttcnactggacgaacagccctgagacctcaggcaaggaatcccccacagctgcccaccctgggagaagagatatccttgcaggaaccccagcacaagtcaaaccctgccatctcccaggtcacctcagatgtttatgcccctgggcctgaggcacaaagtgacagggtggggagatgtgaaaggtcaaggctgtcattgttttctgtgcaaacagcaccgcctggagttgcacaacctggtggctctgagcagggtaggacagagggaggcagcctctcatttggaaagtcattggaggattgattagttgtgtgatctggggcaggtcacctaatcgctctgagcctcaattttctcatctgcaaagtgagaaaataacacctaccc

SEQ ID NO: 270300 - DNA, 535 bp, Homo Sapiens
  misc_feature (348)..(381): n is a, c, g, or t
taaatgtaagtctggtcatttcacttctctgctaaaaaccttccagtgacttccccttttaccgagaataaaaaggtagtgatttacagtgatctttaagaccctacctacacagttgcctgcccctattctcttgagttcatatcctactagtttcttccttactctctatgctacagtaacactggcctcctttttgttcctcgaacacacagggtatgctcctatgcatgcactggctatttcctctatctggaatactctttcccctagataccacatgactcactacatcaccttctttagctcgttgatgaaacgtcactttgggcttgccggtggctcacnnnnnnnnnnnnnnnnnnnnnnnnnnnnnnnnnnagaattcacttgagtccaggaattcaagactagcctgggcaacatgatgagacctcccctctacaaagggtaaactaaattagctgggcgtggtggtacatggcggtagtcccagctgctcaggaggaggctaaagtaggagaatcacttgagc

SEQ ID NO: 270301 - DNA, 475 bp, Homo Sapiens
  misc_feature (240)..(250): n is a, c, g, or t
  misc_feature (292)..(292): n is a, c, g, or t
  misc_feature (306)..(397): n is a, c, g, or t
aaatcttgggggaaagtgaccacatactgtacaccaaaaattatctgacacaggtctaaaacaatttagaagttaattttgccaaggttaaggacatgcctggaagaactaaatagggaatcccagaaacagtctggtctgtgccttttctccagagatgatgctgagggcttcagtatttaaagggaaaaagtgggctaaaggtgaaaagaggaaaggtatggtaatccgcatgttgcnnnnnnnnnnnggagaagcactgggcacagtggctcacccctataatcctagnactttgtaaggccnnnnnnnnnnnnnnnnnnnnnnnnnnnnnnnnnnnnnnnnnnnnnnnnnnnnnnnnnnnnnnnnnnnnnnnnnnnnnnnnnnnnnnnnnnnncatggtggcacacgccagaagtcccagctactcaggaggctgaagcagaagagtcacttgaacccaggagtcggaagt

SEQ ID NO: 270302 - DNA, 424 bp, Homo Sapiens
  misc_feature (402)..(402): n is a, c, g, or t
ttgagattaaaactagtctttatcattactgctgtgacactcttgcttagtatattaagagactcatacatttttgatatcacaactttttgatggcttttcaatattctaaatttgggttcctggtgaaaccaaatggggtacactttcatatccaaattaataaaacctataaggcatctgggtggcctctatgaaataaattaattacccatagtgtagtttctaggaggcatgtgtacacacactcttcattgtgggcacaaatttaaatcgcctcatgaccatgtctgtgagccagggtcaagctggtttggccttcttgcatgcattttccaaggcccactggtaggagccagccatggagtttttcatacagttacttaacgtttgtgggaaaanaggagctttagcccattttttg

SEQ ID NO: 270303 - DNA, 441 bp, Homo Sapiens
  misc_feature (63)..(63): n is a, c, g, or t
  misc_feature (125)..(125): n is a, c, g, or t
gaagtcagtggggtatacaaatcaatcattttagttgttttagggctttttattgaatagggnaaatataaacaatgttgtagagtaatgagaaatcctcccacactgaaaaaaaactagtagtnttaatttttttggaatcatattttctgaggtgtaactggctttcattagatgatcatacttttcctgacatttttacaatgtattctttctttaaatataaaaactgacaagataaatatagtgtttcaacttcttagcctattatttgtgatttttctgttttcctctgacccatcattgattctataaaaaagtgccaggccaagaaacaatagttagagtaattcttcctttaagttctttcagcagttctgccaagcaagcatgtatcattcctgatgtacttctaccattgacagcaagaagaatatcacc

SEQ ID NO: 270304 - DNA, 358 bp, Homo Sapiens
aaagagatggggtcttgctagcttgctcgggctgaactaaagatatcctcctgcctcagcctcccaggtagttggaactatagtaggagtatctaccctgccctgctagaacttcaagttttgatgggcaaatccaccccagaggacaggacaaatgccagtattctggttaatagccccagatgagccagcttcccacccatctcccgtaagtgggcagacacataagggaagccaccttggacctttcaggtcaacccatctaccaggtgatactacagagtgagctttggatacatgacatggaaacaaatggccagctgagtcccacctaaattcctgatctacaaaattagtt

SEQ ID NO: 270305 - DNA, 485 bp, Homo Sapiens
  misc_feature (17)..(17): n is a, c, g, or t
  misc_feature (22)..(22): n is a, c, g, or t
  misc_feature (41)..(41): n is a, c, g, or t
  misc_feature (59)..(59): n is a, c, g, or t
  misc_feature (79)..(79): n is a, c, g, or t
  misc_feature (130)..(130): n is a, c, g, or t
  misc_feature (147)..(147): n is a, c, g, or t
  misc_feature (163)..(163): n is a, c, g, or t
  misc_feature (194)..(194): n is a, c, g, or t
cccctcccccctggggnccccnagatacctgggggcccccnggcccgtcggaaagtgancaccctttatttcccccacnggtaaggaaccctgtacagggactgcataaacaaggtatgaggcaagtttncccccaagggcctttantggcctttataagtcnagtttgattcccttaaaggaaagcacactantcccagcccaaagcccttggtaaaataacccagtttctcccagttgtgtcctgttgcaaaagaaaacattcgtattgcacttatgcaaataactatattgctgtaagttaagaatattcataaataggttccaaattctggagaaatcagaaacaaatatgctccaaattttattcacagtgatatactttactcaattgttaaacagctcaaagaaaagctcacaacagctcaaaagaagttttcttgactctgaaaaataaaacaaagaatcagcaacattttaaacta

SEQ ID NO: 270306 - DNA, 432 bp, Homo Sapiens
  misc_feature (79)..(210): n is a, c, g, or t
  misc_feature (217)..(217): n is a, c, g, or t
tgggctctagcattcctcccacctcagcctcccaagcagctgggactacaggtgcacaccactatgtgccccagctagnnnnnnnnnnnnnnnnnnnnnnnnnnnnnnnnnnnnnnnnnnnnnnnnnnnnnnnnnnnnnnnnnnnnnnnnnnnnnnnnnnnnnnnnnnnnnnnnnnnnnnnnnnnnnnnnnnnnnnnnnnnnnnnnnnnntgcaccngcgcccggccaaaatcttaatcctagtggaaaactgacagccccaaaaggttaataaatgtactcgaggctgacactgttataagacgacgacagattccatgatctgtatgactttgggtcattaaatctgaactccttaaacctgcaattgaaaaagtagtataatcacgtctcatttctcttcagccaagactaatcttagatgtaaaaact

SEQ ID NO: 270307 - DNA, 462 bp, Homo Sapiens
gctggacagtcttgtgaaattgagactcttactccactcatccatcgctgcaataagctcatcctagtaggagacccctaagcagctcccccccgacagtcacctcctatgaaagccacaggagtatggcctacgacccagtcaatgatggctcgcttcctgcagactgctggaagagaatgtagaacacaacatgatcagcaggctgcccattctacagctcactgttcagtacaggatgcatccagacatatgcctcttcccttctaattatgtttataacagaaacttaaaaacaaatagacagacagaagccattcgatgttcatcagattggccatttcagccataccttgtgtttgatgttggagatggttcagaaagacgggataatgactcatatataaatgttcaagaaataaaactggtgatggaaataattaagcttattaaagacaaaag

SEQ ID NO: 270308 - DNA, 490 bp, Homo Sapiens
  misc_feature (24)..(24): n is a, c, g, or t
  misc_feature (35)..(35): n is a, c, g, or t
  misc_feature (109)..(109): n is a, c, g, or t
aaagccctgtgcccatccaagttnacggggtttangactcccgggtcctaaaaaggaatgcccaagtccggctaaaatcttaaaacactgaacagcagttaaagctttnaccttcagaccctgtagaagataccaatccaaaataaactgtgttcatgagacacagggccagaaattaaaactattcaactcctcaagacccaggaactatcatggaagacatgggtgtgtgacattgtaagggtcaattttgagagataaaataagttcagtttccctataaattaaccattaatgtcaaaggcacactgaagcaagaccagcatatgggcctctgagtcagattaacaaggttttcttgaagcagtaacccactccttaataaaaggttataaaaaaggcttatggaaattacatcttatggtcaagatgattaaactatttaatattataggctgtttataaaattttggagaacaagtttaattgg

SEQ ID NO: 270309 - DNA, 467 bp, Homo Sapiens
  misc_feature (24)..(24): n is a, c, g, or t
  misc_feature (53)..(53): n is a, c, g, or t
  misc_feature (63)..(63): n is a, c, g, or t
ccatcaaagcccaatttaaaaaanccccagtgcaaaaataattaatcctgccngtactttatnccagataaccagacccaagtaataaaaaagcaaatccagtcttatcatgatttgcctttagtaaaaatgggagactggagagagaaaaaaattatgtttcaaaaactatggtacacttgttattaggtgtttttgagtgtttttctcatcagttgttcttgagggttttttctgcaatttagactaaccctgcttattcatgtgaaccaaccagtgatctctggctgctgctcagaagaaacaagagagatggtaatgtgaaaatctggatcagtattctaattctgggcccatactggaatcagcttggtttccaacagttgcccgttcatggaaagccttcttatttagtttacttgggataattttacttattttgctttactgttgtagaatatactgcc

SEQ ID NO: 270310 - DNA, 473 bp, Homo Sapiens
  misc_feature (371)..(371): n is a, c, g, or t
  misc_feature (426)..(426): n is a, c, g, or t
  misc_feature (440)..(440): n is a, c, g, or t
  misc_feature (446)..(446): n is a, c, g, or t
ggaagtgacttagtaagcgtttggaacctcttatttctagatgttatggaagcaatgtgaaatgtgacagggtcgccaacatgggtgagttgttcccaaggcaggaggcccaagggggtggtattaaaaatgtcttctaaagccctctttctggcgcctctgtccctgcaaagccagtacaccatctggcatttaggcactgtgccattttaacagatgggactgagtattgaaggctctcagactatgtactaccatcaactgtggtgttggaacagacatttcagtagaaatacccaaccaattctttttcacctcatcttttaattctgcagtaaaagaagatgatatttcttccttagagtgagganaagacaagaaagacctttctcttggtgtctggcgctattcagaatatggagctgntgccaaatttttgnacatgntacattattcacataggtttaaacaaa

SEQ ID NO: 270311 - DNA, 375 bp, Homo Sapiens
aaatttgatatccagggttttaaaatatcctacttctggtagccatttaaattcctcccccttacccccccaaataaatcaggcatgcaggaggcctgatatttagtaatgtcattgtgtttgaccctgaaggaaaatgcctattagtccgtcgtgcttgatttgtttttgtccttgaataagcatgttatgtatattgtctcgtgtttttatttttacaccatattgtattacacttttagtattcaccagcataatcactgtctgcctaaaatatgcaactctttgcattacaatatgaagtaaagttctatgaagtatgcattttgtgtaactaatgtaaaaacacaaattttataaaattgtacagttttt

SEQ ID NO: 270312 - DNA, 258 bp, Homo Sapiens
  misc_feature (22)..(22): n is a, c, g, or t
  misc_feature (106)..(106): n is a, c, g, or t
cccaatgaacattatcctcccngcccaagcaaaccccttaacatgttatactcctttaggttattagaatttatacatgcattatttcatttgacctgtaaactcntaagtaactttgcatggaaaatgttatcctgattttatagacgagatagtgagtttagaaaggcagtatggtggaatggagcatagatttggagttggctagacctaaagtccagattaaatctctgctcaaggctgggcgtggtggctcat

SEQ ID NO: 270313 - DNA, 531 bp, Homo Sapiens
aatgtgactgctggagcctgagaggtggaggagttctgatcccccgttacttcctagcattttctcctcttgccttaaaagttccctgtatgtgaaacgggaagtcctgagagtgtgtgttggtggctgtgcgcacgcaacaaagacgggagtcaccctgtgcttcctgcccaagatactgacccattgaacccccaaagcatctttctctccacaaagtccgtggtgccttcctgggtgggctgcagacactaatggtgttggggggtcttggaacagcttctctatgtgtgggattcgtgtaaatgcgaagagttcacatataaagaagtgactttgattctgtgattatattgatttggtacacagtaaatgggagtttaaaaaatccaaagactctaatgacttgtaaagactctaatgatttgtatcatgtaatgaactaaaccacctgtaattttgtaccgtatgtgtctttccatcaaatgaccaacagcttctcaataaaaccagaccatttctcacctgaaa

SEQ ID NO: 270314 - DNA, 496 bp, Homo Sapiens
  misc_feature (36)..(36): n is a, c, g, or t
  misc_feature (66)..(66): n is a, c, g, or t
  misc_feature (305)..(305): n is a, c, g, or t
acttcccctaaaagaccccctgtatgtgaaaagggnaaacccctgaaaatgtgtgttgggtgggcnttggcggcacggcacaacaagacggggaagtcacccctggtgccttccctgcccccaagatactgacccccattggaacccccccaaagcatcctttcctccccccacaaagtcccgtggtgcccttccccggtgggctgccagacacctaatgggtgttggggggtcttgggaacagcttctctatgtgtggattcgtgtaaatgcgaagagttcacatataaagaagtgactttgantctgtgattatattgatttggtacacagtaaatgggagtttaaaaaatccaaagactctaatgacttgtaaagactctaatgatttgtatcatgtaatgaactaaaccacctgtaattttgtaccgtatgtgtctttccatcaaatgaccaacagcttctcaataaaaccagaccatttctcacctgaaat

SEQ ID NO: 270315 - DNA, 365 bp, Homo Sapiens
  misc_feature (353)..(353): n is a, c, g, or t
attcggcacagcttaattagagactgagacagggcagggtgccgaggtgtctgcatgcgtttcatgtggatgcccgtgtctattctggcctgctcctgggccccctccccactcagccctggctgattgagaatgggacagggactcccttctcgtgtccctgtgcagcgtcggcccaggaggtagcagagcagtatatgcacatctgggtgtgccctcctgcatgtccccacacatctgtcattcctgtctttgcacacctatgtgactcccgcatgttttgtgtccttatgtgtcccatgcatgctccccatctgaccttgcgtgttcttcgcgtgtctgtgtgcgggcantcctgcctttaa

SEQ ID NO: 270316 - DNA, 590 bp, Homo Sapiens
  misc_feature (529)..(529): n is a, c, g, or t
  misc_feature (543)..(543): n is a, c, g, or t
  misc_feature (556)..(556): n is a, c, g, or t
gcggcacgagctcaataccagagagtggacacaacttaaaccaaacaacctatcctgtgatctaccagaagagagataccgacatgaaattgcacatgacgggcagaggatttacatcttgggagatggtacttcctggacagcatattccttaaacaagatccatgcatacaaccttgaaaccgaatgcctgggaggaaattgcaacaaaaccccatgaaaaaataggctttcctgcagcccgaagtgtcacagttgtgttcaaataaaaaatgatgtatttatttgtgggggctataatggagaggtgatcctgggagatatctggaagttgaatctgcagactttccaatgggtgaagctcccagctaccatgccagagccagtttattttcactgtgcagctgttacaccagctggttgcatgtacattcatgggaggagtggtgaacatccatggaaaacaaacggactggggtcattgtttaagatctgggctggtggtacctagcctgctgggaactgggcnggggagaagctgcnttgcggccttccntaaccttggcaaacctttcccgaacacaattttt

SEQ ID NO: 270317 - DNA, 762 bp, Homo Sapiens
tttaacacctcaaactcccctcagccccaatatcctggcatctttagtgagtcaggacaatcctaacctagaagcatatatgcctgggagcttcctggcctcaaaggaataaatcttttcacagcattcacaggactgaaaaataatataaataggattcctacagtaaacaagtattgtttctgtttcaaaaccatcctgcaagcataacaatcagctggtcctaaagcctgtaatacgtacacaggtcacaggcagacaggcaggcaggaaaagggatttcccccagtgcaggctcctttggttctgcctcagaggcactagaagtctaggccctgggttaacagcaacccagagtctgcttggatatggttctagttgtatgcttcgtaagtgaacaccaaaataccataaaggtagaggagagtgaacacataaccccacttgcaaataagaattaccttgcaagattccctatttttttatcttaacagtctatgccgtatgaacattttattctataatataacttttatataaaaataggtcatcttatgactctaaaccatttggtaagtaaaactgatgcttcaagaagatgcaggtttttaagtttgcagttttacattcccctagtacatccctgcttactcgggagcacaaagcttggttgtaagaaattgtgatttggaagtagagaaaagcaaggaagtccaacctcaggagtgtctctgttactaagaggagagtgagatccagggt

SEQ ID NO: 270318 - DNA, 428 bp, Homo Sapiens
  misc_feature (75)..(75): n is a, c, g, or t
cgaaagcaatacaaacctagaaccccataccccaaagcaagacctctggggttgcctggttaaaccccccacagnccctagacctcctaagtgccctctgagggcaagaacccaaaggagcctgcaactgggggaaatccccttttccctgccctgccctgtctgccctgtgaccctgtgtaccgtattacaggctttaggacccagctgattgttatgcttgcaggatggttttgaaacagaaacaatacttgtttactgtaggaatcctatttatattatttttcagtcctgtgaatgctgtgaaaagatttattcctttgaggccaggaagctcccaggcatatatgcttctaggttaggattgtcctgactcactaaagatgccaggatattggggctgaggggagtttgaggtgttaaaaaaa

SEQ ID NO: 270319 - DNA, 463 bp, Homo Sapiens
  misc_feature (343)..(343): n is a, c, g, or t
ttgtaacacatcaataattgttactgcaatattgatgcctaaagaaatgcattttaatacaaaatcatcaaattgaaactcactgaatttcatctacagcaatactttttctaaatgaagacatgttgtaaggatagtcttctttatgagaaatgttattatcagagttgaaaatacgaaacagaataccaacaaaaatcacatcaaatgtagaaaatataaaatatgcacagtacttataaatatggtaattaattctaggagtttgcaagcagactggagaaccgtaaaagattggggttaaagtaaggaagtggagacctgacctgaattcaataggganaagctgtgaagtgggctctccagcaaggggacctattattgggtaaagctgtgacaacacaggctattgggtcacagggagaatacagtgtcagagcaacccatcttctgctccccagca

SEQ ID NO: 270320 - DNA, 376 bp, Homo Sapiens
ttcagggcccagcccagctggttccctcctccgggaagccctctctaacgacctgtgaggtctcggatgcctccactgggcctgcttccaccccatggctgtgggtcttctctgcactcatctggaatggcctcttgtcctgcctgtcagccacattgaccttgtccccagctcaggccctggcactggagcggtgtgtgtgtatacagtggcaaagagttggcctcagactccctggattcctctctctactcacttgttgttgactttgatcaaattcccttctctctatctcaggcccctcatctgtaaaatgggacgttaataattcagccttcatagaatatgaatgtaaaatgagatatgttcatacaaa

SEQ ID NO: 270321 - DNA, 609 bp, Homo Sapiens
  misc_feature (23)..(23): n is a, c, g, or t
  misc_feature (46)..(46): n is a, c, g, or t
  misc_feature (62)..(62): n is a, c, g, or t
  misc_feature (82)..(82): n is a, c, g, or t
  misc_feature (488)..(501): n is a, c, g, or t
agggacctggtccatggaccgtnagatggccctaagcccggaatgngattaaaaagccatancatattaagtattaaaaagngtttataatgtatatgaattttttgcggtaagtttagcttggcattttaggttttaattgatgccttaatctgttaaaatgatgtactgtattttaaagtattctaattgtgcttttttgtaccatcttcagtatgaaaaatgtcagtatttagttcctttctcaggcacaattagatttttattgacattgttttcccccttaactcatgtaattagtcatagcaaccaagagtcaagagagtgattaccagccaattaagaaaaatgtgaccaagcagattgcagagtacaataaaaccatcgtggatgctttacatagcaccagcggaaactgagtttaagtccactgaaagtctctaaggaagtatcctcttgctgctaaacttggtacaagttgactaccnnnnnnnnnnnnnngcttacttttggagtttacctaaaatttctgaatgttataatttttgtggcctcttttaagaatgatattttaaaatagtaaatagttcaataaatggtttgcatatt

SEQ ID NO: 270322 - DNA, 382 bp, Homo Sapiens
  misc_feature (372)..(372): n is a, c, g, or t
aaatgaactaatataaaataaagcacttagaaccaaacctggaatataagtgctttgttaagtcagagcttaaaaaaaggaaattatcataaaagaatggtctgaagtacaaaatagaatggtgagtgaataaaatggtgaacaagcttgtcagtccaaacatcagtctagaaaaataaggtccgatttgtgaagttttgaactaatgcctccaataacaatagcaagtaggcatttgggggagggtcaatgtaattaaaattattctaagatcattacttcgtttcaaaggaaagttaagatatgtttgcctttacattttgttaagttaggacacttattaaaatgcaggggacagttgtttaaaaaaanaagggattaa

SEQ ID NO: 270323 - DNA, 450 bp, Homo Sapiens
  misc_feature (396)..(396): n is a, c, g, or t
  misc_feature (440)..(440): n is a, c, g, or t
ggttcaacaacaagaacttacttaaaacaatgtactgtggtgatgagtcccaggggcactggtcagcctgtggagccctggatgctatccacacccacctatccctgcagctaatttagctgatctctaatttaactgagctctaatttagctgatcagattttgcttgggtaaagttcctttttaatgttctaaagtgtttacggttctcaaatatcagttaaaaactaattttaggtggccataaacataaaatagaaaccctgtaagttacagaagaccctaaattgtatcaaaaccctagagacaacttttcaatttgatccaaatttgaactggccaaccagtctttaaaacactggactaggaagagataatgattgaaacatttagaanaaaaaagtgctccattcgcaggagctttttcctgtcctgtgggntttccagttg

SEQ ID NO: 270324 - DNA, 466 bp, Homo Sapiens
  misc_feature (47)..(47): n is a, c, g, or t
gtttcttgacccagtcctgaagccctggctagaggacaatcagtttncctttctgagcagctgattaaagccacacttcaactatttctactattttgatctcacacactaaggccactgtgcgcctgcccctattgccccagaaccaggtaggaaacaattaaggatagtccctatacactggagccccggagatcattcagattaggcaatccgtgagaagcttggaagacctagctaaacacatcctgcttaccataagctgccccgtgtagctccagcttgttgttaccatggtcttggggtgaaatcccctataggcccctgcctgggcagccttcttctgatttgggagctgccagtaacaaaggagttctgcctttttacccatcagagtgtcatttgtctgtattactaccatcaaatggagtttttaaatggttgtaaaacatagctaatatttctt

SEQ ID NO: 270325 - DNA, 485 bp, Homo Sapiens
ctctcccctttctcccctctgattccttaaaaaaccacgctttccatgaccaatgccccgggaaactttccactgccgcggtaaggtcccttgcgcctccgcttccctgcacacacgtgcttccttaatagctgcaggctatttcatgagaggaatttgctcacgttaacatggctgttcccaaatgccaggctgttttaagtgtttcctaattataaacaggctgtgctgtttcccttgacctaggacttgttcttgaggacagaagtggaggtggcgagatgcaaggcctacgtacggaccggcttccccagtagagcggcgccaatggggggctcccaagctgctcccatctcacctctgcttccggggtgctgggggtttgggccagtgttccttctgcttttgtgaagggcccttacactcgactcgaagtgctcctcctattggtttttaataaatatatttatggaaagctttatgaa

SEQ ID NO: 270326 - DNA, 401 bp, Homo Sapiens
  misc_feature (18)..(18): n is a, c, g, or t
  misc_feature (51)..(51): n is a, c, g, or t
  misc_feature (91)..(91): n is a, c, g, or t
  misc_feature (119)..(119): n is a, c, g, or t
  misc_feature (129)..(129): n is a, c, g, or t
  misc_feature (270)..(270): n is a, c, g, or t
  misc_feature (390)..(390): n is a, c, g, or t
cccatcatgccgccacangaaatacatagtaaataaggaagcctgaaaacncccggcattggatccttaagccaagatgattagaaggtgnaaaaagattttaccaaatgtaaaacctncctatttccnctgtagaaactttccttcacctttgctgtgcaagaagacacctgctttgcctatatttaaaatggcttttttaaaagagatttatgtatttggtaaatgtttgtagtcaacagttcacacaagaagctgtacacggtttgntcatgtaaaaccgtttggcggcacaagctggactttgttgccatccttgagatgaaccttttaaggaaaataagttaatctcaatttttccctgaatgtgttgtttttcttcattatacnataaatataat

SEQ ID NO: 270327 - DNA, 495 bp, Homo Sapiens
  misc_feature (14)..(14): n is a, c, g, or t
  misc_feature (25)..(25): n is a, c, g, or t
  misc_feature (31)..(31): n is a, c, g, or t
ggcagagaagggcncccacggaacntccccnttgcagctcagctgaggagaaggtgacagaccatggccaacggtacagcccttgaatccccactatgaccccacacccactgccctgtatgtagaccccctttaatatagtcagtctcctagatcagttagaatagaaaacagcaagattgggaacacagttaaacaaaccacgtcagcgctggtaagttaattaggaacaatgcccactgataaaaatctgtaatattgttctccgcaacaagttggataagtgatatttgtttctaaaaatcactgcaaaatatttccagtgctgtacaacacaaatttgaaagaggattagtgagttaagccctggaccagggtcacagtctttgaaaagtgaatcatccataaaccacccttagttatatccatggttcaaatggtgatcagctcaggccaagatggtaaattgcacaaaaacccacccaagtaaattag

SEQ ID NO: 270328 - DNA, 475 bp, Homo Sapiens
gcggccgtgttgtatctgtgtacaagaacccaaatccccgacaaactccaggtcctcaccctttcatgagggcttggacccatggtgtctgtatggaaacccctagctgccctttggtgcattgactttaatacaggggttccctcccgtgggctccctgaagagctgatgctagaaagtgatgcacacccaggaaatccctccatctgccccaggacacatttaatttttaagggcaaagcctaacatagaaaattcctattatcattttccctaaatgaagttacatctctcaaactaccaaatctaggaatattgaaacttagaaatgaagatagcggaaaatattttaaaaacagatctacagactatggtcaggatttcttggaaatatatttaaggtttccttttcatgacttggaaagaagagtactttggtttagtttcagctcatgttgttaaaagttggactatt

SEQ ID NO: 270329 - DNA, 709 bp, Homo Sapiens
  misc_feature (78)..(78): n is a, c, g, or t
attcggcacaggggcacattgcagtcagtgagctgctgccaaaaccggcgttaagtagaacccccagaggccccgcgntctggtgatcaccctcaggtcctgccagggagacacagtgaggaggttggctaattgctgctttcaggccctggaaatcagtcgccaaggcccaggagaaccccggtgagtccgtccagttgaggcagaggcaataacctcccattgctcggccctgcgcctgccccagtcctgggcagggggcaccggctcaggaacatgcggcctcctggaatttctcggtatttaactgtctcgctgtcttatccgagtccctaatgaaacgacttgtgtgacaatctgtctgtggccttacgaaagtgtctgtgcactttttaatcctttttaaaagcaacttttaaaagttggatgggggaaggggggcaagcatacgtggtaagggttctaagaaatctgtggtcatcgctgaaatcctttttgcatcatgttttttgatgttggagtgatgaagtgtacatcccccaccccacacaccactacctgtgtacagaccttttaaaacatgtcttctttttctgattcactactgtgccctcaccctacctttctacccccagagacataaaaccccagttttttacaacctgggaagtgggttgggaagggtttgcactggtcttgagtgttgtgc

SEQ ID NO: 270330 - DNA, 430 bp, Homo Sapiens
  misc_feature (326)..(326): n is a, c, g, or t
attcggcacaggtggcgagaccatgagcgacatggtagacctttcagattaccatcatgggcaagacacggatcagggaggaaacagtgcataagaggaaagtgtgattgacattaaggaggctattgatacataacttgatgacagattgtatctagggttgtagaggaaaaggggaagagagagataaaaagtgctccagaagcacgttttggagataaaaggaagtgttccagaagcaagcactttaacaggggaggtgggtcatactgactgactcaatcaggaaatattaacacagactttttgtcagtgactctcacatnaagagttgctcctgtggctttttgggagatgtaatttggtaatggagtagcaggttctacatgggcattgacagctatatattttgtaactcctttaaatatat

SEQ ID NO: 270331 - DNA, 415 bp, Homo Sapiens
aaatgctgcagtagctaaagggacgttccctggctttggtgaagaaataagtaaacaagccagtgtaaagagaaaaccctggttagtgatcagaggccacattctccaacccctacaagttctagcttcgtgtaatgccagaaagagagaggtcaaaagtctgagagaacttttgttatgaaaagtgtttgtttgtatttttaaaattttggataacataatccagtgctttgggtacaaaggtttgagcaatcggcaccattttaataatgcatttagtagtcgcgatgcattaacacttaaagagatagagtctaaaatggcagttccatgttacacatttgcacagtctggcctggatattttatttaagacacaccttcttttccctaggatacctttttctcactatttc

SEQ ID NO: 270332 - DNA, 685 bp, Homo Sapiens
  misc_feature (348)..(348): n is a, c, g, or t
gcacacaggatgttacactatattcatttgagtttcttgatgtttcacttaacaaaagccagattaatttagctttagtagaaaagaaaaacgttgttgtaacggtactaccgggttcttcataacctcaaccagcatcgaaagttaagggaaacaagaactagaaagacattgagaactccagcagtacctccattcagtctctgatttctgctttcttcagggcttctgctttattcttctttcccatgagttgctttctttaatgctctatttccttgttacagtttgtctgactagtgttgctaagttttctttatcatagttctagccacaagtagagatctnctctctctgtcctacctccaagttctgtggagagataatctagttggttccacttagatcaaagggtccaaccctgatgtcatcagtggtggctagaaggaggtggtgcagggtgatgacaatgaaggtggctgtggctgtgggtgatagggtggagtcatccaggacacctctgcctccccagggctcactcctttggatgggggttaggtaggtaggtgtgtgggcgggtgatggtatttcccagagaatggagggtaccaccagagcttggataaactggtaccttataagatacataggattaaaaaagactaatacatattgagggtgtaag

SEQ ID NO: 270333 - DNA, 143 bp, Homo Sapiens
atgagccaccaagcctgggccccaaagcaaaattttctgtcatctgacagcatctgccttttaagcctcagaagacaaatcatgggcaaatagggcagggagcacagaggcactgggggaaaacacaaaccaggggggttcac

SEQ ID NO: 270334 - DNA, 179 bp, Homo Sapiens
accagaaaaccaaaaacaaactggcagtagttaagtctttacctaacaataataaactgactgttgatggactaacttatctgattaaaagatacagaatggctcaatgaataagaaaacaagaccaactatatgctgcctacaagaaattcactttggctgggcacggtggctcacac

SEQ ID NO: 270335 - DNA, 414 bp, Homo Sapiens
  misc_feature (339)..(339): n is a, c, g, or t
attcggcacagccacctggaagcacatcccctgaagactgtgtctgcagagagggatacagggcatctggccagacctgtgaacttgtccactgccctgccctgaagcctcccgaaaatggttactttatccaaaacacttgcaacaaccacttcaatgcagcctgtggggtccgatgtcaccctggatttgatcttgtgggaagcagcatcatcttatgtctacccaatggtttgtggtccggttcagagagctactgcagagtaagaacatgtcctcatctccgccagccgaaacatgggccacatcagctgttcttacaaggggaaatgttatatnaaggacaacatgtttggttgcctgtgatgaagggtacagactaggaagggcagtggataaggttaatttgttcaa

SEQ ID NO: 270336 - DNA, 468 bp, Homo Sapiens
atacctggggctgggttatggtgcacagctgtccgtcccacagggtggttggggaagggccagggcaggtaacactgccactcccacagcatccaggttacgcacatggccacacagggtacagcacctgaaggaggggggaggacacaggtttaaatatgcccccaataagtcttcctaggatgtctggaaatgaggatcaagagcaagcacccagctggaatacccaacagggctgacaggatctccacaaagaagcagcaccaatggatacaggtctatcccaagaggaccaatacaggactagacattttatatagccaacatttttcacctaagagccacttgagagcatgaaaatataaaatattttttagatccctttctcattatagttatttcttaggtcaccttcaatgtctgactttcatcagcttgatttgttgcttttactgcctaagaaagtga

SEQ ID NO: 270337 - DNA, 476 bp, Homo Sapiens
  misc_feature (433)..(433): n is a, c, g, or t
  misc_feature (440)..(440): n is a, c, g, or t
aaataataagtggtggtcaagtcactagttatctaaacttagtgacagggagtctaagagttgccatgcctatgcaaattcagtaaagttaaaggcaagtgcaatacaaattatattcatcttagcgcacatcactgcccaggatttcataaacagatacctcaacttgttagatctactctttaacatctatttcattttttaaaaaatttcagtaaagaatgctgttcataatcttgtatatttgtttaaaaccccactaatcgggtgcagcctgccatttgtaaaatactgtgtgtgttggggagtccccaaggaccacctcaggtttggattattcactaaaaaggacttcacagggacccagccatatagtttctaacagctgtggacatatttacaatgttcaggggtacatggcaaatccggcaanagggggnggggccctggggtcgagtttggagggtaatgggttc

SEQ ID NO: 270338 - DNA, 382 bp, Homo Sapiens
  misc_feature (162)..(241): n is a, c, g, or t
  misc_feature (294)..(294): n is a, c, g, or t
  misc_feature (341)..(341): n is a, c, g, or t
tgattcaaaaggaattattaagtaaataacactagctatggcaaagggaaatggtaaaatcatgaaggtaaactgcaaatgactaggtttgggatggttgtgaagcacctggagtctggaagagccgggttcaaattctaattccactagctgtgctgcagnnnnnnnnnnnnnnnnnnnnnnnnnnnnnnnnnnnnnnnnnnnnnnnnnnnnnnnnnnnnnnnnnnnnnnnnnnnnnnnngtcacacatacacacacagcgaacactcacaaaatgatcccattttctttgtntccctgctcagtgttcctttcctaaccccatgatgcttccctttccngcctctgacatggtcacattcagcaaaaacaccttaggggt

SEQ ID NO: 270339 - DNA, 460 bp, Homo Sapiens
  misc_feature (373)..(373): n is a, c, g, or t
gaaggcaggctaccgttgtcactactactaatttatctgcagtatgagtagcagtaggtgacttcaccataactcacatcatctggatctcaaagagccactctgatgacgtaagtataatctggcagtatcgtgggaatcaggaccaccgtctttgctgtagcaatacccgggacctcagtttacatatctcctttatgtgtcgagaaagtgtatgtgtgggtggtaggagggccaggaaaaaaagctaaaatcactcaccgtgtgattgttcaggcatgaactgtaccgcactaagcttcactagcttccttacgctactgtacccaatggagaggtcattgagaagctgtagtgtcttggaggtggattnggttcacaacggccccagtacttcaaagttggtgatgatttttcctatgaagacgcttaggaccatggtctcatcatttcaagccca

SEQ ID NO: 270340 - DNA, 538 bp, Homo Sapiens
cacagcctcatcctggacctgggttccctcccttttgtggacactgtgtgcctcaagagcctgaagaatattttccatgacttccgggagattgaggtggaggtgtacatggcggcctgccacagccctgtggtcagccagcttgaggctgggcacttcttcgatgcatccatcaccaagaagcatctctttgcctctgtccatgatgctgtcacctttgccctccaacacccgaggcctgtccccgacagccctgtttcggtcaccagactctgaacatgctacatcctgcccaagactgcacctctggagtgcagggcacccttgagaagcccctcacccctaggccgcctccaggtgctacccaggagtcccctccatgtacacacacacaactcagggaaggaggtcctgggactccaagttcagcgctccaggtctgggacagggcctgcatgcagtcaggctggcagtggcgcggtacagggagggaactggtgcatattttagcctcaggaataaagatttgtctgctcaa

SEQ ID NO: 270341 - DNA, 470 bp, Homo Sapiens
atcgggcttcagggttcagaagcatcgaggactggtggccggccctctgtgctcgccgtgtgacaattccagtggctttcctggcaccatcagatgcctggtgccacaagcttgggtctgctcctagggggacgaggggttcctcctcctcctcaattgctttatgtgccttcactcagtgaacccaatgggatggacaacctgactttttaaacctaagggttgggcctgaacgatgattactttgcccacgtgccttctaggtgccgaatgtgtgttcccgtgatattgacgttgaacatccctgcggattcagcccacaggtttcctgacaagctggaggaagcaatggtaattttggctttttcggttttgtcttcagataatgaaaagcttttgtaaaacagctgagtgtcaatatgagttctatggcttcaatctcctttaaaaataaaattcttaagggtcca

SEQ ID NO: 270342 - DNA, 399 bp, Homo Sapiens
  misc_feature (27)..(27): n is a, c, g, or t
  misc_feature (34)..(34): n is a, c, g, or t
  misc_feature (44)..(44): n is a, c, g, or t
  misc_feature (92)..(92): n is a, c, g, or t
  misc_feature (121)..(121): n is a, c, g, or t
  misc_feature (124)..(124): n is a, c, g, or t
  misc_feature (134)..(134): n is a, c, g, or t
  misc_feature (138)..(138): n is a, c, g, or t
  misc_feature (190)..(190): n is a, c, g, or t
  misc_feature (193)..(193): n is a, c, g, or t
  misc_feature (198)..(198): n is a, c, g, or t
  misc_feature (217)..(217): n is a, c, g, or t
  misc_feature (243)..(243): n is a, c, g, or t
  misc_feature (262)..(262): n is a, c, g, or t
  misc_feature (293)..(293): n is a, c, g, or t
cccccgacaagcctaaaacagtttatngggaaantttagttaantcctgtatttaaaaccttccacaagacacagtactgttgatgttccantttgatggccccacatatatgcccactancantgtgttttancccntctgtgactttcctagggtcatttcccttcccacctgaagtacccctactantanttccnttagaggaggtctgctgancatctctgttgtttttgtctgaaaanatttgtatttaatttttantcttaaaaaatattttttctgagtatggaantctaggttgtcagctcgtttctttcaacacattaatgatgtaactccactgttatgtgcatccatattttctgctgttttttgaaataaatattttcctctgaaaa

SEQ ID NO: 270343 - DNA, 504 bp, Homo Sapiens
ctggaactggcatggggagaagctgcttgcggccttccctaaccttgcaaacctctcccgaacacaacttctgcaccttggactcacaccagggactcatcgaacgcttgaaaagaggatttccggactgttcaatgaatactggaaatgttaatttaaagagacccctttatttatgggcagtgtagaatgtgcctacaaagaggattggttacccctgatcaaggcccttatttagaaaatacatcagatgccctttctgtaaattggtttttcagtttatggacatctcactttcccacgtgcttccttctttgcttctgttcctcctgacccattacatgcacatgtactcacatactccctcttccttctcgatggagttaagggaaagcctgaaagtaccttaataatgttattaatcaagacagattcctttttaaaggaattctgaatagttccatgtcatacaatattctagaaattaaaacatcatcaacatat

SEQ ID NO: 270344 - DNA, 453 bp, Homo Sapiens
  misc_feature (18)..(18): n is a, c, g, or t
  misc_feature (50)..(50): n is a, c, g, or t
  misc_feature (123)..(123): n is a, c, g, or t
  misc_feature (264)..(264): n is a, c, g, or t
agcggtgccatccccaancgggtgccagggccttaaccatcaccctcagnccctcggaaacaggcaagtgtgcccaatttaccagaagaaggaactaagccccggaaggcaagtccctgcccngagactaaacagaatccccagcaacataggacgaggcctggaaatccccacacccggacctaatgcacagcccagtgtttcaacgtcgcccaaccccagaaatgttttctctccctgtcatgcctaattttcagccctttnctgggtgacttgttcatcatccaaatatattatttttgttttgtttgactaaaggcaattatatttacattttctctaagtactggaatgtaatggttgaaattcctattcagtgatctggaagaactctaatgttctaaagtgattctttgataattaaagaaagatgtaattatgtataatgtgaaa

SEQ ID NO: 270345 - DNA, 440 bp, Homo Sapiens
  misc_feature (82)..(150): n is a, c, g, or t
  misc_feature (345)..(345): n is a, c, g, or t
aaatggtatatctaggctacacagttatacatggtgtatatctatgagtgttttcatgttgttgaaaatctccgaaatatannnnnnnnnnnnnnnnnnnnnnnnnnnnnnnnnnnnnnnnnnnnnnnnnnnnnnnnnnnnnnnnnnnnnagtttcattcgcaaatggaaatgatgtaaaagctaccatgagtctatcaagaaaaacaagacctgggaagattatacagcacatctcctagggcaggcaagggttatctccattgggatgagggtaacaggggcttctgtttgccataaactctccagggttgcagcccatggacctgactccgccccaggggantgtgctgagttgcagggaaaggggtgaaaacttgctagggcagcctcattaaacacaggctttcaccagcaaaacagtgacccaaaacaccggtt

SEQ ID NO: 270346 - DNA, 230 bp, Homo Sapiens
gagactttgtacaaatagtaaaacatgcctttccccatatcagttcagacttacccacaaaagcccaggcagccaaatggactataacaacccaggtgtcatttattttcttaagatatcatttaatgtaacaagacagaaagagccagaggttcactaccaggaagaaaatgatatggccatgaatagtgtgatttgcatttaacttttaattttagaacggctaaatg

SEQ ID NO: 270347 - DNA, 476 bp, Homo Sapiens
  misc_feature (33)..(33): n is a, c, g, or t
  misc_feature (60)..(60): n is a, c, g, or t
ttccccggtctatgccccaagagaattgaaaancatcccaccccacacaataccctgtgntccccgcgttccatagccagcattacctcaaaagtccaaacggtaggcaacaaccccaaatgtcccatcccacagatgaattaagacatgaagtgtgttctgtcccatacaatggaatattatttggccataaaaaggaaggaaattctgacgcatgccacagcctgagtgaatcctacaaatattacgctaagtgaaagaagccaatcacgagtttatgtgaaatgtccagaataggcaaatctgtgtatcagagacaaagcacattggtggttgccaggtactggaggaagagagaagaggcatgacagctaacagggacgggctttctttggaagatgatgaaattgtggaatgatggttgcacaactttgtgaatatactagaaaccaatgaattaaaaactttggaagatg

SEQ ID NO: 270348 - DNA, 341 bp, Homo Sapiens
  misc_feature (276)..(276): n is a, c, g, or t
  misc_feature (298)..(298): n is a, c, g, or t
  misc_feature (313)..(313): n is a, c, g, or t
  misc_feature (327)..(327): n is a, c, g, or t
atataaagattgtacacaagtgcactatttcccatttgcataattcaaagttgcatcagacactcccgtgtagactataaatatgcacagaagggacagactcctcagaatgaaaaggaaggcattttggaggttcccctttgtcttttggaatgactctctaagtagtgtagtctctgtggcaggggctccgggaatccctacccttcgggttcagggcttcagggaggggagttggggccacagtagttccggggatgacagtgggcccatgtnaggaggaaggaaaacagccccnaggggaggagggggnagggcaccggggtnttgttccccccctt

SEQ ID NO: 270349 - DNA, 177 bp, Homo Sapiens
  misc_feature (141)..(141): n is a, c, g, or t
  misc_feature (149)..(149): n is a, c, g, or t
  misc_feature (155)..(155): n is a, c, g, or t
atagaagtatcctaacatcagtatacataaggatattaaaaacatgaacaaacacatttctaacgtttaggccaattactcaatttgccaaaaacaggattactttttccttttgttggaattttacaaactttcaggctncaaaaatnactggntttcaaaacatttttcaacagc

SEQ ID NO: 270350 - DNA, 523 bp, Homo Sapiens
gctagcaccttcaataccctgtggtttggcatctcactcctaccttccctccctaggtgcttgcccaagcccatacactcctgctccccagagaagccctccccaacaggtgcaggacttggaaaaagtcacctgagagaggagcagcagcggcctcccacatacaggactttcctaacagtcctcttgtctcctaaggttaatccgtgatctggctaataattggtggagtgtccacaggaggggctacccactagccctgaaaagggtaaaacttcgatatactgacttgtccacaaattgaaggggaaaaaaaagcaagttatagacacgaagaatgtgacacccttagcaaacaaaacccattcatgcttgcataagcataaggaaggatacatttctgagtgtacacacccatgctttacaagggctgcctggtcacccaagagcagggagaccagggcagaagaagggataatacctttaactttaagctttctatattgtttcattttgtgatgtt

SEQ ID NO: 270351 - DNA, 629 bp, Homo Sapiens
  misc_feature (47)..(47): n is a, c, g, or t
  misc_feature (60)..(60): n is a, c, g, or t
  misc_feature (97)..(97): n is a, c, g, or t
  misc_feature (103)..(103): n is a, c, g, or t
  misc_feature (132)..(132): n is a, c, g, or t
  misc_feature (524)..(524): n is a, c, g, or t
actatgggaacctaccaatggtatgaacactgaaaatctgtaaaggnagggtgcatctgnccgggaagaactcagactcctgcagcccagcccagtnaccaangaccagtttctcaagccaagacctccccnaaatcagaagaaaggatctcgaacacccattatcataattcctgcagctaccacctctttaataaccatgcttaatgcaaaagaccttctacaggacctgaaatttgtcccatcagatgaaaagaagaaacaaggttgtcaacgagaaaatgaaactctaatacaaagaagaaaagaccagatgcaaccagggggcactgcaattagtgttacagtaccttatagagtagtagaccagccccttaaacttatgcctcaagactgggaccgcgttgtagccgtttttgtgcagggtcctgcatggcagttcaaaggttggccatggcttttgcctgatggatcaccagttgatatatttgctaaaattaaagccttccatctgaagtatgatngaagttcgtctggatccaaatgttcagaaatggggatgtaacagtattagaactccagctaatcacaaacggtcattttggatagaccagtggttccttacgggg

SEQ ID NO: 270352 - DNA, 425 bp, Homo Sapiens
  misc_feature (58)..(58): n is a, c, g, or t
  misc_feature (106)..(106): n is a, c, g, or t
cgccctcacccctccccaaaaggctgggatttacaggccatgaaactacccctacccnggccccttctgtgttttaaaatccttggttgtgtgtgtgtgttttttntctttgattacaaaatcaagtataaagttatttattgaagatgtactttaaaaggacaaaacactacactttagaaataaaaacagcagcttgtgttagtaatatttaaaaaaaataacacaagcatggtatcaggaaaacatatttttggatacacctttcaaataagctatgctaaaacagtaattaaggagtgagaagcaaggttggtttctcaccatggggggtttcacaaaaattcagctattttaaagttctagtacaaaataatcagggatagctatctcttctgctacctatgttgttgttcttaaattcc

SEQ ID NO: 270353 - DNA, 551 bp, Homo Sapiens
  misc_feature (175)..(175): n is a, c, g, or t
aaactggccccaattcactcactaatcaagaacactgaaaccccggtctgctgaacccccagggaagaacccttgttagattgtgaggacccgaatgccatataaagcccttaagtcaacaccagcacatggtaggtgcctaacacatgttggcctactattgtttcctaagaanagggttttcttgaaatggaaagaaaaggagaaaagacagaagaggaagtcaggaatgtcacagaagacactttctggggcacacaggtgaagcaagcacagaagaagcagaagctgccccaggccagctgctgacttcattccgtgtgtcctccaggggcactgtggagaaaagggcagtatgcctaagtgctgggagaggaaacaaacctttacattcacctgtgcttccgaacacacgcacgcgcctctctctgtacctgactttgaatggaacaaaccagactttaactaacaggaacttaagcttgttcactcaaaatctgtctaggactttgtgttgatcagtcagtgtgttgcccagaacattccttaga

SEQ ID NO: 270354 - DNA, 505 bp, Homo Sapiens
  misc_feature (438)..(438): n is a, c, g, or t
  misc_feature (448)..(448): n is a, c, g, or t
  misc_feature (456)..(456): n is a, c, g, or t
  misc_feature (462)..(462): n is a, c, g, or t
  misc_feature (470)..(470): n is a, c, g, or t
gtgtccaaattagcataggcttgtaagagtgtaaacaaatgatatggccaaaagagtaccggacatgggatcagaagacctggtccagcctagctgtactccttactgcttgtgtggctctggataggacactcctgagcttccacctcactttcctacattgtgagcacaaacacacctacctggaagaattgtaagggctgagtaggttcatgtgtatcattgtacccagcataggaagctttttataagtagttgaaataattgattggtgaagtgaacatagagaattctgtctcttatccttcttgtccctgggagtagaaagcctgcttttggtagatacctaaggcagaaatagttctgggggaagtgggggagaaacagggtgggggccagtgcgtttctcactttggcagatcttccgggggaggcctnagaattgatngggatttnggaatntgttgttngtttcctacccggatctgatgtgcattttgactca

SEQ ID NO: 270355 - DNA, 477 bp, Homo Sapiens
aggcgtgggcaatcttatataattatacatgtcagcctcactaaagtaattcaggacacatttttcaagtgtcatttatgcacatggggctgtgattctgttctaggaaggccctgcttaacctggctgttgcccttctctccaatctcattttaacctctctgcctggctacatatggccctcctttctggttcttgaacaccccaggattgtcccatgcctcagagcctttgaatttggtgttcactgtgcccggaaagtgcctcgtttggctttttgcatttatcccaaaaggcttcagtttaaatgtcatctcttctttaaccatagaatacacatcatttactccctctcacattatcctcttatcttgtgtcacctactacaatctgtaactatcttaatagggactaggtctgcctttttcatgcctaaactcccagcacctagaacagaatctgacatgcaatgggctt

SEQ ID NO: 270356 - DNA, 695 bp, Homo Sapiens
  misc_feature (309)..(309): n is a, c, g, or t
tttttcattttacctgccttagatacaatcttaggacttttatgcaacatccctggctctttgaaccagtttttgttctcattatctccagtcagatcccagtcaagacattctagcctacaagaaaagtgaaatctagaagtgggaaaagcatgggatgggttaatggaatggcaaaaattcagttaactcaaccagccaaaatacaaagtagaaaggaactgaaagacatacaaaatggaaatgtagcttgggggcagaccattaaagactttaacaaattttatacttaatatactgtgcaaaaanaaaacaggatttatgagtcatacggagagtataagttttataaagatgactctagaaatggtataaggatgcactgcaggcataaagaggctaaaagagagaggactcagaaagaggctatgggtacaatcccagcaaggaggagaaagccttgtgatatggtttggctctgtgtccccacccaaatctcaccttaaattgtaataacacccacatgtcaagggcgggaccaggtggagtaaactgaatcatgggggcgttcccccatgctcttctcctgatagtgaatgagatagttctctgacggttttattaagagatctttataaggagaacagatggttttataaggagcttctcccttcgctgggcactcattctctctc

SEQ ID NO: 270357 - DNA, 455 bp, Homo Sapiens
  misc_feature (184)..(184): n is a, c, g, or t
  misc_feature (348)..(348): n is a, c, g, or t
gcttcttgtagcccccttgacctcaccagtaaggcagctaagggggaaacggagcagggcattgaagccacacggggctgagtctgaccctaggttttgtgccttgtctgagccccatttcccccacctgtaaaatgagtatgtatgtgcctcatgaaattattgccaaggattgaagtgaganacatgcagcgcttcctagcaggtccttggtctatgcagctttacggtgaaggtgatgacttggacactcccagcctagaacttgggcccacagaaaggtttacatcagccctcgttgtctgggagtgggaaatgctctcaacgtttcaaccaaagatctgaagnagtagaattacattctgtctttaagggtgctagctgttcattttccagacaaacccacaaataagtaaaaagagaaacggagggagggagggagagtattctctggg

SEQ ID NO: 270358 - DNA, 481 bp, Homo Sapiens
  misc_feature (395)..(395): n is a, c, g, or t
  misc_feature (399)..(399): n is a, c, g, or t
  misc_feature (412)..(413): n is a, c, g, or t
  misc_feature (415)..(415): n is a, c, g, or t
  misc_feature (424)..(424): n is a, c, g, or t
  misc_feature (429)..(429): n is a, c, g, or t
  misc_feature (439)..(439): n is a, c, g, or t
  misc_feature (449)..(449): n is a, c, g, or t
  misc_feature (457)..(457): n is a, c, g, or t
actgcagcacccccagcaagcctacctcagagagctttgacctggaattagcatcacccaagacgccgagagtggagcaggaggaaccgatctccccggggagcaccctgcctgaggtcaagctgcggaggtccaagaagaggacaaagagaagcagcgtagtttttgcggatgagaaagcagctgcagagtcggacctgaagcggctttccagggaagcatgagttcatgagtgacaccaacctcttcggagcatgcggccatccccctcaaggcgtctgtcctctcttcaaatgagcttttgccagccagttccatgccttaccatcccagccctggcgcttttcagtggcaggcatccctgggtttggattgaggccaacacattttcccgntttnagccagacctttnntncaatttttnagatnggtgacaagnaggacatttnacaagggnaggaaggttcatttcatttttttt

SEQ ID NO: 270359 - DNA, 431 bp, Homo Sapiens
  misc_feature (354)..(354): n is a, c, g, or t
  misc_feature (363)..(363): n is a, c, g, or t
  misc_feature (405)..(405): n is a, c, g, or t
aagagaatatggaagacataaatctgcaatgaaatcagttatgaaatattaaacctctgcttctcaggagtgacactaatcatggtctggaagctagcctatcgcattttaaaacacccttaaatcaatgacgtagaaactttatagtctaagggctgcccaagcaacttgtcaagcaacccgaaaggctgcacctgatttgcaaacacatacacagaacctatttgtttgaaatcgaatatgattaaatgaatacaatttgggcttgtacctgtctttttcttaataaaactagggatgggacttatttattaccgagggaaaaggaatcaatacaattaaaaaggaaagggnctggaaagncaggcaaagtgtccctccctctggtactctgggccgggggancactggggcactttaaaattttcctt

SEQ ID NO: 270360 - DNA, 463 bp, Homo Sapiens
  misc_feature (343)..(359): n is a, c, g, or t
ctaggcactgggtcaggagaatggataaaagctccaggaagccaggggcctcatcttgtctgggacctgaggtacttccccaggctctgcacagtgccctggcatacagtaggcacacaagtattacatggaaacatcagaaatcaacagtctaaagaaacagcaagctgacccacagctcatattttaaggacagtcttttgtttgacatagattcacaactgcacaagacaaggaactatgagtgtggcccgtggggaggtcgggagacagcccggatgcctgagatgtggtgaggtgtcaccacggagctctgctgtgccttggataaactgatggaggnnnnnnnnnnnnnnnnngacccaggcccacttattttagtaaaatgaaatcaagtacaggtcttaacattcataagcagaacacttacacatcacaactagtaggacctcagccaataaat

SEQ ID NO: 270361 - DNA, 436 bp, Homo Sapiens
gagactgcatagggctcggcgtggtctggaaggaggtaggaaaagaatgaaatccattcccagggactttctcaggtgctgatttaagataaaatgcaaatgaggtagacacagttcctagcctcaggaaggacaaagagaaggggcaggtttggataatctatatgtcagatgacaatttattcaacgaatattttttaaagtaccaactgctagcagaaccctgcactgctcacagcaggtggagcaggtggcagatttcagagtcacttgctgtgctgtgacttggagccaagcccccgatttcccactggacagagataatgaacacctagtttcttcatccatgtgactcagcacacagtggtatttggatcacaaaattatcctggtactataggcgaggtacaaaccctgttaaggttgagaaggggca

SEQ ID NO: 270362 - DNA, 225 bp, Homo Sapiens
  misc_feature (40)..(40): n is a, c, g, or t
  misc_feature (92)..(92): n is a, c, g, or t
  misc_feature (113)..(113): n is a, c, g, or t
tcactggcccaagagatttctccctacattaaggagcaantttttgttgtttacttttaccctttcctagtgttgacttaaacaatgaatgntcaatgtaggtgagttcaaantctagtttgtttatattgatcacttttagttactcaataactttaaaggttggttgcaaaactattttgttttttgcagtctctgaaaagaggattctgagatgttaaatta

SEQ ID NO: 270363 - DNA, 483 bp, Homo Sapiens
  misc_feature (429)..(429): n is a, c, g, or t
  misc_feature (434)..(434): n is a, c, g, or t
ttgctgggtgatgagtatgcatactcttaaaacatggttgtaccaatttacacctctacgacagtggttccatacccttgccaacttcattttgttcattgtaggcattctcttgggtgtatagtgttattgcattttggttttaattttgcatttcccctaatgacctaatgccagttgaacacctttcccaaatgataattggcccatttggacatcatctttcttgaagagcaagtcttgctcatttttccaatgggtcgtttgctatttgtcttactgattcccagggaatcctttctatattctgaataccagtcctttgtattacaaatatgttgtactctgtgacttgttttatttttcaattttccagtttatgttgttgattgttttacttcatcccagaccaacaggttctaaaggttnaattnaggcgggccgcaaggcttatttccctttaggtgaggggttaattttagg

SEQ ID NO: 270364 - DNA, 421 bp, Homo Sapiens
  misc_feature (348)..(348): n is a, c, g, or t
tataaattcatgggatatgagtataatttaactatattgatatattgcactatggcgaattcaaggccttcagtgtatccatcactggaacaacacatattgtatccaccaagcaacctgaaagattttttaaaatcagcaaacattcttaattgtattatatgtaattaactttttccattatggttagtactttatgtatgtagtttaagaaatattggtgtattcaagatcataaattcccctagggcattctctaggaagctctattgttttacctatcacatttagagtcaacaatccatctacaatttcgttatgaatgatgtgaagtagagaatcaacatnacattttttccataaacatatttattgaaaagaccatcctttctccactgctctaccgtggtcatctttggtg

SEQ ID NO: 270365 - DNA, 712 bp, Homo Sapiens
  misc_feature (341)..(341): n is a, c, g, or t
  misc_feature (419)..(419): n is a, c, g, or t
  misc_feature (642)..(653): n is a, c, g, or t
tattgaagaagttgaacttacagcagacagtgaaaggagttacagcactccaggacaaacacagacataaaataatacataaaacaagtagcgggaaactggaagatgccagggagtcctcttataaaagcagggttcaccaaaaccagaaggccaactggctccaggacagcgaaaggcacagtggctcctctgctcctctgccttctgccccatttgaaatgggggacttacaaatccagacttcagggcaggcctagacttgatgcagccactgcaatcttgggtccatggtgcaatttggcagacaagttggtgaaaggtaagttgtctcccagagnatttcaatcagggacgtgggcttcccagatgttaaaagatacccagctaagtcacaaggaagtggatgttttcaaatngctaagtgaccaccaaacaaaacattctccctgggccttcaccactcagagaacaccaacatacaaaaacaaaagtctgttcccatttcatcaataatggagttttaaggattttgtcatagtgtagaatattaagaatggatgaataaaaagtcaaaaaaggtgcagaggtcctataaatcagggtttattagactagatattaataaattggaagggtttnnnnnnnnnnnnggctgttggccctacatatgacagtttcccattgtttcttagcttagtatatttatttt

SEQ ID NO: 270366 - DNA, 641 bp, Homo Sapiens
  misc_feature (257)..(257): n is a, c, g, or t
  misc_feature (384)..(384): n is a, c, g, or t
atctccagtcaaagctgatagtttatgattaaaattaaactttatgacctctttgactgctgctttcattttttcctttagagtacatttaagacctaaaatgataggtatctaatttaattgtttgctaaaaggagacaaaaatctctaacataatcaaaaatttctaagatataagaatatgaggaacagttctaggctcaatgtactgaaatcccccaaatattagaccacagcaaccctctccataccatgtnatatacctggctcccctacccatggcaagcaaaatccaagtgggtagtctggacttccaccctagtgaggctacaaggtggcatcttcaacaccctaactggggtagagtcaaagggctatgtagancaagtagggagccatgataatggtgtcagcggagaccacctagagagcctagatttccacccatacaggaagtaatacggtgttacttactccttctcctagttggctagtatcaaaggaggcctagtggaaagtcgggacttttcccattgcccagaggtgagaagaccactcccactgcagtgtcactggagaccatatgggaaactgaaactgccaccctagcctagcagttgctgtggctaaggaaatagctc

SEQ ID NO: 270367 - DNA, 370 bp, Homo Sapiens
  misc_feature (334)..(334): n is a, c, g, or t
actcattgccttcctgaagttggtgcatcacaatatggcacattttcctacaagaaggtctttcctagggaccagtttcagtgtattgtggtctgtgtgaataccttgtataacagatgttctgagtaataattcaacatcagaacctattttcattagctcttctattttcttagaagaagtttcacttttattatttttgaattcttcatttatctttattctggctgcttctaatgctctggcatcatttttaaaaacttgttgtctggtcctgtgcagtgttttaaagagctgtaaaaccttgactgcccgtcccatggctctcctcaanccggccgctacctccagagcagtcgagtagccccgc

SEQ ID NO: 270368 - DNA, 280 bp, Homo Sapiens
cgcccagccagaacatctgtttttacacccagagagcgcccctcgttaggacagaaccacggtgcccagagccaggaagccgccctcctggcgcccagcattctgagcttctacacgtgatgggcgggctcaggagaggacagggagtcgtggtggaagttccacagctggccgcgtgggggggcccttgcaccgcacttgccgcctcctgactgccccgattccccgcagcccctgtgccggatttcattttccctcctgtgttcccagggttactggg

SEQ ID NO: 270369 - DNA, 310 bp, Homo Sapiens
  misc_feature (23)..(23): n is a, c, g, or t
  misc_feature (35)..(35): n is a, c, g, or t
agaaagatataacgttagggttnggttgtttttgnttttgtaatttttgtcctttgaaagggtttgttaatttttcctaattttaccaaagtttgcagcctatacctcaataaaacagggatattttaaatcacatacctgcagacaaactggagcaatgttatttttaaagggtttttttcacctccttattcttagattattaatgtattagggaagaatgagacaattttgtgtaggctttttctaaagtccagtactttgtccagattttagattctcagaataaatgtttttcacagatagaaaa

SEQ ID NO: 270370 - DNA, 397 bp, Homo Sapiens
  misc_feature (241)..(241): n is a, c, g, or t
  misc_feature (261)..(261): n is a, c, g, or t
ccaccttgttgagtttacttgaaaaccagaggaagctacaagtcacataatttacaatagatattaaataaactacagtaggaatgatgaagatttacagacatttaatcaagtgaatgattttaattcattaagactcttctatgtccctgaactaagttccactaatttgaagacatgctacagtaaacacatatatttggtttcttcagtcttggctatatcttatacaaaggtgaanccaagaaacaataaattagncatcataattgtctacagttgaaagtatgatatacaatataaatacactactcaaaagccagaaatatttatgaaaaaattaagggactaggagatacttttattttttacagtttctacaaagtgattgtgccgc

SEQ ID NO: 270371 - DNA, 466 bp, Homo Sapiens
  misc_feature (45)..(45): n is a, c, g, or t
  misc_feature (69)..(69): n is a, c, g, or t
  misc_feature (99)..(99): n is a, c, g, or t
ctggcctacctccttattcccaccccatgtgggtccattggaaangccctttcccacagagacctcctncctgtgtggttggatttggtcccccaggtnggccccagggctaggctggctcctaaccaacctagcatgaccagccctcccaatccagaaaggccaggtaaggggaccagggtgaggagaatgggcagatactgacagaaattaaagtaaagggattgtgaaagtaaagagctcttccctgattctcatccttctcttttttcctattacaaggcattgaacttggcacttcctgtattctttgtgatcactattgagtgcattagttaacacccaaggggatggcttgattgggaatgtagtgaaaggagctgatctactgtattgtaatgtaaaacagctacagccagttattttgtaagattataagttgttcattaaaaaatcagcacacaaa

SEQ ID NO: 270372 - DNA, 576 bp, Homo Sapiens
caggttcttccagtctttgttcctgggacctgatgttttgagcaactcaggtcactgataaagtggaaggactaagacactgtggtcacagatcccagcaacatcaactcacactcaatccatgtggtggtccacattctgctactcttatccacccatgtggtcattgagagcctttctcagagactcttctgtgtgtttgattgtgcccaggtggcccagggctagctggctctaacaactagcatgacagcctccaatcagaaaggcaggtaaggggacagggtgaggagaatgagcagatactgacagaaattaaagtaaagggattgtgaaagtaaagagctcttcctgattctcatcttctcttttttctattacaaggcattgaacttggcacttcctgtattctttgtgatcactattgagtgcattagttaacacccaaggggatggcttgattgggaatgtagtgaaaggagctgatctactgtattgtaatgtaaaacagctacagccagttattttgtaagattataagttgttcattaaaaaatcagcacacaaaataaaaaa

SEQ ID NO: 270373 - DNA, 520 bp, Homo Sapiens
  misc_feature (185)..(185): n is a, c, g, or t
  misc_feature (188)..(188): n is a, c, g, or t
  misc_feature (386)..(386): n is a, c, g, or t
gcatttctgcctcagtgttgaaggatgaataactttgacaggctggaaaaaggtgacatttcaggtagagcgtgtcacatggatgtaaataccaaaggtcaaggacatgggcttgagagatggtgagaaggatggaggtgactgtggcttgcattctatccgtatcactattaattaccttctanatnctttggctctaggtggtggaacaagtaaagtaatggacaaatactttttcctacccaatatttagtgacccaaatgcagagttatggagagggccagggacctcatgaaccatactctttcctagtcctagggacataactccaatgcctttcctgtcccagtaagaggccatggatttcaagaagccagacaatccnattctttcagataatgataaaaaagaaaccatttattttatttctaagtatagaatgaaacatttatagttgcccaaattttggtaccttttaggagaaaaatacagatttttttgttgttaaaaataaactta

SEQ ID NO: 270374 - DNA, 345 bp, Homo Sapiens
  misc_feature (239)..(239): n is a, c, g, or t
  misc_feature (264)..(264): n is a, c, g, or t
  misc_feature (310)..(310): n is a, c, g, or t
ttatgtgttgtcgtggatgcggctccaccagggagctgggtaggttgggcgggatctccaccaggtggttcttggagatgtagagcttctgcagcttccgcagtgggctgaaggcttctcatggatcttggagatcttgttgttcaccaggacgagggcgtagaggtgctggagacccttgaagtcatccttgcggactccggagatgtcgttgttctgcaggtccagcagcgtgggtntcaggggagatctctttgggcacanacttcagacccagggtcggagcactgaaccacccgcaggtggccantgggcagccgaaaggacacatgggcgctttagggt

SEQ ID NO: 270375 - DNA, 454 bp, Homo Sapiens
agtgtctcagatgtgtaaaagctgaggaatgtggtgttctggcttcacaaatgaaaaggaggcagatgttaccattgtcttttcactgtatatacttctaagacagcaaccgggacacctgcagtggccaatagtgttaaaaaatcctcattcctcatgatttttggctcctagcctaggaatagtttagtcaggacctcagaaaatttgagccttagttctgggattatgaaaacatggggacaaaaacaataacttgtggatgtctggttccctgctgtctgcagcccaggtatctcaggttgcaatggtcagaagtcccagtgagggagctagaaacagagctatctgttcctcatagtgccagtgtgtttacatttataggaccacatatccctggtttctgggggagggtttcactgttacatcaccaagaggccctgaaaagaggaaa

SEQ ID NO: 270376 - DNA, 357 bp, Homo Sapiens
catgagcccacccagcccggcccaaggctgtgaaaccttgaatctgtcctcaacatctggagactggttccaaaaataggtaaaaatcccaaaatggagctttgaaagtgtgttgaatccatagcttgtcagtagactggctccaaggatgcccttcattcttgagtttttaagttccagtgaaattcaggggccaatttatggaaaggtctattcttgatacctatagacattctaaggggaattagtcattctaggactgatatactctaaaatcatctgaattaacaacaaaactgattttatttccttaacatgcttttggattagtacacagacctataagaaatgagggaa

SEQ ID NO: 270377 - DNA, 452 bp, Homo Sapiens
  misc_feature (349)..(349): n is a, c, g, or t
  misc_feature (378)..(378): n is a, c, g, or t
  misc_feature (415)..(415): n is a, c, g, or t
  misc_feature (423)..(423): n is a, c, g, or t
  misc_feature (430)..(430): n is a, c, g, or t
atatactatgctcagctctggggatatagcagtgaacatgacaaacatagtccctgcccttatgggggtttacaggagctagactataatcaaataaacagagagaaatagttacaactcatggttagagctctgaatttttattttagaagatcactgtgggctgctgtgtgaagaataatttgggaagaggcaagagtaggagactaaaagagtaggtggttgtagtcatcgcagtggggagactgctagcttgggactaaggtgggcattgggggatgaaggagaagttaatggggtttgaggtatatttctgagggatggaattcaacaggaactttgcccgtanttatgtttaggatgtgggggggtaagggnttcccagactccccggggtgttcttgactttgaggcngttggttnagttggnatttgccttttttactccaggt

SEQ ID NO: 270378 - DNA, 333 bp, Homo Sapiens
ctggaaagattccaaatccagaaaccggggattccagggccttgggaattccagtgcccttggaatatcaggatctgccttcaagagatgaggtttccaacattgagggactgggcagagggattggggacccagaatctggaatccagcagctgcagttgcccaggatccacttgctgtgccactggggcccccgcacttgttttaggagccagaatctggtgggtgaaggcttgggaatctgggatccagtgcctgggggtggaaggcgtagtgcttgaaatgcagggatctggcagtcagcagaaggatctgagacccagtgtcgaggtt

SEQ ID NO: 270379 - DNA, 383 bp, Homo Sapiens
gctgagagcaatgtaacagagcaaatgggcctaaatagacccaacataaatgaaattaaagtctgacctgtgtgaacctgataacgtaatatcaaaacaataaatgcccaacttgaatgtcacctccccagagagggctctcctgacaaccctacggaagagtcatcccttcctctgtaccccatcctgccccaggatgctcccctagttccttccatgggcacccactcaatgtacagcatctcgatcatttacttgcttcctacctttctcccctgaggaaggggcaaaggggccacctctgtcttgggtcacctttgtatctccaggcacccagcaatgtgcatggacacaaggcatgaggctcacttaaatatttactg

SEQ ID NO: 270380 - DNA, 420 bp, Homo Sapiens
  misc_feature (19)..(19): n is a, c, g, or t
  misc_feature (43)..(43): n is a, c, g, or t
  misc_feature (136)..(136): n is a, c, g, or t
aagggtaataagacttttnggtttaatacttataatttcctcnaaaatttaacttttaataacatacctccttatccctccttaacatatacatgcaatggataccaaacccttacagccctatattatttgtatnattagaaaaagaatacagctccaccatatcaatgctgtgtagaacaaaaatacatcatccttgtagtttaaagtattgaaattatttagttattcccttcccaagaagtgaaaaatatctgaattgtaaagagaaaatttccaggttggaacattttaatgaagagaggaaaaacacagcttctgagcaggtttgaggaagagtcaaagatgtatttgaaaattatgcactatatttgcaaagtgaagcatgtccactaaaagtacattctttatacacatgct

SEQ ID NO: 270381 - DNA, 286 bp, Homo Sapiens
aggctgcgagagtggacctgacgctggaccctgacacggctcacccggccctgatgctgtcccctgaccgccggggggtccgcctggcagagcggcgtcaggaggttgctgaccatcccaagcgcttctcggccgactgctgcgtactgggggcccagggcttccgctccggccggcactactgggaggtagaggtgggcgggcggcggggctgggcggtaggtgctgcccgtgaatcaacccatcataaggaaaaggtgggccctgggggttcctccgtgggtag

SEQ ID NO: 270382 - DNA, 426 bp, Homo Sapiens
aaggtcggccaggaatggaaaccacgcacccattacatcatcattacattaaattacatcaaacataaattatttccttcccccttccccttttcccagcactcaacccaaggagcaaagctcatcccaaccccacacccctccccaggtctgctcactgcccaggctcctctcccctttgttcagtggagctggcttttctcccagcccctttccatgcctttcactccatttggcaagctctgagggggagcctggggacgggtttgggtccccaggaggagagccttgggtataatctatttttctaggagcctcttgccttgtcacttgcactttcgccctctgctttgatggctgaggtgaactcatgttctttgggaaaagggaaggcgtgctgtggaaataaaatgtttatttgcttct

SEQ ID NO: 270383 - DNA, 530 bp, Homo Sapiens
ccacacttacaaagttagaggcagtaatctatattagcgtgtgattaatcaaagagtacacttactaccatgaacttgggccctatgtcatagaattatttttgcctttcccccaaagaatcatttgctcttgaagtaataggctttttaaggcacattttaacaaaaacccatcatatacccagcttaaacatggaagctccaacctggttatagtaataaatatacctaagtaatgtgtgatttaccaaataggctagtgtctctagcttgaggataaagtcatattagaaaactgattcttcatttgcttattcaaagtgaaacaacatgtaaaaaatattagagaattagatttataacaataacccctaagtgtcaggtctgttggcaaaggtccaacaggatatagctctggaaatcagggagccctgggctctaaaccatccaggtttcggagtaggaatcatgaggaaaggagttagggcaccttaattatttttagaaatctcctttcaaatgcacagaac

SEQ ID NO: 270384 - DNA, 471 bp, Homo Sapiens
aaaataaatgctacattaccatttaaacagatgtctaataaatgcatattggaacctattgcacaaaagcataaaaaatgctcttcatccacataaaaacatacaaattaaaagctactcaaagtaaaaagaagcttgcaaaacatctcacaatttcattttatatgcctgtaaataaagctggaccactgaaaccaaacaattggatgggaaaatatgatagaaggcttaaaatagaataaataattttataaagttaagttttcttttttaaccccccaaatcttaaattcaatattatatattctatttgaattttctatgtccatgaaaactgcatcggtgagaccgtattccgggtaattagccccactgctgttgaaaacgacgcataaggtgatttaacagcatttgttttaccagcataaatagttgtgaaaacttcttcacagtaactccatctccaaaaaa

SEQ ID NO: 270385 - DNA, 411 bp, Homo Sapiens
  misc_feature (347)..(347): n is a, c, g, or t
ttgtcaccaccagtgtcgacgctgggcggtcttgtctcaggtcaatggtgaaaacaactgcatcttcacctgcagataagaacgtacagggagagtctggttccagtgccaacttgtgggacgctcccttgtgctgggccacacgttttgtattcttgcaacactgtgtggcagacagttctgctactcgaacctgcccgtcacgggcacacatggccagagtagaatcaccactgttaggaagaaacttggcctgggaacacattacttttgtggccactctcaaagtccagtactgggctgccgccgtaacccaatcccacaccaccacctttcagggtcatcgntggccactggcccagccggggtgccgcgtgggttaaagtgcagggtatttgacaaaaccagttt

SEQ ID NO: 270386 - DNA, 535 bp, Homo Sapiens
  misc_feature (386)..(386): n is a, c, g, or t
tatccggtggtgacagccggatgctcctgttgccttgcgtcatcagcaggtaatctggggaggttcactggtaccttgtgaatattctgtttcctgtcagcctttcacctaatggtcttagcatccctaaatcattatttcatcagggatgtcaaagatgatttccatattctgtgattcttttcacatgtattaggcgggcattctgtaaagaaacttcttatcatcaataagagaacatcatagattcttctaaaaaagcagggtcaatgtttcattctgtcctttatccatttgaaaggaaggataggtcacctataggttgtgggaaatcagtgttttcctttcactcctctgccttctttccctccatccttcctttgtgnaatcactgtgtgccaactgactattcattgtgttgtagtcacagtcatggggttttctgctgctcacttgatttcagatatggccagtggaaactcctgctggctggttcctgtgtccttttcatatgtgtgtattaatgtttaagagc

SEQ ID NO: 270387 - DNA, 443 bp, Homo Sapiens
  misc_feature (35)..(35): n is a, c, g, or t
  misc_feature (318)..(360): n is a, c, g, or t
  misc_feature (365)..(374): n is a, c, g, or t
  misc_feature (408)..(408): n is a, c, g, or t
  misc_feature (413)..(413): n is a, c, g, or t
gggcttctctgtacccaagttacagtgcagtggtnaattatagctcactgtaaccttgaacttctgggctcaagtgatcctcccaccttagcctcccgagtaagctgggactgaagattaattttttgatgttggttttactttctctgcccaatctgaaaatctctgccttttatttgggaacacattaaattaaactcaattagattttacttgctaaaaagagtccaagggcacagacacaatgggtaaaccacataaactcttcagggttccctggccagttccaggacatcagtttttcttccccccgaaaannnnnnnnnnnnnnnnnnnnnnnnnnnnnnnnnnnnnnnnnnntttannnnnnnnnngtaaaggacaggggttctgctgtgttgcccacgntgggncccaaattcgtggggctcaaggtgaccccc

SEQ ID NO: 270388 - DNA, 585 bp, Homo Sapiens
  misc_feature (33)..(33): n is a, c, g, or t
  misc_feature (204)..(204): n is a, c, g, or t
cctccaagcctaaaaggttgttaatagttggangtgattccagtgaagatattttatttcctttgtcctttttcaggagaattagatttctataggatttttctttaggagatttattttttggacttcaaagcaagctggtattttcatacaaattcttctaattgctgtgtgtcccaggcagggagacggtttccagggagnggccggccctgtgtgcaggttcctgatgttattagatgttacaagtttatatatatctatataaataatttattgagtttttacaagatgtatttgttgtagacttaacactttcttacgcaatgccttctagagttttatagcctggactgctacctttcaaagcttggagggaagccgtgaattcagttggttcgttctgtactgttactgggccctgagtctgggcagctgtcccttgcttgcctgcagggccatggctcagggtggtctcttcttggggcccagtgcatggtggccagaggtgtcacccaaaccggcaggtgcgattttgttaacccagcgacgaactttccgaaaaataaagacacctggttgcta

SEQ ID NO: 270389 - DNA, 417 bp, Homo Sapiens
  misc_feature (24)..(24): n is a, c, g, or t
  misc_feature (39)..(39): n is a, c, g, or t
  misc_feature (68)..(68): n is a, c, g, or t
aagggggtttccacctatgttggnccccaggctggtccncaaaactccctggacccttgtgaatccgnccccacgttggccctcccagagtgcctgggattaataggcgtgaagcccattcgcccccggccctgttttccacattttcctttagtaggaagtgcctgtacagatatcctcacgttgaggaaatacctttatattgcctttgtcttaatatttcaagggcaaaccaaaagagatactagcttaactaatgatccacttctgcatgctttatttggatctaggataaatcagtaccccaccccccggagtttaagtgatgattggtaaatgtcagagaaagatttcataccaaacaaaatgtattctatttatttaaaatagtttatttttattttcatttacttattt

SEQ ID NO: 270390 - DNA, 388 bp, Homo Sapiens
aaagggcccaaaggttaaaaagtaaataaaaacactttaacaaatggcccaccctggtagaatgtatcttggagaagtaagattataaaaattttttacggggcattcctagaatcaggagattggagtgaggaacagaaacctgaaaagcatcctatttacccattatttaactaacactagttgtttctttcctctttaagtagaaatacaatacaacttttttcctatttcatcatcccccaaaactcacagtgaggggaaattcctcaaaactaagggaatacataagcttagggttaaaaaaacaagaacctatgtccgactgatataaattccaagtccttaaaaaagtatttatttggaggcttcatctccttttgttagt

SEQ ID NO: 270391 - DNA, 444 bp, Homo Sapiens
  misc_feature (19)..(19): n is a, c, g, or t
  misc_feature (28)..(28): n is a, c, g, or t
  misc_feature (44)..(44): n is a, c, g, or t
tcccaaaaagccatttaantaaaaacanctgttttaaaagggtnaatgtaacaatttaattttgctaaaattgaaaagggcaacatagatggaatcccaaaatatgtacattcagcgtgtttggtttttcgtttttcattgttattattgtgagaatgctgttattggggttgtgtgtgagtgcccgtcagccagtgatgcctcgggccacgctgtggggccacctcagtcctgcctgggtcctggtgccttggaccccacgtgcttgtggccaggcctgcctgggcgggccatgtggcctcagaccacaagagcggagctgccctggcccaagcactgcagctgcctgcaccccccagcgtcgcagccttgcttgttttctctgaacagcaacagaacagtgttcacagcgattcaaagggtggcattgcttcgtgccgaagt

SEQ ID NO: 270392 - DNA, 616 bp, Homo Sapiens
  misc_feature (552)..(552): n is a, c, g, or t
  misc_feature (558)..(558): n is a, c, g, or t
actggaagaattatgttccacgggcctgctcaggaggccttgggatactttgaatcagctggttatcactgtgaggcctataataaccctgcagacttcttcttggacatcattaatggagattccactgctgtggcattaaacagagaagaagactttaaagccacagagatcatagagccttccaagcaggataagccactcatagaaaaattagcggagatttatgtcaactcctccttctacaaagagacaaaagctgaattacatcaactttccgggggtgagaagaagaagaagatcacagtcttcaaggagatcagctacaccacctccttctgtcatcaactcagatgggtttccaagcgttcattcaaaaacttgctgggtaatccccagggcctctatagctcagatcattgtcacagtcgtactggggactggttataggtgccatttactttggggctaaaaaatgattctactcggaatccagaacaagagctgggggttctcttcttcctggacggaccaaccagtgtttcagcagtntttcangccgtggaactctttggtgggtagagaagaagctcttcatacatgaatacatcagcgg

SEQ ID NO: 270393 - DNA, 442 bp, Homo Sapiens
  misc_feature (324)..(324): n is a, c, g, or t
tacaaatagcacaaaccttcttccaagctccaggttttcccatggcctcttctcttagattaactgctatctcccttaaatgtccatagttggaagcatgggacatgcttggccctctgcagacaccctatattggagtgcaccttctggctgaaaagtaacagaggcattcaggccccatggtagcagcagcagcttgatacaggccgcatggggccataggaagagcacaggcccttgagtcaggagtcttggttctgtttcagccaagtagggtgatgtcagacaagtcctttgcctctcttggtcttcagtttcctcatnctgtaaactaggatttcggtgaggcttgaaagacaagatagttcccaaattattaccaaatcagactctaaacccattaacatatttaattgaaacagatacatcccccctcaaacct

SEQ ID NO: 270394 - DNA, 532 bp, Homo Sapiens
  misc_feature (17)..(17): n is a, c, g, or t
agactgaaggccaaggntagacaccacagctccggggctcatgggaacagagcagttatccacagagctggacagtaaaaccccaacgcccccagcacccactctgctaaaaatgacctctagccctgtggcccgggcactgcctcagcaggacccagcttacctggcggtgctctccccaccagtgtacgctcgatagtaaccactctggtaccctccgagctcatctccgccgtaccgaccacaaaaagcaatcatggtggcatagcatctgagtcacttgcgggtggcctagtggaggagaaggtggggatcccatccaagaacttcttacccagcatagccccggtcgcagaatttagtctcaaaggaaacttcaaccacagcacttgcaggcctcttgtttggccagaccagagtgggaggtaaatgcttgccatagtctcttggacaaagcagtgagcccaaagagatagtttgaaaagttccaaaattccaggccgaagaaacttccgaattgaagagccactgt

SEQ ID NO: 270395 - DNA, 400 bp, Homo Sapiens
  misc_feature (87)..(87): n is a, c, g, or t
gggtatgcaccccgaaaaaagcaccccacttgtaacggttgccatccttgagtttccagaaagttcccagagtgaagctcagccccnagatgaacaaaaactggttgagtcccagagatgccctgagttggagatgaaccttgcaaactttcctcattacccatactaaaaaccccaccccaggaaggagcttatctgcccatttcctacacatgtgacatatggagaagcatgatcagctacttcacagtctctgcctttactctgcctccgcatacaatggctcagccaactagcctaacgaaagctgttttcaccattgtttgggaggtactgctttgggaaactgccccagctgtcctccttacttgttgtaggtaataaaatccctttgttaaat

SEQ ID NO: 270396 - DNA, 203 bp, Homo Sapiens
aggaaggaaaagaaaaaaagtaaagtgatggggcagggggaataaaccacgtaaaggaaagctaaaatcttagaaagtatgaaaatgtgggcttcaattatatttgtcttcagctcatattcacatttactgtggaaacagaaatatcacaaatccaatgttaaaactgcccctcctggtttcacactggtcacaagtttcaa

SEQ ID NO: 270397 - DNA, 237 bp, Homo Sapiens
agatggtttctctccccttcctccagactgtttctaaaagaagacagtaagtcaggttcttaactctcttaaaaatcattttagttaaacataagtttgcatatgttaattgaataaacgttaagtgtgaagtagaatcctgcagatccccttaagtcccccatataaatgaatgaattttgatacaaagttaatgtttagaatgttgataatggcccaggtgtggggtgtcacgcc

SEQ ID NO: 270398 - DNA, 666 bp, Homo Sapiens
  misc_feature (163)..(163): n is a, c, g, or t
ttcggcacaggatttgatgaacactaaatatttcttattaatataatctatttttgtattttacttaatgagctttaagtgcctgtcgttctgaaaattgtgtatttataattcagcttatctcacaattggacctaatagcatttctttgtgcagttaggtnacgagcactgctttgaggcccaagcactagtagagatgcgcgatacaggtctagtttcggtaactgttccagacatcaagcaataaaaaaatgaataccacaaaagatgtttgattttacagtggagccttactgaaccagcattcagaagtttaaggtcctcctaggtatgagtatttttagtagtggatcactgtggacagggtgcagctctaccagttcctgtttcttctgagccagaccctcttcagggaagggaccaattaattttaaaactcacttgaagcacagctggtcatggggcttggtataaagttcctatttccaccctgatacttccaattcctggaaccccagcccactcccccatccctcctccctatcaaactagtataatgattttgaatcggtacagtgtgtttaactgtaactaagttcaacagactattattattatctttgtaataaattaacctagcaataaaaattattctgtttcttta

SEQ ID NO: 270399 - DNA, 373 bp, Homo Sapiens
  misc_feature (141)..(141): n is a, c, g, or t
attgtccttcctgaagtaactggggcctcctaccctaatgtcctgattcccatctgtgctaccaaaaaagcccctctgaatggcagccctgtctgtgcacaatgatgccgaagacttttcttttccagcatcttaatgagncatggcccccaggaaagcagagaaggcggatgcttgagtctctgagggtcagaatacgcttatggtgaaatcagaactggggacaaggcaaagtactgccattgggaatccggggtggatggtcatgttagaccaggggtgtccaatcttttggcttccctgggccacttggaagaagaattgtcgtgggtcacacataaaatacactaacactaaccatagctgatgagct

SEQ ID NO: 270400 - DNA, 460 bp, Homo Sapiens
  misc_feature (13)..(13): n is a, c, g, or t
  misc_feature (21)..(21): n is a, c, g, or t
  misc_feature (285)..(285): n is a, c, g, or t
  misc_feature (439)..(439): n is a, c, g, or t
  misc_feature (447)..(447): n is a, c, g, or t
atctcggcacagnctcggctncggtgtaccaggtccctctcaagtcttcagctcagtactgattaattagcacatgcgtataaactaccagagaagccccagaaagaagcagtggaaacaatccccacaactcacagaagtagcagagtaattcctccttccactacccaaagtgagaatctcacaaggcatcagatgagtagtcagaaggttcctgccctcagtagcatggaaaaactagtctctaaaagctgctgcgactctgctgaacaaaagcttaaaaancaagccttgtaaaggattcaaacagtctccaagtaactttagcctcatcccagaacgaggcttcaaggattatttgtagtacaaaaatattccagcaacaaagttaaaatttttacaaggttaaaactcacattaggctgggaaaatttaaccngggcccanggaaaggaaggca

SEQ ID NO: 270401 - DNA, 401 bp, Homo Sapiens
  misc_feature (13)..(13): n is a, c, g, or t
  misc_feature (333)..(333): n is a, c, g, or t
  misc_feature (364)..(364): n is a, c, g, or t
attcggcacaggnagcttctgtctgcagtgtctagaatgggggttggagggactatggggaacagaggtggccccagagcttggacatctgggttctcatgctggccttgctgctcataagcaggtaacacagggttgagttcctccttttcctggccagccaacctggaagacctagccttctggctgttcagtgtccagagctctggagaatccctgaggctacatctctgggtgggggaaggtcctctctgtatagatggccctccaggggaaagtctgcaaggatccagacttcagaataatagagttaagtattaactaatccaagtngtcctagcacattttagcacatttgggcatnttcaaggtgtgttgcttaaatgttgctgttcatcaaa

SEQ ID NO: 270402 - DNA, 130 bp, Homo Sapiens
aaagccaaaaatttaaaaacagtatcgaattggagaagagtttgtttcaagcaagttactgtaattttcaaaagcccattttgtggaactaatacagtgtattaaaatgaattgaacaagcaaacttaaa

SEQ ID NO: 270403 - DNA, 394 bp, Homo Sapiens
  misc_feature (12)..(12): n is a, c, g, or t
  misc_feature (22)..(22): n is a, c, g, or t
  misc_feature (127)..(127): n is a, c, g, or t
atggccttaagnctgggcaggncagaggttgccaatgaagcccaagattgcacccatttggactcccagccctgggtgacagaagtgagactctgtctcaaacgaaaaacccccacagtattatttncatagttgtaatataaagggaaattaaaggaaaacaatttgtaataacataatatgcatttcagtattcaaatgcttgggaagcaactacatgtatgaagtacttgaacatgtgtacttctgcctagagctgcacttagtagtgtggactgattcaggtgtgttgttttggcagaatcaaagtaacatgatgttttgaaatagtaaaaatctcttggtaaaattctgagcaaaaagaaatgaaaagtgacaggatgggttgatttct

SEQ ID NO: 270404 - DNA, 552 bp, Homo Sapiens
  misc_feature (78)..(78): n is a, c, g, or t
  misc_feature (261)..(261): n is a, c, g, or t
gtttacattataaaatgtcccataacccttaagaaagttaactataaaaacaaagcaaaatgcttttagtcacatttnatacttggttttcaataaaccacagaaattaagctggaaaaaaataggatacaacttataattagtgattatgcttaaagaacattaatattacagggaaatgaatgaaatgttcctagcaattggatgctgctgaaaggcagaatttggaattttttaatattttcccaaaaattgccctgnaagtgcacacactgtgtcagaagggcaagacaaactttctttttccttagtgatatatgtttatacttctttgcaccaacccacgagcggctgggcattcattcccaagatgccaactcttacgcgaagaagcgtggtggtagtctaccaaaagtggggctatgaaacgtggcatgaaaatcagctgttctcacttcctactaaaaaatagttaactccatctcactaagcaagagactatctgccatcagaattcaagtcccagtgattagctattaatgcttaacagga

SEQ ID NO: 270405 - DNA, 323 bp, Homo Sapiens
caaatatttaatctatcataaacttaaagtaatattttaaagactcataaagtgtaagcatttccttccaagaaaagggaaaataaacagaattgtctctataataataatcaaattaaaatgctaaaaatgtttgcataaacaaagctgcataataaatgataaaactagcgaaatatttagaacataggtcgtaaagcatcaataacttttacatattaagagcttttataaagtcaacaagagaagaatggacatacaaacataaaagagataaagcataggaagtgaatttataagggaaaaattaaaattaaatattg

SEQ ID NO: 270406 - DNA, 337 bp, Homo Sapiens
  misc_feature (27)..(27): n is a, c, g, or t
  misc_feature (42)..(42): n is a, c, g, or t
  misc_feature (118)..(118): n is a, c, g, or t
  misc_feature (131)..(143): n is a, c, g, or t
  misc_feature (305)..(305): n is a, c, g, or t
  misc_feature (308)..(308): n is a, c, g, or t
  misc_feature (310)..(310): n is a, c, g, or t
cctgtagtcacagcctacctcaggagnctgaggcaggagaancgcctgaaccccaggaggtagaggttgcagtgagcctgagatcacactgcttcactcccaccccgggtgacaaagnagagcgcgtctcnnnnnnnnnnnnncaatgagaccgtcatcactagatcacggatttcaaattaaccatcccacatattagtcgttcttcaaagaataagtttctctttatttagttaatatgcacaatagattacacatggtgtaacagaagtagaagtagattttttaaaaaattagaggagtcnccnantgctgtgcacctcttaagatctgttaa

SEQ ID NO: 270407 - DNA, 484 bp, Homo Sapiens
  misc_feature (24)..(24): n is a, c, g, or t
  misc_feature (91)..(91): n is a, c, g, or t
  misc_feature (168)..(168): n is a, c, g, or t
  misc_feature (178)..(178): n is a, c, g, or t
  misc_feature (235)..(235): n is a, c, g, or t
  misc_feature (276)..(276): n is a, c, g, or t
ataagggcagatccccggcctaanaacttggacctgtgatgaatcagatggtcaaagacttagcttttaaaattaaaaagggaagctattnaacccattggagcgactgcatttggcctcccagacttggtcagacacagtgaggccgctcaagcaaaatgggatctnggcatgaaantccccaagcggctgggccccaggctgtggcatgatgggcggaggcaagaagcacccnggacttcctagggattcctccttagtcgccgcatgcagaantcctatgacactctaattatgattgctaatagccttatgtaaatatttttcttaacaatttgaccctccactccttgaaaaacacaggattataaaatggtgccgccatttctcattttttaactttttacagaactagcacagcagaaatacttttaaatttttccttcatgctctagagaaaataattttatttttaaataaacgc

SEQ ID NO: 270408 - DNA, 337 bp, Homo Sapiens
  misc_feature (27)..(27): n is a, c, g, or t
ggtacccccattaggtgcccgccccgnttaaaaccaatataattgaccgatgccaagtatttccgaagaatggatctggccaataataaaattaagtatgccatataccccaacagttgtagataaatttttaccacaggtcccaaaaatccaatgcatatttgccgctgttccactgcagtgctgtttgtaagaacaaaaatttggcagtaacctaagtgaccatcaccagatgaaaatgtaacaaaatataatactttcaggcatacaagggaatactctgtaatagtcagaagcagttgtagatttatatacagtaacacagatttcgatgttg

SEQ ID NO: 270409 - DNA, 438 bp, Homo Sapiens
  misc_feature (32)..(32): n is a, c, g, or t
  misc_feature (95)..(95): n is a, c, g, or t
  misc_feature (401)..(401): n is a, c, g, or t
aaaaacccccacctttgaaagggccggaaatncccccacctaaacaaccctattccctgggcaaaacacccccccccacagtgaattaccagccngtccccaatccagaattatttccagtccctccaaagccaaggagagtcctgtttaaaagagttgccttacaaattgtatttttattggtgatggtcactcctgtatagcaccccaaggaggagacactaactgcatcccattatggcttatgatgccatctgtcagatcatttctgcaggttaggtaccagtgtaaagttggaaagagtagtgctgcaattgacaactgaggtaggacctcaggagtcatctgtactctgatgggctcatcagcttactaatgacctattcacattctgttagggnaaaattatttatataaaatgttcatattcatcatcaa

SEQ ID NO: 270410 - DNA, 382 bp, Homo Sapiens
ccctcaacccggcctggcccttagaaaacctttcactggatcattttttgtcactggaataaccttcaaggttattatgcctttcattcccaaatggatctgtcctcagctctggacccaattccccttacttcattttggcaaacactaagtcaaatagtgaaatgcctgtcactacatagaacctattacctggggcaaatacgaacagattgagtttccttcatcttgtgtaaatatgatgaaacagagacctggtaacttggtgacactgttaaaccctttttgggataaagccaaatgtaaatgaaaacattaaacagataaattgtggtgttgagacttttctgaattgagaaaaataaatgtaattttggaagaa

SEQ ID NO: 270411 - DNA, 496 bp, Homo Sapiens
  misc_feature (18)..(18): n is a, c, g, or t
  misc_feature (30)..(30): n is a, c, g, or t
  misc_feature (59)..(59): n is a, c, g, or t
  misc_feature (83)..(83): n is a, c, g, or t
  misc_feature (94)..(304): n is a, c, g, or t
  misc_feature (377)..(377): n is a, c, g, or t
ggaagtcttggctctgtnaacccagggctnagtgcaagtggtgtggatctcggatcttngggtcactggcaacctccaacctncccaggtttannnnnnnnnnnnnnnnnnnnnnnnnnnnnnnnnnnnnnnnnnnnnnnnnnnnnnnnnnnnnnnnnnnnnnnnnnnnnnnnnnnnnnnnnnnnnnnnnnnnnnnnnnnnnnnnnnnnnnnnnnnnnnnnnnnnnnnnnnnnnnnnnnnnnnnnnnnnnnnnnnnnnnnnnnnnnnnnnnnnnnnnnnnnnnnnnnnnnnnnnnnnnnnnnnnataaacaaaatattttctatatttgtttaatagaattttaacctactgcagttttaaaattacatgccctcanaaataaaatataagtatttagtactgtctgaaatacgacttatacagacagttctaggaagcatttcgataaggcagcaacatctgggaagatatttaaccatttcctttttctctgat

SEQ ID NO: 270412 - DNA, 985 bp, Homo Sapiens
  misc_feature (419)..(427): n is a, c, g, or t
  misc_feature (755)..(794): n is a, c, g, or t
ttccaaaccagtgacagcaaggaaatgctaaagaaagtaaggggctggatgaacacctaggctagagattctggtgaatataaactaatttcctagccactcagagaaataaatgtaggaagggttataaggtgtggtactaagctggaagaaacaacacatctttatatcttgcatgatttgttcaaacttaatgtaagcagcaggtttcctttgttgaggatttttcggttgatatgacaaggatacttctaagtgactgttagacagcggtattagttcccatacagagagtatgttggaataatcagtgcttgcatttgaatctgcgactctaccaggtgggatgaaagggcagctggaaattcaggcacaacggagggaagttctttttcagggtccttctgtttgtgtattgnnnnnnnnntctaaaacatttatatttagatgagtcttacagtctcaaaagcccatttttacaatagcagacaagtctctccgaacaacctgtccccccacaccctccgtggcacacaggtctgactcacctctggttccctgctattcttcagacaccagaagattccttcgctctttgtgtcgcctctgcctaagaccccccattccttaggcacttacgggactcactcatagacctcctccagcgtggctgccctgagcaccctatgtggaatgactacgcctccagctcatccgccctcctgccctgtcctgttacatttccctctattgtnnnnnnnnnnnnnnnnnnnnnnnnnnnnnnnnnnnnnnnnggttcacccccccgcctcccattagaatggaagatccatgaacgcagggtgattttgggggagggtctgttttgctcattgctatatcgctgtggtttttaatgaattcatgactggtaaataaatgactgtaaaagccccatgcctaggaaaaaagatcagaaagaaataaaccaaaatgttaacgtgaa

SEQ ID NO: 270413 - DNA, 457 bp, Homo Sapiens
  misc_feature (375)..(375): n is a, c, g, or t
caaaggaatatattaggtaaagcatttgacctttgctccatgttcttcattgcaattactaatgttatttccaaataaaagagatttttaaaatacagagacataagtttaaagttgtaccgaaaggaatggtacatttgtagttattatgtagttcatcaggttttcatatccaagtcatcatataaattatttgaagaaaacattataattattaaactgatttaataatcatagtcatttagtacttaaaattcttgcatattctacccattggaaaatgacactttggatttaatttcagtttccctaagagttggggcccatattataggtgagggaggggtggaggaggatgcaggaaatggggccccnaattatagggtacaggtaggccttccacctgcctgcctggtttatggggggcctaccattttctggggccggtgggggtggg

SEQ ID NO: 270414 - DNA, 395 bp, Homo Sapiens
aagggaagtatttctcggaagaggtgctgatgggccttcttttcagatggtgaggcttctgcttacatcttttttatgtctttgctgtttgggacctaattgctactttttctagtcgtagcagatgacttgcttgaagctgttggaatagttactgcatattgcatacccttccttgtagctaaaacaacaacaaaacggcagtgtgtggtctaatattggacaagactctattgtgagttagaaagcagaggttttctgcttgtgaactcctttctctgatattttctattttgtggtaagttaggcttggtgtaagttgataaccacatctcatttaaccatgtgcgtcagattttgcatttttgagctttaggaaactcaaaagttttcca

SEQ ID NO: 270415 - DNA, 472 bp, Homo Sapiens
  misc_feature (362)..(362): n is a, c, g, or t
  misc_feature (373)..(373): n is a, c, g, or t
  misc_feature (388)..(388): n is a, c, g, or t
  misc_feature (418)..(418): n is a, c, g, or t
  misc_feature (437)..(437): n is a, c, g, or t
  misc_feature (454)..(454): n is a, c, g, or t
tgaagttgtagagaaaaatggcctgggtcaatgtaggatctagaaaattaggagtgtacatttgctggcttctttttgagttttgtactgtttattacaggaacatatttgtgtggctaatctctagggtgacagtgagtactaccctgctccttctgcattctagttatccaacacacccagcagattgtgttcagggacagaatgtgtttttagaaatcccttattattgaaatgaataataatatagctataaatatgaatgtctggaggtatccagatgtgccttaacaaatgtaaatggttttcattcagaagtttacatttttattacattataaaatctcatccattgggggacntttctaaaccntggaatatccgttcnttttaatggaaattttagggtggtgcttanccatttgggagaagttgcnggtttgggccataggcnccggttatccaggagtgt

SEQ ID NO: 270416 - DNA, 452 bp, Homo Sapiens
  misc_feature (408)..(408): n is a, c, g, or t
aagtaggaaagtatgtagggaaggaaaaagcacaaattctacctgagtactaaaacagttaccttttaaaagacaaatcatgcttatgttcacttaagtaagcggaacagacagaaaccactgctcgacttaaagtgtccagaaaaagtgcttctgtagcaacagaatgcctagaagaactcctggatttctagaatgtctcagtataaaaccaagtctttctcttactctgttgtacacgctggaactggatgggttcattcgattccaagacatgtgaccacagaatttcagagttaaaacaagacatcatgagaaggaacctcgttcttaaataatatttttagatctctaaagccagagaggggtttaactgctatttctgtgcaaagattagaaagccagtgntccaaggaaggctgccaagggactggggtttaccttcaggctca

SEQ ID NO: 270417 - DNA, 687 bp, Homo Sapiens
gtagacaatatcaatattcaagtaaacaaatttattaaatccaacagcaggtaaccttccaaataaaaaacattaaaggaaaaaatgtagacatcaaagacaaaaatgtgtgtaacaagtcaataaaaatactcaaggggccatttggagagtgcaacagtgcagaaaatacaaacaaaagtattaacttttgtcaagtttgtacaacctcaacaaacagacacactggtcacaaaccaagagggatccacaaaggtggagggtcacatgagcagtggactcatcacctcagcggcttaaggcagggtatatctgtgggaccaattcatccaagccccatgtgcctattgcttcacattccccctttaaaacctagtcatattcattagtgcaacaggtaagagcaattaagcacagacggagctggggaccagggtcagagggaagacacttctcccagagcaaatgtatgcatgtcagggggatgaaaaaccccagcagctgctgaatggcttcctttggcaatatccaagatttgtgttgaaaggagcagggaggttggatgggtggcggaagtaggtatttatgagataggctgggtttccaagaagagaagaatagggaggacatgatgcccagcacctgaatcagaagcagaacccaatggttatgcaaagctatttgaac

SEQ ID NO: 270418 - DNA, 490 bp, Homo Sapiens
  misc_feature (455)..(455): n is a, c, g, or t
gacgagagctagcaccatgagcttcaataccctgttaaggaataatatgaacagaggagaataatctaattttagattagaaaagaaccccagagatcctgaaacactttcctctctccgcttccctccatgagataaaaatcactccagccagatagccaaattttgataaatgcctattatgtgctgggtacctttcaaggaactagagatcaagtgatgaacaggactgaacaggacacacaaggtccctgcctttgtggacttaaatgctaaaaggaagacagacaatgatcaagtaaacaagtgacacacccaaataaatcactttaatattccttaaaattcacacagagagttggatgtaggagcctcgcttggggccctcgtttcctcccactaatcccatgttctattatgtcacgatgccgggatcacagaaacaaaggaaaganatcaaagagaaaatgcagaacaggggagaaggctc

SEQ ID NO: 270419 - DNA, 779 bp, Homo Sapiens
acctgatttttattccttaaaagaaaaaaacaacttaaatgcatacatacagaatagaatacacttacttaagttttgacagtgaaaaaaaataattacaggttagatatttaatccaaggtttaacatgaggatgatctcataaggcaatttctttcctttaataaatattaaagtgaatattattctggaagcaaatcatctcctaattcttcatcagcaaaatcatcctcatcgatccttttcttggctgcagtttttggtcgttctatttgagggccaagtgggtccacataggaggcatctatttctttgttactgctactttcataaggttcatttgtcccaggtaaagctctgagtctggcacttagtcgttcacctttactactggcactatagttctggccactatcaccgctagcacttccttctcttttgccacgggagcccccactgccatctctgcctgactttatgcgctgttcccctatttccgtcattttttccaacctcttcagttttctggcatattcttgagcatcttttaatccaagatctgtgagtatctttgtaagtatctaatgctttttggtagttaccacttcttctgaaacaactagctaccatcagctgccatttcacttgtgtaggctgtataagagaagctctttcaaagtactgaatagctttttcccaaaattgggtgtcaatgtaaataggctccaagccactcaatgacttcaatattacaaggaaaatacctatatgactcaata

SEQ ID NO: 270420 - DNA, 505 bp, Homo Sapiens
  misc_feature (224)..(237): n is a, c, g, or t
  misc_feature (492)..(492): n is a, c, g, or t
ctttgcaagcacctgtcataccctgtgtatatggatatatgggatagaggccatacaggtcaagtgggcacaaaaatgcttagggacgaaatgacacctaatttttaaatcatgacaggatgtttaaggttataaagcatactaatatatttaaaattctaatttaagaagagtttttcttcatgtttgcaatgttacagtgttctctatttcatagacatgcnnnnnnnnnnnnnnaagtttatcatgcattgtggttgaaaagcagcacacaatttatggcaaggaacacagtgaagtttataatgtgacaatgtgataatagccaagactgtcaaaatatgccagccattctctggtaattaggctcatttgtgtccttaaacttgagatgcatgtataaaaataccatttccctcctgcttgcttcctgggcagtcttgtgtgtttttactgcactgtacgttgtactgtagcaacgttatgccttcnaatcaagatttgg

SEQ ID NO: 270421 - DNA, 443 bp, Homo Sapiens
  misc_feature (359)..(359): n is a, c, g, or t
  misc_feature (417)..(417): n is a, c, g, or t
  misc_feature (429)..(429): n is a, c, g, or t
cagcgcctactatgtgtcagaaacaagtgtttctgcctggacatcataaatggggacttgggaccctgaggagagtcaggccacggtaagcccttccccagctgagatatgggtggcataatttgagtcttctggcaacatttggtgacctaccccatatccaatatttccagcgttagattgaggatgaggtagggaggtgatccagagaaggcggagaaggaagaagtaacctctgagtggcggctattgcttctgttccaggtgctgttcgagctgttagaacccttaagcttgacagctttgtgagttattatttgaaaaatgaggattccaagagttcagaggagtttgataantgtgcacgagggcacactgctagtaaataacattgaagattaactgggaatggaactncctgattcccanagcctattgtgttt

SEQ ID NO: 270422 - DNA, 287 bp, Homo Sapiens
tcacgagccactgtacccaaccatatgtcattctttagacacactgcttactaaatttctctttttaaaggatatactgaatttccggttgagccaacttaacagctaattttctattttagctttaaaacattgataagcaacatgaagcaatctagaacttaacctttaagtggctttattaaagcaatccagctatgaaaattatggcagaaatggattatctacaatcttaccagcacataaggaaattcttcctctattctgaaataccatcttctcacaat

SEQ ID NO: 270423 - DNA, 565 bp, Homo Sapiens
  misc_feature (471)..(471): n is a, c, g, or t
  misc_feature (482)..(482): n is a, c, g, or t
  misc_feature (490)..(490): n is a, c, g, or t
  misc_feature (520)..(520): n is a, c, g, or t
  misc_feature (540)..(540): n is a, c, g, or t
  misc_feature (554)..(554): n is a, c, g, or t
ttattaaagagagttctactgtagacaaacaacccagggattgtttgaagaaaagggatatcccctcagacctggggatgcatttctccctcagtggctaaacctctttgtcattattacctccagagagagacacccagggatctgctcacaccacccatctccaggcaagttgaagcatgtcctggaaagccacctgaaccctggacagctccgcctgactagagaaatggtggcaaaggaattcttgctgtggtcccagcggtgagcattaacagagttacctctctccaccccaaatattcagactgcaaggacactggctcccaagcttcgacctgcttgggagttccattccagggtacttctgctggatgtcttcgggccagccttcaggccacagacttcccagctggagctgagcttgttctgaggaagtcagggaaatttgggggggattttttaaccagnggaaccaaagnctggggancccattttttcaaaagctctgggatactangcttttttaggacctagggnggggttaaacgggnaaagtccattt

SEQ ID NO: 270424 - DNA, 590 bp, Homo Sapiens
gaaatttaaaaccaccaccccccaacccctggagttgctctttagccaagcctatttaccaatttttttctaacctctccctggaggtaaatctgggtttcaagttggaaagccatggggtgaggaagttccccaagtgcaatggccgatgacgagtatccttgccactgccagttaacagggctgggatgagctcctgtagacagcagcctcacatccatcagctagggtagccctaggttctcactctgttggcctacgctgtgaaaatgatggggctctgcagtggagcaaatccccatgacagagaaaatcacacctggaatatcaaagtgctttggtcccaggttcagtgaccagagaagaggaagaggggcatctagctcatttaaaaacctggaggtttgccctgcttcccagacagggcagtaagaaacaactataacgtttttcccattagggaaaaacatcacaaaaccaaacccatagaagggcttttaacacagcttcctgatgcttagctgggcaatgtctcttccttctgtggggggacaagggagttaatgggactggcaacagcctcaacatga

SEQ ID NO: 270425 - DNA, 617 bp, Homo Sapiens
ggcacgagggctaccctagctgatggatgtgaggctgctgtctacaggagctcatcccagccctgttaactggcagtggcaaggatactcgtcatcggccattgcactggggaactccctcaccccatggcttcccaacttgaaacccagatttacctccagggagaggtgagaaaaaaattgtaaatagacttgctaaagagcaactcagggttggggtgtgttttaattctcctgatcacttgaaataatctgtaggctgagtgcttatgggggtgggggagaagggtgactccagggtccttccattttgtgaagctctgggggtggagtgtgggcatctgaggccctatgatggcactacattgagctgtctgcccttccggaaacccaacctgcaatcaactgcaaatcaaattcttcacattccagctacagtctttctttccccattgaatctcagtccctggccatgtggtcaaggtggctttctgttaagctaccctaatttcgggaatgggaggggagagaggagggccattacaactctgccttcaagactcatctcttaaaaacaaaacgaaacaaaactacaaccaccatcaaaaccacacggc

SEQ ID NO: 270426 - DNA, 503 bp, Homo Sapiens
  misc_feature (396)..(396): n is a, c, g, or t
  misc_feature (412)..(412): n is a, c, g, or t
  misc_feature (421)..(421): n is a, c, g, or t
  misc_feature (451)..(451): n is a, c, g, or t
  misc_feature (462)..(462): n is a, c, g, or t
  misc_feature (467)..(467): n is a, c, g, or t
  misc_feature (480)..(480): n is a, c, g, or t
  misc_feature (493)..(493): n is a, c, g, or t
tttcggcacagcaccaacagagagcgtttctatctcttctctactcctcccttttaaaattgagattctgacagtgtaaaggagttaggacccccttttgggattccggcatggttttgtggctttaaaatgctttaaaattgctgaagtttcttggtattggaactgtttctcctaagtaacattttatcatcgcacgtgaaatactgtaactctcggtgccaaatccagggaaaaatggggcggttaggagaagtccaggggaaagccgactgagcaggttgtgaaggtaaggcagtcctgttaaaatgtacacaaaaatgtccactttgcttctctaaactaggggaaaactggatagggactttttggattaagggtaggggttattaaggntttaaaaattattaantagggtccntcccccttcccaaaaaagcccttttgttanggttttaaccnggtgnagttgaccgttcncgttattaatttnttttgggaat

SEQ ID NO: 270427 - DNA, 451 bp, Homo Sapiens
  misc_feature (440)..(440): n is a, c, g, or t
aaattgaacatcaaccgaaatgtggtaacagcccacactcctgaaggtgaaggtccagccattgggcacaggcccaggacagctaggtgggccagtggtgctgggcacacagaccctattgctcgtacccaggagcaggtccccagatgaacatggctgagcattctcttgcaatggcatgccctggggaaaaagaggagcagaaataagacaccactgccatgccaagcatggttgtgcttggcattcaggagagctgaacacatgttcttagagtagtgttcactttggtgcaaggggatgctgtgcaagggatacaactccagtagtcagcttttaagacataacacatgtgaaggagttcttaagtggtctctttgccttccctgagtaagtaaagttgttctccctatgtaagtttttggttgcatgtccgtcanctcgtgccgaa

SEQ ID NO: 270428 - DNA, 371 bp, Homo Sapiens
  misc_feature (100)..(100): n is a, c, g, or t
  misc_feature (198)..(198): n is a, c, g, or t
  misc_feature (300)..(300): n is a, c, g, or t
  misc_feature (331)..(331): n is a, c, g, or t
  misc_feature (346)..(346): n is a, c, g, or t
gggtgacagagtgagattctgtttaaataaataaataaatataatgaaactgtcagataaggaagcaaatccagagcaatctgaagtgttgtgacacggngtggtttcttaggctcctcacaagtaacttgggcagcagaaaaagataacagtaccccaaacacaactaaagaagcagtggtaagcagcccataaatnctaaaaagcacagaatatgtttactgggataggattgacaaagatttcatctaggaacagtaactccaacttacgggataatgggctgtttggaaatggccntgtttcggaaaacttttttgagggtgatccngggcctagcttaccnagggtagtgatcaaattaacgggtt

SEQ ID NO: 270429 - DNA, 309 bp, Homo Sapiens
  misc_feature (26)..(26): n is a, c, g, or t
  misc_feature (145)..(145): n is a, c, g, or t
acctccaactgtggagggtgcgtccnaaagctccagttaagtgagagggtagggcaggagctgggatgaaccacccttcctcagccaggaaatgcaacactggggtcccaggaaaggggtgctccccgggtacccacaccctcanatcccctgggcagggctgctccttggctggagggtgggaaggggagacaaaaatcacagcttttgaacagtggttgggaagttattgggaactttggtcaagtatgaaagatatcactttacagaacagaaactagcttatgtatttttctggaagacattctc

SEQ ID NO: 270430 - DNA, 510 bp, Homo Sapiens
gcataagtgtaagaagtactttaatagctcaaactcagagtcatcgtgctcccaattccaaagagattcctaaaagaggcaacttcggccgtttgagaagccagcgctcacccacccggggtctctgtgcattgacctttgggtgctgacttggagaaaagcacaaacacgaccagtcccatcctggctcccgtggggcttcttctatctacgcattgtatcgactgcattagttggactaagatgatgactcagttaaaggaggagacaaatgctgactgtctaagcaagaatggcccaagctggcaagaaaaagcacactgcatacatagggatacagaagggcagagcttctgcctgcggatctgcaacattacatttgttttgcctgcaaactatcaagaaggattcattggccagggagtctccactgaacaaacaaaatggcagtcaaaagtcttgagtgtcctattccagcagcccagagtcctcatccgtcatccacgggag

SEQ ID NO: 270431 - DNA, 180 bp, Homo Sapiens
aggccctcagccataggaagtcccaccaagggacaggatggatgggggacaggcagccacgccaccctggcaatgctatgggacaaaataaagatttgatggcctttgatgttgcctctggtaaatattggccagaagggggagaatgtaaaccaaaaataaaattctaaagccctccga

SEQ ID NO: 270432 - DNA, 296 bp, Homo Sapiens
  misc_feature (52)..(52): n is a, c, g, or t
taagcccaaacacttgaaagtttcccttttatggtcctggtggtttttaccntattgagagaaagatgaaataaagaaataaaacatttatagatgtgaactttatgtgtgatttatgatcctagattattatagtagtatttcttttttcataaaatatttattttatttatgaaattgaaataatgtctatcttcttcatagcaccgtggagcagagaagagaggttggagtggtggggaatattactttaggaacactgattgtaagaggcattaaatatgggcaaaagtttg

SEQ ID NO: 270433 - DNA, 445 bp, Homo Sapiens
  misc_feature (40)..(40): n is a, c, g, or t
agtataggtagatttaagagagaccagaagctggaacagnagttgtggagcaaattaagcagaaatgacatcagggatggggcagcttgagagaggacggactcaagttgtagtcactggctaaacagacatccaaatgcagcatttcggaaaagtcaaagcaaaagttgtgatcttgagattagcacctgcctatattacattcattttgatggtttgtatctcaaaggagtacagtgaacgaaacttgtttaaagatacaccggaaagaaaaagagaagagggcagagtgggcttgttgcccagttttgttctcaaggctccttgggaaggatggaaaacttttgttcttgggaagatctaaatccttttattagattctccaaggaatctgtggccccttccagcccagttaagagttgtccaatagaaggaaaagatttct

SEQ ID NO: 270434 - DNA, 423 bp, Homo Sapiens
  misc_feature (77)..(267): n is a, c, g, or t
ttttaactgtccacacccccaacccgcaaaattaaaagcccacaggtgccatgttcaaggtgccttagttaaagagnnnnnnnnnnnnnnnnnnnnnnnnnnnnnnnnnnnnnnnnnnnnnnnnnnnnnnnnnnnnnnnnnnnnnnnnnnnnnnnnnnnnnnnnnnnnnnnnnnnnnnnnnnnnnnnnnnnnnnnnnnnnnnnnnnnnnnnnnnnnnnnnnnnnnnnnnnnnnnnnnnnnnnnnnnnnnnnnnnnnnnnnnnnnnnnatgaagaaccgttaactttttcctccctcagtaaagatgttactgaagaaaatattttgaagattaagtgcattagaatagttgagtatgtcaacgttacccacaatcaaatgctctttgttactaagtaggactgaatagaaatttctgtaagat

SEQ ID NO: 270435 - DNA, 400 bp, Homo Sapiens
  misc_feature (187)..(198): n is a, c, g, or t
  misc_feature (384)..(384): n is a, c, g, or t
tgagtcacctcgggtcccctttaatggattcctcccctctgaaaacaattaaaatgcctagataaaatagccttgcccttgacctaaaaatttcaaatagcctacacccagtatattcttcccccacatttcctagactggaaggaaaactgcccagtgtgaacttggagcctaagtagaaatgggnnnnnnnnnnnnctactttgaaaatcttctcatgtaggtcgtgacctgaattcatatacctacatggtcaaaaaattctcaagccaagaatttaactaatattggtcccaagctagtaatatctccaggcacctgacaaaaacaaatgcaaattctttcaatccaggcttcaattaccacagataaatttattctagnaaatacaaacacaata

SEQ ID NO: 270436 - DNA, 358 bp, Homo Sapiens
  misc_feature (153)..(153): n is a, c, g, or t
  misc_feature (334)..(334): n is a, c, g, or t
  misc_feature (346)..(346): n is a, c, g, or t
tgagcctcagggatagtttgtcaatggctgagctaatcacaaaggtgcctgggcaggaatactggcaccagcaaatttgcattacttgttctgagcaattgagctttgtttgaagaatgggaggggataaagaagataactgatcattttccncaggtgactgacctgggtgattaggagcagccttcttggatgcagttaggcaaagtctgaatgtcttcccttctccccccaccgctctctcctgccaccccaggaagcaacatataaaaatgttgtagctccaggcatgaaagtaagcttctgtctacacaaatgcaggtccaaagagaanggacttgaccangttttccaggga

SEQ ID NO: 270437 - DNA, 376 bp, Homo Sapiens
  misc_feature (47)..(47): n is a, c, g, or t
ctccatcttaacagataaaagagacttaacagataaagttccagaanagaatggtacagtaaccagccatgcaagtggtcaaagccaggattgcaacccagattctgagaccaaattctggcttgggactgaattatttacattcatatgcacacagaaggcccttgaataacactgtttaattcaactttgttttgttataacactgatgagaagaaaaattggttcctggtcagggtcaccatccatgtggagtccgcaagttcttcccatgtctgcatgggttttctcaggtactctggtttcttattcagttcccagagatatgtcccttaggttccttggcatgtctccacggtcccagtctgaatgagac

SEQ ID NO: 270438 - DNA, 458 bp, Homo Sapiens
  misc_feature (17)..(17): n is a, c, g, or t
  misc_feature (110)..(110): n is a, c, g, or t
  misc_feature (145)..(145): n is a, c, g, or t
cacctattccatagtcnattaacccggaatgctaatctagtcaacctctacctccctcttccaaccctactatcatggattggtcctaagatagaacttaaatttattgnaatagcaaaatataaaaatgtttggaataagatgnaaggagttgcctcattttggtaacagtctgcgttttacaatgattttgattataaaaagcttaaggaaattaaattatcattaaaaaaattctcagtaaatcattcattttcttagagtaattcaaggtaataagatggagacactggctaagtgatggaaacattgtaggatgtgaagtttctaaagtgcaagtgtttaggcagtgttttaccatggaagtatgatttaataatatgtatgtttccatcttcagaaaagaaaatttatgtctttaaaaaaactatcccctataaagatatatgttataaaaa

SEQ ID NO: 270439 - DNA, 423 bp, Homo Sapiens
  misc_feature (294)..(294): n is a, c, g, or t
  misc_feature (332)..(332): n is a, c, g, or t
  misc_feature (348)..(348): n is a, c, g, or t
  misc_feature (386)..(386): n is a, c, g, or t
tgggatgtgatccaatgcatggtgcttaagagcgatggccagtggtagcctaatacccagtggcatggctgttttatacttccttttgtttgcaggtgtgctctatagtgggggtgggagagatgcctccatcaccagatctgctcctgggccctgggggagtctcctgcaatcactgtgtttcttgtgttaggtgtactaggccacaggtctctctcaggcagaggccctttcctaggagccattctggggaactagctgtagtgtatgggttccctgcacaggcttcctccntcttcaactcagcttcattgctgcctctccatccactncaggcattttcttctntcaagatgctgcctaaattacgggtgggtttactccanaatttggtgtcttttcagtgggggttggtgcttcccg

SEQ ID NO: 270440 - DNA, 374 bp, Homo Sapiens
  misc_feature (212)..(212): n is a, c, g, or t
  misc_feature (300)..(300): n is a, c, g, or t
  misc_feature (338)..(338): n is a, c, g, or t
  misc_feature (353)..(353): n is a, c, g, or t
taaataatttaactgatttaaaatgaacatattcgctaaacaaaagaccttattggagtttcaccactttttccactaatgtcctttttctgttcccaaattccacccaggatcacggtgcatttagttatttcttagtctctcgccgttttgtaggactgcaataacagttcctcaatctttccttatctttcataaccgtgacatcttgnaaccagtactgatcagtatttatggaaatgttcctcgatttggggattgtctggatgtatttccatggattggggactggaaggttanggaacttttggggccaatttacaggcacaaaaaatggngtgggggattccttnccccggtgggcatttcccttc

SEQ ID NO: 270441 - DNA, 395 bp, Homo Sapiens
  misc_feature (33)..(33): n is a, c, g, or t
  misc_feature (79)..(79): n is a, c, g, or t
  misc_feature (181)..(181): n is a, c, g, or t
  misc_feature (185)..(185): n is a, c, g, or t
gcccgcaggtggaagggtgaataaaaatatgtncctcctgaacaggacccccagcccagcccacataggtggaggtttnccccatgtcccaaatgaaggtccaagatgcccgaaatccccagatctgaccttcacacttccccttttcctagaaccttttgtaaaagttggtggcagcagnaggnagccccaggccgggctgcatctctctgtgtctgttgtgccttgcccggcgcctcacggatggcaaagctctcctcacccatgggactgtagtgcaattaaacccgcgtctaggtgatgcttttaaagttgtagcttcgtgctttgtacagttttctttctggttttaatttttagttgtgctttgagtcagtgcaataaactagactttt

SEQ ID NO: 270442 - DNA, 366 bp, Homo Sapiens
tgcccatattacatataaaatcttcatccctttaaggtttagcatttagttctctttattatagtggatctttattgttcatttatgtatgaaacctgtgctagggattatagaagatacaaatttgaataaaatatttgatctaggagctcttatccaaaatgccataaccatgtgccttaattataaaatgaaagaaggcctataaaatgatacatagtaaaaattttaacagcctatgagagtttaaaggaaaaggatacaaattatgactgcattgaaaaatagcactttgaagctgagcatggtgatgcatgcctttagtcccagctactcaggaggctgagatgggaggactacttgagc

SEQ ID NO: 270443 - DNA, 522 bp, Homo Sapiens
  misc_feature (27)..(27): n is a, c, g, or t
  misc_feature (33)..(33): n is a, c, g, or t
  misc_feature (85)..(85): n is a, c, g, or t
ccccaaaaagtggaaaaacaagcccangtctgncccccaactgaagacccctaactcccctgtccccttaagcctgaattgggtncccaagataataagtccatcctgaacccccaggctgaagcccaatcaagagtccctttcccccgggaataatggcggcccctaacccttgaatcctgataatttcctcctaaggaaaggcagcccatattcctgccctgaactgaattattggcccaagaacggaatgaagatcacgggagagaggagcaaagcatcccggcagagtccctgaggccaccttcatctctatttgatgccttggtgcctgcacataaattccccatcaatttttgtataatctgggtcacatgtgtgttatatctgggacaactcagaggcctaaaaatacagagatcgttatttattatccccaatttacagatgcacatcctgagtgaggctcaagggtggaagtgcccatgagtcaggatttgaagtcagatttgtctgacccca

SEQ ID NO: 270444 - DNA, 437 bp, Homo Sapiens
  misc_feature (13)..(13): n is a, c, g, or t
  misc_feature (26)..(26): n is a, c, g, or t
aatcttggaatgnccctaatcccaanaaaccccagaatccctcaacccgtccatcccacgggagaatcctttgaagggaaaacatgaaatcccagctcaaggcctctgccctaagggtcaaatttccttcgggaatcactgtgatcatgatatcttcattaaccctgcggaccaccatgttccagggtgctttcccttttaatgacgtcgctgacatcattggcggagaccacggactgtccattgatgctgattatgacgtcgttttccttgagaccaccagcttctgctggggtatcaggaattacttcaattatatacgctcctgagatcacgtctgggaagtcccggtgccggtccttcagctctttggctttgctggacgtgagtgacatcattcggataccaatatacttcttcttggtgatggcttttcc

SEQ ID NO: 270445 - DNA, 276 bp, Homo Sapiens
  misc_feature (246)..(246): n is a, c, g, or t
tctccctcatttggcatcccactgggccccagtgtcgtttttcactgcaaatgccctgctgctaaaactatacaagcaccctccctctagacccagggttgtggaagagttgggtacatgagattgtaagagccagttttgagggctcaagttaggtcaaggtcaaacccttcaaatcaaggaggagtatataaagatgcctcaacagctgggtaaaacaaaggaacttttgccttctaaatgganttatggtgttcaactgtttgcattccaccc

SEQ ID NO: 270446 - DNA, 386 bp, Homo Sapiens
  misc_feature (225)..(322): n is a, c, g, or t
ggaaaagccgactgagcaggttgtgaaggtaagcagtccctgttaaaatgtacacaaaaaatgtcactttgcttctcctaaacctaggaaaactgatagggacttttgaaataaggtagggattataagatttaaaaatataaataggtccatccccctcccaaaaaaaccgtttgtatgtttaactggtgaagtgacagatctgtaataattatttagaaatannnnnnnnnnnnnnnnnnnnnnnnnnnnnnnnnnnnnnnnnnnnnnnnnnnnnnnnnnnnnnnnnnnnnnnnnnnnnnnnnnnnnnnnnnnnnnnnnnctggatgtggtggcatgagcttgtgatcccagccactcgggatggtgaggcgggataatccctt

SEQ ID NO: 270447 - DNA, 340 bp, Homo Sapiens
  misc_feature (37)..(37): n is a, c, g, or t
gccaatatccggttacctggggaaccattccccaggngtttaaacctcttccacttcttagatgccatttaaattcttaatgccaaatgacgtagccaatttgaaaacttccccgtattacttgtgtttaaaatgtcttgctttaaatacaaaacaaatggtaaaggggattatcttttgtttagatggttaaatattatttttgccttagatagctttgtaataatttttctccagacagttcaacacttttgaaaaatgacatgaattttcattaaaaacccttttcctatgtttattgtatacaagaattatgcaataaaatttctttataaaaatt

SEQ ID NO: 270448 - DNA, 501 bp, Homo Sapiens
  misc_feature (41)..(41): n is a, c, g, or t
aacaacaatagttattaattaattaaaattaacacaatatncccagttaacacttttcaaaggactttaacatgtacccaaacattttaatttcccatgatagccagtcctcaggtagatgtgattatccttatgtacaaataatgcacatagtgtctgtgtgctggacaacgcacaggggtagtggacctttggcccagtgtctcacagggaggagggcgggggatggtggggacaactggtagagtgggtggcatgaccaaaggctttctcacgtgttacattagcagggttattcccacagatgcccacggagtaaagacagaatggtactggtagtcctttatgtattcattaaactaacccacacaataaaaacatctacaccaaaaaaaagatcattcagaaaaagtgatttttccactcttcaaatttgcctctagaatgacttctgatattctgtaagcagaagagtgatcagtgggctaggtgccaagtgca

SEQ ID NO: 270449 - DNA, 370 bp, Homo Sapiens
  misc_feature (147)..(147): n is a, c, g, or t
  misc_feature (217)..(217): n is a, c, g, or t
  misc_feature (350)..(350): n is a, c, g, or t
cagtgaagggtgttctagcagctcagttaacactttactctccagtcaacacttgggacatataaaaatgccattgtaactactgtagagtcctgtgactcatcgtttgtgtttgtcaatgtgcagttcagcttagcccttccctgntcctgtgtagttacaatctggccctgaagacatccgaggcacttcagtaagtgggatcgtttctagagancctgggtgactttgggtgcacagggtgaccgagcatttctgcccctgtgaatgtggcactaacactgtgcactgtctccaccaagcaaggtttccactgagtttcttctcatgttacctgggtttgtaaatgnataaacacattttaactacg

SEQ ID NO: 270450 - DNA, 384 bp, Homo Sapiens
  misc_feature (340)..(340): n is a, c, g, or t
aaataaactctcagccagtagaagatgatctagtcatattttcattaaccaattaatatacaaccttccagatctacatacatacaatataaaaccttttaggtatgtttctatttaaaaacaccttatttaatataaataactgattcattaacactgaactatagttaacagcattataactcatgcctgaacaaaacttccctacacattccttgtaagggtaatcaaaggccttcttgtgtttaaaaacacggggcaggcacttcaataggtttgggggggccatttttaaggcatccaaaatcaccaacagggccgggggcgcaggtggggcttnaaccaacctggttagggcagggtctcgggaaaaaattaaaaaat

SEQ ID NO: 270451 - DNA, 698 bp, Homo Sapiens
  misc_feature (15)..(15): n is a, c, g, or t
  misc_feature (40)..(40): n is a, c, g, or t
  misc_feature (90)..(90): n is a, c, g, or t
  misc_feature (462)..(462): n is a, c, g, or t
  misc_feature (505)..(505): n is a, c, g, or t
  misc_feature (526)..(526): n is a, c, g, or t
  misc_feature (533)..(533): n is a, c, g, or t
  misc_feature (589)..(590): n is a, c, g, or t
  misc_feature (646)..(646): n is a, c, g, or t
aaaatattcagagantgaaaaaataaacagagagactaanaagagaaagtgttggggggaagagcatagacatagaaagagaggaagtcnccaagatcttacaacacaggtttagacaaaggtcacagagtccacagctgaccaactacctggggagaggggaagcactggctcctttaaatcaacgacactgtgtggccacacaatggaggactccagtaatggaaactataggcctgaataatttagaacagtattttacaattatatacaccatgtccttccctagccatatgctgtattgtttttattattatacaaaatccaaaaccccatccttttaagttatagtgttttgttggttccctcttaaactctggctcatgtcccaaatgtataagaagttgtggtggttggttggttgtatttttaaaaagtcaagtgtgtaaaaatggcagtganctccccagtgactgttttgtccaaaactcccctatgaaaaatntaaaacaattaaaaagaatancaggttnaaaatcaacatggcaatcagcggcctgcaactggccctgcgactttggtgctcagnnggtgaaaagaaatgtccagagaacagacactgaagcctctgaaagttgtgttggtntgtcagtcagcattccccattcacagtttttttctccttccatttttgagaa

SEQ ID NO: 270452 - DNA, 568 bp, Homo Sapiens
  misc_feature (422)..(422): n is a, c, g, or t
  misc_feature (424)..(424): n is a, c, g, or t
gggggatcatcaggaagcccagaacactaacaagcggttctcccatctaccgtcagtccacatggcaggtctgctgtgtccacaccacagatgaccacatctaatcctgcttctactctcagctttaggacaaaagctctgtcagaggcacaagctgaaggtcaaaaaggatttaaaacattttaccctcagactaatttcctttaaaggattcaggttcaaaacttaaccactgccttatttcagtgcactgtttcaactaacacccatgctatttttgtagtcagaaacagctatgcaaaccctacctaatttacagtctgaaccagcatgctggcttggtctactggcatcctcggggacagtcacctcgccactgagtggccactgtccttcctaaatgtcaagaagtgaagtatgtncnacctttcagggaaattcaggcaattactgaaataggagggtggcaagaacagttctatcctggtgccttactaataaaaaactggattctggtttacagcagctttacagtgatagttaaattaactggggctaggggaagagc

SEQ ID NO: 270453 - DNA, 822 bp, Homo Sapiens
tttaaaaagacagtaaaaagagtgaagagaatgaaatagaacagtttactcaagctatctttatgtccaggaagaaaaaagattacatgctgctcgcagtaagtacgagctttccctgcaactctggctgcaggcgcgcaaccgtttcaccactggagttcctaccacagcaggggattgagaaatgtctccaaacactgaaaagctccatgtcaggactggatgtgtggttgataacctttgttcagtaaaacaaatcatagtaggttttgagaaggaaaaaaagaatgctcacaactgaatcggtagagtgaaggtttatcagacaaagggacatgaggcaaacaaattttaattacagaaaccaccactgcaatgtcatgtagaaaggagaaacaagggactagcttcctggatggaccaaaaatacagtttatagactgtttcaatcctaaaactaagacaatttctagatttacctcagacatgagtagacgtctggaaaatggatggaattcaagttacagaataccatattttcatgagtgcttatgtaagaacagcaaatgataacatgtaaccgtaatttacacgaatacttggcattctggagctactttagttacttttgaatgatcaaagccctgcccaactaaaccacttgtgatttgtcagttattccattgcaaatgcaggctatctggagcagtctttaaatttgagatcacattgtttaaaaaatatatatttttatatcgtccagtactctttagacagatgagagagtcaagttcccacatggattggaacatacttcatgta

SEQ ID NO: 270454 - DNA, 415 bp, Homo Sapiens
  misc_feature (26)..(26): n is a, c, g, or t
  misc_feature (37)..(37): n is a, c, g, or t
cagggtaaagcccagattctcctccnggaagggaaantttctatgaatgggatgatttcccaggctcagggtgggctgtgtgttagttctgagcaaatccctcacccaagacccttccctcccaagccctcaaagaaatgagcaaagcccttccctgcaagaccccttgtggatgtttttgcatctacctgatttttagccccacccagggagactttataccccatgatcctgccccaccgttgctgttgtctgccagctgggtctagcatcacagggaagggggggatttatactcatggaaagactactgatctaccggaaaccaacctgtttactgtactgttgtaaatatcatgccctttatatcctgtatattggcttcttttaaataaagtgaaatgtcttagaactg

SEQ ID NO: 270455 - DNA, 482 bp, Homo Sapiens
  misc_feature (11)..(11): n is a, c, g, or t
  misc_feature (33)..(33): n is a, c, g, or t
  misc_feature (54)..(54): n is a, c, g, or t
  misc_feature (74)..(74): n is a, c, g, or t
  misc_feature (83)..(83): n is a, c, g, or t
  misc_feature (99)..(99): n is a, c, g, or t
aagtttaaaanggtaaccggaattttaactgtngcttattaaagcaactttctngtaaacatttatccattaanatttaaaangatcaaattccattcnaactaggaattagagtttaagactctaaacccggatttttgcccatggattccttctggcccaagaaattaaagcacatgtgatcaatataacaatataatcctaaacccttgacagttggagaagcccaatgcagaactgatgggaaaggaccaattatttatagtttcccaacaaaagttctaagattttttacctctgcatcagtgcatttctatttatatcaaaaggtgctaaaatgattcaatttgcattttctgatcctgtagtgcctctatagaagtacccacagaaagtaaagtatcacatttataaataccaaagatgtaacaattttaaaattttctagattactccaataaagtgttttaagttttcctatg

SEQ ID NO: 270456 - DNA, 241 bp, Homo Sapiens
  misc_feature (241)..(241): n is a, c, g, or t
atagaaaaggctattagaggggaaatttgtgaaattaaaaagaagatatgtcatttagttaacagaattctaaccatgttaattccttggttttgatcattgtactatcctcatctaagttgataatataaaggactctgggtgaagggtatgcctcagttttttgtactattgcagcttctctttaaacctaaaattatttcaaaatagaaagtaggccgggcacagtgggtcatgacan

SEQ ID NO: 270457 - DNA, 268 bp, Homo Sapiens
gttttttaaggatcaagatgagaatataagtatttccataaagaagtaaaagaaataatgttactatttattcaacaagcccaactttttgaatagctgctgaatttaaggattttttcagatggaaaataaacaatttaaagtttgatatctttttctatataaatgacatttgtattcatttggagaacctgtttaaatatgtgcttacttcactagttaagttactgattcatgcttatttaatctgtaaaacacataattctaa

SEQ ID NO: 270458 - DNA, 663 bp, Homo Sapiens
  misc_feature (15)..(15): n is a, c, g, or t
  misc_feature (62)..(62): n is a, c, g, or t
  misc_feature (158)..(158): n is a, c, g, or t
ctgaccaggctgtanggggaggagacactggcaggagatgtgctgtcctgcaccagcgccanccagctccctgggcagatgtgccctgtgtcctgggtctgacattgcctcaggagggggaagctcatccctccctccaagcccccgatgcggactangggctggagctctgcccaggtgccctggggccagcaaggcagtcccaggcctgccgtctccagcacggccccaaggtggacactagaccactgctgctgcaggcgccatgctgcttcagcagtgacgattgagccatttgtgagagagaatccggaagcgttaggtattacagcagactgacctaagacctatgtaaaaggaaagctgttccaacacacggactatttttgtactagaatttgctaacttgtaatattgaatttcctttggccgataatcaggatttccctataagtcacttggacattggtcacttgtaggaaatttaaactctaattatgacagctacactgaaaaataattgtactgaaattaacttgtctatcttcatttggttttaatttttaaatgtttgtaaaaagagactgttttgggggaatggggcaaaggggtgggcgatttcttttgtaagtgtaaaataaatgaacacgcattgaataccga

SEQ ID NO: 270459 - DNA, 411 bp, Homo Sapiens
  misc_feature (23)..(23): n is a, c, g, or t
  misc_feature (333)..(333): n is a, c, g, or t
ggaaaaaaaagctcatcagctangttaatgtattttacgtgtggcccaagacagttctagtgtggcccagggaagccaaaagatcggaccacacctgcaaacggttcttagatgaaaataaaatgtttggccctttatgactttaattgttcttggctgtcttataaattagttcctttattgaagtcactagaataagatacttaacggtttcctttttaagatgggaggtgggatgggaatgaggtgttagtataaactttgccaagtttgtagcctgcaaccttgttcaatgaaccccactgccctaaagatctggggggatggccagtntaggggggctggggactgaggtccattctgggaaaggctagactttgagagtgcaaaaaggatgaaccagggcgcagg

SEQ ID NO: 270460 - DNA, 440 bp, Homo Sapiens
  misc_feature (67)..(67): n is a, c, g, or t
  misc_feature (125)..(125): n is a, c, g, or t
  misc_feature (228)..(228): n is a, c, g, or t
aaaaacccctggctctgcttttgtgcttgtggccttaagccggaaggggaacgtggcccaaagggtnaaggtggccaaaaaccagaaccagaagtctcctgccttggttcccctcccctgccctnaggccctccttcccagggatgtctctccagctctactttatgtcctgaagctgacccgaggtcttcctatctggaatgactagagggagccaagaggaatggngggtggcccaaggcccccagggcctatcgtgggagagcctgggcaggatcccatcagaaaggtgctgactaaactggttgcccggacactcaacagcctccacctccctttctaccctcacagctcctggggccttcctggctctggcccagaaagtgattcatttgtaaattatcatggttttctttctgcattaaaatgctcatttccgg

SEQ ID NO: 270461 - DNA, 400 bp, Homo Sapiens
  misc_feature (29)..(29): n is a, c, g, or t
  misc_feature (39)..(39): n is a, c, g, or t
acccagtctcattctgggaaaagaaacgntgtgtcccgngaactcagcagctccatctaattttttccagtcgaaagaaactgagctttaaggcaggttttacttggcccagaaagcagtgctgaatacttgaaactgtgtgctctgttcctacttaatgttctgtcagaatgttcttttgtaggcagtatgtcatgatgtaatcatctatctccttgtctgtttccaagttacactgtgaagctgcgacccttttgaggtggtcatcaaagacacagattccttgtttaaccaagtgtcccaaagcatgtacctgaagttatatcattttttattctaaaaagctatgcagcttatattctgaaaactattaaaacatataccactgttgtttttgtaa

SEQ ID NO: 270462 - DNA, 832 bp, Homo Sapiens
  misc_feature (743)..(743): n is a, c, g, or t
actacagctgtgcctctccaacaactttgcccggtcattccaccccatgctcagatacacgaatggccctcctccactctgaactaagcagatgccatctgcagaagtgctggtagcataaggaggatcgggtcataagcaatcccaaactaccaacaagaggaccttgatcttggcgaaacctccggtgtggcagctttagcctcctccagatcacatgtgtgcaaattatggcttcagaggtggaagataaacagtgacgggggaacaaacagacaacaagaaggtttggaagaaatctggtttgagactctgaaccttagcactaaggagattgagtaaggacctccaaagttccccggactcatgaattctgggcccttggcatatcctgtgcacagccaaggacttcagtagaccatctgggcagctttcccatggtgctgctccaaccatcagataaatgaccctcccaagcaccatgtcagtgtcgtacaatctaccaaccaaccagtgctgaagagattttagaaccttgtaacatacaatttttaagagcttatatggcagcttcctttttaccttgttttcctttggggcatgatgttttaacctttgctttagaagcacaagctgtaaatctaaaaggcacttttttttagaggtataaagaaaaactagatgtaataaataagatcatggaaggctttatgtgaaaaaagttgaatgttatagtaaaaaanaaagatatttatgtatgtacagtttgctaaagccaagttttgtttgtattgatttctttgcatttattatagatattataaaatattaa

SEQ ID NO: 270463 - DNA, 527 bp, Homo Sapiens
  misc_feature (168)..(168): n is a, c, g, or t
  misc_feature (276)..(276): n is a, c, g, or t
  misc_feature (281)..(281): n is a, c, g, or t
cagatttaactgattttgttaaacccaatttgtaagttactgcttctaatattacacttctaaaaagctgaatttatactcatgtcctaaaggagaatatgtggtaataaagtatatttgttaagtaactaattgaaataggcttggttttaagagttccagtatatnataatcacaaattgaaacctgacagtatcttgggagttccagtaatgtcacaaattagtgaataagcatgcccagtgtgccaagggtaatgtaaggattgttagcccnatccnaaatattcaaaattactttaaaacttaagtatgttttctgatttttaagaattcagaagtgttctgtaatggattcagatgtttcatttgtagtataatgaaatgtttacagaaagataactttttcattaaaatatttttagaaatgtgtgtgttgttttgtcacttcacaatgttcatgtgacttaaacactataggtgaatattttgacttattttaccagtaagtaataaaacaacaggaaa

SEQ ID NO: 270464 - DNA, 524 bp, Homo Sapiens
  misc_feature (333)..(362): n is a, c, g, or t
ctgtctgtctctgccttctttccattcaagttagaaaataatcttcctgtcagtctgcctccattccagggatgggcacataaatataactctcctggttggaaagctttcctctttctgagtaactgacatttcttgtcttggggctatcatgtgctaatacccacaataacatcaaaaacctttcctgttatcccactgcccttacctattgcttttgtacttttgctttactttagccacaccatgttaccatatgtgcctcttccaaggcatggaagctacatataacaccagcggcagtcagacgaggtaagcacatgagactcagcnnnnnnnnnnnnnnnnnnnnnnnnnnnnnnaagagagagagtgcatacataggtggtgtggatcgtctgtggcatgactttgacctcttgtccttgtaaacctgatctatgtctctcagataaacatttctgagattgaaatctgttctattacaagcagcaactaggaatgtgtaataatacaattggtta

SEQ ID NO: 270465 - DNA, 361 bp, Homo Sapiens
  misc_feature (301)..(301): n is a, c, g, or t
  misc_feature (335)..(335): n is a, c, g, or t
tccctttacactgtccaattgtgcttcttacttttttttcatgtatttacaaactctagttaggatccctgattacagcatagttccttgataatattaagatatgtaaggtatcttcattgttggcctcaggctatctttgctatgacttgcatttgtccaacgtcaaaacataggaaacaggtaataaagcttttggtggtatccagccactgtaatgaagacaggaatgtgatttgagctgggaggaataaatttccatcttacttcacttttatattcctttttattatcaggcagncattacccaaaggccatggggttttgttttcagnaaaagtaggaactttggaattcatgc

SEQ ID NO: 270466 - DNA, 462 bp, Homo Sapiens
  misc_feature (343)..(343): n is a, c, g, or t
  misc_feature (371)..(371): n is a, c, g, or t
  misc_feature (424)..(424): n is a, c, g, or t
acatagaaaaaaatgtatatttatatccctaaaaggcaatacagaatttataaccaaaccatgtgtgagaacttgttaaattacattccaaataccagcagtggaacaaacagaaacacagagatgttttaaaaaacatgcagcacgttacaaagaggccgtgtaataattcacaacttttgttaggcagccgttaagtttgattagtattaagcagcaatggtttaagcaattttaaatcatgatatgatagttacatatatgcattttactgttccaattatagtttagtaataggtcaggggtttgagccaacattttaaggcattataattttctcccnaaattatttactatgggggtaattgggnttcccacttaagggttttccatagggaaacctggatggggttattttttatgngggggaggattgtcctggggcggtatggtggtgtatgg

SEQ ID NO: 270467 - DNA, 400 bp, Homo Sapiens
  misc_feature (40)..(40): n is a, c, g, or t
  misc_feature (112)..(112): n is a, c, g, or t
  misc_feature (353)..(353): n is a, c, g, or t
accctgtcattgccgtcttcccaggctctgctcccttganccccaggcggagggcggaaggctgctggggtgcgcaggtttggaaaggccccttggattcctggctgggganaatgatgacctggaccctggccagaagagccctggccctccagcaaggcagcacctgctctgatgcacctgtgcacccctggccctcccagcaacctgggagcccgaagcttagcctggacgtgccaagccagtccctactcttgggctgcggccacgtgaggtccgcatcagcagccaggggcgagcactagtggacaaagccagcaaatgcggcgttcctgtgagcagataccctcaanccagccagctgtcaaaagtatttcaagataaaatccaggccaagcaa

SEQ ID NO: 270468 - DNA, 445 bp, Homo Sapiens
  misc_feature (16)..(16): n is a, c, g, or t
  misc_feature (36)..(36): n is a, c, g, or t
  misc_feature (41)..(41): n is a, c, g, or t
  misc_feature (111)..(111): n is a, c, g, or t
  misc_feature (121)..(121): n is a, c, g, or t
  misc_feature (129)..(129): n is a, c, g, or t
cccctgacccttaaanaaaataaggcctggggggtnaaccnatgggggaaaggagccccccagaatccaaaatatatggcctggaaagtcctgaaactccatagcccttanttttaccccntgggcccntaaccctttcctatgaccctacctagttttaaagaatcaaatgaaataatgtgccacattccaaatttaagtcatttttatcctagcacccgagtaaaacaaattaatgttactggtaactgaaaaatactcctttaagttgcaaagattaaaaacaaagtaatgaaagtctttatatagtgtattagttctacagtcttagcaaattatcccgcataactcaaccatttcttagtggctgagggtcattatgaggaacggtatgataatggtatgtcacgagcacctcagagaccaacaaacacagtaaaagcat

SEQ ID NO: 270469 - DNA, 293 bp, Homo Sapiens
ttagaaaatatgacatggatggaaacacttgataatgagctttaaaaaagtccagtaagattgagacagatagaatctgtaggcaatcttgttgggtatgtaaataagagtaaattgcacaaacacagttagggagcaaaatgctgagtggatatacagtgtgggaaatgaaatgagactatgctaggcagaatggatgaggaaaacacattctggcttctttgggcattatattaagcacagtcaccaccttctggtgaggagatttgcaagatttacatgcttatgattag

SEQ ID NO: 270470 - DNA, 472 bp, Homo Sapiens
  misc_feature (289)..(423): n is a, c, g, or t
tggaagaattcagaaaaaactgctaacaatgacttccccttttgagggtacctggagacagacagggattattcaccctgaaaaactacttgaatggttaccacgtgcataaaaatgtttttaatgttttaaaaacatctgtgaaataatggtcaccataactaagttttttagcaaaaaattagaaataaatatgtttttcctttgggaaggattggtataaatttcagcccatccatactctagaatcctcttcagatattaaaatatttgaaaaattaaatgtggnnnnnnnnnnnnnnnnnnnnnnnnnnnnnnnnnnnnnnnnnnnnnnnnnnnnnnnnnnnnnnnnnnnnnnnnnnnnnnnnnnnnnnnnnnnnnnnnnnnnnnnnnnnnnnnnnnnnnnnnnnnnnnnnnnnnnnntagcctgtagccctagctactcaggaggtgggaggatcacatgtgccca

SEQ ID NO: 270471 - DNA, 540 bp, Homo Sapiens
  misc_feature (53)..(53): n is a, c, g, or t
  misc_feature (427)..(442): n is a, c, g, or t
cccccaactggcgaatttccctttccatttgggccctgaaaataatttcaccnaccttcgatgaataattttcaaaatttcccaaaacacccatttattccttgagttatatgacgtggcttttcatttctattctccaaaccctgtggagtttttcagttcccgtgtctttgcctgctcttggtccagtccacctggaatccagtgtgttgaggtcaagcactctgtagagtccacttggacctggaggacaacactttgtgccaaacgtgcctccttgtttgtgggtaagtgaatctgacagaggttggcatgttcttgaaggtggtgagtggcttcagtggcatgatgaagaaggcatctggtatcgatatgaagacgtaactgttattcagagagatgagccatcaaggggctgccccttttnnnnnnnnnnnnnnnngagtgatctgggatcccaaggacgcttccttctggctgatttctagtgtaattcagtctagccagggctaccacctgcagcagtggttcttcaaattg

SEQ ID NO: 270472 - DNA, 351 bp, Homo Sapiens
  misc_feature (324)..(324): n is a, c, g, or t
tggaaggatattaaaaagctaatataatcatacgaaaataatcatagttatgcggggtggagtggaagcaggaaacgtttcactctattccttcaaatatattcaggtatattacacctttatatattttattatatgtatttgaacaatgagtatattaccccttcaaagttacataaatatgaatgcaggaaatctatatggacagatgcataacaattttccatatatagttaaacagaaaaagcaagtttgcaggaacagtgtgtacagtatcacttgtctaccacaaaatgtgtgtggtatatgtgtgtatgtgaggtntttatatacatacatatttatacattt

SEQ ID NO: 270473 - DNA, 474 bp, Homo Sapiens
tacttataaaccggtgcttttaactgagggctgtgtaaagctactatctgacatgtgaagtcaggataaatttatcgaatgtccgttttccacatgcaactgtgttacagaagtagtaaaattggaagaatcatgtttatggtgttaccactgatggaaacacacaaacaccaagctaataataaatatataacttaaaaagctaattatatgcactgaaatggtgggaattttagtgatgcagtaattgaggagtctggagttttgtatttggaccaagaattatgagatgaggatctttttctgagtgttctaaagggcttcttgagggggagtggtttaaagcacttcatgaatgatgtgaagaaggtaccttgggctgagacagcattctaggtacagatggcactctgttcaaccaactgtggatggaaaatattctgaaaaaaaatacaataaaaattttcaaaatac

SEQ ID NO: 270474 - DNA, 344 bp, Homo Sapiens
  misc_feature (116)..(116): n is a, c, g, or t
  misc_feature (210)..(220): n is a, c, g, or t
tttaggtttgagggaaaggaggtaagaattgacacaaataagtaatgtcatgtgcctaaaatgactgaagattcagtaaagaccaaatggaaaaaaatctcatttttttaattccnctcatatttgatgtttgtgaaagtctgtattggtgcaggcactttgggtgtttctgtggccgcaagaggctcctgatcttgccctcagatgagnnnnnnnnnnngaaaaaaggagcacaatggagagcaagaaaaataaagggaaatacagcctttgtgaatgggaaggaactgtggtttcagttgcagaggtgggcccaaatagttttggccttttttttgtcaggg

SEQ ID NO: 270475 - DNA, 454 bp, Homo Sapiens
  misc_feature (343)..(343): n is a, c, g, or t
  misc_feature (361)..(361): n is a, c, g, or t
  misc_feature (373)..(398): n is a, c, g, or t
  misc_feature (400)..(400): n is a, c, g, or t
  misc_feature (406)..(406): n is a, c, g, or t
  misc_feature (440)..(440): n is a, c, g, or t
atatcatcatagctcatgtacctagcactgtacctggcacagagtaaatactaactgtacttcctcataggtgggaatttatgaagtatattgtcctggaaaataatttaatgaagctggtgaaagagctaagttttgagatacaaaaggttccttcccagaggtccttgaaatcaaaccatgcttcctacgtatacgcccacatttgtgtggcagaatcattacataaaaccgagctctcctgctaattttgagaactgatctccttctatatccttcaataattttcacattctttttttctctattgtacatctacctaggatcaaaggaatcatagganagccagcgtgggctcagncatgggtgagtnnnnnnnnnnnnnnnnnnnnnnnnnntnagatcngtgagtttcggggccacatcacacagggcccggnaggccattttggga

SEQ ID NO: 270476 - DNA, 328 bp, Homo Sapiens
  misc_feature (311)..(311): n is a, c, g, or t
ttgaactgaagttacttgttaacccatttaagaaaattcttgcatccttgcaagattgtaggacctgtgctggttggtaaacttgatgcttgtctacagtaagacttactccctccaaggctcattttggttcactcagactctgtatttatgactctctctcatttgcccccacactgtaatcctgtagggtacatcattatcaaccacaatctcctactcactaccattttcctcccataattggcacctctatggaaggattaacaaaacctcattggcctaggtgggggatggactatcccggtggnttcctaaactttaataa

SEQ ID NO: 270477 - DNA, 423 bp, Homo Sapiens
ggagggccaggtcttacccagcccatccccaccccatttccctgggcccgccacccagcccatcactgcaccctttggtcctgtggatctcccacccctctcgtttccgcctcctgaaagtgccgcacccctctgctcagtgatgcccagggcacagctcgagaggtgcgagcccaggcactcaggggcgaagggctcactccggctgcttcctgcccctcccacctgggggtcccctttgcagtccagaaacctaggcccgagccttccctcaagacctgaggccatggcaagagaaggtcccacattgccctctggttctctgcgtccatctgtccgattctttaaatttctcggtcttagcagcaccaacttcctggccaataaatatcttttctgttatttccaaaacaaacttaaaaa

SEQ ID NO: 270478 - DNA, 397 bp, Homo Sapiens
  misc_feature (20)..(20): n is a, c, g, or t
  misc_feature (326)..(343): n is a, c, g, or t
atggttccccatttccctangcctaccagaccaggaatggggctcctaaatggttttccatagactggctgttaaaggcccaaaaattttggtaaatcaatgcctatattatgctcttgaactattaaaacagcccataattattgtccccaagatagaatatagtcctttttcaaaagatgattatacgtggctaggtgacagacattaatgactgactctggagagtaagtcatacctgcactctgtggacttgatggttctttttctagagcaaacagagcgtggcattttgttttgacttgttcttccttggggtcaaattnnnnnnnnnnnnnnnnnnaatttttgtttgggcgaccaagatctaataattaaaacccaggtggaccatgga

SEQ ID NO: 270479 - DNA, 400 bp, Homo Sapiens
  misc_feature (106)..(106): n is a, c, g, or t
ggaacccaagaagtcctatgccacaaatccaggagagcccctattatttataaacaagatggctcaacccacagccatgttataacaggacacagactattggatncacatggcttttttggtggtttgtactagtcataaaaccagagtttatgaaaaggttgcacacagacaacatcaaggatttgtcttttacaaagatatagaagattgcggaattggtttaaatctgattgttctaatttacagttgtcatgatccactcattgcgagaattttctcatcttcattctacagtttttacatcagaattacaagaggtttctgagagtcaaacaggatggtgccacaatctccttgcagaatgagatttgcctttggaaaatgtcaagtattattc

SEQ ID NO: 270480 - DNA, 388 bp, Homo Sapiens
ttttctttagtgtagtatgtgaaggcactggttcaacaggatggctccagaactgtgtttttctaatgtttggtaaggggctagtgagaattttaatgatatggtgaagaaaaatatatctgtataattaatttattatattggtgtatgggctgtgagttcaccttttagtggtcatttgtcatttcataacaactatgcattttggttcactgtgatgatgatctatatttagtgactgcaacatgtttataccactgattcaaattccatccatgatgaagttatacaaataatgcatatattgataacttttattgcaaaaatgtaaatttaaaacttgtataatgttcttgtgctttttaaaataaaatatatgtgtatattt

SEQ ID NO: 270481 - DNA, 424 bp, Homo Sapiens
  misc_feature (401)..(401): n is a, c, g, or t
aacgccacccaacaatatccagttctgtaaagacactggcttttttcccaacattcaccatggccgaactttagggttatcagaattaaggctgtgagtctgaactgctttggtacctttgaaatgtaggtaagcttaatggctccaacacgtgatgatccagaaggtaggttctgtggattatccatgtaccacacgaaactatcttctctggtatccagtatgaagtaccttcgaagaaatttcccactgttttcattttcttcaatgtctagaaaaccacaaatgcgattctgacgatccacataaggcatttctgagcttgaacattacactacaggagatgcagaacacagaggaacatgctaaactgcaccaaaggaattcaatcagcaagaggnagacgcgctctggcccggagcta

SEQ ID NO: 270482 - DNA, 524 bp, Homo Sapiens
ctgactaactgatataccagcacaagagcctaacaccagaaaccaaaagggccacccaaatgaggatgtaaaaacatccaccttttgccctggatggcaccccagctagaattctcaggcccagaaagctatctatctctctccattcacacgtgagctaaccagttcacggagggaagcgccaatgagctatcagatcaatatggtgaagtatggagattgatttcatcccggagtaagtgcattaacgagctcctctgtgtgacctttgcctagtggtacaaattagactccaccgcagaccacatacttaaatgggatccttcagtatttgctcgcttttaataaagcacactacagacagacctcaaagatgactacaaaaacttatagtgcgtctttttatacagggaaggaggtcttgtagagttactatattatgtctgaaattatatagcattaaatagacaagatagcataaatgcaaactttcaaagtaaagcatattcttttaagaagcgggc

SEQ ID NO: 270483 - DNA, 267 bp, Homo Sapiens
ttttttataaacacctaccctaggctaaccttccaaataagcaaaagtttcagaattgatagttgattgattgattgttttatggcttatgagatgacaactgtttactggatgtgagatgtaatattttgggaggaaaatagtggaaattgagtgactgcgggactcggctaagatgggtagatggggcatgaggagaactggtcctgtgtctgtcaagggatcaatgagtaaggaaaaatgggcttcaaggacaaaaagccagga

SEQ ID NO: 270484 - DNA, 381 bp, Homo Sapiens
  misc_feature (17)..(17): n is a, c, g, or t
  misc_feature (289)..(313): n is a, c, g, or t
ataaaagccggaagccngctgtcagtccaccctggatacagcaagcaagagcctactagagaatagaacccaacacagagggaaaccacagcctgagtggggaaagagaggcggataacatcgtttgaatttctagatcccacaatgcctcaagtctatccctgtacctttacctttcagtgatattagccaataaattccacttattaagccagtttgagttatgcagattacagtccttctacagcatttcactgcccttaaaaccacacagaactaagctcacttnnnnnnnnnnnnnnnnnnnnnnnnnttgacttttttcactttcagtatattctttttactaactaaagtatttattacaaatttctttgggtt

SEQ ID NO: 270485 - DNA, 220 bp, Homo Sapiens
aaatataaagagatgattgggggaaagctattcatttactatttaaatatgaactgaaacttaaatgctcttcactttgaaaatcttagtattggttgttgacacatttgctcctgaatgttgtaagattttctggcattttaaatctggaacgtgattatatcttttctcctcctgcttcttagtgtttatgaacctcagttgcagcaccatgtggctc

SEQ ID NO: 270486 - DNA, 388 bp, Homo Sapiens
  misc_feature (11)..(11): n is a, c, g, or t
  misc_feature (24)..(24): n is a, c, g, or t
  misc_feature (41)..(41): n is a, c, g, or t
  misc_feature (49)..(49): n is a, c, g, or t
  misc_feature (83)..(83): n is a, c, g, or t
  misc_feature (106)..(106): n is a, c, g, or t
  misc_feature (112)..(112): n is a, c, g, or t
aaccaaatccnggtcagttccaanaaaaccaggtcctaaantcctgtanggaaactgctcctacagataagaaccaacagggntatccacagctccttgtccctantttttntcctgattcatgtcctatttcttttatttataaagtagtaaattaataaataaatgaaatagacaaagtctaaatgaaaaaaatgattgatggtctgtggcctgccccagagatgatgactcgtgggtatgagtcaaggatgatgagtaaataggagtcaggaagtttaagctccgatataaaagaaatctagcctattgatcagttggaaatgatcctgtagacaggtagttaaaaatattcagttatcggctgggcacggtggctcacaccttt

SEQ ID NO: 270487 - DNA, 421 bp, Homo Sapiens
  misc_feature (20)..(20): n is a, c, g, or t
  misc_feature (49)..(49): n is a, c, g, or t
  misc_feature (66)..(66): n is a, c, g, or t
  misc_feature (304)..(317): n is a, c, g, or t
tggtctcaaaactccctgancctcaaaatggatcccacctgcccttggncctccccaaaagtgctnacgagggagaatccccttgaggcccaagagtcccgagaccagccctgggcaacatagtgagaccctgtctctacaaaaaataataacgataaactagctaggcatgatggcacatgcctgtagtcccagctactcaggcatggaaggaggatcgcttgagcccagaagttcgggctgcagtgagctatgactaaactgctgcactctagactgggcaacagagtgagacctcatctcnnnnnnnnnnnnnnttaaagccttagtttacaggcatatattatcattgcaaaggatgactgcaaaagagagttctcactgtgaaccagatcatgggatctttaaaagttgtcattga

SEQ ID NO: 270488 - DNA, 429 bp, Homo Sapiens
  misc_feature (84)..(84): n is a, c, g, or t
  misc_feature (149)..(149): n is a, c, g, or t
ccgctgacagcccaaagtatccatttagaaaagtgaagcaacaagatttaggttgatgaaagatacatgagtttgcattttgancctgttcagtgtctgtcttcccagcacggtgtgtacacttcttcaaaattgtacacagtttgccnaattagaaatatcttggaaagcctcatggtcactaattttcaactagcatcaggtattttgaaaacgtgtgtctggatattaactcttgtttaaactgaatgtatgatattttgttagaatggaaaagtactatcttgttaatttaagtattttaaatatagttgtatatttttcttactcttagtcacctgtaattgaaatatttctgttttgcgtcatacacgaagctagtgaaaaagaaagtgcaaggcattttcagatgagcaagtgactatcgtg

SEQ ID NO: 270489 - DNA, 460 bp, Homo Sapiens
  misc_feature (157)..(157): n is a, c, g, or t
gaagttagggtgggtggagcaagccccacctgcgtttttctgccacagcatccaatcgtgaagaactcgggagagggtggagtccacatctagggttgtcctgccccttggctctatccctgcccagaggtgggaactggaggagtgggctgcaaanactgagccctaaatgtctccccggccttgacttttctttcctagcccctggggcctagattctgcacttggggtctctgacacaacacaccatcccaaagtagccggaagagctaaacacagggggttcttaaaatggctgcccccgccacccgggcctcccttgggcaaaaggaattgtcagccctaccccaacccttcaactaccagaatctgggccaccccagcagtatttttatttaaaatgttgcccattttatgagttatgatcaatttgtattaaattaaagttacagatgtcagt

SEQ ID NO: 270490 - DNA, 157 bp, Homo Sapiens
aattagccaggtatggtggtgcacgcctgtagtcccatctactcagaaggctgcggtggaaggatcacttgagcgcaggagttcaggggtcagcagtgaggttcagttgtgtcactgcacttcatcctgggccacaaaatgagaacctgtctcttcc

SEQ ID NO: 270491 - DNA, 440 bp, Homo Sapiens
gctgaggatggagccgccccagccgactccaagcccgcagagggcagacgccaccctggactgctctccctcgccagctggcctctctggcctattcctaccttccaggcccactgcactcctgtctgggagcccttatgagggcagcccagcccccgcacccacccccaaccagagaagcacagatcttggggagctgccccacaagccccgctggccaccgagggctgcagcctgcgctgccggcttctccccaccaccctgccacctccactgtgatgtatgtccgctccctcgtctgttcccccaggatctcgaagtgactccgggctgagcagtggggcggctgggggaggggtgacgattctcctcaggctttggccctgcaagcaaacccacatatctgctctgtatgtaataaatgtcttaacgtcacaccc

SEQ ID NO: 270492 - DNA, 432 bp, Homo Sapiens
  misc_feature (17)..(17): n is a, c, g, or t
  misc_feature (39)..(39): n is a, c, g, or t
  misc_feature (170)..(170): n is a, c, g, or t
atgtccccagcccgcantccccccacccccatggccccnggaggtttccccgatggaaattgggcccacatttgcctttagtctctcctatcccagcctaaataggccttggggacagctgtggtgcctacagaaagtaccctagacttagaagcagtaatactggtttnctagttctatttctgacactgcctccctgtgtggtcttgagcaagtcacttcacttttctgtgctttggcttcctctactctaaaaatgggataacagtatctatctgatctactgtgtaatgcttctctctgtgcctcagcttcctgatctgcaaaattggtttaataataatgcctacctcacagggttgttgtgaggatttgcctaaatatatatgtacagtgcctggcatataagttctcaataaatggtagatatat

SEQ ID NO: 270493 - DNA, 660 bp, Homo Sapiens
cagagagaggacaaaaatgcctgtataatttgctttaaaggcttgtccttatgtttgtaatttcagttaaatattttctacagattgcttcacttcccctttcccccaataacaagttcatattcttgtaatgtttactttggtcaacgtggtaatttttggaagaaaatgccaaaatgtaagcttctcacaagcagcaaaggaatgtaactgcctgtagctaccacatcaagggagagaagaggcttgcgtactttgggttgatctcactgtacaaaaaaagtgtacccctattggaagaaataaggaatacttgaaggtttctcctttttttacacttgagtcatgtgcaaggttgaaccatatgaaattgccagtgttcaaccattgctgatctgcaaaagcgacaatatcatatgcctcaacctaacacttactcttaaatgcaggttaaaatctctgtgaggcaaagggataatattctctaggaactcacttttgagagtatttttctctaacccatgtggatctaaattttaaaaataggaatgaatctcttaattgcagcttgtggagagtataaaacattttgagcacaatatgcagcacataacttttcagattgtgtttgcatagaaaaggttaaaatcaattcttcca

SEQ ID NO: 270494 - DNA, 279 bp, Homo Sapiens
ttttgagataaggcctgccattcagactggagtgcagtggcacaatcatagcttactattgacttgatctcctgggcctaagtgatcttcccactttagcctcctgaagtagctaggactacaggcacaagccatcatgtccagccaaattttttttatgttttgtagcgatggagtctgtgttgctacattcagaggggagggggcgatgtgagactgcatctgttcacagatgacagggattgtctttgtaggaatatcctaaagaacatttaaagg

SEQ ID NO: 270495 - DNA, 359 bp, Homo Sapiens
  misc_feature (38)..(38): n is a, c, g, or t
  misc_feature (50)..(50): n is a, c, g, or t
  misc_feature (92)..(92): n is a, c, g, or t
  misc_feature (138)..(138): n is a, c, g, or t
  misc_feature (211)..(211): n is a, c, g, or t
  misc_feature (218)..(218): n is a, c, g, or t
tcctgcatgcctatttagtataaaactgcctgtttggnttttaaactggnaccacctatttacaaaggatgactttaattggctaattcagnaaaatgcagaattacaaaataatcaacaaatatctgtcaagtaccncctcgttgtgtcatttgccatgggatatataaaatcaagtgttaagatatggtccttgctctcacaaaacttnccaaggnactacctaagcaacaaaataattacttcatgaactaaattgcagcaattaaagccaggtgctgtggtacatgccactgcttaggaagctgaggctcaggagtttgaggccagcctggacaacgtaacaagacttcatgtca

SEQ ID NO: 270496 - DNA, 174 bp, Homo Sapiens
ttttaatcggtaaactgaatttatttcctcttggaaaacaattccagtaatctccaggttcagactgcagagtaaacattaataacagtaacatacaggttagttcaactgattcaagaatttggctgcgtgaaatcattaaggaaaaccttgaacactcaaagcttcaaatgt

SEQ ID NO: 270497 - DNA, 549 bp, Homo Sapiens
gagaaaatgagaggccctgcctggacccagggagaggagccagtgacacaggcagagcggtgcagccctccttcccttccatttggaggaggtggtgccaggagcctgcccgcttacctctgctgaagcataagtggactttgcttttggggcttatctctgatacatgctggagccctgcctctcccactgctagatggaaccctggaatctctcatcctacctcttagtctgtcagtttcctacgtgtgagaagcaagcttgtgggccagtgtccttgtacatgctgtagcacttaaaaaataattcccagggttccctgggaaaaccagtcccaggggttcctatgatctgtagtttctacctgggattataactggttttgggtacctgaattttgattggttagccttaattatagtctggcgtgatcatgtagaatcttttctggtgaacagatcataaagttctatcaaggagttctatcaaggcatccatgtcagtggtgctatgctggttacaacttgagatttttgaaataaaaaattt

SEQ ID NO: 270498 - DNA, 562 bp, Homo Sapiens
  misc_feature (508)..(508): n is a, c, g, or t
  misc_feature (518)..(518): n is a, c, g, or t
  misc_feature (524)..(524): n is a, c, g, or t
  misc_feature (530)..(530): n is a, c, g, or t
tgaaatgacagataaagccataccatataacaacttattgaagatatattaaaactggcaggttaacccacatctagagccagaaagcataaatatttttgacattgattgtcacaaagaaataatgtgaaagtatagggtattttggcatacaaattttgtgtaaatgtcaagaattcaaaggcttttatatctttgtttttggtgaggaattactaatactaaacaactttgtattatcagatattaagactccttttcattcccactaatgttcatcttaatgttttccaaactacactttaaaaccagaggctgccaatttctaccacactaatcgggaaaatttctggcaataacttttttgcttttataagataaaatattgggtgaatgatcaatatgtgatcaacagtcttctgcatgctatttagtataaaactggcctgtttgggtttttaaactggaaccactatttacaaaggatgaccttaattgggctaattcnggaaaatgcnggattncaaatnatccacaatttctgtcagtaccaccccggtgg

SEQ ID NO: 270499 - DNA, 616 bp, Homo Sapiens
  misc_feature (362)..(362): n is a, c, g, or t
  misc_feature (371)..(371): n is a, c, g, or t
  misc_feature (495)..(495): n is a, c, g, or t
caagcctctcctcccaacttgtatgcagccaacttggcgtgttctcacaatggcctttctgctgtgtctgcagagagggagagatctctggtgtatcttcctccttttgcaaagacaccagtcctctgggattagggccccacccttatcacctcagttaaccttaatcacctctttaaaggttctgtctccaaatgaaatcacattggaggtcagggcttcaacatgtgaatgctggggggacacaattcagtctcacatatgcagtggaaagaagttgacacactgagcagagctttttgcatctcctagtgttggggagacaataattggtgacagccccacaagatagggagactctngatgagtgnacccagaccttcagctgagagcactgagggctgcaataggggaggaaggctgaggggtgagtagatcgtccctctcaaagtctgaaaccaagcttccaaagggctgactcccagactaagttgntctgctctctttcccacagccagcccaaagcaaaaggaaatatgcagaggtaaatagcatcatccagggcctcaaattaactaaaatatttccatatacaatatccagatttaaagtttac

SEQ ID NO: 270500 - DNA, 227 bp, Homo Sapiens
caacacgcatacctggctccaagaaccatgatttttaaattgaggaagagagagtaaaagaaagtacaagagtaagttcagttactgtttttcaaatgtttggcattctaccaactttttgttataaatccaagagagagcactaacatacttcttccttcctcccaagtcaaacgtatatactacacccaacttggtaagttctgctctctctcttatggcaaagg

SEQ ID NO: 270501 - DNA, 290 bp, Homo Sapiens
tttacctccctcccctaacttactaaatgcaaatgtactaaatgagatcctggctcaacaaaagcgcaggatctcatctgctttgttcactaccactgtagttccagacctacaatcatctctgttactgcaacattcaaaatatatttttggaatgaattaataataactttgaaatgaagaggaagatggcatgaatcacaaaaactctttggaaattgtgtcagaatttaattgattattttcatatgcattatctattaataataaatacctcatattataaattc

SEQ ID NO: 270502 - DNA, 351 bp, Homo Sapiens
aagcagttagcaccctcccatatacagacaggtacacccattttataaaactgaaagtttatactccagaaataacaaaaggcttctggactacaggatactaggcatagtgagaagtactgtagtaaaaagtgttagtaatacaggagactggtaatctgaatggtaccgacaaacccaagaccacagaacaatgagaaatgtgatgatcttctgtaaatgaaaccactggaagaatgtcgaatatcaatctttgattactgcatccaaaaagtcatgcaactaaatgcagaatgcttcattctgcttttataaggaaaaatttaagggttaaaacaatagctgatactt

SEQ ID NO: 270503 - DNA, 371 bp, Homo Sapiens
gcaatcacattttccccattggcactgctgttttcatagttcagtaaagaaacctaccatccaactataaaatctgactggttttgggccagttcatttagaagctacaaagaggtagtgcatgcatttcaaattagaagaagttaagcctgttaaaagttttataatcttttatatcaagcttccatctgaatggataaatgcaggaatgtccagaggcatcctctgacttcatgaaaggtaagttcataattcaaactatatattattatgcatgaattaatgtgtcatattctgaaatatatgttcagaatcattacacaggactttcagagtagtccaagtagcaagttaaaatcaagtgtttcctg

SEQ ID NO: 270504 - DNA, 476 bp, Homo Sapiens
  misc_feature (67)..(67): n is a, c, g, or t
tgccctacaagcacttatttagctgtgccagctccctgcactgctgccaaggtcccaagaaacccangatctctcacagagccatagaagcagagggctggagtatctgtgaggacaacaaccttgtctaacttcgcgacctcattcttgagcatttctactgatgagaaactcactacccccaattgcagctcattcaactttaaaattgctgctttttgaatcactgattgtgaatattaatttaaaaaaataagtaagaaaatgttttaaatgtgctgcctctttaaaaggtctcctctttgtgcaaccaaaacccacctctctagaatacagtttgtataactgaagctataatttcataccatgagtgctgctgttagcaataataatcatgcccggattttattaacaacagaagctgttgctcgtatgaaaaaacaaacattagttctaataaacatctgcattgagtc

SEQ ID NO: 270505 - DNA, 428 bp, Homo Sapiens
  misc_feature (18)..(18): n is a, c, g, or t
  misc_feature (29)..(29): n is a, c, g, or t
  misc_feature (44)..(44): n is a, c, g, or t
  misc_feature (259)..(274): n is a, c, g, or t
cctaaacacgggcagtgnctggggctgcnagggctgtccatggnctcctcccctcccgagaacagaagggcagaacatgctttgcatctgcttgtctcacatgcagacatgcatggataaattaatgtttcaagctaaaagtgcatgggtaaactctctagtgtcctttgggccagccaaaccacaaacatgctaaactaaaagcttctgctcaattgaaatcttgctttgcacatggtccacattaacctttactggnnnnnnnnnnnnnnnngtcaaaagactttaagctaaatgtaattataggccacagagcaccttgttttaaaaagaacaaaaatgatactaatacctaggggctctttactcccaatatgacctggttggctctttcctgaattagaaaccagcatcagagataaggtgat

SEQ ID NO: 270506 - DNA, 722 bp, Homo Sapiens
  misc_feature (51)..(51): n is a, c, g, or t
  misc_feature (53)..(53): n is a, c, g, or t
  misc_feature (71)..(71): n is a, c, g, or t
  misc_feature (124)..(124): n is a, c, g, or t
  misc_feature (571)..(571): n is a, c, g, or t
  misc_feature (634)..(672): n is a, c, g, or t
ccttccccgaaactcaaccacccttgtaatactgagagaccaccaggctangnggaggagaggagcctaanttctgctaaggtgtagacaaaaacaattgtgaggcgttattccagaagccacngagatatgcaacttcctcagttacccctgcagataatgttacttttgtagaacctaggattggccttctgagatatcttctcaggattttgcatgtctgatgaccgatggctccaccgggacccagcaacggcttctgtgtccccacccagaagcgactcagagaaagaggacagcttcgacaccctatgatttcatctctgacccaaccaatcagcactccccataccctagcctgctacctaccaaattacctttgaaaaatccctaacctccaagccttagatgagtttgatttgagtaataactctgccgtcccacatggtgtggctggcatcatgtcaattaacctctttctttactgcagtgccatggtctccatgaactgatttttttgtgcagtgggcaggaagaacccatcgggcagctactcaggaggatggggccnagaggatcgcttgagcctaggtgtttgacaccagcctagacaacattgtgagactctgtctcnnnnnnnnnnnnnnnnnnnnnnnnnnnnnnnnnnnnnnncattattatttaatacagtcattattctatgcaataaatcactaaagctt

SEQ ID NO: 270507 - DNA, 379 bp, Homo Sapiens
  misc_feature (39)..(39): n is a, c, g, or t
gtacatcctgtcctccccccatctgtcagccccagcatncctgagcctattagagcctaggtgcctaccctcccacccacggtattcacacgaaatggagcaggcttcaaactcaaaagtaactgaagaatacttacaatggaaatgaaagtgaccatagagcatcaatctgtaagtttatccacacacacaaaaagagggtttgtaagagttaaatgtaaactggctgaagcttatagctggcagtttgttacaaagtacccaagctatacctttaccaacatcgtagatttgaagaattaaaggaattttatgaaatactgttggaagttatactgacagagaaaacaaaaaaggggtaaaagttggattatggtag

SEQ ID NO: 270508 - DNA, 395 bp, Homo Sapiens
gcttaagggggaccaatcctactcaactccagaggattaacttccttgacagttgcaagcactgtgttgtccagatcttcccacattttcaagaggactctgaaacccagatttttatttggaattgcatgactcttcagtgctgcctcaattaaaaatgaaacagctggctgatagattccacagttggctgcgtagattcctccgtgaaagtataatcacgtgtgaatgttttgtattaatattatacacaaactaatagcaaaatgagttttgaggtaaaggtacagattcccaggatacaggaagtaaacaaggatataaaaagagtaacaggtcgggcatggtggttcacacttgtaatcccagcattttgggattataggcatgagtcc

SEQ ID NO: 270509 - DNA, 425 bp, Homo Sapiens
  misc_feature (31)..(31): n is a, c, g, or t
  misc_feature (171)..(196): n is a, c, g, or t
aaatattgggataacctggaatttaatagtnaaaacaaagtggatctgaatttgtagtaaaacaaagtgaaaatattacaaagccagtccttgtccatgaagtagcccttatataactcagaagcaacacatttcatactttcaaacactttggtataagtgaaattaatnnnnnnnnnnnnnnnnnnnnnnnnnncctctactttggttttcacattattggaacttcagcaacaaggcaagtgcacagctaccttggatgacaaaatggaaaacctctcatctgcttgcttctcctcctggaaatggacgtgctaggagagcgcttcccaggacttcttgaaaataaggtgcatctcacttctttccacaatcaggctctcagcaatcgtttgagggatttataaaacctcagattcagttgg

SEQ ID NO: 270510 - DNA, 473 bp, Homo Sapiens
  misc_feature (359)..(359): n is a, c, g, or t
attcggcacaggagaaaccctatgtgtgtgctgagtgtgggaaagcctttagtggcaggtcaaatctcagtaagcaccagaaaactcataccggagaaaagccctacatttgttctgaatgtgggaagacctttcgacagaagtcagagttgattacacatcacagaattcatactggagagaaaccttatgagtgcagtgactgtgggaagtctttcactaaaaaatcacagctccaagtgcatcagcgaattcacactggagagaagccttacgtgtgtgctgagtgtgggaaggcctttagcaacaggtccaatttgaataaacatcagacaacacacactgggagacaaaccctnacaagtgtgggcatctgtggggaaaggctttcgtttcaggaaattcagtgtttcagttgtttcttcagaggcagccacggttttgaggaggaaacagtgttgaggaaaaccccc

SEQ ID NO: 270511 - DNA, 321 bp, Homo Sapiens
  misc_feature (31)..(31): n is a, c, g, or t
  misc_feature (270)..(270): n is a, c, g, or t
  misc_feature (293)..(293): n is a, c, g, or t
  misc_feature (303)..(303): n is a, c, g, or t
gggtcctcaaaactccctgacccctcggggngatcccaccggccctcagtgagcccactgtgcccggcccaaaaagattttttagattgggatataactagtattcagtaaagtgcacacgtcttaattataaggcttcatgaattattatattcatatacacccatgtatctacctccctcattacccccatcaagatacaggaacattttccaggcatcgtaggaagggctgttttcctttcatggcccccttttccagttcaatgtnttttttccggggggaattcattnttttttaacntttttcacctaggttttt

SEQ ID NO: 270512 - DNA, 369 bp, Homo Sapiens
  misc_feature (185)..(185): n is a, c, g, or t
  misc_feature (352)..(352): n is a, c, g, or t
ttcaaagccatttaacaagtttctaggaagttccagactttcccacattttcctgtcttctgggccctccaaattgttctaacctctgcctgttatccagttccaaagttactttcacattttcgtgtatttgtacagcagtgccccactctactggtaccaatttactgtattaggccggtttncacactgctaatagagacataactgagactgggtaatttataaggaaaaagaggtttactggactcacagttccatatgggctgaggaggcctcacagtcatggtgggaaggcaaaaggcgctttcttatatgggcggccaaggaggaggaatgaggggaaccaagncaaaaggggtttcccct

SEQ ID NO: 270513 - DNA, 592 bp, Homo Sapiens
  misc_feature (36)..(36): n is a, c, g, or t
tattaaaatctccatttaaaaaggtttttcttaaangtttacttttatatacttaattggaaaagattggttcaaactttttataatttgttcctttaatcattccccctcccatccacttcagtacccagaaaactaaatatccaagaattcctgggtaaaacagacaaccactagatagatataactaacgtatttttttaagctgtatagttcttcatcaaatggaaatcggcaaccactgaaaataacattaaaaattagtgtgggcatgaagtatggaattttaaacatcagtttactatgctgattaagtcaacatttatattttcatcagaacttaataatcccataaataaatagagctctcagttatttaaaaaaatcaagggataacatatggatttagacatattagcagcgtaaagatgtatgcttcaacacacttattggggaaacgtctgaaaatattactacactggattcaagggtatccaaaggaacctgacatagaagttctttagaataacatcatttcagggaatttcaaaaaagaaaaggggtcaaataggaaatagcctcaaattaattg

SEQ ID NO: 270514 - DNA, 512 bp, Homo Sapiens
  misc_feature (483)..(483): n is a, c, g, or t
  misc_feature (498)..(498): n is a, c, g, or t
atagttatcctcaagccaatttccagaacctgccaccagggggaggtggtgcagcatgaatcattctgaatgctttgtctttgaagtgttcccctattgctgttaccatctcagaggaagtaactgggcatggtgagactcctaaaatgatcggagtttttttggccaaagctggcatctgacttgccacattcctctgagtctggagtagccgcaggggtgggagaatgccagcccagagtcagtccatcggggttacatttccaaggtctgctgccttcatctatgtaatggccgtgttactttcagatctttcagcttcccagagtgttgtgggaatcttggtcattgaatgtaaagggacttagtaaagggtatagatatttttcaaaaatgaaaataactttttttcttataagtgataagcttttataaagatcataggaaaactagaaaaaatgtaaaatgtaggacaatttgtanaacaaacttgcattngagatgtttttgat

SEQ ID NO: 270515 - DNA, 468 bp, Homo Sapiens
  misc_feature (81)..(81): n is a, c, g, or t
agaaggcttctgtgcttaggaaaaatattttgtggtttccttaaaatattggtattttgtagctggaagaataggatccanggcttaccatgtttccaggccacttggtcactggttcctgaatttagaaaacattggattaatgagttggtgaaggcatttagtggttaccaaaaaccagtttaaatatttatgattaaaggcttttcacaaacctttttaaagaaaatttagctgagaaaacttaaaaagttttctaaggaagtttaactgtggcacatgttttgatcagaaaggtagttctctttgctctggtagttttaaagtttgtactagttctttatttctgttgtttttttaaattgttaaaattataaatcacgtctaatcatactgaattgtaaaacttgaattgtatctttattttaagcataaatgagaataaaatgatcctgttcaccctgaaaa

SEQ ID NO: 270516 - DNA, 323 bp, Homo Sapiens
  misc_feature (232)..(232): n is a, c, g, or t
  misc_feature (262)..(262): n is a, c, g, or t
  misc_feature (293)..(293): n is a, c, g, or t
cggtcaatttgaatccttgaagatagaaaggcgaattattaactttcccaaatttgttttcttcaaacttttgtaaatgtcaattttacagggctaacatatttgggtgaaacagattgttttaataaacagttacctcttaaaaaaggagctttttcaaaaatagccatgtacccgggcattaaagtctagcccatgtgtccaggaaaatggggtgtgtttttccggaggnacccaaacagcccttcactttggatacttnttaaacccccatttttgaagggcttaggggnccattaactccaggtttaaacattgggggg

SEQ ID NO: 270517 - DNA, 268 bp, Homo Sapiens
  misc_feature (198)..(198): n is a, c, g, or t
  misc_feature (209)..(209): n is a, c, g, or t
  misc_feature (218)..(218): n is a, c, g, or t
  misc_feature (238)..(238): n is a, c, g, or t
aaggagtcaaatgcctgggtacagcatctgtgacatcaacacatgatgtagggtccaaagtatgcctgtgttgaggttttttgggcagctgctgcagggcttttgacagctgggggcaggggtaggaatcccttggtcaagatcccagaaaaggggggttggaaagaggggagtaggccaccctcccagaagttcgangtgggggacancagagtttncttggccattttgggaaggnacacgaggtgggaattcagacaggttttcc

SEQ ID NO: 270518 - DNA, 380 bp, Homo Sapiens
  misc_feature (255)..(255): n is a, c, g, or t
  misc_feature (299)..(299): n is a, c, g, or t
  misc_feature (354)..(354): n is a, c, g, or t
aagatgtataccagggaaacacaacagaatttgttacttgttaaatcccacaaaagctacaagggagctgagagttgatggcacttaaggacagtaaaagtctgcacttttaatatttttaatgcccactgatgggatttgtgtcaatactttttaaaatgctttttatttacaatagataaaacagtaaggaaatacaatattatatcatatccccgcacagagatactatatctgtataaatgaatcactagntaaaagagttatttcttatttcaaatgaaggtcttatctagggnattaattagggctgtaatctaaatgttgatgggtgccccattttcaactcccaanataaacaggaaagggctcatggtatc

SEQ ID NO: 270519 - DNA, 408 bp, Homo Sapiens
  misc_feature (18)..(18): n is a, c, g, or t
  misc_feature (361)..(361): n is a, c, g, or t
  misc_feature (368)..(368): n is a, c, g, or t
atgcttcagcaactggtnactgtttatagaaatggggaaaggggaaattaatatttgtttaaaatgctttgagttgcctgatagacatccaaggggagcagtcagtttctaagcaaaagactgcgcttttgtggacagtcctgtggcagaggattggaatttgggagccattggcatgtaggtggcatttaaattatgtgactaggtgaggagggaagggttgttacctagggagtggacattgatggagaagactagtgactaagttctgaggcaagaccctccagcgtgtaggatggccaagcagagcaggaagccatttatgacctgaggaaggagaccactgatggccaggggagcngaaaccnggggccatgtaattgtcaccaaaattaaggtagcatgcat

SEQ ID NO: 270520 - DNA, 551 bp, Homo Sapiens
  misc_feature (16)..(16): n is a, c, g, or t
  misc_feature (46)..(46): n is a, c, g, or t
  misc_feature (84)..(84): n is a, c, g, or t
  misc_feature (98)..(98): n is a, c, g, or t
  misc_feature (352)..(352): n is a, c, g, or t
attcggcacagccccngccccggagcctccagcccctcgcctgttnccgcgcgagtcccgggcccggagcgctaggagcgcggnagaggagccatggnctggacgggataaggatgccagatggctgctacgcggacgggacgtgggaactgagtgtcccatgtgacggaccctgaaccgcgatgtcacccctgagagtgacccggcgaggtgccacattggaggcgtgatgcttaagcctggtggagaaactcgatgtaaaaaaagattggtctgacccatgctctctggtgggaaaagaagagaacttggcttctgaagacacattggaccttagataagtatggtattncaggcagatgctaaagcttcagttcacccctcagcacaaaactgtccgcctgcagcttcccaacatgaagtatgtgaaggtgaaagtgaatttctctgatagagtcttcaaagctgtttctgacatctgtaagacttttaatatcagacaccccgaagaactttctctcttaaagaaacccagagatccaacaaagaag

SEQ ID NO: 270521 - DNA, 1032 bp, Homo Sapiens
  misc_feature (75)..(75): n is a, c, g, or t
  misc_feature (376)..(399): n is a, c, g, or t
  misc_feature (607)..(607): n is a, c, g, or t
  misc_feature (626)..(626): n is a, c, g, or t
  misc_feature (950)..(950): n is a, c, g, or t
tgaaattccgtggctggcacaccacgagctgtcacgcggcacgggtcataacacatctgggtgtcatcggacacntcacctcgcccaccctgtaggagcgtaaggagcctccatcctcagccacgtgcagctgacgtggctttcctgatcggagggcttttcttttatgggtggcccagcttcttcaagaccttcactgctctgcctcagtggacagtcgtttcttttttgaggtgtgaccttttgttttcatgccttccccttgaagtcatcctgtgttttgtaatcagctgtcaggccaaatgtctgacccgaaagagaatgtatttacactcatgctggcgttgttcagcagcccctctgtgttctgtgtgannnnnnnnnnnnnnnnnnnnnnnnacatatatatgcagggaagtaatggtactgggtagtgtatgttttctatggggttcaaaatatgaatttcgaacacaccaagccgctaatgagatagcagcttttttctgggacccagagtcacaaccaaattgatttaagaccggacccaagacacctttaacaataggactgaaaggaaaaaggatagggaaaaagcttattaaangaaaatgtgtcaaccaccnaaatgttagaggggaagaaccacaaaccaggcataatacccaaaccggttccagggggaaacaaggctttggtattccgctggctccagcgctttttctgaaacccgaggctggccagggtgctgtcaccgtgtggtctttgattgcagccattcaatgcccacatgcttttccttcttgtttcagaacagcacatggtcacaacaagatattttctttttccccctccaaagccttttgtctccttgtgcctctttttatccttaggaaaagatccaggtgcttgtgaaaagaatcatgaatgcaacagggaggctggtcctngttgtgtcgccgattaagttttaaacttttatttattatttatgtctgccgtattttaaataaacattctcgttccttccga

SEQ ID NO: 270522 - DNA, 380 bp, Homo Sapiens
  misc_feature (340)..(340): n is a, c, g, or t
  misc_feature (360)..(360): n is a, c, g, or t
  misc_feature (367)..(367): n is a, c, g, or t
ctgacgctggagtcctgcctgcagcagctggccacacatcccggacactggggcatccatttgcaaatagcggcccgcaggccctccggccatccctggcttgctggcacgcctctccagccttggcctcttgcattggcctgtgtgggttggggccaaaatctcccacgggagtttttcggtccccggccatgtggctggcagagagctgcttacagctgtggctgaggtcttcccccacgtgactgtggcaccaggctggcctgaggaggtgctgggcagtggcttacagggaacagctgcttcacagatatgcttagagttgtgccaggggttcttngcaaacctgttgttcctttncagattncagggccattgtt

SEQ ID NO: 270523 - DNA, 453 bp, Homo Sapiens
  misc_feature (15)..(15): n is a, c, g, or t
  misc_feature (25)..(25): n is a, c, g, or t
  misc_feature (37)..(37): n is a, c, g, or t
  misc_feature (52)..(52): n is a, c, g, or t
ctacgtcccctaaanggtaacttcnaaatcctcccancctcaagaaccgtgncccttaaaggccaggtgtgtggtcgaattgccctcaggagtctggatgtcccacagggtcctttcaacacccatccccaaactgacctcaggctctgtctgacttctgccctctcaacagcggcactcctcagtcctccccctcacaccctgtgctttaataacagtgagttatactttatttattatgtgttcagagcagcagtgggtaagagcacgatctctcaagtctggtccaaaactcccctctgcccatgtactaggcaataactaggcaggttatttatgcccataaactaggcaagttatttgcccataactaggcaagttatttatgttgtgtctcattttctccttctgtaaaacggggcttattatagtgcctgcttcgtagattgtttt

SEQ ID NO: 270524 - DNA, 530 bp, Homo Sapiens
  misc_feature (90)..(90): n is a, c, g, or t
  misc_feature (187)..(187): n is a, c, g, or t
atcagagcctgttaaatgttaggctaggaatggaccccatcacttatcaaggctagtctttgcttacaattgagaaaactggactccaangaatctagaagaggttataaagcaggcagaagaggaaggaagaggtcaggggcaatgggcagtggagacacatgacagactggtcagccattctggnaaggagccagacatattctgctagtctaggaagggcagggctcagaaatttatgaagaaatgaacctcctctgtcccacaaaagaagaatcaaaggatcaggcagcatcatctttctctgatatttcggaggacatatagattccttactggccttttcattgtatatgacacatatataatttttctcatttacttgtagttgttgtcctctataagtgactaaatcttgaatgaaatttagttaacataactggaacaaacaaataattctgtaatattttctgatacattaaatgttaagtttgagcagacatatagtagattttaaaaagatctttaat

SEQ ID NO: 270525 - DNA, 386 bp, Homo Sapiens
  misc_feature (33)..(33): n is a, c, g, or t
  misc_feature (42)..(42): n is a, c, g, or t
  misc_feature (47)..(47): n is a, c, g, or t
  misc_feature (53)..(53): n is a, c, g, or t
gacactgggcagcatcacaagccatctttccantgattaganggacngtaacnttctccattctgcccctgtccttcaactgtcactacagtgtcacctaggagcactctgtcactctggtttgatgttacaatacagcatagtatgtacagtttggtctcagtcatactgaagtttggctagttttctagaattatctttacaaataatagcctgtgcttatgtttccaagttaatagtctggcttttactgcctaattaaatgaaaagggcttaaaattcacaagactcacctcttcaattacttttctatttgtagtgtgatcattttagcagaaattaaattagttagaaacctaactaaaataaatgcaagcttcacacag

SEQ ID NO: 270526 - DNA, 404 bp, Homo Sapiens
gagtgttttatggaggaaagcccttccttttggggggtcaacagttttccctatgctttgaaacagaaaaatatgtacccaagaatcttggtttgccctcccagaaaacaaaactgcatttcactttcccggtgttccccactgtatctaggcaacatagtattcatgactatggataaactaaacacgtgacacaaacacacacaaaagggaacccagctctaatacattccaactcgtatagcatgcatctgtttattctatagttattaagttctttaaaatgtaaagccatgctggaaaataatactgctgagatacatacagaattactgtaactgattacacttggtaattgtactaaagccaaacatatatatactattaaaaaggtttacagaaaa

SEQ ID NO: 270527 - DNA, 467 bp, Homo Sapiens
attctcaacagcgggtctggcaactgtcccaggacccagtctgatgaccagtgaggagaggagcctcgaaaccatctgtgcccaaccacaacaatggacgcttacaccctcgtccccctcacccctcacaataacgggcagaacttgggggagctggaggtggtggcctactcttccccaaggacactcagacactgaccgtgataacctcgtccctgacagggacactcctacacaaagattgttgcgggtctgaaatggcctgtgagacccccaatgctggaacaagagaggaccccactgacaccccagccacagatagtagcagggctgttcaatgccacagtggcctcaaaaggcaacgaattgaattggaagatacagattcagagaattcctcctcagagaagaaattaaaaacatgataaatacaaagggaaaacaaaaagctacaaaagtagccttac

SEQ ID NO: 270528 - DNA, 779 bp, Homo Sapiens
  misc_feature (14)..(14): n is a, c, g, or t
  misc_feature (122)..(122): n is a, c, g, or t
gtgagctctgaatngtcaaagtctctgaggatgaggaaagtaacttgattcaacaggtttgtgtatgttcttcaaagctctgtgcatgtgccctgtaccggcctctttagctatgagttgtncatatggctcgcagatgtttataactggagtctgtcacaacagcattcaagaaaatgctgtgactgcactgacacttgttttgtcgtaagtcttggacaccagcatacagaggctgttgctcattggcaaactgggacctaccccttcatactgattgtcggaacaaaatagagcattgtgatttcatcagctctcactttaatgtgtatacactactggccaaatgtggtggtggatcttggcaaagtctcttcctgatagcaatgagtctgaggcacaaagaatccaggtgttgtaatagaaaaagacaaagaacgatgtttccaaaagctgtgggagacaatgactcacagcatgaacataggctttacgatcatcctaaattgagagcaaggtatttattatcgaaaacagagactggagaaagacactacatttgactactgggacattctgggtgcttataaaattttgacatgatattatttttcatgatggaaacttttaaggaataagtgtctacaagaggtggacatggaccatgcttatacaacttaaagctctgaactctgagaggcaaagtctatttgttctctactctcctcacagcctcttgaatcagaccttgggccaatccagttactctattaaagaat

SEQ ID NO: 270529 - DNA, 285 bp, Homo Sapiens
  misc_feature (59)..(59): n is a, c, g, or t
gggatttatgatgggctatttttgaccccataggctcagagaatccctgcaaaaccctnttttattgtttattctgcagacaaaaatgtgacaatatgctttgaaaacatagatatacttgagtaacatttatttacataaatcccaaattctacctctgaaggtatatgaaatttaactatgtatgtattatgcattttgtctggctttctatcataattttaatttgtaaagaatgtgcttacttgggaaagcaaattaaagtgactactgtttgctatcgtt

SEQ ID NO: 270530 - DNA, 614 bp, Homo Sapiens
  misc_feature (52)..(52): n is a, c, g, or t
  misc_feature (61)..(61): n is a, c, g, or t
actgcccccatgttaattaccctttgccaatgtgaaaaacccatggtaaggnaggttgggncaggttttatcctctcccacaaaggtgagcctttgctccaacaagccagcaacctggccagaatgggagagatggccagaaccaaagcttctcattaaccctccagcaggcaagagtaggtccagtggaatcatggactgaaacaagacattgtgtgagctggtccgtcacttcagaagcagggtcctgaaggaagctggaatggcatgagttaggtggggggaataggtggtgtggcccctcaaccagacaattagaatcagcctccaccttaactgcccacccccagtgagttctgcctcagcttcttgactaaacccttgtaggggcaaaactcctggaagggacagccccaccctgagccagcttcacttgagggtatagcagtttgtgggcacaaagggcatcttgctgactacagccaatcctgctgttccgccgcacctctaccagcagcattgtccctggacgactgtactcgcagggcacataacccatcgccacattcttcttcagagagggggaggggcagccactagtcacagtaccaatc

SEQ ID NO: 270531 - DNA, 403 bp, Homo Sapiens
  misc_feature (170)..(248): n is a, c, g, or t
  misc_feature (299)..(299): n is a, c, g, or t
  misc_feature (320)..(320): n is a, c, g, or t
gatgatacttaatttcagtctcagctttggccaaatattgaatttaatgtttggctacttggcaaccactataagcagcaatcaaaaataataataaagtaaactagaatagcaaatataattttgaaaaagaagaacaaaattttaagactcagactatcttatttcannnnnnnnnnnnnnnnnnnnnnnnnnnnnnnnnnnnnnnnnnnnnnnnnnnnnnnnnnnnnnnnnnnnnnnnnnnnnnncaagagggtcagggagatcgaggccatcctggggttaacatggggtggaancaccatcttcttacccaaaanttaccaaaaaattaggccggggcattgggtgggccgggcccctgttaggttcccagcttctttggggagggctttaggggcag

SEQ ID NO: 270532 - DNA, 368 bp, Homo Sapiens
  misc_feature (340)..(340): n is a, c, g, or t
aatgagaggggacatataaattaatatttacattctatcattacgaatctgttattagtgttatcacactatggccaagtacctatttagacaatttaaactttgatttctaagaataagtaattgggaagggagaaaaacattttaattatataatatttaacacattgcacctaaattaaaaagtaattattctctggaggattaaatgggaataccctaaaaacacaaagtttttaaagagtgggtatagattcccagcttactgtgaaaaattcccaactactttcaaaggattttaacaactccaaaatgggctggacagtagggtaaacaggantataaaaccaggatgggttcagacaatc

SEQ ID NO: 270533 - DNA, 512 bp, Homo Sapiens
ttcgttgttgttttttacacttcttaacctggtgatctatttgaggtctttggtgtttatcaaacttattcttaagtttaaaaaagaaatttaaaagggtggtttttttaagatttttaaagtttgcctaaccatattaaaaatccttccaaatgctttattaaaatagagccagttcttgccaccccagtcttggtattctgtctttagctagcccaaattgtcccttgaatttgggttttccacaacctcaaaggggttatttgaaatcttttgttgtattttaaaatattttttggaagagctgctaattttattttaaaaaacaaagttgtgaaaacatgcctcctttttaaaaaataacccctccatccaggatatggaatccagcaccacagtgcacaggtcagggctcggagggagcctctgtgcagatgtgctttctttacagtggctgtaaaaagtttgtatttattatgtataaaatgttgaataataaaaaaaatggaatt

SEQ ID NO: 270534 - DNA, 354 bp, Homo Sapiens
ccccttgggttaaagaaatcaaatttggcaagaatttaatcctacaagttgtattatgctttgaaaactcccatcccctccctaagaatcctaaaaaaacttgaaatgctcgcccaaatgtcccccatgggatttttgacccaaaagtaaggtgataactgaagaaatttttagttctttgatcacttcagtgacaatacccattaatgaatcttctccatcccaggatatggaatccagaccacagtgcacaggtcagggctcggagggagcctctgtgcagatgtgctttctttacagtggctgtaaaaagtttgtatttattatgtataaaatgttgaataataaaaaaag

SEQ ID NO: 270535 - DNA, 490 bp, Homo Sapiens
agaagatcatggggaaggacattgcaagcagggggcacagctagcgcaaaggccccaggataacagctatgagctcaagagtgttcaagggacagaaaaaaggcctggtgtggcctacagattaagcaaatgaagggaaaagagtacaaaatgaatggaagaagtagataataccagacccataaaggctttgtaggctagggcaaggaatttggggtttattctaagctcttaaaaggtttcaagcatgcgtggcactcaaaagatctttaccgaactagcttttgcaagacactctactatgtttctatagggaaggcagaaatgaccaagttaaaattctgtcttttgaagaaattgtggctcagtggtacagaaaacagtaaagtttctagggtatatattatatagtggcttcttaacacaatataagctacctacatagtaattttaaaattatcactacttatctatccctggtagaaatcat

SEQ ID NO: 270536 - DNA, 416 bp, Homo Sapiens
  misc_feature (47)..(47): n is a, c, g, or t
acctaaccccctcgggcaggtcaaataagggtgtgtaggccacaacnccccctaagagccttattttagttactgtcttccttgaattgctttgcctggtaggagggttaggcaacacctcttcctagtccccctggctgtccttggctggagttagctgatggtagacttagtggcagggttgtggatatcccaacaatgccacaaagtccctttctggttgtatctctccatggagccaacataaatgtaaatcagcagaaaagtgtgcagatgagaagatattgtccataaaatacacaccaatggatcatttcagctacaccagaagaaaggaaatgtgttttttctagaggataaaagagaaaagtagccatttaatgagggaataaacctacctgaagggtatatacatt

SEQ ID NO: 270537 - DNA, 377 bp, Homo Sapiens
  misc_feature (249)..(249): n is a, c, g, or t
  misc_feature (277)..(277): n is a, c, g, or t
  misc_feature (321)..(321): n is a, c, g, or t
  misc_feature (327)..(327): n is a, c, g, or t
ttgctaagtaaaaagtaggtttaagggaagaatcatttatagtaacactgaattaagtaagggtttgtaggtcacagaatcagactatttagggctgatacttcaagcatatctcaattaacaaaaaagcacattgagactccaaggatgaactgcctttgcttagtggccagggcactgtcaagacccagaggtctcctaattcccacgctagcacaccataccacccctttgttcaacctcacaganttgccaatactagcgtatcaccagggantacttacggaaccatactaactcacatgggaaggattgggcaantgaaanttgggcccacattttcttgttccttcttcaaaggggtaataggggttcta

SEQ ID NO: 270538 - DNA, 485 bp, Homo Sapiens
tgttgaaatccctgcatctactagcatttactgttaaaaatttgcttttatcaatctagttctaaggggtaagtaactgagtctgttaaaactgtgccataaaatggtgaataggtttaagaggagagtgtgcagtttccatggagttccagcacataagtatttgatacttatttttagggttcataattgtcttcttgataaggccattggcaattagtatacggtagttttaggctaaagctttctcagagattaaagtgctggggtactataaattctcatctccttaatgtcctcttgtacctagataccacaatctactttaaatatataaaatgcattattctacataaaaagtcagttattgaatacatgcttccagtgaaccttcttaaacgtaagatagtgtaacttgttatacaagtattactgttctggattttttgtttactattttaaaactgaaagaaaaaaataggtgt

SEQ ID NO: 270539 - DNA, 522 bp, Homo Sapiens
gagtcaccctgacactggtgccgggctgacctcagctcccgaaggctcgcacagcctccccatccttccttcccggcccttgtggctctgtccacctgatcccaataccagcttcccccagcccctgccaccccagagggcggccacgacagggagaggtgtagatgccaccatctgagggagaggaacgtggaacaggagcaggctctgatgctgagaggcttgcctccgggggctggaagcctgggtggccggggcccctgaagaaggctcccctctgtatcccccaggtctcctcaacactgggctgatcctgaatggcacaggccaaggggaggccagcctcgcctttctacccaggccccctgccctgcccacctcaggcccccaccctccactcctccccacggtactgtgaacgtcgtgtgactcagtgcagagacagataatatatttaattcatgtacagaaaggagcgagcagtctcgtacagaaaagctgactttgatagattgatgccca

SEQ ID NO: 270540 - DNA, 288 bp, Homo Sapiens
  misc_feature (222)..(222): n is a, c, g, or t
caagacctatggttagaattgagatgtttcccccctcagaaaaggatccagaagtcctagacattgaaagtcaagtttgcctaaaaagccaaggtttatagatagaaaagaaaatgaaggcccaaatgcggtggctcatgccctgtaatccccaacaatttgggaggcctgaggtgggaggactgcttgagcccaaagagttcaagaccagccctggacagncatagaaagaccccatcttgacaaaataacaataataataatttagtcaggtatagtgatgtgcac

SEQ ID NO: 270541 - DNA, 433 bp, Homo Sapiens
attgtcgttttattctataatttttaattagtgacgttaaacatctttcctatcggccattttacatattttttccttatgagttgccttcacttatcttcagcaaaatttctattgagatatcttttttttcctgtaatttggaagtgctcttgatatgctgaaatgtctgcactgccacattttgccctatttgttcttcagtttgcggtttgcttgcagttgtgcttatggcgttcactgtatggaagtgttgttgtttcatcaaaagcaaatctattgagtcttttttcttcatggctcctgcctttggtcataaactcttacaggtactacaatgaacactcgccactgtggttaccatggtgcagatgtcttttgtatccttccagaaaaccatttgaggagtgacttttgcaaaatgtaccagtct

SEQ ID NO: 270542 - DNA, 394 bp, Homo Sapiens
  misc_feature (37)..(37): n is a, c, g, or t
ggtccttgaaactccttgggcctccaagcaagtcccnccccacctccagcctccccaaattgttgggattaacaggcatgaagccaccgccatttggccttcattttcttttctatctataaccttgctttttagcaaacttgacttcaatgtctagactctgatcatttctgaggagaaacatctcaattctaaccaatagtcttgcatgccaggaagtttctttccactcaagtttattcatgcatgtttataagaggcacaaggttgaagtggctaagaatctcacctctaactcttccagagggaagtttcttaatgtccttaaacattagttttctcagctgtaaagtggaactaataataaaagctcaaagaattttttaaaaggatt

SEQ ID NO: 270543 - DNA, 376 bp, Homo Sapiens
  misc_feature (193)..(193): n is a, c, g, or t
  misc_feature (350)..(350): n is a, c, g, or t
  misc_feature (356)..(356): n is a, c, g, or t
ttaagttgaaaaatcaaattggattttattgaaatgtatataaataaccctcatttttctttatttcatcagtattgggaaattaagtgaaaagtaattaaaaagtagtagtcctgagagagagaaatgaaggctgaaagggaatcaagaaaaccatattccatcccagatctgccactacccagttctgggnaaaggcatttattgtcctgggcctcagctgtaggaatgaggtgggctgaaatctatgttgtctgggagtcaattacaggctctacaatcttgctgttctaattctaccattaggggggccaatgcttaacggtttacatactggaccctattaggcnggggtncctcaaaatggaaagggggg

SEQ ID NO: 270544 - DNA, 185 bp, Homo Sapiens
  misc_feature (19)..(19): n is a, c, g, or t
  misc_feature (34)..(34): n is a, c, g, or t
cccccccggttgatgttgnaatttgtggccctcnaaactgtccctcccccaccctcagccatcccccaaagcatgggtgaccccaattttgattttctagttaatgttttttccctaaagttatggaataggatttaaggtttaaagatgaaagaaagagagggcttggcacacttgcttatgcc

SEQ ID NO: 270545 - DNA, 444 bp, Homo Sapiens
  misc_feature (110)..(110): n is a, c, g, or t
  misc_feature (353)..(353): n is a, c, g, or t
  misc_feature (419)..(419): n is a, c, g, or t
  misc_feature (427)..(427): n is a, c, g, or t
attcatcactatcatatatattatgttgtcttaccattcaaactgttggcactatacctaatccacagtaaacaggattatcattcccataatatgatctttcttatgangaatttggtaacagtattctattgtagttttcatgagaaggcttttcctattcaccaaattgactcggttccttgtcagtatgaataatgacccaaggtttactgggggatgggtgacaatgtagggaaggggtccctcgcctcattcaggtgccttctcagagggccctctccaggaacaggccatgtggtggacattctgatgtggggtcatttctatttacaataatatacatatttttnctggctggcatggggtggcaacaggtggtacaatcaggaccccaaccctcggggggggtttttccncacaccgntttccctcaggctgggc

SEQ ID NO: 270546 - DNA, 278 bp, Homo Sapiens
  misc_feature (109)..(109): n is a, c, g, or t
  misc_feature (145)..(145): n is a, c, g, or t
  misc_feature (199)..(199): n is a, c, g, or t
  misc_feature (247)..(247): n is a, c, g, or t
  misc_feature (252)..(252): n is a, c, g, or t
cctcccttcctcatctcacttctctctctttcactctttctaatatgtttgcttctgagtatagcttaagttcccgtctataaaattagtaaaattaggcattcctttngttttctaaattattttacaccgattttcctctttngcctaataataatttatagggaatattttaggtattcctcaggcacttgggggnctttttaatttaaaacttggtttggacccacattggttagggaatggnattcncctacaatatccggtccttcgggggg

SEQ ID NO: 270547 - DNA, 421 bp, Homo Sapiens
  misc_feature (31)..(31): n is a, c, g, or t
  misc_feature (40)..(40): n is a, c, g, or t
gggggcccccaaaaaggaaaaggagaggggnggcctcccnacccctggcacccaccaaaccaggagagagactgttctgttgtaaaaccccttccaaaaaatctgatatggtaaggtaccttgagaccccttcacccagaatgtcaatcctttttttcctgtgtaacatggaaacttgtgtgacccattagcattgttatcagcttgtactggtctcataactctggttttggaagaataatttggaaattgttgctgtgttctgtgaaaataacctccccaaaataattagtaactggttgttctacttggtaatttgacaccctgttaataacgcaattatttctgtgttcttaaacagtataaatagttgtaagtttgcatgcatgatggaaaaataaaaacctgtatctctgttatt

SEQ ID NO: 270548 - DNA, 556 bp, Homo Sapiens
  misc_feature (312)..(427): n is a, c, g, or t
tgtatcagagtggagctatacactgtaagaatatttggctagtgaaaatgtttccgaagagagccaagtaaacatgggcagggaattaatcacacgttttacttatttttcactacaaagggaaaaatgctttctttgtaatatatcgcatacagtataatgaggggaagcaccttgcctaaggttagttttctcattttgattacaaaattgtgtacaaaagacagatataatcattaaatactcatttctgattactcttactaaatttggaatagaaagaggtgtccctggctgagcaccaggtgtcannnnnnnnnnnnnnnnnnnnnnnnnnnnnnnnnnnnnnnnnnnnnnnnnnnnnnnnnnnnnnnnnnnnnnnnnnnnnnnnnnnnnnnnnnnnnnnnnnnnnnnnnnnnnnnnnnnnaccctgtctttaaaaaaatatatagatatgtccttaacatgctactttaatcatccaacatgacactgagctgtgaaactataaaatcatttaccttaaaaaatcaagatgttattaattggaatactt

SEQ ID NO: 270549 - DNA, 621 bp, Homo Sapiens
  misc_feature (465)..(487): n is a, c, g, or t
cactaatacatacccctaaaagtcctatattgctactttctggatctcagtgaaatttatttccatactgactttctccagtccacagtgtatatgaatatgtacacatacagtgtttattagttgtcagtaaaaatttctcatgaaactaaattccccatttatttaaaaggttagaaatgtttagtttgatgctggaaataaaatcattgaagtctatgtacagtaaatactttgaagtatatttttatggaaatcatcttttgggagacaaatgaaagatgtgcattttcctatatgaaataaaagaagtgctcaaggcaccccccaacactgacatggaggcgggtcttggagaccttgtaactggcctcccccacagctcaccccagagctaccataaatcatgtaatactatttatgcccctgggtcctttcaggtgttttgtaaaatgtacagttatnnnnnnnnnnnnnnnnnnnnnnngtttgccaggcctaaagggaaaagtaactggagtgttttaaataatgagcattagttacaggatgaaaaacaggaaatacacaaagaaaaacatgccagaggtaggtgcaggcccatcttatatgagaagcagg

SEQ ID NO: 270550 - DNA, 427 bp, Homo Sapiens
  misc_feature (68)..(68): n is a, c, g, or t
  misc_feature (121)..(122): n is a, c, g, or t
ccattccagacctaaattaccttaaattatccaggcacagtcccccactatcaattgtgtcccagagntcctgtggggatatgaaggacaggtggactcaatacacaaatttaacagtttnnatttagtttatatttcccacatcttttggttaagacatacaggagaggtcataaatgtttatgaaggcagtcttgacacatgtgtatggaacaaatatgtatgtaacatatgactcatgtttatttttgtgtggggacttaacatataatgtattataattaggccctagacatcaaaaggtctttttaggacataaaggcatgcaaatgtgtactttttgtaaactagccagaattagcctatggtcagtggtcttgtttatagtttggtatcttattgttacaaagaatctgtcttatcagtc

SEQ ID NO: 270551 - DNA, 467 bp, Homo Sapiens
aataggagtgtaactttataactttagttcagctcaatctgattgattgccagccaggtcaccgtttgcatagaagtacaactttttgacttcaactttagcctctgaattgttgctttctgcaaccaccagatgtttgccataggaatgtgacctttgtaagttcacttcagcctctgattggttgctttctgcaaccaccagatgtttgcataggaatgtgacctttgtaagttcacttcagcctctgaattgttgctttccgcaaccattcagactgattgcgggccaccacttcatttacgtgaggtaagcaccaagtggccaatgggaaacctctagggggtatttggacccaagaagattctgtatctgggcccttgagccgctgctcaggcctgctgccaccctgtggagtgtactttcgatttcagtaaatctctgcttttgttgcttcactcttaaaa

SEQ ID NO: 270552 - DNA, 522 bp, Homo Sapiens
tcagcttcattatttggatgtattgcattcaaagcagcagttccaaacataacacacatctattttcttagagttttgtaaatacagactaacctgatgacattaaaaattgtggatcctacatgttcctatgttcattctctaaaaacctgagtaactttatgaaaacacacaaacctgggaaaaacatcacatttttgtcacatttttactgacaaatgtatattcatatgatggtacggcagcagggagtggcccccagttaacatggctgtgagtggacacagtgtctcgcaggatcactgcatgttatgatggcttgtaagtgcgttgttaagacttttgtttcagtgtttgtctcccagtatttgaacctaatttaaagaaaaagacgtttccaagttgtatttattaaatgtgtttttccttaccttttgtgctgctactttgctaatctcattagcttagctgtgtttgtgcataggttatatttggtaataaatttatagagtgttggttgtc

SEQ ID NO: 270553 - DNA, 464 bp, Homo Sapiens
tgcagcgctgaatgagctcaacgtacatgaagtcaacatcttttgcgtttataaccttgcacggtcctgcaaaaagtccatatccacggatagcaatagataactccttgttgttcgaatccacatttctgatgattccataaaactgctccataaagtactgcagtttatttttatgcatttctgcatttttcgccaccatattagaaacctgcaaatacataatatttatttttttggaaatatttaatagcaatggaatctatacaaacatggaaaaactagaactgtttagatgctactaatgtactgttatagttacacgcaattgcttttaatcataaagaccctttgcttccattttgcttagtctctatcaggttcagaaaagtgtcttaaataaggctatgtgatacatttttcctagagaagggactaagagaccaaggatacacataagtctg

SEQ ID NO: 270554 - DNA, 757 bp, Homo Sapiens
  misc_feature (53)..(53): n is a, c, g, or t
  misc_feature (735)..(735): n is a, c, g, or t
  misc_feature (741)..(741): n is a, c, g, or t
gtcccggacacccgtggtacctggaacaggacccaacttctccctggggagcntgcaggggcacctggcatacgacctgaacccagccagcactggcctcagaagaacgctgcccagcacctcctccagtgggagcaagcggcacaaatcgggctcgatggaggaagacgtggacacgagccctggcgacgatttactacacttcgcccagctcgcccacgagtagcagccgcaactggacggaggacatggaaggaggcatctcgtccccggtgaagaagacagagatggacaagtcaccattcaacagcccgtccccccaggactctccccgcctctccagcttcacccagcaccaccggcccgtcatcgccgttgcacagcgggatcgcccggagcccacacccgtcctccgctctgcatttccctacgacgtccatcctaccccagacggcctccacctacttcccccacacggccatccgctacacaactcatctcaacccccaggacccgctcaaagatcttgtctcgctggcctgtgacccagccagccagcaacctggaccgtcctggtatctgggatagcaaaggtcttcttccctcgccccttctccatcgtcccaggaatcccggggggcagcaccagccgccccggcccacgttttcggtggaaaattagagtgaacaagaacacccctgccgactcccagcccggccaaaaagacaaaacanatagangcacacaatcaggagg

SEQ ID NO: 270555 - DNA, 225 bp, Homo Sapiens
  misc_feature (76)..(85): n is a, c, g, or t
ctattattaaactacaggctgtagatttcttagttctcacagaacttctatcattttaaactgacttgtatatttnnnnnnnnnntcttcagtaggatgttttgtactattgctagaccctcttctgtaatgggtaatgcgtttgattgtttgagattttctgtttttaaaaatgtagcacttgactttttgccaagggaaaaaataaaaattattccagtgcaa

SEQ ID NO: 270556 - DNA, 459 bp, Homo Sapiens
ccagcacatccacctttggaacccaccagttaaggtattgtcagagtatcctgtttgggaagaattcccatttcaggcaccctcgatgaagagccaggccaggaacatgggatgagagagcgaaatggtggaaaaaaggggagataggctaattccagaggcacctgcccagccaaaactcagccccggctgcgcgcactgagtcctgtgtctgctgcaggtatcgggctttccgggatgacgatggacattattcccagacctactggaatcttcttgccatccgcctgggccttcgtcattgtgtttgaggtagccgaggcacctgctggttctcccatccatgggcatgaggccccgaccctgtgctttgcctaaatttcgaggcacgtgggtgagggggtcggtggccgtcaattcctgctgtgtcatcttggtcaaatcagagctcttctctgc

SEQ ID NO: 270557 - DNA, 621 bp, Homo Sapiens
  misc_feature (41)..(96): n is a, c, g, or t
aaatgttcctgtgcttcaacctccattacccttggaaatgnnnnnnnnnnnnnnnnnnnnnnnnnnnnnnnnnnnnnnnnnnnnnnnnnnnnnnnntcctgcggaagatggtgagatccaggaggtagagatggaggatgagggaagtgaggagccccctgccccaggaacagaggaagatacccctttgaaaccttcagcacaaaccacagttgtaactagccagagttcagttgattccaccatctctagttcttcttccactaaaggaataaagaggaaagctacagaaattagcactgcagtggttcagaggtcagctaccattggcagttctccagttctctatagccagtcagctatagctacaggtcaccaggcagcagggattggaaaccaggcaacaggaattggacatcagacaataccagttagccttccagcagcaggaatgggtcatcaggccagaggaatgagcctgcagtcaaattaccttggactagcggcagcacctgcaattatgagttatgcagaatgttctgtcccaattggagtgactgctccctcattgcagccagttcaggcccgaggtgctgtgcctaccgctaccattatagaacc

SEQ ID NO: 270558 - DNA, 173 bp, Homo Sapiens
aatgattgttgaaaaaaatgtctattttttatcctctaaatagctttgtgtgtcagagatcagaacgctcattttacatgatatcaagaacccgaatgctagatagctagaatggttgttaacttcctagatatccattgtagaggaacacataaggtaaaacaaatgaataa

SEQ ID NO: 270559 - DNA, 299 bp, Homo Sapiens
  misc_feature (206)..(206): n is a, c, g, or t
attaattataatttaatggtcaatgggtatacaaaaactttgccccatatatagctctgttcccctccctccctccctctgtgcctatcactgtcatataatttaaatgtttacacatcatttgacctacccagcacagatgtcctaatcatcactctctgcagttgtcttttaaatcaggtaggagaaaaaagagctacacacantaaactatttatttttacactgccctttgaaaatgttttccccaattttttattgtaataaaatacacataacaggccaggcacagcaacaca

SEQ ID NO: 270560 - DNA, 478 bp, Homo Sapiens
  misc_feature (194)..(194): n is a, c, g, or t
  misc_feature (224)..(224): n is a, c, g, or t
  misc_feature (308)..(308): n is a, c, g, or t
ggcctgcctctccctagacgcagttgcgggcactccagggaatgaaccagctcaagtgtgtccctaacagcagcctggagctacccccaatccctcacagcctgaccctcctcattccatcagatgcatttgtagaatcggggcaaatttccttatttatttatggcccatgcctttccccctcttcatcctgntcccgttttgctttgaagagaccccagtanccaaaaaacagcctccagaagccaaaaccatgcctggatctcccatagcttctcctttgctcccaggagaaagttcactgaaanaaaaatatcttctggcttcttgtgtgtacagagacaacagaactcggtggggaaacgggaatcttttctgcaccaaagctgcttctaaagcagaaagcagtggggctcttggtgtttcatgctgccttatttatattaaaggaagaattaaatcttgcaagccgtaaaaa

SEQ ID NO: 270561 - DNA, 436 bp, Homo Sapiens
  misc_feature (70)..(70): n is a, c, g, or t
  misc_feature (85)..(85): n is a, c, g, or t
  misc_feature (100)..(139): n is a, c, g, or t
  misc_feature (425)..(425): n is a, c, g, or t
aaccggagaattgccttgaacccccggaggtggaggttgccagtgagctgagattgcaccactgccactnccggggcacctgagncaaaactccgtcctnnnnnnnnnnnnnnnnnnnnnnnnnnnnnnnnnnnnnnnntgatatagagaacttgtgcttgctgttaagggaatgcaatactttgggccagtgaaaaatacctagaaattgatcaatatgaaatgtagcccaaaggagtcatatatcttcaaaatctaatgagatcaccctgtttttggcttattcccaaagctgtctctgtgtttacagttggagagaaaaggttagtggagtggcttttataaataagattaattattacagctataactgaagtctccaggcaggaggctttacaactcagtcagtgctatattgtgcctcnattctcgtgcc

SEQ ID NO: 270562 - DNA, 477 bp, Homo Sapiens
  misc_feature (25)..(25): n is a, c, g, or t
  misc_feature (39)..(39): n is a, c, g, or t
  misc_feature (67)..(67): n is a, c, g, or t
  misc_feature (107)..(107): n is a, c, g, or t
  misc_feature (188)..(188): n is a, c, g, or t
aaatgtgtacggtgagtcccccagnttctcccgcttctnctttagcagctgcccaagtcctgcaggnccctggcagtgtaagccgatgaagaactgtgacaaggggnaggaaatgcacggctccaggaagctggcagaatgggaaagccccttctgcctcccctctgctgggtctcccatcacgtgangcactcattccgggcaaccagattcagtcccagtgaatgcccaggttctgtgcttctctcagggctgaagagggaaaatgaccccatcataagaacctgtggtcctgaggcctgacattccagccaaggtactgccaaaccctggtggctgcaggggggtgccagcaggagactcagaactactactcaggaggtggcaaaggcttagggatgaccctgggatcaaaggctgcttcaggagcaggtttatcaaaatggaaccttgagtgtttgatctctgtctccagct

SEQ ID NO: 270563 - DNA, 255 bp, Homo Sapiens
  misc_feature (72)..(72): n is a, c, g, or t
  misc_feature (103)..(103): n is a, c, g, or t
gacaggtaaattgtagacatgcaatcccacctagcataaacatggacttgttaaaacacttttccttttctntctcttctaaaagctcaattaagctcctggncttctaacaaggcttagtccagaattaagcacttttatgctgcaaaaacccatgtacaaggtaggaacagagctcatcacttcagccactgataagcacagagacaggcgtgtaaaatgcacttcacaggagcagttctcacccaaatgaaa

SEQ ID NO: 270564 - DNA, 458 bp, Homo Sapiens
  misc_feature (16)..(16): n is a, c, g, or t
ggggaaggtccctggnaccctataaagcattatgccagatggagacccccccttataataggtgtgtaagtatataagacaacccctacattcctccatgagcctagcccataagttttagcaaccttgcctttgaacccacggtagatttacaattttctgtagtattgagttgtgttcatttagaattttgtaatatttatattgaaaatcaaatttttgtaccctacaaaaactacaaaaaatccccctagtttttatagtttctattaaaattatagctggtacatagggatgccagaaggactgtttaagaagctgaaaatagagaaatgaatttatcttctcatagttaggcagggcacagtagaaggatgcttaacattgcaagctgatgggaacagcaggttgatatagcttgtgataacacttctaaagaaaaagcaatgagccataga

SEQ ID NO: 270565 - DNA, 378 bp, Homo Sapiens
tctagcagcagggtcagagtctagtgatcgtttttaaaatggcttagatgctacctttcttttctgagaactcagtgtgatataatccttataagatattgacagctaattttatggattatcctaccgggacagtggaacctaagtagtttgaagacgagaaattgttttgattcagaagcaatgggttcactagtgaaaggaaagatcccacgatcgtaagtggtaaatgtttatatttgttgaataactctctgaaaaaaggaaataaagtagattagccttggtaagaggtggcttaagagtggttttatgatctaagttttatttgaaaaatgtgtgaaacttgtttaaggtaaatgtgagaattaataaagg

SEQ ID NO: 270566 - DNA, 843 bp, Homo Sapiens
  misc_feature (454)..(454): n is a, c, g, or t
  misc_feature (544)..(544): n is a, c, g, or t
  misc_feature (787)..(787): n is a, c, g, or t
tcatgggtaaacttaacccagaactataaaatgtagttgtctcagtcccctccaggcctcctgaatgggcaagtgcagtgaaacaggtgcttcttgctcctgggttttctctccatgatgttatgcccaattggaaatatgctgtcagtttgtgcaccatatggtgaccaggcctgtgctcagtttggcagctatagaaggaaatgctgtcccataaaatgccattcctattttctaatataaaactcttttccaggaagcatgcttaagcatcttgttacagagacatacatccattatggcttggcaatctcttttatttgttgactctagctcccttcaaagtcgaggaaagatcttttacttcacttaatggaggacattccccatcactgtctgtaccagttcacctttattttaacgttttattcagtctgtaaaattaactggaccnttggcagtaacttgtacataaagtgctagaaaatcatgttccttgtcctgagtaagagttaatcagagtaaatgcatttctggagttgtntctgtgatgtaattatgatcatattaagagtcaatcctgatctgagtgcttgtaacagttccaatatacaatatcgaagtcatctggacacagtgagtagcaatttatagattcagaactagctcagttatatgagtatgggatatgggtaatcatccctacaggcaatctctagtgctgatctcagacaagcatgtcaccactggttctacgagagggtcagaccggttcggctaatttganccgggacggactaggctccggtgatggaccagggcccaaataaacctccggccgac

SEQ ID NO: 270567 - DNA, 461 bp, Homo Sapiens
  misc_feature (15)..(15): n is a, c, g, or t
  misc_feature (201)..(201): n is a, c, g, or t
  misc_feature (361)..(361): n is a, c, g, or t
ataatggcaaatcancccatttccaaagcttgtaaatcatacccccgaaccttcatccccagaactcacaaacactgaagacgctactccccgcgcttgtgaaccccatgaacactgggttctggggcacggcacaaggcaagcatcaggggaacgtggtatagcgcaggctggggcagtgggggggtgccagcctgagcnccaacccagaagggtgtttgcagctttacaacactgcagacttacccagcgccacgggacagatgacacgatcctccgacactgcccatctgcccatcggtgcaagaaagaattcgaggcagttttcactgaggcaaagtcagacccaggcaacactggnggacccagggctcctagaaagggacaaaggaaggagggtgattaacagttgaccagtttcatcaattctagaaaaatgcaaaacattccctgtgccgaat

SEQ ID NO: 270568 - DNA, 359 bp, Homo Sapiens
  misc_feature (279)..(279): n is a, c, g, or t
cgttccaagccggcatggctgggaactgcagacctgtcctccctggtgggtcccaggggcccctccagcttgtggagccccacactggggtgccgcctgcccgtctctctcccatggagccccagcccctttgggcccagggacaccagccaggctctgtgctgaccctcctgttgcacccagccctggtctcagcagcgaccacccctgcctccaccctccgagctttgcatgttccactaaacccgggcgggtggcaggtggaggtgtcaggctcgntggcgcctctgcaagggcagaacactaacctgaccgtgggcggggccttgggtatccgcccccaataaaagcaattccaa

SEQ ID NO: 270569 - DNA, 476 bp, Homo Sapiens
  misc_feature (347)..(387): n is a, c, g, or t
  misc_feature (391)..(391): n is a, c, g, or t
  misc_feature (404)..(404): n is a, c, g, or t
  misc_feature (436)..(436): n is a, c, g, or t
  misc_feature (451)..(451): n is a, c, g, or t
  misc_feature (459)..(459): n is a, c, g, or t
ttgttgttgagatggagtcttgctctgtcacccaggctgggatggaagcaggccccctctgtattcgtttgctggggctgccataacaaagtctcacacactgagtgccttaaacaacatcaatttcatatcttacagttctggaggccagaaggcaaagatcaaggtgcgggtggggttggtttcttctgagggtcataagggagggatctgtctcaagcctctctccctgggtttatagacggccatcttctccccatgtctttacatggtcttcatttctgtgtgtgtctatgtcctaatctcttctttttttgttgttgagatgggagtcttgctctgtcacnnnnnnnnnnnnnnnnnnnnnnnnnnnnnnnnnnnnnnnnngatnaagaatgtagggnatggggtgaagcccaacagggtcagggaatgnccatcactaaaaggntaggtttnttactcacagttcccga

SEQ ID NO: 270570 - DNA, 446 bp, Homo Sapiens
  misc_feature (31)..(31): n is a, c, g, or t
agaccgaattagtggccccagtcagtttccngggaataaactgtggtccacccagcaagctttcagagagaacttggtcatcccgacaaggagccttcccaatttggtttgagttgtggagaatttaacattgccccttgttccctagcaatcaggaagcagaggggaaagatcagttttaaatgtgtctcatctctattgtcaccttttgctgtctttggacctcctttgcgttgaggtccaaaaggaagttggaaaattatagtgaaatatcttcacatttgccctgttgaccttgcaacttaaaggaagtttaggcacaaaaactccagagacagtcccaactgaaaaagttcacaaagagcaaagactgggccaattctggatgcatgcctatgagttagccctctctgcaaggaaaatttattttttctaaataaaatttt

SEQ ID NO: 270571 - DNA, 575 bp, Homo Sapiens
  misc_feature (18)..(18): n is a, c, g, or t
  misc_feature (261)..(261): n is a, c, g, or t
  misc_feature (474)..(474): n is a, c, g, or t
  misc_feature (552)..(552): n is a, c, g, or t
acttgaaacccgtcatcnaatgcctcaccgtcaatatgtttacaagttgttaccagttgggggaaaacagtcaacctccccagtgtaaaaccaagattccccagtgaagcacctgaggccaagcaggggagaggaatgaggggagcagctggacatggcctcctgaggcctcggggctgtccttcattgcccacatggatagacggagctgtggtgcagagaacttttcccgcaacaggtgcaggactgccagggatcggnagtgcgggccgcgcacggtgccaggattccgccgaggggaagccgctcacattgcagtcatcacagacttacgcacttgtttggacagtttttccagaggggatgggaaagggccttgttctagctgaatctgtgtatcatgaccatttctgacaggcagaatgaattgtctggtagccctgtcctgacccatccaagcgctgttggggctgnttggtgacgtggtcacatgtcctggcatatctggggccacgcagtttagtctcttgtcccaggagaattgttagtganccctctttctcttgcaagccccc

SEQ ID NO: 270572 - DNA, 299 bp, Homo Sapiens
  misc_feature (24)..(24): n is a, c, g, or t
  misc_feature (278)..(278): n is a, c, g, or t
ctcctgtaggacagtcatactggnttccaaccaagtcattgaccctcatggtgaggcgctctatttccaactcattggcacagatagtgtcattagcccgctccagtttactgcttaagtgttgaatttctgattggctagaaagttccacagactctaatttctgtttccgattgacaagctgagcctagaaacacagactatcaatcaataggtaaaagggaaatgataaaataatcaatgaataagactaaaatgaaactattatttccataaanacataaaggcattgggctcac

SEQ ID NO: 270573 - DNA, 418 bp, Homo Sapiens
  misc_feature (24)..(24): n is a, c, g, or t
tattattagtggaattccttaatnggaagatgccaatggagatgacaaatttggaaaaacccactcatcacttacatttccatgaagtaccttctttgataaaatcctgttatgggcctgaatgtttgtgttcccgtaacaattcctatgttgaaacacgaatcccaaggtgatggtatttgaaggtagggcctttaggaggaaattaggtcatgagggtggagccttcatgagtggaattactgcctttataagaagaagccaaagagccagctagctctttcaaccacatgaggttacagcaagaagtcagcagtctacagtgcaaaagagggccttcaccagaacccaagcatgctggcaccttgaccttggactttcagcctccaaaactgtgagaaataaacctcagttgttt

SEQ ID NO: 270574 - DNA, 1046 bp, Homo Sapiens
  misc_feature (208)..(217): n is a, c, g, or t
  misc_feature (249)..(473): n is a, c, g, or t
ggggaaataatttcagatctgctggcattccataaatcacaccgtgtaagtcaatttggtcactgactattgtttaagtgcttctctgcacaataaagcataaaattttttcagtatagttattgattccaacatagacaagaactctgaaaagcaccccttgtcatcattattctatgattgcaagtctcctttttaaaagatagcnnnnnnnnnntgttgctgttatagaattctttcttagatatnnnnnnnnnnnnnnnnnnnnnnnnnnnnnnnnnnnnnnnnnnnnnnnnnnnnnnnnnnnnnnnnnnnnnnnnnnnnnnnnnnnnnnnnnnnnnnnnnnnnnnnnnnnnnnnnnnnnnnnnnnnnnnnnnnnnnnnnnnnnnnnnnnnnnnnnnnnnnnnnnnnnnnnnnnnnnnnnnnnnnnnnnnnnnnnnnnnnnnnnnnnnnnnnnnnnnnnnnnnnnnnnnctgcctgttttaactatagtgaactttggtttgttatgacttgttatcatgaatttatcctatatatgaattcaaatgaatcaagctcttcctgtgactccccacccccatttgtcctatattaaataacacgggttccaatcttctttaaattttcatgatctggcttcataataaagctttatagttggttcttaccagttgtatcaccctggggaaggagaaagaattggatgttcattttgcacattattttaacctcggctaatggaaactttctctaacttcctgtgtaggtcagcaatttaaagttggattatccatagaaatcatatttcattgtaggttcatcctagaggttctaaactaggaaaggaatggactgggggggtctcaggtgagggtgtgtgaggacccctgctgctgcttctctggaggttaaggggatttattacactcagtcctaaatgtttcaagtgcagaaagagctgtgtaagtcctaaatgttagcggtggaggacatcttaggcatgaaatactctttcttattgccaataaagaaattaaagcttt

SEQ ID NO: 270575 - DNA, 119 bp, Homo Sapiens
gatgcttccctgtgtggtcccttgtggcatagagtgccccctcttctcaggaactgtgagtaataaactatctttttagtgatggtcattcctgacctgttgggcttcaccatacctac

SEQ ID NO: 270576 - DNA, 479 bp, Homo Sapiens
  misc_feature (193)..(193): n is a, c, g, or t
  misc_feature (360)..(360): n is a, c, g, or t
  misc_feature (438)..(438): n is a, c, g, or t
  misc_feature (451)..(451): n is a, c, g, or t
aaacctcacaggccgcttgacgcccaagtcctccacgccctccacagtttcagagaagtccgatgctgatggcagtagctttgaggaggcgttggacgagctgtcaccggtccacaagaggaagggccggcagtccaactggaacccgcagcaccttctcatcctgcaggcccagttcgcctcgagcttgcgnggagaccacagagggcaagtacatcatgttcggacttgggcccacaggagagggtgcacatcttcgaagtttactgggctctccatgaccaccatcagccactggcgggccaatgttgaagttaccagtttgaggaggacagggggaacgaaattccttaaagaacngggacacaggggcatcctgttttctttttgcaacgatttgttgcctcttcagtttcaggaattgtttttaacattacntaaagttcttttnggaggacacattttggggtttcagcttg

SEQ ID NO: 270577 - DNA, 458 bp, Homo Sapiens
  misc_feature (275)..(275): n is a, c, g, or t
  misc_feature (335)..(335): n is a, c, g, or t
  misc_feature (405)..(405): n is a, c, g, or t
  misc_feature (412)..(412): n is a, c, g, or t
  misc_feature (424)..(424): n is a, c, g, or t
  misc_feature (438)..(438): n is a, c, g, or t
gttcactgaacatcagaaaattcatacgggtgtaaaaccatacaaatgtaaagaatgtgggaaggcctttagtcgtagtgtagaccttagaatacatcaaagaattcatactggtgagaaaccctatgagtgtaaacaatgtgggaaggcctttagacttaattcacaccttactggaacatcagagaattcacactggtgaggaaaccctatgagtgtaaggtatgtaggaaaggcctttaggacaatattcacatctttatcaacatcagaanaactcattaatgtaatttaatataagaaaaggtttccatgtcatgctctatttataggantatcaaaatatttatggccaggaagttctgtccaatgtgttgatgtttttttacacatattaacttaatnaaatgtntgggtcttaaantacctcttagttcnccttaaatttagggaaattc

SEQ ID NO: 270578 - DNA, 447 bp, Homo Sapiens
attgtgtgtataaatgcatagaaaaaaatctggaaagatataaacagatatttatagtggtctagggcaggggatggaattgtagatatttgctttttgttttatgtatatgtttcccataatgaaatgtattgtttatataattaaaaaatatacgaaactttgcttgggggacaacaaagcacctcatttgttaatttgggaaaatcttttattacaatctctgtaaggagttggttgctctctcttctgtactccctgattacataatgctcttctgagcacttttatttaatagcagaatggttgatatcattatttagttaaggtttcctcctattatccgaacatctgagttcccagtacactaagtctccccctttatctggtgggttttgcttcccaaggtttccagttatgatcaaccaagatctggaaaatattaaa

SEQ ID NO: 270579 - DNA, 631 bp, Homo Sapiens
  misc_feature (136)..(136): n is a, c, g, or t
  misc_feature (179)..(179): n is a, c, g, or t
tgatcttgcctaaagatcttaaaagtggaaagcagaaaaaatactgtttcctgaaattcaaaagttttggcagtgccagcaggccctcaacattctcacaggcaaggactggaagctgaaaggcaggcatgcctgnacccccaggcacctccatgcctggctcagaggctgaccacctngaattcaacaaggctcccagggcttcgtgttgtacctcccccctttgaacaggaggccttgcagactctgaaactggaccacccgaagatagcagcctggcgctggagccggaagattggaaagctctacaacagcttgtgcccgggcactctctgcctcatcctgctgccaggaaccaagagcactcatggttcactctctggtctaggactgatgggaataaaagaggaagaagaaagcgctggcccaggcctgtgttcgtgagtcggcctgccatgtttccatgtgccatttcttaccccttgtaggcaatggcaaagaatgtggtcaggctgtagcctccccaaccagcagacagttttatggaaacttggtatagcagctaaaagagtttagtttgtttatatggcatgtataagttttcaataaatgcctaaagttcaagcatagt

SEQ ID NO: 270580 - DNA, 459 bp, Homo Sapiens
  misc_feature (382)..(382): n is a, c, g, or t
  misc_feature (401)..(401): n is a, c, g, or t
  misc_feature (436)..(436): n is a, c, g, or t
atattaaggaacagaatgtttaataggcagaagaaaggagagaggagagcagctctctctctcgtgagacagaggcatctgaaaagggaaaagtggtggaccacagcgtattttataggcaggcttgaggaggtggtgtctgatttacatagggctcacagattggtttgaccaggtgtgacgtttacgtagtgcacgagaaaggctggccaccccacccaaatctgattatgcaaatggactttccacttgggccatcttgtcttctccttactgcactcatagctgggcaaaaagagaagacggagccgccattttgaacatgcttaggtcttagggtaggtacattccaatggggcacaactgctgggcatttcacccntggcaaggcttcccacttngcttgtctatgtctgcagcacggtttttacaggtngcttttgtttaggaaaagggttt

SEQ ID NO: 270581 - DNA, 451 bp, Homo Sapiens
gatggctcattcaaaaactgaagacagcccattttaacataatttataatagagatggtgatatggtttggctgtgtcctgacccaaatctcatcttaaattgtaggtcccaaactccccaagtgtcgtgggagggacccagtgggaggtgattgaatcatgggggcggttaccctcgtgctgttctcatgatagtgagtgagttctcacaagacctgatggctttatatgggacttttccccccttgctccacgatcctccttcctgccaccatgtgaagaaggacatgtttgcttccatttctccatagttgtaagtttcctgaaggctccccagcactgtggaactgtgagtcaattaaatctctttcttttatacattaccctgtcttgggcaggtctttatagcagcatgaaaacagactaataaagatggaatttctggtaaaaa

SEQ ID NO: 270582 - DNA, 289 bp, Homo Sapiens
tattagaagcattatctgtagttgtaaaacattattaatagcagccatcccaattgtatgcaactaattaagggtattgaatgtttatttccccaaaaatgcagaattataatattattttaaacactatgtatcaatatttaagcaggtttataatataccagcagccacaattgctaaaatgaaaatcatttaaattatgattttaaatggtataaacatgatttctatgttgatagtactatattattctacaataaatggaaattataaagccttcttgtcagaa

SEQ ID NO: 270583 - DNA, 366 bp, Homo Sapiens
  misc_feature (262)..(262): n is a, c, g, or t
  misc_feature (286)..(286): n is a, c, g, or t
  misc_feature (316)..(316): n is a, c, g, or t
gacatgataaattcagcctcactgtagtccagagtgagaattagaacataccaacttccaatctgcctaaatgtgacagcctctgcccaagactggctcactgaggcgtcttggctactggatgtaaacaaaaaatgcaatatccgtgcctcccagttctttgaaggaatcaattcatccttggttatatctatgctggaaaactgtgggtgtcctttggataaagcatacaggagttacctaccagggatttagatttggncccttctgtaaatattagcctgancgttgagttctgtgaacatggaattctttncgaattccattacaatggcagggcagggttttgggtgtcaattttttaaa

SEQ ID NO: 270584 - DNA, 424 bp, Homo Sapiens
  misc_feature (52)..(52): n is a, c, g, or t
tgcccaacagggtcaccgagaggaccctgacaagtccaccgagggggaggtnagcgccgacgaggagggctttgaaaacctgtgggccaccgcctccaccttcatcgtcctcttcctcctgagcctcttctacagtaccaccgtcaccttgttcaaggtgaaatgatcccaacagaagaacatcggagaccagagagaggaactcaaagggcgctgcctccgggtctggggtccctggcctgcgtggcctgttggcacgtgtttctcttccccgcccggcctccagttgtgtgctctcacacaggcttccttctcgaccggcaggggctggctggcttgcaggcacgaggtgggctctaccccacactgctttgctgtgtatacgcttgttgccctgaaataaatatgcacattttatcccatg

SEQ ID NO: 270585 - DNA, 423 bp, Homo Sapiens
  misc_feature (105)..(105): n is a, c, g, or t
  misc_feature (383)..(383): n is a, c, g, or t
  misc_feature (389)..(389): n is a, c, g, or t
  misc_feature (406)..(406): n is a, c, g, or t
tcggcacaggaccatcaagtttgggaaaccgctagagtccgcactgtggctgtcattggtggcatctccagagaagacccaggggctttcaggctgcgcatgggnttgtgaagattgtgattgctacccctggggcgtttgattgatgtgctggagaaccgctaacctggtgctgagccgctgtacctatgtggttctggatgaggcagataggatgattgacatgggctttgagcagatgtccagaagatcctggagcacatgcctgtcagcaaccagaagccagacacggatgaggctgaggaccctgagaagatgctggccaacttttagtcgggaaaacataagtaccgccaaacagttcatgttcacggccaccatgnccccancggtgggagcgttcttnggccagggagctatttt

SEQ ID NO: 270586 - DNA, 466 bp, Homo Sapiens
  misc_feature (44)..(44): n is a, c, g, or t
  misc_feature (55)..(55): n is a, c, g, or t
  misc_feature (82)..(82): n is a, c, g, or t
  misc_feature (87)..(87): n is a, c, g, or t
  misc_feature (111)..(111): n is a, c, g, or t
  misc_feature (247)..(301): n is a, c, g, or t
cctccctcccttaattgatttgtaaggagctttttatatattanggaaaattaantccccgggagggtgctcacacctgtanccccngcactttgggattacagaagtgancccaccgcacctggccaagggtgcatatttcaaacacccagagtaacccactaaaataataattcaaagaagaatagctttaaaaagcattagataaaccacaatggaaatctcaaatacatttcattgataaggnnnnnnnnnnnnnnnnnnnnnnnnnnnnnnnnnnnnnnnnnnnnnnnnnnnnnnnggtagcaataaatcaagccacatcgatatttactcttacattaacagactgaactctaattataaggcaaggattgtcagaattggtaaaggaagacctaattacatgctatctacaagacactttaaacataaagaaaaagatacacttaagacaaatgaatgg

SEQ ID NO: 270587 - DNA, 479 bp, Homo Sapiens
  misc_feature (393)..(393): n is a, c, g, or t
  misc_feature (398)..(398): n is a, c, g, or t
  misc_feature (459)..(459): n is a, c, g, or t
tttagagacagggtctcacactgttgctcagcacagagtccagtggcatgatcatggctcacatgcagcctcaacctgagttcaagagatccgctccagcctcctgagtagctgggactacagtgtgcaccacaccaagctcagctactattttgattttgtagggatcagatctcactacattgcacaggctgaccctgaactactagcctcaagtgataaatcctcctacctcacctcccagttgttggaattacaggcttgagctattccacctgaccttattttttatttttagagacaaggtcccggctctgtgggcctaggctggattggcatagttcggctggcagccttcaaaatctgggggctcaaataattctcccggccttnagccnccgagttagccggggatttacattacaagcgttgagtcaccatgaggagttcccaaatggncaatttttggcatacaaagg

SEQ ID NO: 270588 - DNA, 475 bp, Homo Sapiens
  misc_feature (11)..(11): n is a, c, g, or t
  misc_feature (30)..(30): n is a, c, g, or t
  misc_feature (69)..(69): n is a, c, g, or t
  misc_feature (144)..(144): n is a, c, g, or t
ggccggaaaanaggggggcaagcctcggcnaccggcccctccccagcccggcccagcctgagcttgctncccctcccagtagagaccagaggggcagtgtttgcatgggaggtgtttcctgcctgtccctgcctgatgtccccnggtggagcaggtacctccgggcgggcaagcctctgatttgcacacctgaaaatccgcggaattgagtttcgatagattgatttttaaaacttttttggagtagggggtataggggaatcatttaatttaaatcattaagattcccctgctcaaacccagattcctgtgtacagatgctatttagagggaatcagaaaaatgccaagccttttctctatgaatgtgctatttttataactgaacttgtacatatgtataaagagagacacatcttcctattactaactggataaaaaaatcttaaataaaatggagtgagataattttatgt

SEQ ID NO: 270589 - DNA, 455 bp, Homo Sapiens
  misc_feature (296)..(296): n is a, c, g, or t
gtttttttatgttaagacagaatctataacaaattctacgaattcaagagacagttaacctggtcatttccaagcctcaaattacagccttgtcagaattctattgcttgctggtacttcaacatcctctagataagtttcatatactgagttcctagtaggactctgacaccaactcacagttcccaccgggcaatgagctcgccctttgttaggggccacggagcagctccgcccagcgcgctgccccggcccgaccccgggtcggtcgcggtcagtggtgcacgcgcacccgnccccaagtcagcaccttccgagagccatagggtcgtcgcgcggcttcaccccgcgatttgcgcggtccacgctggcctctaaagagcccccgatgtgctttcttctcgaaaaagctccctttttaaagccttgcacctacagggactcgggggttgcgt

SEQ ID NO: 270590 - DNA, 424 bp, Homo Sapiens
  misc_feature (20)..(20): n is a, c, g, or t
  misc_feature (389)..(389): n is a, c, g, or t
  misc_feature (403)..(403): n is a, c, g, or t
tttgccagggctccagggtnttattcagccccttccctctgccgccagctgcttgagtgaagcccccactccatgaggagccttgagacccctccagtcctgtgctcagaggctgagtctgggccccccacgcagagctggctgctgctcacgcctggctgcctttacccactcgccgatgatggtggcctccagcttccgcgcctcaaccacggaagcaggatcttctgggtgggaggctctgaggtcgaggtggtgcgctcccccctgggatggtgacggcgatgactgaggcactcagggttcctccgaatcccgccccctgcccaggggttccagggttcccgtttgggagaagatgatgtttgctgggcggcttttaagatcanccccccagaagctnggtcagcagccagttcgggcc

SEQ ID NO: 270591 - DNA, 402 bp, Homo Sapiens
  misc_feature (17)..(17): n is a, c, g, or t
  misc_feature (195)..(195): n is a, c, g, or t
  misc_feature (222)..(222): n is a, c, g, or t
cgaaactgcctaacccncagatggatcctgccccgccctcagccctcccccaaagtgttgggatttaccaggctgagcccacccacgccccagccgggttacagtaatccgagagcaataaaagtcaaagcaggctggatgtcactctgttatcccaagataggaaagagaatcgatatgccttggtcccaattnccagttttgttggttctttcgttattnctgggctttgctgctacagccgattatcaaatggagacacctcgtgtccttgtctacctcccagtgttcttgggtagatgaacaggatgtcaaaacattcatcttgagactgtagaagcctgtactattgcattggggctaatctcatgttccacctttgactggcttggtttttcttgg

SEQ ID NO: 270592 - DNA, 524 bp, Homo Sapiens
  misc_feature (48)..(48): n is a, c, g, or t
  misc_feature (55)..(55): n is a, c, g, or t
  misc_feature (167)..(167): n is a, c, g, or t
aaggtgactgtgccttgtcgggacccccccggccccaagaacacagcnggaaagncctccggggataacagccatggcctaaggaaggacaagaagttgtcaaagaattccccaacgcccaggaccccacatcccctttggtattggatttcacagtcagctgctcnaacggaatggcctctccacaaccagggatccttagcacccaaccggtctgcctttaattttacccaggaaggactcacattggggcgaatgaaccaagtttcgccatgctggatgatgaaatggattcccatcccaaagtctgagatggattgcatatacagtgtgcagtcccagagcctcctaaaattctagccatttgtcacacaaccacagcaagaaacgtgttctatatctagagtgtgcccatctgtgtttagtacacatgcatgcatacacacccatacaaacatctgtgtgagggcagttctggagatgagcagagagagaccggaataaactcaatcttttctttccca

SEQ ID NO: 270593 - DNA, 443 bp, Homo Sapiens
  misc_feature (49)..(263): n is a, c, g, or t
ttgagatagagtctggttctgctgctcaggctgtagtgcggtggcgagnnnnnnnnnnnnnnnnnnnnnnnnnnnnnnnnnnnnnnnnnnnnnnnnnnnnnnnnnnnnnnnnnnnnnnnnnnnnnnnnnnnnnnnnnnnnnnnnnnnnnnnnnnnnnnnnnnnnnnnnnnnnnnnnnnnnnnnnnnnnnnnnnnnnnnnnnnnnnnnnnnnnnnnnnnnnnnnnnnnnnnnnnnnnnnnnnnnnnnnnnnnnnnnnnnnnnnnatgcttgcttaagccaccatgcccgaagcataaggaattttatacctggtaagtacttccaatacattcattcaggtatactctgatgtcctgatatttttactgtacgacttaacattttgtttaaactcgagaaatagttgtacctttctaaagagattatctggagcatcatcattt

SEQ ID NO: 270594 - DNA, 422 bp, Homo Sapiens
aaacaaatgtgtaagtaaactccctgcactcagtttctcctggctgtttgggttgggaaggggcctgtttggattctctgcacagcacatggcaagtcttcactggctggagttttacgccaccctagatttcaaaataaaatcttttccatgtaaaatgcagcgcccagttttaaaacaagctgcacttgtcaacatcagggtagggagtggtggcaggggaccggacgggaagtcaggagacacgcacgtcagtgaggcctgctgttgctggctctggaaaacgacgtagtgacttcccggctcgtcttctcattggtgtcataaagggctggactcctggctcacggctggaactttctaccagtatgtggtctgagaacagattccagggccactgtcagggaagtggggccccatga

SEQ ID NO: 270595 - DNA, 380 bp, Homo Sapiens
  misc_feature (45)..(45): n is a, c, g, or t
taacacataaatcaggtaagagagaagtagatggatagatttttnttttttaaggaaattagcctccctgggtacttacagtagattgagtattgagagatttacaaagatataattctttggaagattacagaagatggaaacaaaatcaaatctttcactttcaggtactggagttcattaattctttcaccaaaagcacatcactgaaggaaaatcagaagtggttttttagttattattaaagtagttcaagacccaggggaaccccttgaggatggaaaacaaaacagtattcaacttttctttcacaagacttccttgtactgggcaagacttagaggacttctggcttggaaaaatattgcttaggaaaactt

SEQ ID NO: 270596 - DNA, 448 bp, Homo Sapiens
  misc_feature (427)..(427): n is a, c, g, or t
ttcggcacagctacgtatgtggccctttgtgattggctccattcactaagcatagtcttttaaggttcatccacattgtagcatatgtcagtgctttattccttatttttttaaccaaataaaattcaggtgctatctgttaggaaagtcttatcgttaaaggttggtaatttctgagaaccaagtttagatttatgttctgcagtttttaacagtcttgaggcagtctttaattcagttgctgtgtgaataatttcatctttttctttggaagagacacctgtgcatagcagatcatcttcacctattcctcttgactcctagcaaggaagggagtgctgtgtttgctggctttgaagggagaagaactaatgaaataaacgaggtcctctcctggaagcttgtgcctgacaattaccccccaggngaccagccgcctccaccctct

SEQ ID NO: 270597 - DNA, 391 bp, Homo Sapiens
  misc_feature (14)..(14): n is a, c, g, or t
  misc_feature (41)..(41): n is a, c, g, or t
  misc_feature (67)..(67): n is a, c, g, or t
ttccaaataccttnactggaaataaaacccaacccacgagnagctgaaagaatctgaagcagggagnaatgcaactcacatgaatattccctaggtactgtgcaatgtaagttatagagattggtagcccatcaagcaagtatttgctgaagtgtcagtatcatgggaattctattcaaacgccatacaatttgtgcagtaagaaacaaaggactaaaaattaaatctctttactatattatataattgatgtcatctttcaaaaataactgctactttccgttaatttcaactgattaaaaatggtcacttatcctgcgaaagcagtacttgatggagacagcgtttttgtttgaagagtccaatggctgtttattctgcaagaaagcag

SEQ ID NO: 270598 - DNA, 484 bp, Homo Sapiens
  misc_feature (11)..(11): n is a, c, g, or t
  misc_feature (243)..(398): n is a, c, g, or t
  misc_feature (409)..(409): n is a, c, g, or t
  misc_feature (458)..(458): n is a, c, g, or t
atatatatatntatatacacattaggaaagatggactaactacaacccaagtagagaaagtatgaacaaggcctgctggacagttatacaaccttgcactcaacaactgttctcttcaatcacatggaacgtgtgcaaaaaactgcccatatactgggccataaagcaaatttcaaaggactgaaattatgccaagtatattgtctgactccaaggcaattatactagaaaaaaatgactagnnnnnnnnnnnnnnnnnnnnnnnnnnnnnnnnnnnnnnnnnnnnnnnnnnnnnnnnnnnnnnnnnnnnnnnnnnnnnnnnnnnnnnnnnnnnnnnnnnnnnnnnnnnnnnnnnnnnnnnnnnnnnnnnnnnnnnnnnnnnnnnnnnnnnnnnnnnnggcgtgacacncgtggcccagcggaggaccctgtctttaaaaaagccaggcattccagcngggggcaacaagagttgaaattgttt

SEQ ID NO: 270599 - DNA, 486 bp, Homo Sapiens
  misc_feature (30)..(30): n is a, c, g, or t
  misc_feature (67)..(67): n is a, c, g, or t
  misc_feature (151)..(151): n is a, c, g, or t
  misc_feature (233)..(233): n is a, c, g, or t
ggtgcctgccacaaaatccccccaagcagngatattcccaaagaggagatacatgtggaaaaacggntttaaatttaacacctccccaattccctgattaacatttgggaaaataccttgtgtaaacccatccccccttcccacctcccanttgtctgttgaaagattttaaagttggaaacagttccctgtctgaaaactcttctgagaacccacaaaccttgtgtatggantcggcatggagccctcagctggcggctctgggtgctgacggccgctggagaggtgggctcccctcgtgcactttattgcctgggcagttttgcttgatcttttgtgactttgagccttttaagtagtttgaatgataagacttaaaatgtttcataattatgttttatgtaacagactttgacattatttaaacgagcatgtgtaactgtaacttttctctttgaatcatataaaacttgattttacattgaa

SEQ ID NO: 270600 - DNA, 625 bp, Homo Sapiens
tatgacatgcaaagtaatgtgagtcctgccagtattctggtggataaggtcttttgagtatttggttgcttgtcacaacattctccaagcagtgatatttctaaagaggagatacatgttgaaaacggttttaatttacacttcccatttcctgattacatttggaaatactttgtgtaaaccatcccccttccacctccatttgtctgttgaaagattttaagttggaaacagttcctgtctgaaaactcttctgagaaccacaaaccttgtgtatggattcggcatggagccctcagctggcggctctgggtgctgacggccgctggagaggtgggctcccctcgtgcactttattgcctgggcagttttgcttgatcttttgtgactttgagccttttaagtagtttgaatgataagacttaaaatgtttcataattatgttttatgtaacagactttgacattatttaaacgagcatgtgtaatgtaacttttctctttgaatcatataaaacttgattttacattggatgtgtggcctgtgtcatttaactgtacctggtggcctaagtatacctagagactttttggaagaatctataaaattcattgtgtattggctc

SEQ ID NO: 270601 - DNA, 174 bp, Homo Sapiens
ccttagctaagcgagaaacgatagaggcctatagctagaggactgatagtgcatggtgcttttggacaataaacatgtactttattttaggatgtaatttagtgagcagttagaaagcagtattctagtctttgcattagggcaccactgatgaagctggctaagcaaagagaa

SEQ ID NO: 270602 - DNA, 392 bp, Homo Sapiens
  misc_feature (14)..(14): n is a, c, g, or t
  misc_feature (44)..(44): n is a, c, g, or t
  misc_feature (93)..(93): n is a, c, g, or t
  misc_feature (253)..(253): n is a, c, g, or t
tttaagtgtccacnccgtttttggatccatgtggtccggcctcnccccgaggcccttcaattatcctccccgcccctctccaccctccccccncgatatcctccgagaagccaaaggaaatgtgccatttgtaaattcagtattatggaccccctgattatttggcagggtaaggaaataggttctgttcattttacagtattcgcataggctagatgtttaaacaacaacaaaagacatggaatggaggagnacagtgggagtaagatcaaagcttttttcattaaaaagaattttgttgaattgagttcattctctcaaatgataacaagattgtgattactcttgggtgtcgggttagacacaacattgcacacgtagcttaagaaaag

SEQ ID NO: 270603 - DNA, 462 bp, Homo Sapiens
caacatttgaagcctcctggtatgtgaaatataaaacacacttgaaatagctgttgagctggagaggaaaactccagaatggctgcggtggaaatcatcgtggcatcaggaatcatcctgtgacatacacacaggcaaaaatgataaaaattccttagtagaaacaaagtttgttcaaagaaataattatgtgacttcttcaaatggtgagtccacttacatagaacaggaaagcttcctcctgaaactccttctccagcactggtctgtctatcccagcatgaggaagtccttgtaaacattgcctgcaaatcatgtcgctgccactagagaaccggagagcattcctaagctccatttctagctcagaactaatattttactctcagtgtatttcattctattttattcattttaaaacttaaataacatcattcaaatataaaagtatttcttaagcta

SEQ ID NO: 270604 - DNA, 480 bp, Homo Sapiens
ataatgatgacgataagcatgagggtaataatgtcctgtatgacaggcatagtgccaagtgttttatatgccttattttatttacatgcattattttcctcactcccctttcctgacacatacgcacctgcatgcacccccaaatgtctttctcactttcagactttgtctcatgccgaatttctgtctgagagatctcctcccagtttgcctagtttgaaaagtccttcagggcctgggggcaatccccatggccatccacaatatacacaggtaatgggaaagggtaaatctctctcccacctggggcctccttcaggcacttactttgtgtggctacatattttaagcattaactcaacaattaatttccctaaaacctcctctagttgtttcagggtacataattcctaatctggactttaacaagattgaggactcccgggaatggacttgaaagcatccatatataatggttag

SEQ ID NO: 270605 - DNA, 340 bp, Homo Sapiens
tttcccactgaaaatctattctcatattttgggaaggagcatatgtcctttaactttcaatggtaaacaatcctaggatagtgtttaaaaggcatggattttggagtcacacatagttggtttgaatttctagcttcactacttaccagctgggtttgaccttggttgatttacttaacctctctgagcctcagtttcctcaactataataacatgggtggagggaggcatgttgaaaatatctacctcagggttgttggaataactgaaacaatgtttgtaaagctttagcacagtgcctggcaagcacttaataaatggctgtggtggtggtggttat

SEQ ID NO: 270606 - DNA, 507 bp, Homo Sapiens
  misc_feature (369)..(369): n is a, c, g, or t
  misc_feature (377)..(377): n is a, c, g, or t
  misc_feature (439)..(439): n is a, c, g, or t
  misc_feature (459)..(459): n is a, c, g, or t
  misc_feature (471)..(471): n is a, c, g, or t
  misc_feature (480)..(480): n is a, c, g, or t
  misc_feature (492)..(492): n is a, c, g, or t
ccttttatccgtggcaacttcctatttatccagtgagctgtagcttaaatattgcctactttttgaaatgctcacttattctacaaagttatactctccttctcctacatctcatagcattttacatatcctaccttcggaatatctgtttgtctgtccgactcttccatcagactgaccacttcaagtgtagaagacttttactctttgtctcatcaccccttaacactaaggcattatacctaacacataggagttgctcagcaaatgtctgatatggatgatgggtagatgggtgaccaactgttgacaacttgttgaaaagtataaaagatggaattttgcatctggctaccatggagtaggagntaacactnccattaagaaccactagaaaactagataaattccataagaacgtattgctggcatcagagantgctaagcagtttgtgaggnagccacagctgngtatacttncccctaggagantggtaaacctaaata

SEQ ID NO: 270607 - DNA, 283 bp, Homo Sapiens
  misc_feature (156)..(156): n is a, c, g, or t
tctattattattatttaagttaattagttttcctcagtatagtaagttgactctagtaaaactctaaatcctaaattctcgggtcagagtagatattgtcacctatttttcaactctggggtagttgagtgaactgttttcttatcgtaaagtaantagagtattttctgaggtactaaagagtgtgtctttttgcccaaaatagtaaatagccataaaaattttggaaagtcccatataataggaaagtttaaaaatgtgatttgtcatgggtgttagatga

SEQ ID NO: 270608 - DNA, 469 bp, Homo Sapiens
  misc_feature (24)..(24): n is a, c, g, or t
  misc_feature (34)..(34): n is a, c, g, or t
  misc_feature (53)..(53): n is a, c, g, or t
  misc_feature (65)..(65): n is a, c, g, or t
tgtgaagtgtgactggaatcctgnaacctctggnaaaaactggaacaggggantccctcctacgnctggagcaaagaaagtggttcctggagatggaatccaactcctggtgaaagatgcctgtgccacattgttgaaaatggacaacaaagggtttaagaacccattactgcaagtgccccaggtcccacccccagttctggaaagaagatctgtggtggggaatatgctatcaaacagtgtcacatgcctacagaggaatctttggtgaaaggaagagtcaatgtggcaaacttcattgttgccttattttaatagccacagccacctcaaccttcagcaaccatcaccctgattcagtcagcagccatcaacatcaaggcgagaccctctaccaccaaaaagattacaacttactgaaagctcaaatgatcattagcattttctaacaatagtttttaaataagat

SEQ ID NO: 270609 - DNA, 475 bp, Homo Sapiens
  misc_feature (76)..(76): n is a, c, g, or t
  misc_feature (395)..(395): n is a, c, g, or t
  misc_feature (416)..(416): n is a, c, g, or t
  misc_feature (449)..(449): n is a, c, g, or t
  misc_feature (464)..(464): n is a, c, g, or t
acagaatcttgctctgtcgcgcaggctggagtgcagtggccaatctcagctcactgcaagccccgcctcccacgtncacgccattctcctgcctcagcctccaaaatgttcctttctaaaaatacaaactcagaaagtatttacatgaagcattcgagtatttcacaaataaatgcttacctattctacattcaatacgagaattttaatctctattttaaagtacatttttaataaatatgcatatttgcaaagtatcctatctcttgctcttgatttattcagccattatcagtgtgtaatacttagctttgctttatagacttctaaatcaggggaaaaaatcatataaaggaaaggactacagaacaagctcttggactggcaacggtccnatcttattcacatttggtacncgtggttggtttagaagaatactgggaacatcnattcactccaaaaanaagtaactgga

SEQ ID NO: 270610 - DNA, 381 bp, Homo Sapiens
  misc_feature (18)..(18): n is a, c, g, or t
  misc_feature (34)..(34): n is a, c, g, or t
  misc_feature (50)..(50): n is a, c, g, or t
  misc_feature (61)..(61): n is a, c, g, or t
  misc_feature (69)..(69): n is a, c, g, or t
  misc_feature (110)..(110): n is a, c, g, or t
aatttgccccaatagccntgagccaccattcctnatgacacccataaccnaataggttccntaatgtgnatattagaaactgttaccagcctgcagttacccataatttncccatgtttgtggaattgatattgaaatagcagggctaaggaattactggcaagttttagcctgtgggtaataccttagggttatttaaatatttgtaattttatttaaatgttcatgaatgtttgaaaggaacaaaattatcagggatggctctttgccatgggtcttattttcaccctcttttctgtaagaaaaaagaacaatgtcttaatgtatttttaaagtttttggtatagtttctaattccaattttaataaaagttttatata

SEQ ID NO: 270611 - DNA, 492 bp, Homo Sapiens
  misc_feature (133)..(133): n is a, c, g, or t
aattggggggattctctgccctaccccactcctccccaaggcagtgatgacccccacacacacactggtagcccacccctctcacaagagatcaattgtggcccaacccccaactctccctggtgggaggagnaggtggatcaggcagatgggagggaaaccccatgggaatgtccagttgagtaccccacatgaaaactggggagccaggaatgtagggagaaacccgaagtggcagaattattggtccatcataacatactgaacttcaagacacttacataccagctgggggagggagaggagggtacaagaggtttggaaaatgagggtaagggaggcaaactggactagaggggctaggaggaggcaatgctggggaccagagcagcctggttccccaaaagcccaggctccccaccacctgcgagtaatgtcgtgcaaatgaaaatgtgatacaagaactaatggggactaactcctcagtaaaaa

SEQ ID NO: 270612 - DNA, 417 bp, Homo Sapiens
  misc_feature (237)..(237): n is a, c, g, or t
  misc_feature (370)..(370): n is a, c, g, or t
tttgttttctgctgtgagtttaaatgaaattgccaacagcatatacaatgtgtagggattgaattacactccctcctgttccatccacgggattatcggtactctcttcagtacccaaggtgaggcgcccactcctgccgacaccatgagagctgccagggagaagtgactgtccttggcttcgtggagtctggattcttctatcacacaatccacacctcatatcgttgccaggangggtatgggtgaaggggagcatgggatacaactgactgagcacagctcaaagcctgggcttccccaagctaacacaagcaaagcctgccaccttctcttggaagacccagttgcggcttgttttggaaaagtncagaatttcaacaaggcaagtgttgttttgggaatcagtggaaaatg

SEQ ID NO: 270613 - DNA, 373 bp, Homo Sapiens
  misc_feature (44)..(83): n is a, c, g, or t
agagctagcaccatgagcttcatttgagcccaggtgtttgagannnnnnnnnnnnnnnnnnnnnnnnnnnnnnnnnnnnnnnncaaaaattccagagcatctttggcttcctaggaaatagcctaaggctgtaaataaaccctggcctcatattcctgttgtcatttactggcgtagtagacaattcataactgggaaaatcctttgggtgtttttttgatgtaggttttatagaatcagaggttccaaaattgtgtttaacttgattctatagaagactataaaagtaacaaaggcaggcaaacaaggaacaaaaaccttttgtggccataaaatcacttatttagggccagggtgttggtgggctcatggc

SEQ ID NO: 270614 - DNA, 416 bp, Homo Sapiens
agaaagagaagcaaaattaacggtttgaaatagaagaacttaaagggcaactggggaaatgctgtcaaatcctcccagcccaatagtatgcccctcttgctccaacttcccagggttgtgggtagggatagagaaattatagccaactttcagaaagcccaagtcatggctaacattctctgcaaaccgctgtgtgggttacattacaggtgtcccattcatggggcactgtcttggaattgagcaaactctgggcaaatagaaggtggtcagacaagtccacaaaaagagattaaatgcataagcagggtggaatgggcagcttctctcgattttgcccataaaggaatccaatcacattgttggggaaagtcttatatctgaagaaatgattgcactttacattccttaggagg

SEQ ID NO: 270615 - DNA, 646 bp, Homo Sapiens
  misc_feature (101)..(102): n is a, c, g, or t
  misc_feature (114)..(114): n is a, c, g, or t
cccccatccaggggccactgtcctgggaattgagcaaaactcctgggcaaaatagaaggtggtccagaacaagtcccacaaaagagataaaatgccataanncaggtggatggncagccttcctcctcgattttgcccataaaggaatcccaatccacattgttggggaaagtccttatatctgaagaaatgattgcactttacattcccataggaggctttcctcaggatgggctggtggtttagactttgaaactatctccagctgtgccactacgaggccctctcctaggcgatcagttgcgcattttccctgatttacaggggcttgggggaaatgggatgaaaacaaaatcatgcatctcattgtggattggaagcacagaaatttctcagtcacaaaacttgcatacatgactgttcccctgatgactaactagaactaaaggaaattatgccttatgtgtatagatcatggattgcttgtgagtgatttttgttcccctccaaatatcagagactttctaggccaatgattctgaattacactggaagagattccatgaaccacagcatctccacagtgggcttttaattcagaacttccattccccaaagaaaacagtggaatccaagaattatacta

SEQ ID NO: 270616 - DNA, 109 bp, Homo Sapiens
ttaagactcagagtctcaagaaaaaaaagaataacctatcttggatatctaagtttgacacggaggtacatcactgaacgatgataagtttgtcatcaaatcaatatcc

SEQ ID NO: 270617 - DNA, 490 bp, Homo Sapiens
  misc_feature (24)..(24): n is a, c, g, or t
  misc_feature (36)..(36): n is a, c, g, or t
  misc_feature (49)..(49): n is a, c, g, or t
  misc_feature (80)..(80): n is a, c, g, or t
  misc_feature (132)..(132): n is a, c, g, or t
  misc_feature (238)..(238): n is a, c, g, or t
aaaaacccagccaaccaagccccngttgggcccccnagctggccctgtnccccgaacttcccctaaagtaaggggaatgnccaaatccctaactccactaagccagaaaatcctggttccaagtgaatgtcnaactagtaagtgcacaattctccctaacaaaatggaaaattctgtttactttaggagggagacttgggtgacctcaggttggggttgaggggacagcctttcctcnaaagtcttgacatgctttctccctgcctgtcagttctcccatccatggtgactggagattccaagctgggggttgcaacagagaagctgggttcatgccagtcacccaggcctgtcccccgctacctagaagacgagagagctcagggtgctacgtaccaactgtgctggcagagacgcttttctccacacctgggcaatgctagttaaaccagcatcttagcagcaaaaaggcgtctgccccacatgtgtg

SEQ ID NO: 270618 - DNA, 513 bp, Homo Sapiens
  misc_feature (361)..(361): n is a, c, g, or t
tgatgtattttggcatttacgatattgttcccacacatgaaactcacaaacgttgctaagttaaagcacctaacttttcattgactctagcattcaaaaatctcacaaaccctgggtctgtccatatcttaaactctatacaccagtttttttgccactgcatttattccacggcctgcatacagtgtgatctgggcatatatgcaagaacacttaagtaaagttctgcatgcttgattgagaaaaagacttttattctaaaaacaaagaagctatatttaataatctttttgggaaagagaatattttaccaacattcccttgtctacactgcttggaataagcactttgaaataagacnagcactttggaataagacaagacggtatacagaataataaatcactgggcattaggcaaaggggttgacttatttgtggtatcatggatcttagatttactgatcctcagatttttaaattcctgctggattctctttctcaaaaccaattt

SEQ ID NO: 270619 - DNA, 942 bp, Homo Sapiens
  misc_feature (162)..(162): n is a, c, g, or t
  misc_feature (298)..(306): n is a, c, g, or t
  misc_feature (706)..(706): n is a, c, g, or t
  misc_feature (716)..(716): n is a, c, g, or t
  misc_feature (732)..(732): n is a, c, g, or t
  misc_feature (801)..(801): n is a, c, g, or t
  misc_feature (903)..(903): n is a, c, g, or t
  misc_feature (919)..(919): n is a, c, g, or t
aatgatagactggattgggagagtgtatgtgtgccacatttccttgatccagtctatcattttggacatttggtcaacaagaagaaaatttagtcctgaaaaataattttttataaaggctgacattttggcccagcattgttgttgttattgactttattntttttttacagcagttttaggtccacagcaaaattaagcagaaagtacagagaggtctaatgtgttttggttattttaaaaattaatagactacttgttacataaaacaaagtaggttttcttgcttgttttgtcnnnnnnnnncagtaacactctaaagggtaaatttattttgtctgcaaatcaagtgtgcatacatgttgccttgttttctcttcacttcaaacatgtaaaatttcatctagaacttaattttgtaagtatttgaggaataattcatacctttattatagcagataaaagcctagataggacatttaaaaaataatttctaaattgtaccgcaattattttaatttcagaaagctttcctttatcatattcttatcttttatttttatgttttaatggtttaatagattcgacttttagatttgaggggacatgtgcagggttgtacatgactatattcatgatgctgagataggggtatgaagatccatcactaggtgcgcacatacaccgataggtgtttcagccatgntgcgttcgtntctcctctagtatctnagctgtgtcctctactgatagacccacgtagccaacaatgagatttggattggactgtctaagtactcnttgggatggcgggcatattatagaaaaaattttttcggccgaatacattcccattgcggcgggttccttgacgcgtagcgactctgaaaaaagtacggcttngatccggctagcgacnatccccgtaccgtctgcggagtt

SEQ ID NO: 270620 - DNA, 435 bp, Homo Sapiens
gctcaagtgatcctctcacctgtgccaccatgcccacctagtttttgtagttttagtagaaacaggatttcaccatattggtcaggctgaccttgaactcctgagctgaagcaatccacctgacctggactcccaaaaggctggaattacaggtgtaagccactgcacacagcccctaactttcaatatatttgcaacaacccattatcatgtttccaaaaattacaacagcctcactcatcattattgggttgtagtttttaaagaaaaaaacaggacaaggaagctgtcctattactcctttgtgaaatccactaaaaatcactgatgctcctttggtaaagatagacaagtggaaaatacaccaataagagaattaaaaatcctacattaggactcgattccttgctttaggagtttgggactgggtggaga

SEQ ID NO: 270621 - DNA, 389 bp, Homo Sapiens
ccacttttgatcaggcatattatgttatggagacatcctaaagaagggagggtgagtaggcagggacttccctccccatcaaaaatttcatcattgcacacttacatcgtctgacatgattagacggtgtgtggtcccttcacaggatccctcaagccttcctgagggttagttcgtttgtgcagtgaaacatcttccctgtaagaatgctactacctaggagctggaaacctgcatatcatcactttattggttgactctaccattattatttttttaaatgaaacactttgaatgtggccttattaaaaacagaattaaatattagtaaatcataaatataattatgtaagttaaattctaacgataataaagaataaataaaagac

SEQ ID NO: 270622 - DNA, 365 bp, Homo Sapiens
agtaataatgacagtgaatgacagcaagcttgaagaatggcaatagaatagctaactttccttgagtccttattatgccccaggcacttttcttaatattactttcttaaagctcgaacaattctctaaagatggctcttatgtttgaggaaactgagactcaaagaggtttacttgcccaggttggacaaccacaaagtcgtagaaccatgaaaaaataggctgggtgaggccagccacggtgggttcacacctattaatcccaggcactttggggagggctgagggtggggcggatccacggagggtcagggagattcgaggaccatcctggggtccaacatgggtgaaaccccgttcttcta

SEQ ID NO: 270623 - DNA, 382 bp, Homo Sapiens
tgaatagtggggtgggctggatcagctcagtggtcccttccatctggataatttcatggttgtataactttgtcaactagagaagcagagttctggtgctcctttggataatatatgcctctcgctttaactgccttcaatgtggtccttctttcaattctgctctccttctttggtgccattgcacagctaaaagggctgttttgaattggaactaagcgaacaaagttctttctgggctgtgtctttggcctcctgcaaagcctcaggcatctaagatgtcaggagctgggctgccctgctctctatcccagagctgggaggaccaggactgggcaaagacattgcttcccagttctcctttgcagcattcaagaccttt

SEQ ID NO: 270624 - DNA, 437 bp, Homo Sapiens
  misc_feature (66)..(122): n is a, c, g, or t
  misc_feature (426)..(426): n is a, c, g, or t
ggaggactagtctaagggtcatggatgaggatttttgtcatgaattcactactgtttgcctaggcnnnnnnnnnnnnnnnnnnnnnnnnnnnnnnnnnnnnnnnnnnnnnnnnnnnnnnnnntgatcatgttcaatgtcctttcctaatctgtcattctgtgaagtggtgcttccaggtcaaggaaacaaataggtcagaatgttcctgtggtcattgttctctttaggctcattttccatgaaatagttgtattcctcttcctgtagcacactcaggttaagttggagctctttaacctgggcattcttcccaatacttcattagaaataccgcctgcttcaaaatcacctttgtttggcactatctactacagcgtaatagacttctgggctcaggagaagtggaaagctgtggggaggaaaantaggaaggatt

SEQ ID NO: 270625 - DNA, 470 bp, Homo Sapiens
  misc_feature (17)..(17): n is a, c, g, or t
  misc_feature (24)..(24): n is a, c, g, or t
  misc_feature (49)..(49): n is a, c, g, or t
  misc_feature (57)..(57): n is a, c, g, or t
  misc_feature (65)..(65): n is a, c, g, or t
  misc_feature (92)..(92): n is a, c, g, or t
  misc_feature (176)..(176): n is a, c, g, or t
tcccccccttgaaatanttcacancctaattgaatgggtacttggaatncccatganggttggtnaataaaccccggaaatactacaaaaantgaacaatataatgttccccaatatggtaaaacagcccccgggtgcttgtctgccccacaggagtaggggaggttggggcatgnagacactggggacatttgctctcatgtctacttaatttgtctaggaatctttgtagaaaacactattgtgaggtgagtgacagtgaagcaggtaccagatggcgatttatgatttaggggctcgtcgcatgtggagcccagcagctgtcctggttctacttcctgacagaggtctggggagcacacttgagcccagttttgagattgcgaatatatttttcttctccatcttactagatcttttggcagtattagacatactccctccttgggagagctttatcttaataaact

SEQ ID NO: 270626 - DNA, 241 bp, Homo Sapiens
  misc_feature (28)..(28): n is a, c, g, or t
  misc_feature (196)..(196): n is a, c, g, or t
ttttaatatttaatatttgccctactgnatggagttggccattattgaagccaggtggtgagtacctaagaattcattctactatttttctattttcatatacctttggaatttactatcataaaattatttttaaggtatatattttaaaatcttctctgttagctagtccttctcttgaaccacattcttcaanagttctcccacagctaagttataaagagcggaccacttttggcag

SEQ ID NO: 270627 - DNA, 791 bp, Homo Sapiens
gaatttagaatgttacctttgtttttaatataacttaatttgaaagatattattttaatgattaacttgaaattttaacaattggttcacaagccaacatgccatgtgcctgtgcaatcaattccatgccatatatacactttttttcagataaggaaaaggtaaaaatacagaatactacatggattatcaaggttaaatctattctttcttaacatgacaggaaagtaaagctttgacccgcaggggagactggagaggggaagttggcctgtctgttcccatttcaggagcaggctaagagtgtgtttctggaaacaaaactgtcagagtgaaggctcacaagaaatcagaaacaggacccagatctctacccaagggcttataacaaaggctcaaagcaggcttttttccaaaaatgtttttaattccaacatccatcttaatggcctactgtagcctaatttagccaatagctgttattctaaaaatggaagctaatgattccagctaaaaacaacgaagccggtactatcacagtatgttgtaagaaactgattatcatggggtgcatttttcacttccttttctctgaagaaaggcttagtaagagtcccacatcaaaagcaaaagcatttctttctctcacgggaccccagaataggaggaatgtgttctctagaggcaaccacctcccagaactactctttggcaagatgcatcagacgcacggagcgatggtctggctgaagggcaccacctgctattgctcatcatattcgtgccattca

SEQ ID NO: 270628 - DNA, 448 bp, Homo Sapiens
  misc_feature (103)..(103): n is a, c, g, or t
  misc_feature (342)..(387): n is a, c, g, or t
ctttttactgctattctgtcacatttaggataagttcactgagaatgagactgtattctgtgcatatgccaagtcaatatatttcacaatcatttcgtatttnataatatagtgaacaaaggcaccaacaatttatttaaatcccaagacaatcactgattctcctattttacacaatttatccctaacattagcttcttgaacttgtagctttcaaatgaactgtagactcttcactgacatgaaaagataccagatatcttaccagcacctgctaacaccaacaaaaccagaatttgtgaccctgactacaaaatgtatgtggggccgggcatgcgtgtnnnnnnnnnnnnnnnnnnnnnnnnnnnnnnnnnnnnnnnnnnnnnncttgaggtcaggagttcgacaccagcctggtcaacatggtgaaacaccgtctctactaaaa

SEQ ID NO: 270629 - DNA, 540 bp, Homo Sapiens
  misc_feature (391)..(391): n is a, c, g, or t
  misc_feature (407)..(407): n is a, c, g, or t
  misc_feature (428)..(428): n is a, c, g, or t
  misc_feature (456)..(456): n is a, c, g, or t
agaccccattctcttacaaagtctctattataaaagtacatccatcaataccattccatttaaaatgggctattgtaatttacccacattatcacattttcaggaattataagaatgtgttttattgtactccttccttggagctgaatgcaaggaatgtgaattctgaggaattaaggtagaatatatttgactttctggtaaagatcatggttaagtataatcattactgccaaactggaattttcaagttattataatatcccaggccccttgataaaagctgagggttatcatgaccttaatgccaattcaatgagaaatgagtttaatagcataacattaccaaggtaatcaaactaataaaaatccatatatcttccctgcatcntgtcactgtgtaccantcaaagtgtttataaaactcnagattcatcaaatgagatttgctcagcnttttgaaatgttaagatgtgtttggagaaggctgcatgactttgtttttcccttttagcaaaactaaataaagttgtcaaatat

SEQ ID NO: 270630 - DNA, 478 bp, Homo Sapiens
  misc_feature (452)..(452): n is a, c, g, or t
ctgttagaatgcccagtttacctggatggcaacccaacagtgctcctgcccacctgcccctcaatcctcctagaattcagcccccaattgcccagttaccaataaaaacttgtacaccagccccagggacagtctcaaatgcaaatccacagagtgacccaccacctcgggtagaatttgatgacaacaatccctttagtgaaagttttcaagaacgggaacgtaaggaacgtttacgagaacagcaagagagacaacggatccaactcatgcaggaggtagatagacaaagagctttgcagcagaggatgggaaatgggagcagcatggtatggtgggctctgagataagtagtagtaggacatctgtgtcccagattcccttctacagttcccgactttacctttgtgattttaatgcaacctcctaggaccccttcagcagtctccacnacaccaacagccaatggggcaggttt

SEQ ID NO: 270631 - DNA, 416 bp, Homo Sapiens
  misc_feature (297)..(297): n is a, c, g, or t
  misc_feature (358)..(358): n is a, c, g, or t
  misc_feature (375)..(375): n is a, c, g, or t
  misc_feature (389)..(389): n is a, c, g, or t
atctgaaatgaaataattgcttttcttccctgtcattttatcttcatgattagaactgatcttccatttaactattacagaaagcagtaactattgcaactatctaatagttcacacaaaagaattaaaagcttaaaaataatttttaggaaacacaatattcaaaatctaaacacactgataaattattaagattaagattatttatgtgataaatgaaatctcctaccaatccatccagcctttaccaggggaagaaaaggcaattatttcatttcaggataggaaatacaaaanaattaaaaaatacttttcttagggaggccaggatatgggtttaaatgttttattatccctnatggtcctaaactaatngggttcacccaaanggtaaaattccatttttccattttacc

SEQ ID NO: 270632 - DNA, 759 bp, Homo Sapiens
  misc_feature (358)..(358): n is a, c, g, or t
  misc_feature (366)..(366): n is a, c, g, or t
  misc_feature (602)..(602): n is a, c, g, or t
  misc_feature (618)..(618): n is a, c, g, or t
  misc_feature (638)..(638): n is a, c, g, or t
  misc_feature (645)..(645): n is a, c, g, or t
  misc_feature (651)..(651): n is a, c, g, or t
  misc_feature (661)..(661): n is a, c, g, or t
  misc_feature (671)..(671): n is a, c, g, or t
  misc_feature (680)..(680): n is a, c, g, or t
  misc_feature (710)..(710): n is a, c, g, or t
  misc_feature (717)..(717): n is a, c, g, or t
  misc_feature (727)..(727): n is a, c, g, or t
  misc_feature (737)..(737): n is a, c, g, or t
  misc_feature (743)..(743): n is a, c, g, or t
aagtggcaaaacctggtacaagaacgcttttgaaaagctaccttcggtgaagccttgatcctgggaaatggcttcgaaaaacttgagaacatagtttaaatattctgttactcaagaatagtgaaagaaatatatttcctattgtgggaaattatttctgagtagtttcggtagagcataaaaatgtattattaggggatcaaaataacgttttatgtcatttagatacaaagacttggcatgcttctgaaataatttataaatggacatatctgcgtgtcctcttgtggtgttgtgatacatactggttttcatccaccacggttcctggctcataacacccataaccccattaccngtgttttngttataatatagggtacgttaggtctcagaaaataatctctgatcttctcctgctctccttacacgtgtcccaaggcaagattctgatctttacccagctttctgattgtaggtcttgagatcctctcttagagagagggtgttggccctataccccggggaagggaagtaaggtttcctatatggaagcttttattaaaaacccaggagggccaggggcgcggtgggcttcacgnctgttaattcccagcnttttgggggaggctgggggntgcgagncaaatnacaagtttangggatttttnagaccaacncggggcctttcttgggttaaaacccccaanttttaanttaaaaattnccataaaaanttaggntggggtttagttggtt

SEQ ID NO: 270633 - DNA, 312 bp, Homo Sapiens
  misc_feature (33)..(33): n is a, c, g, or t
  misc_feature (109)..(109): n is a, c, g, or t
cgtgtaacccatcaacttctctgaacagcgccnatcttctcaagactcccttcagagacaaggccctgggcagaggcaggggacaaagggcttgggggatgggctggtncctgggggcatgctcaggcttcttgctgcctaggaaatgtgcccactgggggcttagaggcctgagtgtgccactgcaggtggacccagggcagacatgcagccctggaaaagggcacaacggcagtcacaagaatcccggacgtggataccactcatagagctcactaacccgccacagcaccctgactgcagagtctttct

SEQ ID NO: 270634 - DNA, 408 bp, Homo Sapiens
  misc_feature (271)..(303): n is a, c, g, or t
  misc_feature (386)..(386): n is a, c, g, or t
ccttagtacttagtttatctcattgagcagcactgacagtgagttcatggaagatacacaaaatgtgtggaagatcagtgttacaaactatgacaagtagatggctgtggttagaggactttctctcaatcagttgctccatctcagagttatatggtgagaggtggcttgcaactgcctgttgcctgccattggctgctttgctagtgttacttatgtttgatcctcagtacttttgtgatttgaactttgagtattaaataaaaatagnnnnnnnnnnnnnnnnnnnnnnnnnnnnnnnnngaaacagggtcttgttctgttgcccagtctggagtgtcatggcatgattcatagttcactgaagcctcaacttcccagactcnaacgatcctcccacgtcagcct

SEQ ID NO: 270635 - DNA, 382 bp, Homo Sapiens
  misc_feature (15)..(15): n is a, c, g, or t
  misc_feature (24)..(24): n is a, c, g, or t
acgggctgtgttatncccccatcnaaagactccaggccaccctgcaaacctaaggaccatcatcaagccccttggaagggcccaagggggttgagaagcagcagttgccagagcagccttttgagaaagctgccttccagaaacagaatgaatgaccccaagggcctcagcctcccactgtgtctcccatccgttccagccgccccccaccagcaaagaggaagaaatctcagtccagggcaacagccagctgctgctatcttagatggttgaaaactagacgggtggctcactgccattgtcaccaggttggaactcttgcctctgtgaggatgccttctctactgtgcatacccatgaaatttaatacacattttaaaac

SEQ ID NO: 270636 - DNA, 625 bp, Homo Sapiens
  misc_feature (85)..(97): n is a, c, g, or t
  misc_feature (579)..(579): n is a, c, g, or t
acagtaaaaataatacttggaagacagctgaggaaaaaggcgccaataagacaaactcacagatgggatttatctccctcttgcnnnnnnnnnnnnngcccctggtaaaagtcagaacctgggatgaccagaaagtaacaggacagatttctcccagcaaatcagtctccacaaccaaatgaatattgttctccaaggagtcaagctatagactcacaatgacaacgtggccatggctcaaaacactctctgaaattacaaaattgctttctgagccaatttaaaagtcacatgattgaatccaagctattttactttaaatggtccttttgctttgcacctgagacctcgcttggccacagacgtcattcgctggactccctgggcactaaatgagtgtctagcatccttaaggctgctcaacacacagccccagactctgaatatgattccaagaaatattctgaaaaaagtcacatcgctggaataaacagtttcccaagataactgctttgaaaaccagtcccgttagtttctaaaagcccactacggcaccttccttccatcagagtctgcctnccgggtgggctgggaaggagggagatacaaagaagaaagtaggcat

SEQ ID NO: 270637 - DNA, 484 bp, Homo Sapiens
  misc_feature (16)..(16): n is a, c, g, or t
  misc_feature (29)..(29): n is a, c, g, or t
  misc_feature (37)..(37): n is a, c, g, or t
  misc_feature (116)..(301): n is a, c, g, or t
aaacccgaggcctganggttcaaagggcngggaagtnacccagccaggggaagaaaagatgtaaccctggggaggcctaagcccagtcctagcccttttcacaatccttctgcccnnnnnnnnnnnnnnnnnnnnnnnnnnnnnnnnnnnnnnnnnnnnnnnnnnnnnnnnnnnnnnnnnnnnnnnnnnnnnnnnnnnnnnnnnnnnnnnnnnnnnnnnnnnnnnnnnnnnnnnnnnnnnnnnnnnnnnnnnnnnnnnnnnnnnnnnnnnnnnnnnnnnnnnnnnnnnnnnnnnnnnnnnnacctccttccttatacaaccttaacattgtacctgcagttaacagttgccctttttctggcccattttttaaagcattctttttgctcctcctccccacatgttccagcactcctgttgtgtgcttcttggtaatactttgaaagtgctcaagttcattgatgagaattttaaaaagaaaaaa

SEQ ID NO: 270638 - DNA, 450 bp, Homo Sapiens
  misc_feature (412)..(412): n is a, c, g, or t
tgaaaatgaacttcttccagctgcctgtaaaatggggtggagttggaacagccagcttctgggcaaagatggcctttgaaagagcagaacagcagctctctgcactgaaccaaaccctcctgcctgcccctccttccccacctacctaccccacccaccccacaccccacagccacgaggaccagtgctgctgccacccacgaggccctgtccttggggccagaggcaggcctgggtttattgcaggtggacctgagcagcccttgcatatgggaacaggatgatggggtcaggagggacctggctaaaggcagctctggacaagggagcaggcagtccagagaactggcctccccagcccactccacaggctgtgcttctaggactgtgggcccctgtgtggcccatgaangttgtgaagtcaaataaattaattttatcttaaaaaaa

SEQ ID NO: 270639 - DNA, 440 bp, Homo Sapiens
  misc_feature (16)..(16): n is a, c, g, or t
  misc_feature (35)..(35): n is a, c, g, or t
  misc_feature (45)..(45): n is a, c, g, or t
  misc_feature (175)..(387): n is a, c, g, or t
  misc_feature (389)..(389): n is a, c, g, or t
gttaattaatatatgntacaatgtctttgttttanatctttgcanttggctatttaaaactttttttaaataagcaaattagagattctgtttggggtgcaattcctgtcctttggggaagtactgctgacctttaagaatagtgggtaattggccgggctcagtggctcacacnnnnnnnnnnnnnnnnnnnnnnnnnnnnnnnnnnnnnnnnnnnnnnnnnnnnnnnnnnnnnnnnnnnnnnnnnnnnnnnnnnnnnnnnnnnnnnnnnnnnnnnnnnnnnnnnnnnnnnnnnnnnnnnnnnnnnnnnnnnnnnnnnnnnnnnnnnnnnnnnnnnnnnnnnnnnnnnnnnnnnnnnnnnnnnnnnnnnnnnnnnnnnnnnnnnnntngccactgcacaacagcctggcgacagagcgagacgctgtccaaaacaaaca

SEQ ID NO: 270640 - DNA, 424 bp, Homo Sapiens
  misc_feature (72)..(72): n is a, c, g, or t
tcccctggaaaacgtccaagtgaaagctgctgggttcccatcaaactttgggccagccgggttgtcgctgcnagggaaggaacccaataagaatttctaaaggaaacctgatcttgctatcaattgctgctgcttaaatggcaggccaactggtcagctgctgatcagggtgtctaggctgaaggagttggagaccttgtgctaggtaggtgaaccagaaaccaccctcgccaccaagactcgctcccaacctggctcccggcaacctcaggtgccttcctcgcccaggtctttcaccctttctacagaaactacctcggtctggatctccccaccaccagcagcctgtgcaatatttattggtctatcaatttctcccgtctcctgtcccaaagtaataaatcatgtttaataagtctgaaaa

SEQ ID NO: 270641 - DNA, 425 bp, Homo Sapiens
  misc_feature (35)..(35): n is a, c, g, or t
  misc_feature (40)..(40): n is a, c, g, or t
gaaaccgggaagccccccctggaccagaaccccanggggncagttccttgaacctttgaaaagtaagagaaaagggagaaaaaatgagcccttttggaaaaataaagggaaaaaacattaaaccttaagttgtaacccatgaagtaagttatactttgttaaatgtgcctgatttttaaggtatcatacatattcccactcttcttctggatgtgtctgattgtaggctgtaaaattcctctactaccccaacccaggaaaggtataaaagaagactgtgcttcgttatggagtaatatgtgtatacatgtacacaaatgcacacatgaacataaaagcagtataggatgcggtacaaggatcccaaaagaagtctaaaaaattgctagtttcttttgagtgagttcatgatagtgagcaagtca

SEQ ID NO: 270642 - DNA, 170 bp, Homo Sapiens
aattacccatgtttacctttctgtttgttatttgtttgtctattcaactttcctcctgtaactcagatgtttcttctggaaccatttcccttcttcctaaaatatgtcctttggaacttcctttagtgagagactttggataataaaactctcatttttttgtgtgcttg

SEQ ID NO: 270643 - DNA, 438 bp, Homo Sapiens
  misc_feature (24)..(24): n is a, c, g, or t
  misc_feature (70)..(70): n is a, c, g, or t
  misc_feature (86)..(86): n is a, c, g, or t
  misc_feature (108)..(108): n is a, c, g, or t
  misc_feature (150)..(263): n is a, c, g, or t
ggatttacggaatttaaaaaacgnactccacctaaaggggaaatttggccccctcgaggcccaagaaatncggccacgagccccancctaaacaagactgttttcccngtccaatgaacatgggacgctttccccatttatttaggcttnnnnnnnnnnnnnnnnnnnnnnnnnnnnnnnnnnnnnnnnnnnnnnnnnnnnnnnnnnnnnnnnnnnnnnnnnnnnnnnnnnnnnnnnnnnnnnnnnnnnnnnnnnnnnnnnnntggctttcttaattttatttttgaattgttattgcaagtgtatagaacagagttctttattatccccatctggcactagcaagccacactgggggcacaaactgtcaccaccacagccacctctaaggttgacagtgggagactgtaggcactaagtgaaaagttgcaacattca

SEQ ID NO: 270644 - DNA, 617 bp, Homo Sapiens
ttaagagagaaaagaacagcctttcaaacatcagttcctcaaataaggggtgacagtgctatatggctcccttttaatctcctcacctactcagttatcaaatacctccaaaattagacaaataagggccagagacaaagctcccatggtgaaattgccatctttcagatgtgccttttcaattcactggtttttaatttccccattcctgatttactgaggagtaaaggtgagaatcatccaactgatgacaaagtaaaacaggaaaacaggataaacagctagggctctgcggtttggaggctggctatcagcaaggaaagctgtggaggcaactatagaccaggcaaacatcacaatcaccacaaaaagccgaaccatgaagtttacaggtcctggatcagccaaaagtaccagccggcaaatcagcattgctactgtcaagggaagtatacagtaacccagcacacagaggctctgaaaaaaagatatggtccctccaagaagttttgagttgaggtgatggtaactgtaccaaaccagacaatgacaaacacctctgcaaattggggccctccatctttttcactatctgcagagtctctttgcagcattaa

SEQ ID NO: 270645 - DNA, 566 bp, Homo Sapiens
  misc_feature (164)..(164): n is a, c, g, or t
  misc_feature (185)..(185): n is a, c, g, or t
  misc_feature (285)..(285): n is a, c, g, or t
  misc_feature (384)..(384): n is a, c, g, or t
  misc_feature (393)..(393): n is a, c, g, or t
  misc_feature (403)..(403): n is a, c, g, or t
  misc_feature (415)..(415): n is a, c, g, or t
  misc_feature (423)..(423): n is a, c, g, or t
  misc_feature (434)..(434): n is a, c, g, or t
  misc_feature (440)..(440): n is a, c, g, or t
  misc_feature (470)..(470): n is a, c, g, or t
  misc_feature (483)..(483): n is a, c, g, or t
  misc_feature (505)..(505): n is a, c, g, or t
  misc_feature (523)..(523): n is a, c, g, or t
  misc_feature (535)..(535): n is a, c, g, or t
  misc_feature (548)..(548): n is a, c, g, or t
agggtccctccagtgctgaggggaaggatattgcctttagtcctccagtgtaccctgctggaattctgcttgtgtgcaacaactgtgctgcctaccgtaaactgctggaagcccagactcccagtgtacgcaagtgggctctacgtcgacagaatgagcctttngaagtacggctgcagcggctngaacgagagcgcacggccaagaagagccggcgggacaatgagacccccgaggagcggaaggtgaggcgcatgagggaccgtgaagccaagcgcttgcagngttgcaggagacagacgagcagcgggcacgcggctcagcgggatcgggaggccatgaggtgaagcgggccaatgaaaccccggaaaagcggcaggcccngcttatccnagagcgagangccaagcggttnaagagggngcttgagaaanttgacntgatgttttcgagttcatttttgccagggnccttttttccatngcaaccttttgcagttgaattnaatttttttccagttgcntttaagttgggnttggattttgggncaaccagtttttttgggg

SEQ ID NO: 270646 - DNA, 366 bp, Homo Sapiens
  misc_feature (21)..(21): n is a, c, g, or t
  misc_feature (41)..(41): n is a, c, g, or t
aaagccaagccccaagatccngcctccagcaaacatttccngccgcccaaagaagcagccccagtggagggatccctatttcctgtttttcctgccgatgatcgcccaacccggagtatggaggcctttggacttgcccccattttgcatcttaatctcccttagtttttcatcctgcactgtgcatcattcatattggagccgaaagcagttcaaaatgccgaggattgcatgcagtcttcactagggatctgacgcttgagggctgtcgcttattgcttattggaactggtagaatgcacagtatctttcagctttgttattcttatttaaagaactattaaataaacttcacttggcacaact

SEQ ID NO: 270647 - DNA, 201 bp, Homo Sapiens
tcacgggaattgttcgctttagtgccggcgccatggggtcggagctgatcgggcgcctagccccgcgcctgggcctcgccgagcccgacatgctgaggaaagcagaggagtacttgcgcctgtcccgggtgaagtgtgtcggcctctccgcacgcaccacggagaccagcagtgcagtcatgtgcctggaccttgcagctt

SEQ ID NO: 270648 - DNA, 427 bp, Homo Sapiens
  misc_feature (22)..(22): n is a, c, g, or t
  misc_feature (140)..(294): n is a, c, g, or t
cttagattgcctccactgatgnccccataattcccgtgaaacgcctgccctactgaaaaaacaaatccccacaccctttattttattttccttattttagagacacggtctcatctggtaccccaggaggagtgcaccannnnnnnnnnnnnnnnnnnnnnnnnnnnnnnnnnnnnnnnnnnnnnnnnnnnnnnnnnnnnnnnnnnnnnnnnnnnnnnnnnnnnnnnnnnnnnnnnnnnnnnnnnnnnnnnnnnnnnnnnnnnnnnnnnnnnnnnnnnnnnnnnnnnnnnnnnnaagaaaacttttcaataaaagtttcgaatagcaaaaattctgtggtcacaaggtctatgtatatgcactatagagacaggaagacacaatttaatataaagaacaacatttcactgttaaataatgctgtaac

SEQ ID NO: 270649 - DNA, 600 bp, Homo Sapiens
  misc_feature (357)..(357): n is a, c, g, or t
  misc_feature (387)..(387): n is a, c, g, or t
  misc_feature (415)..(415): n is a, c, g, or t
  misc_feature (456)..(456): n is a, c, g, or t
  misc_feature (473)..(473): n is a, c, g, or t
  misc_feature (526)..(526): n is a, c, g, or t
  misc_feature (530)..(539): n is a, c, g, or t
  misc_feature (546)..(546): n is a, c, g, or t
  misc_feature (553)..(553): n is a, c, g, or t
  misc_feature (572)..(572): n is a, c, g, or t
gagtctttactatgtattacgaacttatagcattttccaaagtttaattgagcataaaacatttttttcacaaaagactttacaagccaagtattccagagaactttaaggagcacttttctaagtaaatcttttggaccttaaagcgatactccttgactgcttttatctacccctgatatgggacactgactgtcacctaagagggtggtgtgtggtaagggcacagccagggaggcatggattaggttctggttgcagtgtcccactgaacatcaaaaggaatacagcagacatccctgcaggagtgcccttggccggcggagggagtgggcctgggaagatgcatttagaggngcatattgagatgcatgaggagtaggtgtnggagaacattcaccagttctaagactgnctgttctccatttgagacagcgtttccttggggtgtttganaatgggattggttggcncatccttagaccttaaggaatttaagtgcctttacctgtaggccaaaaattgnggtnnnnnnnnnnaaaaaantttgctnaggccttggaattaccacngttagggaactgggggttgattccccca

SEQ ID NO: 270650 - DNA, 677 bp, Homo Sapiens
actcaggctatggacaaggacagccccaaggttgggaagacctggccttagtcgtcctcagcctagggcagggcagtgaagaaagctctccccgctcctgctgtaatgacccagagtagcctccccaggccggcatcttatgtgtgtcttccaccatcctcatggtgggcacttttctaggcctgtctcccagcattgtgcaaggctcggaagagaaccaggaagtgaaactgggtgaaaacagaaagctcaatggatgggctaggttccccagatcattagggcagagtttgcacgtcctctggtcactggaatccacccagcccacgaatcatctccctcttgaaggattttatttctactgggttttggaacaaactcctgctgagaccccacagccagaaactgaaagcagcagctccccaaagcctggaaaatccctaagagaagccctggggcaggaagtggagtgacaggggacaggtagagagaaggggccaatggccagggagtgaaggaggtgcgttgctgagagcagtctgcacatgcttctgtctgagtgcaggaaggtgttccagggtcgaaattacacttctcgtacctggagacgctgtttgtgggagcacctggctcatgcctggcacacaataggtctgcaataaaccatggttaaatcc

SEQ ID NO: 270651 - DNA, 225 bp, Homo Sapiens
  misc_feature (49)..(49): n is a, c, g, or t
tctgtgcatctggtagaactcttggttactgaataaatagttcctgaanaagtgagagagtgccagctggaaattagatttctgatgaataaatcaaaccctattaagagaaccaggttcaagtaattttaaaaccacttgaattttcataaatgttttgttaatgactaattataaaaaacagtgactagctggaggcttttgtgtgtttgcttttgagtcagc

SEQ ID NO: 270652 - DNA, 439 bp, Homo Sapiens
ggcaatgaagagtgaaccccaatgaagagtgatcccaactttggaaactatctggtcattcatgaccttaaaaagctgccatggtggtcaaatggcatgtgtttgcacaaaaatgaccgatgtgtttaaccaaagctttgaaatgtgatgaagccaccaacataagcacttgcctaacagaaatcagtatttcttcctacttagaaggcttggggcccagggtaatgaggcaccagatgaagataagatctgcatcaaggaattaaatttccagtttgtccttggggttctttctggcttatgttttttcccccccatctggtaatagtcctcttctgaggaattgaaagggagggcacaggaagtttgcggaggaaaggacccagttcccccagtcttttgccaccctttgcacctgggttgttttcggggttccttt

SEQ ID NO: 270653 - DNA, 533 bp, Homo Sapiens
  misc_feature (101)..(101): n is a, c, g, or t
  misc_feature (150)..(150): n is a, c, g, or t
ctgagcctagttctcacgaggaccctttcttgcccacagtttcgagaggcccgtgccatgagaccgcctggggtgagcaaggcacctgggctgctgccgantggtttggccgccgcgggacacctgtttccttcccgcagtgtctgcgtnccgcacagcatacccagctcggacctcctaggacagagactcagcgaacccttgctgggaaccgctgagctgaagttcttggaaggctcccacccaggtgccccgttggaaagcagatatttcccggacccagcgcggcctcaaccaggggcaggaaagagtggttatttatgtacttaaagtttcattaaagataaaatcggaaagttctggggctgctaaatgaattgggggagggaacacctgactctccttagccactgtcccacctccatccacacacagaccacccccctcaacttccccttctgtcctgggtgagttacatttagccagctgctgttaattggttctccacaaataaaaatgtaatatatttattc

SEQ ID NO: 270654 - DNA, 439 bp, Homo Sapiens
  misc_feature (35)..(35): n is a, c, g, or t
aaatggggcccatgtgaatgcaagctgcctctgtncttccccctccccctggggaaaaaccccaaaagggaagcaaacagggaacctcctgcaactggttttaatccgggaaaagatcatccctgccctgcagatgctgttgaaaggggcacaagaaattggagctggagaagattgatgaaagtgcaggtgtgtaaggaaatagaacagtctgctgggagtcagaccctggaattctgattcccaaactctttattactttgggaagtcactcagcctccccgtagccatctcccagggtgacggaacccagtgtattacctgctggaaccaaggaaactaacaatgtaggttactagtgaataccccaatggtttctccaattatgcccatgccaccaaaacaataaaacaaaattctctaacactgaaactcaatt

SEQ ID NO: 270655 - DNA, 418 bp, Homo Sapiens
gttacattaatttaacatgcatttatagaagaatacattcaaagcactgatgtaggagatacacggtacttggagcagtcagccaaaaatcacagatactgctttcacttaaatggaaacaattctccgataatgctttgctttttttcttatgtcactcttgtgtactatctatttttctcctctctgggaccaagtttctttttataaagcaataatatctctgtttccatttcagaacattgtgctgtctgtcagcatatgtatatcagctacaaaatatattcaactttgacttcttttgacaaaggactttaggaaaaagaggaacaaagacattatttgagaattaaattatatatttttaatatgactgtgaccttgactgataataaagatgtaataagaattgcaagct

SEQ ID NO: 270656 - DNA, 760 bp, Homo Sapiens
  misc_feature (52)..(148): n is a, c, g, or t
  misc_feature (179)..(269): n is a, c, g, or t
  misc_feature (278)..(278): n is a, c, g, or t
  misc_feature (323)..(323): n is a, c, g, or t
  misc_feature (463)..(463): n is a, c, g, or t
aaagagagacacattctcgctccatcatctaggctagagtacagtggcatgnnnnnnnnnnnnnnnnnnnnnnnnnnnnnnnnnnnnnnnnnnnnnnnnnnnnnnnnnnnnnnnnnnnnnnnnnnnnnnnnnnnnnnnnnnnnnnnnncagctaatttaaaatttttctgtagcaacgnnnnnnnnnnnnnnnnnnnnnnnnnnnnnnnnnnnnnnnnnnnnnnnnnnnnnnnnnnnnnnnnnnnnnnnnnnnnnnnnnnnnnnnnnnnatgggccangtgtacccggacctgatatgacatattaagtgactgtcttaattnggtttcaaactgtccttttataaataatctagaggcacactggacttccagaaatgcccaaatttgtaagcaagaatttgcctgtcttaaattgcagattcctatatagcctctcacttgtaaagggaccccaaacatcnttttgaaggcagctgggcccctaggtccataagtctccagttttctgcaaaggactattcaagaaaacaaacggggctgggagtggtggctcaaaagttaaatccaccaagtgcaatgtgggagcctgagctggattctggagcagaaagaataggtgaaatttggataaagcctgggagtttagtcatcagttattaatgtgcagggaaactgggtgtgggtaccatgaatattctcttttctatctatgcaatttttctgtaaactgaaaattattcccaagcaatagtttcctt

SEQ ID NO: 270657 - DNA, 802 bp, Homo Sapiens
aagtggggagtgatgggcaggttcggcagcctaacattgttcaggcgcatggcccctgcggtgtgtacacgaactcggcttcttttgtcctaggtacgccaagggcaggtttctggagactcccttgtgcccgggatggcaagggcaccgggctggcgtttccacatctgtcttcattagcagaaaagtgatgatggattttatttcactcacactccagtttgtaataaaatgccaaattctgtcagctatccaaacaagccaccatttgttcttgttgcttctctggatccagaaatgttgccattcttggaaactgtcccattgcttcgtatttctgccaacgtagctctgcctgcctgtcaacccctcactgcactctgctcatcacgggaggatacctgtgtgccggcagcccctcagggactctcagccctggcactggcaccccagggttggccccgtcagcagaggcttggctttcgagccagtgggtgtctctcctttgggcctgggcggcttgctcctgccagccatgccttcagggtaggctctgagcaagctggcgaacagccctggctgctccaaaaccaaaaagctgggtcctctggaggaggggcgagctgtggagcagccacccactgctgccccaagctcactcaggaattcacacccgcctggtttcttgaagtgtgctgggtccttccctctgctccctactccccaccacggcagagaataggctttctaagatgctgcgatcccgttctgctgcccgtaataaaaatgctctcagactctg

SEQ ID NO: 270658 - DNA, 529 bp, Homo Sapiens
  misc_feature (15)..(15): n is a, c, g, or t
  misc_feature (35)..(35): n is a, c, g, or t
  misc_feature (58)..(58): n is a, c, g, or t
  misc_feature (71)..(71): n is a, c, g, or t
ggccggggaaacggnaaaatgagggagtccaaccncgggcaaagtcccccagcggaancccacgacccttnccccttatcctccgggacctccccaatgtgactgatgaaaagttaccccacatgctttgccagggggaaaatggtttaagccatgtattacctacatccttaatccacatcctttgtaaaagcccaggagcattttgaaagtcacgttacagacattgtttaaacatagtctgtatatacccaaagtataggacgttgtatcatctcatattaattagttagttggctcaaaattagtgcctaatgaccttagtaattcagtgatttctgttagctttaaaacctttatttcagaactatttcacctcttggttttcatttttgctgtgtgtcactgcctgccagctgctaatttattaactcccagtgaatcacgtgtcctgtgaagggactgaatattagtggcaaattatgttgatgatttatattttgaataaatagtttgaatacatagaaaa

SEQ ID NO: 270659 - DNA, 275 bp, Homo Sapiens
  misc_feature (217)..(217): n is a, c, g, or t
  misc_feature (250)..(250): n is a, c, g, or t
tgggattacaggtataagccactgcacacggccttactatgctatcaattccatatatggaaaggtgttttccctttcagagctctttaaagctctgcagaagatttacatgtgtttataggagctaaggagaaatcaggggcatgggaaattgagtgtgtaataaaaattaaactcttcatgttattattaatcatggcattaacttcttatcttncatttcttctggaagttggcctaggaggcaccnttcacagctaggggaaggctttccc

SEQ ID NO: 270660 - DNA, 409 bp, Homo Sapiens
  misc_feature (212)..(212): n is a, c, g, or t
  misc_feature (312)..(312): n is a, c, g, or t
  misc_feature (348)..(348): n is a, c, g, or t
  misc_feature (377)..(377): n is a, c, g, or t
  misc_feature (386)..(386): n is a, c, g, or t
ttcggcacaggtatgaatggggtttaaaatcagaattaacatttgccaccccccgtggaagtttgaagattttaaaaatagaaatgtacatttttcaagctgtttttcttatgtttttgaaggaccatttttaattagctctttgatacaaagtaactcagaacgtcaaaacctatacccactaaagggaaggctgccgggaaggaagatgngaacaggaatggagcctgtctcaggaaggccagctgcaggtcctccagaaaatcaaagaagggaacgaaactctgagtttgaggtacaggggcttcgggngtgcagacgtccctccagggcccatggtcagtattngcacctgtgttatggaacccccagatgcntgtgcaggngcagggggcgggggctgctgttt

SEQ ID NO: 270661 - DNA, 824 bp, Homo Sapiens
  misc_feature (46)..(61): n is a, c, g, or t
atcttttaaactttattacaaaaaatatgtgctttttggtaatacnnnnnnnnnnnnnnnnaaagatagggcagatagccccaacacactaccctgcacacagaaaataatcattggtcttcactagtgaaataagcagtgggttgctaagggccaacttgcctgaacaggtacacaagaacctcagagcccaacccattgtgaagaaacatgggttacttctgaggttctagaattcccagaagctctgcttcagcactggaagcttttgctcagcagtttgcttcatagctctgtgaagaagctgtggcccacactggggtcccctcttttcctaaatccagatgaacaggtttctcttggctaatgagtctttatctgcttggatctgccagaggtgagtgtttgatctaggcttcaggtaaatacaaaaggggtctcccttaagacatttcaggccttgaagaaggaagaccagtctctccagtcacccaaaccaatctgagtcagaatcaagagcagctaaacaagtccaactcggagagctcctgaaccagttgatttctctagtcatagctttacagtcagagggtcccactggcttggcacagtctggtttctacttattttagccactcaacatttatacctgatgctgccatgagatgaaaaagtaggcttaggggttctgtagaagcccaatgaaggtttgtcccaccaattaaatgtgagggatccttgtgtggttaatgtgccaaggaaagatgggagatgggaagatgtgatgtgttcagaaaacaacctcagaacacgacagagcctca

SEQ ID NO: 270662 - DNA, 162 bp, Homo Sapiens
ttgtactttactggatgactgtgaagcgatgagtattgggttggggtaggtgtgttgattttgagagtgcatgttaagaactgaaggggaactacttgagatgacttaagaagcatcccatgcaaatatctttttttgccctaataaaatattcagaaagat

SEQ ID NO: 270663 - DNA, 282 bp, Homo Sapiens
  misc_feature (147)..(147): n is a, c, g, or t
tttacaattaaaattgggtttattacatgttgaaattgaagggacaatataagcccatcacttacttttctcctgattgtcaagtacattctatttatgacttttaaagctggagttaagattattactaaactggccatgagccancccccctggcctatttgtagttttaaatcagtattaacagaagccaaatgtgtaagtaaagtcagccatgaatagaaaagttcattaaaaatccatttcatagcttcttggcgttcagtgtaaatacaaaaagga

SEQ ID NO: 270664 - DNA, 509 bp, Homo Sapiens
tatgtatcctttttttaaaaaaaagttcgagtctgttgcactaggctgtacatgactaaagttgacagatgctatgctagatttataatcactagttctggtacttgtgtctttgtatgatcaaagcatgcaataagcaatacaaaataccaagccttatacttaaaagaagtttaacatattggttaatatactggttaatatactggttaaacatattgaatgtatataagtggcaaaactagatttttaaggaagtgtacattataatattggagctcagtactgcatgaagagacttcattaaaactaagaaaacatttatttggggagaaattttaggcatttaagaacttgtatttttctattttaaaaagttaaattattccgtaatttggaagaagtttcgttgaatgtaggacataaccgtttgaagggttttcatttgaaaaattgatgtattttgtgccttaatattttgttcttttaataaaaatgctctgaatttg

SEQ ID NO: 270665 - DNA, 502 bp, Homo Sapiens
ttatcttctatctagaccaactaaactttcttcataacagcagcaagattgtttagctttttatcattcatgtattcactggagcagtactttaaatttctttccagaacacttcctttgcattcacaactcggctaagtgtttgttgcatgaggtctagctactggcctgtcttgcttacaacatgccttcctcactaaggcttaattatttcttccttttgggttaaagtgacaggacatgcaactcttctttcactggaacatataggagggctattgtaggggttattaattgggccacattttaatattaataaaaagcagcctgagaaaaagagagagaagagaaatggcctgttgggggggcagtcagaacaaacgcgtttgtcaattgtttgctgtcttatcctggtgtgatttgtggttcccaaaacaatgacaacagtagcattaaagatcactgattagagatcactataacagattcaataacaaaaagg

SEQ ID NO: 270666 - DNA, 496 bp, Homo Sapiens
  misc_feature (16)..(16): n is a, c, g, or t
  misc_feature (144)..(144): n is a, c, g, or t
catgaggattggggantgaggtggctcaacttttacgttttagtttcctcactagctaaatataaccttagtgaatggagtggtacggaaggaatttgtcagagctgctacggaggtccaaacatcctaagtgaaagtgcatcntaaaagttcaaattttaaaattaatgtaaggcactgaaaacgtgaagaaacatgtattgagtacttattataagtaatgtaccacagctttaatggttgtttaaaagatgcattagggagcaattgaaaataaaaggaatagctacagagtttgggaaggcacagggaaaagagtggctcagtatcgaagataaaattcgggagaagacacaatcagattttgagagatggacaagtcaaccttagaataatttcccttatttaacctgtctttcccctaatagcagcacactcatctttcaacttgctttttcccacgttacatatataatttgggagaaggaacaaaaaa

SEQ ID NO: 270667 - DNA, 300 bp, Homo Sapiens
  misc_feature (31)..(31): n is a, c, g, or t
  misc_feature (59)..(59): n is a, c, g, or t
gatttatacccccattattgttttatttttnaattttcattcactcttctgtttggatncttttgctaattaacgtcctatgttaatttccaccaagctataagtccatagtcagtaaaacattccccttgggctgtcatgagataaaagcagtgtcatctccgcatgttggagcagccaagaaatagtttggtactaccgacattgtctaatccatgtcacatcctcatacaatttaattgctcaaccatgcatttaaaactcctcaagaaaggattggtactgcaactgtaggtaaac

SEQ ID NO: 270668 - DNA, 439 bp, Homo Sapiens
  misc_feature (99)..(112): n is a, c, g, or t
  misc_feature (115)..(207): n is a, c, g, or t
attcggcacagccctgtctagaatgccagactctctgctgaccattctctctggtcagaactggatcactttatttgatgtaaattgtatttgatttannnnnnnnnnnnnnaannnnnnnnnnnnnnnnnnnnnnnnnnnnnnnnnnnnnnnnnnnnnnnnnnnnnnnnnnnnnnnnnnnnnnnnnnnnnnnnnnnnnnnnnnnnncgtgtgagccacagcactggccataaattgtatttgatttttacagctacctgtatttagccatgtgaaagtgattttccacttatgtcagagatacaaagtttcgtttagggataaattgtaaaaaagaatataggcctgggtggtgggctcatgcttttaattcccatactcagcttgagtaccggaaccaagactagtcgaggcaacatagtgaacctcatttctttaa

SEQ ID NO: 270669 - DNA, 455 bp, Homo Sapiens
  misc_feature (37)..(37): n is a, c, g, or t
  misc_feature (40)..(40): n is a, c, g, or t
  misc_feature (84)..(84): n is a, c, g, or t
  misc_feature (88)..(89): n is a, c, g, or t
  misc_feature (439)..(439): n is a, c, g, or t
agatttgaattctccctgggacagagttcccggaggntgnaggggccaccatctttgctgtttgggcgacttagctgttccggntatnnagcttttggagagcccacaccaaccaggggtggaagcagtgccccagccagcacagctgatctgtgaaagcatggacagactgcttctttaagcagttccctgatcccgttcctcctgactgggtgagacctcccaacccagggtctccagccttgtcctgcaggcgcatttgggctggcaacaggtctgtacctcgctgggccggagctcccagaggaagaggcaggatgacatctttgctgtttcacagccttcactggtgatagctccaggtactggaaaatccaaggagactaggaactggagaagaagcccagcaaagtacagcagcccttacagaaacatgggncagattgtttaaaaaa

SEQ ID NO: 270670 - DNA, 441 bp, Homo Sapiens
  misc_feature (326)..(326): n is a, c, g, or t
  misc_feature (412)..(412): n is a, c, g, or t
  misc_feature (427)..(427): n is a, c, g, or t
aaccagaagtggacgtgcatgacagtggacctagaggctgacaaacaggactacccgcagccctcggacctgtccacctttgtaaacgagaccaaattcagttcacccactgaggagttggattacagaaactcctatgaaattgaatatatggagaaaattggctcctccttacctcaggacgacgatgccccgaagaagcaggccttgtaccttatgtttgacacttctcaggagagccctgtcaagtcatctcccgtccgcatgtcagagtccccgacgccgtgttcagggtcaagttttgaagagactggaagcccttgtgnaacactgctgcggaaaaaccaggcatcctgttcccacgagggactgggccccttaaccaaggagttcacatttggcaggtgccagnggaattcctcccagnagggagctgggagg

SEQ ID NO: 270671 - DNA, 456 bp, Homo Sapiens
tattgacctataacctgattagaatatgccagatgggaatcaatattgtacagaaagttgtacagaattttttacatagaaaactttacatctgtaccatatacattttgtccatctgaaaaaattttctacatccactgttaatacggaatgcttgacaatcttgtcttttaaccatcagagcacaattcacagtatgaatacatttccagtaaatctaacctccgcaaaccatggccagatttgttattttaatatattcaacgttaaattctggtacatagaggtaaaatctacatcaaggccccaccacccaaaaggaaaagaaaatgacagcaatctggattcattttgcagtgattcaagttttggtccataaggatcattctattttaatggctcatctttaaaagtcctaagagaaatatgtgacaggtagttactggcagtagggga

SEQ ID NO: 270672 - DNA, 456 bp, Homo Sapiens
  misc_feature (138)..(171): n is a, c, g, or t
ggagcccaatgccagatagccacatccagatgcctaggggtcgctgggaggattaagggacttaatctgctaggaacacctgtacttgaagtggaggaggctagggggccacagttgctgcttcattaacatagaggnnnnnnnnnnnnnnnnnnnnnnnnnnnnnnnnnnagtggattggcagactccttgttgcttaagagtggctttctaggcagccactggcatctgaattcatcattgacaataaatgtaagaaattggaataaaaaagagagacctgctgttattcgcttttgttctccagtgatttgattaactcagggcaaggctgaatatcagagtgtatcgcactgaagaataataatccattcagtaatgttatagttatcctcaatctaaatatgtcaactgtcattttgctacttttcaaataaaatacttgaaaactgtcaa

SEQ ID NO: 270673 - DNA, 477 bp, Homo Sapiens
  misc_feature (444)..(444): n is a, c, g, or t
cagagtttaatgtgaatcatgagatgagacaaaagcctcctccagggcgatgggaagacccagccccaaaccagactcttgagcacgcagccctaaaccagactccgggaaggggctgcgtggtcatgcaccgcctaagactcagaggtgaagatgggaagacccagccctaaaccagactcctggaaggggctgcgtggtcacgatcgcctaagactcagaggtgaagatgggaagacccagccctaaaccagactcttgggaatagggctctggtgggccacccatcggccgtaaggtcccgggggatgggagaacaggcatgggacaggggacctcggcacaaagggcatgttcggggaggggcctccttttcccaagggcacagccccaccctgctcctttcttcagcccacggacggggagcagagcccattgtccganggccgtgcccccacacaggggtgggaccaaggg

SEQ ID NO: 270674 - DNA, 230 bp, Homo Sapiens
tgtcatagagtggagttggtgctgaaaatagaacagtgcagagtggaactgcagtgagacccaggagtcaattggtctggttctgaacccctctgagagtcagggaaaagctttatgcaaacattttcttttccattttcctctcagtgtaatagattttaggaattcagtcagattctgattttctacatacatcttcctctgatcagacagaatgttttctttagaac

SEQ ID NO: 270675 - DNA, 340 bp, Homo Sapiens
attcggcacagaactggagtggtatacagtgctgggatgggggtgggtcttgagttgaattctgaagtgtgattggctaaatttgctgttgctgctgttgtaatatcagctgatgatgggaaaactttggaaggtggtgaatgaagaggaatctgctgatgttttattagagaatgaggctgaattggagaatatgaagctgtgagagaaaaaaatgacaattagtactgatttcaaaaatacagaaatttttaaatcactctaaaggaaaaagtgttcattatcagaaggtcataatcatcagaattctattacaagttttccaaacaagagtaatttg

SEQ ID NO: 270676 - DNA, 447 bp, Homo Sapiens
tcggggacatctaccgccaacccagctgcttttggcaggactccaagccccagcgtggggaagggccctggagaagccctcatcctcatgcgaaccacactgccagtgggtggggaaggttgttgtccagctaccactcccggctcctccaggtcctgctggctcctcgggggccagggttccctggacctcccagttctgccgccttggggccagccagtactcagagaggaggaccttctcaaccacgtacagaacacgggttttcatggctgcctttggtttggttttctgagaagataggattggattggattttgcagagggtgagaacttctctgtgcctgctcagaggcgccctagggaagggccatgtttgagttttgctttgtatgttgttttgcaagtatctgcctggtactttgatttaaaataaaaacaattttc

SEQ ID NO: 270677 - DNA, 604 bp, Homo Sapiens
gttgccaacatattaaaatatgagcttatgttacaaagtcccagctttctgacttctcttgaaatatcagcacatttagcaagattgggtcctccctagcaccagcagcagccactgaggagcagctggctcctttggaagggcaagctgtgctcagtgcactagggtccccacctgttccacttcatttaggtaagtcatctgcctggcccctgtaggatctgagtttatggccccttgttgaaacccacagaaataacctaattaagtcctatctcataaccagttagtcacgggtgaaatcatgaacagatggtttaaggtgaacatatgttgttgatctggtttctcttacttcattaaccattttgccagcatttgaaacagtctaatcatatgtcagaaaccataactggagtagaagtttatagggtgataatctagagtatctttgaactgtttatttttaaattccaagtgaaagctgctttgaggtttgatctacagttcaaggtagaattttaccagctcagtaaatgtgagttctaagcatgttccgaattctgtgcctcacacatttctgtgatgccagtgtattagaagg

SEQ ID NO: 270678 - DNA, 472 bp, Homo Sapiens
ggcagagttctgaaaggcagtgtccatctgggttttgaggcatctgcttcttagtggaaaaaactgtctgagcaaatacaaggaagtgaaaaccagcaggttgtgtgtacacaagaatggctaataactgaagagatggtccctctaaggggcagataagtagagctgattagatggcaggaggcagtgagagggcagagaggagccaagttgaaggaacacctgacaaccaattcacctttggctgcaattgcacgtgtccatgcctcagtaagaggaaatgtcttctaggagcctgaaaatcccggggctgaggatgatacatgggacctcatccaaagcagcaagtataaaggaagaggcaagatgcaggatgcagcatgggtgttcaaatgcagagaggagggcagtaatagtggtgataatagtggtttcagcctttgacgctcaacaattgcagcaaaaaagttca

SEQ ID NO: 270679 - DNA, 391 bp, Homo Sapiens
  misc_feature (21)..(21): n is a, c, g, or t
  misc_feature (326)..(326): n is a, c, g, or t
cacttctgcccaaagtgcctnggattataggtgtgagcccactgtgcccaagcctagtgacctgtttttgaaaaaaagaagccacattaccctcccttgttaatcacttatgtacaaaaatgccatgttttgcctgttgatctgttttaactctttctacataaataacacatttgtacatgtatatgtgcagatatatttataatgttaaaattgtgtttaagtgatgtttactaaacaggataaaattttgtttggaaaattgcgatgtgaaattttatctagttaatctatagtcctttcccttatggtgtccagctctatgncagctctgcctcactccagattatgtaaatatcaattcatattcaaatgaatttgaaatttagct

SEQ ID NO: 270680 - DNA, 526 bp, Homo Sapiens
caagtgaaaagctggagataagagtatgctaggtaatgtttaaaagcttagagacagaaaagggcaatgtatgttcaaagaccacgaggtaaaagtgatgtgagctgaggctggaaatgaaggcagggtcagacctcagagggcatgtcctcttcttgcaggtttgcattgcctggacacatgctttccgccacacgtatatatggacgatccttaaaatttgttaacaaatgactggagttagcctgtttgctttgagttatttgatgagcatgtttgatattgttccctgtcttccttatttccctcttagatctgagacttgttattagagaaataggatagtaaattaagtttcgagtactctattatgttacagatatttgcttgtccaatgagaaatccttaaaatatggccttttctgtatttatagattgtctttcattaacaataaggcacaaaggcatcgcagaaacgatgggaaaatgtgatgaagagcatcccaagagctgaaaatgcattggc

SEQ ID NO: 270681 - DNA, 480 bp, Homo Sapiens
  misc_feature (29)..(29): n is a, c, g, or t
  misc_feature (76)..(76): n is a, c, g, or t
  misc_feature (127)..(127): n is a, c, g, or t
  misc_feature (228)..(228): n is a, c, g, or t
  misc_feature (232)..(232): n is a, c, g, or t
  misc_feature (270)..(270): n is a, c, g, or t
  misc_feature (272)..(272): n is a, c, g, or t
  misc_feature (401)..(401): n is a, c, g, or t
cttctgggctttcaagctcagctcgtcgnttccattccaccaatttccagggccaaactgagccctgctctggccnatggctccagccggaaacaagagctgcccatgttcgtagccacctgaagtnaacccgccggggaggtctctgtcatctcatgtacccgctggcaggtgccccacagcaggggagccctgggctctctctgtcccaagctcccagctgcatcnaacntcagctcacagttgtggatcaccctgaccttccagagntnccctcccaaggggcagacccagcatcctggagtccccaccccgagctgtgctgaaggacagctggggcggtagggccaggaccagaccaggcctctgacaaagtctcatcgaaatgaaaccaatgtgcncggccaccttaaggggccctgaccaggaaagttaggcctgaagctgccaatgccagatcctcagggtgttacctgtgtc

SEQ ID NO: 270682 - DNA, 365 bp, Homo Sapiens
  misc_feature (22)..(22): n is a, c, g, or t
  misc_feature (44)..(44): n is a, c, g, or t
  misc_feature (68)..(68): n is a, c, g, or t
tggattttggcactggaattcnagccctggataacaggatgaanccctgttcccaaaaataaaaaatnaaatcaaagacacttaaaaagatggggaaaaggaaggacaggcacttaagcaagttataagctactttcctaactacacaagtggaatcttaagctgaggttcccaggagttgactggagccagagaagacagacctataggagcacccaattggagtcaccctccatagtagcccatatgtcttacatggatcagctttcgtggggcccttttactccatctggggaagggcgtcagatctgtggctctcatgtactgctcagtacactgccattcccagttctttttttcaaaaa

SEQ ID NO: 270683 - DNA, 357 bp, Homo Sapiens
atttatggattgcctaccacgtgccaggcaattagtagttgctccagagagtattgaacaaaaaagacaaaatccttactctcctggagctggcattttaggaagtggacagcaaatgcttaaactaggggttggcagattatggcctataggtcaaatccatcttgccacctacttttgtaaataaagttttattggaacacagccatgctcatttattttacttactgtctatggctggttttacaccacaatggtagagttagtagttgtgacggcaaccgtatggcctgcaaagcctaaaatatttaccatctgggccctttataagacaagtttgccaacctatggcccaga

SEQ ID NO: 270684 - DNA, 417 bp, Homo Sapiens
gcagtccttgggcagcgctttgctgtggaacacgagagctcctcctcaggggcctggcactcaccttctattctgtatgatgtatttggttaaacactgtcaaataatagagatgtgccagatttagattttcttaccctaatctgtttaatattgtaactttattccatttgaaagtgtcaagcccattcagataagctataatctggtctttaaggaacacaactttaaaactgcagctttcttttatataaatcaagcctctgttaacttgaattccttatagtacatattttcccatctgtaatgacgaaattttgattctaatattttttctattatttataagtgcaaattttttaaaaaagtgtacagctttctaaaagtaataaaggtttagcataaatacagccaaaa

SEQ ID NO: 270685 - DNA, 271 bp, Homo Sapiens
  misc_feature (144)..(144): n is a, c, g, or t
  misc_feature (163)..(163): n is a, c, g, or t
  misc_feature (211)..(211): n is a, c, g, or t
  misc_feature (220)..(220): n is a, c, g, or t
  misc_feature (239)..(239): n is a, c, g, or t
  misc_feature (258)..(258): n is a, c, g, or t
ggttgcattcactgatgttgagcaaccaccacctttaactatttccaaaacattttcatcactccaaaataaatgcctgtacacactagcagtcactccctatcttcccctccacctgtccgctggcaaccacttgatctcccnttttatgtctgtggctttnttctattctgggatatttcatataacgtgggaattacacaataatatngtggtcttngtggtgtctgggcttcctnctggaggacagtagggaangggggggcttggg

SEQ ID NO: 270686 - DNA, 357 bp, Homo Sapiens
tcgaggctttagtcatacaaagaaaatggcctttctgtattgttcttctgtgctctcataatgcttaaccatgtcttttacttaaacaattccaggaactggccttaggagatccaaatagggaaccaagattgcagagtgtcccatcttgggagggaatgctgaataattaattgatttacagccttgttgccgctggccagaccacccaggtggcccattactcgagatgatcatcacaaccagatgatgctaacctatatcctctacccttcgcgtgctttgtctgggaaaagtcttttggccccatgtcaatttctattgcattgagagcccaagagcccctggtcagtcagg

SEQ ID NO: 270687 - DNA, 417 bp, Homo Sapiens
ctgtcccctatgctgccaacatgcagtctttgtttatgtctttaaaaatgtccatgtttatgtcatgtctgtgaattgctgagtactaattgattcctccatccttgaatcagttctcataatgctttttaaataagaaaaattcagaagatgaatttcttccaatatttgaataaattaaagctcttagatacagagtagattgtattatatgctttttcctattaatactacttatagaaatccattaaaaagcaatctctgtacagtgtatttaaatatttcattgacatactgtgatctctattagtgatggatgtacaaaaaatgttttcttacccttgacttacaatgaaatgtgaaattacttgtctgaaacccgtggggagaaataaataattttcccaaagttcaaaa

SEQ ID NO: 270688 - DNA, 698 bp, Homo Sapiens
  misc_feature (618)..(643): n is a, c, g, or t
actccgctttttccatgttaagaatgaaattatcttttaagtgaaaaaaacataggcactggcacttacaaagggttctttctgtgtagagaacagattggatgagtgtgtgtgcgcgcatacactgagaaggagggttggatcaactaaatcggtgctgaaaattaaggacataggtcaagatgacagagtaggaacttcaggagttagtatcttcaccaaagtaactattgagatggcaagaactgcttgaggtgatattttaggactctggggtctaatgaaacacttgcagtgtccagaagagtgcttgatgaagaaaaaagttggtaaattttagtgaattttggcatttggaatagcatcttatcattctctagctcccatccctgtggtaaccaactgttgggatggcagtttctgctgcagcttgctggtgctagggcaggaaataggggctttgtcctccaaaaattgaagttatgtgtttcgttcactacttttgattgctgaggagctgccagagcgctggccactgtttcacacatgcacaccccctgactgaagttgcctacctagtggcactagacaagtgaacttaaagggagagaacactcnnnnnnnnnnnnnnnnnnnnnnnnnnattggatctaagcatttaaggaactctctgtcaagtcattgaaagaccacagaga

SEQ ID NO: 270689 - DNA, 452 bp, Homo Sapiens
atcctattatccaatccaactgataccaaatgagatgcaaattttgtttgatataagttagcttgttagcatatcgctagaggcctccatccctgtattctaatgtttttactcaaagctctagcctttaggataggtgaatatgtaaatcttttatcactttctcaaattcaaactaaaggggaaagatcaaaccccttcccttcctacctgttttctgagctggctgacttgccagccacaagctgctcttgcagagttcttaccattcctgtaaatgttttgacttgttgcagaaattcctatctactttattaagcagtattgatctgactgtggaaacatcctctcacttgcattcttttaacttaaaactatttaagaactgatgttccgattattgtatatatttttctaaaaaccaaataaagctacctatgaaaatgaaaaaa

SEQ ID NO: 270690 - DNA, 179 bp, Homo Sapiens
gaaaagaacactgttaaaagaactgcaagcatgatgatatggaaacaccttccaaaatactagtttgaaaaaatgtatgaaatatcaggctgagttatcctcaaatatataaaaacgaccatctactagtgatagaacaatcttatagctacagacattttttcacccaataaaaccct

SEQ ID NO: 270691 - DNA, 369 bp, Homo Sapiens
  misc_feature (37)..(37): n is a, c, g, or t
  misc_feature (50)..(50): n is a, c, g, or t
  misc_feature (73)..(73): n is a, c, g, or t
  misc_feature (153)..(153): n is a, c, g, or t
cctgccatgtattacaacccagaatacagtgtttggnaccctaaatctgnttgtgccgtcctgcatcaaaggnacatttgccttcactgggtgataaccctttgatggaaatgagatatgtcccaagtaacggttaactgtgaagttacacancagtagctgacttcaaagtgcctgttctgtaaattttattttaaactgttaccatagtcttaagttgtttatgctttatcagactggctaatgtgaaagcataatattatgaagtttattctgccttatgagaccttaaaaaatggatttcattttacaggctaatgttgtaactgactagtatgtaaaataaatcattcctgtgtataaagcagc

SEQ ID NO: 270692 - DNA, 258 bp, Homo Sapiens
aactgttccatcaggaaaaaaatgtgtcagttgattttggtgtgacttgtgtaaatggttcatggcaatgacgttgggttgcttcctaggcctggctgagttgtgcctaagggtggctgaaatactaaaacacttatcttacagcaagtgaacaggggctacctgccacatcccctccacagatgcactttaaaaagccactcatgctttggcttaaactgtaattaatttattttatgtacaataaatcgcatttga

SEQ ID NO: 270693 - DNA, 680 bp, Homo Sapiens
  misc_feature (406)..(422): n is a, c, g, or t
ggaacctgaaatgcctgcccaaaagtgagaatgaagtttggagtggatttttcctgcaaagccccccagatgacaacctcagccccggcctaacacccctgatttccagcctttgtgataatttgacccagagagccccagagaaccctagtgagcctattaaataattgtaattaattttaagctgcctaagtctgtggtaatttgtcctgcagcatcagaaaactcatatagcaggccatgtgcagtctctggtgcagatttttgctctttttttctacttttcttggataatagttaaacatttacaaacctttattaacttgtgggccataaaacaaaaacaaaaatcaggccacaagatgagctgtcatttgctgattcctgccctagagtatccactttnnnnnnnnnnnnnnnnntggccaccacacctgaccctttccttctttttctaattaaaataaacactcattgagtactttctgtctgccgtggttttcctccaaaagaacatactttatagtaaaactaattttactactgaaaactccccaaaactttcatcaaaattattattgtacttttaagtagactgaaatatctgtttatttaaaatttaacataaggatcttcactttttaaagaaatttgtcatgacttttaaaaatatgtacagg

SEQ ID NO: 270694 - DNA, 373 bp, Homo Sapiens
  misc_feature (297)..(297): n is a, c, g, or t
  misc_feature (349)..(349): n is a, c, g, or t
atgagccactgtgcccacccagaatttccttttttttaaaggctgaatattattccactgctgtatataccacattttattatccattcacccatcgatggacacttgggttgcttccacgttttggctattatatgtagtgctgctataaacatgggtgtacaaatatttgtttgagtccttgctttggattcttttgtggaatccaagtgggaattgctggatcacacggtaatcctatgcctaattttttgagaaaccactagggctgttttctatagtggttacaccaccttnacatttcccgcctgcaatgtaaaaggggttccgatttctctattaacctcgncaatgtggttttcacacaaaaagt

SEQ ID NO: 270695 - DNA, 138 bp, Homo Sapiens
atctctaatctcaggacaagcacggagggtcatgtaagtagtatattcttattgttcaacttagttatctttagaacatgactgcttaactaatatttgagtttgacagtattaaaatttcaaggtcatttagcagtc

SEQ ID NO: 270696 - DNA, 131 bp, Homo Sapiens
aatcattaccccaatagcctttcacctctggagagctggattcaatgcctgttaagatacaagtgaaaatgagtttggtggtctcatcctaaacctatcggacaagttattccttatacagaaaagcccca

SEQ ID NO: 270697 - DNA, 435 bp, Homo Sapiens
ggcagaggacttggatgctctccaggcagcagagtacttctacccgagcacagactgtgtggactttgccccctcagcagccgccaccagtgatttctataagagggaaacaaactgtgacatctgctatagttaatagaaattacagtaattcagaacatgacatgggtatatctatttttctaccacgtctagatgacactgcaaaatatgcaacttggtaacacaatatcccaagcacagtttacatgtcactatttccaattttctgatgctaagcattcatatgaagtcctcagacccggtcacagcgccactcctactttgtatgctcatagtttaaatttttgtaggaaactttcaattgttttactttttgtataacgaacaaatgctgtctccttttttactaataaataattttgtattactaaa

SEQ ID NO: 270698 - DNA, 337 bp, Homo Sapiens
  misc_feature (34)..(34): n is a, c, g, or t
aatttaattaccgactccactatagggaattttngcccctcgaggccaagaattcggcacgagctggaagataatgttttctaggttaaagcctttcctgctcctctctaggcaaatagattttggtttcttctgcccacgagagggttgcagaaactcatattcctgggcaatgaggccaggtgacccctaggaacacagtcttcattgcctcaaactggccttcctccctagtctagctgtcagccgtcatcacgctaccaccatgccacagtgggatcagcattattctcattgggtcttctacccaggctgacattgttgaaaagaaacctgg

SEQ ID NO: 270699 - DNA, 378 bp, Homo Sapiens
  misc_feature (171)..(171): n is a, c, g, or t
  misc_feature (338)..(338): n is a, c, g, or t
aaacccatgtactcttcggccttgtttgctgatgtacttgggtacaagattctcttggttcgtccatttccagctcttagaagtattacatggtaatgaaccgtatgaaataattgcataattttcagttaatattattgagaaagcttcgtactctgagtgtgattgtcnatttaaagttgaataaatttaggatgtccatttctatggattaaggttttggcccaaggagtatgtcgctgtaggcataacaatgcttttgtaaggaaaatgacctttcccaggaacttaacctatactactacatggcagacctataatactatatggggtaaacnaacctaagatattggggccagggtacagtgggctcagggc

SEQ ID NO: 270700 - DNA, 403 bp, Homo Sapiens
  misc_feature (22)..(22): n is a, c, g, or t
ggatactaatttaaaaatctangaaatcttaaaagaaattctccaagagactaaaacagtactggaaatctagcttgccattccaaacacctagtacaccatggatactcaatagtaaaaaacaaccaatcatggatatatttctatgttgaatctaaacctagaaatccaaataatatttggaggaaatcaaagaacaaagatcttttcaaaccaccaaaatctgacggacttaacaattaaatgctattaaggaaagtaattccgccttcctccatgtgagaacacagtgaggaggcagtatgcattcagaagaggaccctcaccagaacctgaccacactggcaccctgatcttgaacttcctagactccagaactatgagaaataaatttctgttgttt

SEQ ID NO: 270701 - DNA, 236 bp, Homo Sapiens
agagagctagcaccatgagcttcataccctgaccttgtgcaggcctaggttaaggtgtgtgtatgtgtcttagttttgtttttttataaatatgaggtctcacaacgttgcccaatctagattcaaatttcaggactcaagcaatccccccacctcagcttcctaagtagctagggctacagctgtgcaccattgcgtccggcttgtgtctttgtttttggtaaagttttaaaagt

SEQ ID NO: 270702 - DNA, 728 bp, Homo Sapiens
  misc_feature (15)..(15): n is a, c, g, or t
  misc_feature (29)..(29): n is a, c, g, or t
  misc_feature (34)..(34): n is a, c, g, or t
  misc_feature (688)..(688): n is a, c, g, or t
  misc_feature (701)..(701): n is a, c, g, or t
  misc_feature (704)..(704): n is a, c, g, or t
ggtagtctaactttnaccttgcacaggtngcctnaggaggcatttaccaaaaaccagaagaagggaaggcagaaaagtcgccacagagagaaaaggctaacatctctaacagaagaagctacactacaagtgggctcagagatgaccagaatgcgtcctgggctcggggtgccagtggcagggcccacccctgggcacatacagctctcatagcacacttgaatgctgcagcagtgtggcaggagatgagggaatccatagagagatttcctggcccagagcagcagcaactgaggtgaggagagtctgtcctaacacctagtcctctgctaccaactcatgtcatgatggggatgagccagacaccccagggaccatgcagtgaggagtcccaacattcccttcgactacaacttctctacctgaatttgtttgtgggggaaactaatactgccagactctacttggaaacactttagaggtgagggagcaatcagatcctaagccactgaaagagaagtaatgagaataaaaagcaatggtgttgttagactcccctatttttaaaatgctaattcacattctttttgtcttctgccccagcgctcagaattctaagtcagaatggaatgttccgaaggatgaggaggctgcagctgtgtggacattagtattttctctgctttcnacatttccgaganacncttctaggccgaagctcaccaaag

SEQ ID NO: 270703 - DNA, 659 bp, Homo Sapiens
  misc_feature (131)..(192): n is a, c, g, or t
tcccaatgtcacggctacatccctatggaaattaatcagaagcacagtgtgtacggaagcattgggacttctgctggtgaaacaagagaccattcagcaagacacattgaagtggcacggagctgcttttnnnnnnnnnnnnnnnnnnnnnnnnnnnnnnnnnnnnnnnnnnnnnnnnnnnnnnnnnnnnnngtactttgctttaaacggaaagcacttaaatagatgactatgtgtaaaagctctgtgcaattgaaatcatttttcttcattttaaaaaaataacgtattgcacaccaaatgaactcaaagtaagctttagaccaggacgattcaggttatgaatgagtttgttcactgtagttccgtttgttcatgaaccgaagggaaaacaggcctccccgactccctccagtctcccagcctgcctcttggtgaccactgtgctgggcgtgcagggcccgcgggctctggccggagccgctggcctgacgaggcaggatagggagtatccgtgattcagaagctgagacccttccccagtgtctgaggccacagccatcccttccagcacttaatcttgtcttgttgaaatggactgactgctactgacctgccggcgtgcgtgagggtgattataaaaggatgtttccttgaga

SEQ ID NO: 270704 - DNA, 400 bp, Homo Sapiens
  misc_feature (27)..(27): n is a, c, g, or t
  misc_feature (58)..(58): n is a, c, g, or t
  misc_feature (74)..(74): n is a, c, g, or t
  misc_feature (118)..(118): n is a, c, g, or t
  misc_feature (125)..(125): n is a, c, g, or t
  misc_feature (138)..(138): n is a, c, g, or t
gccaggggttccatatggcctatattnaaaccaactgctgttagagattgacctatgnttctttgaaactgaanaaagactctcttggtgccccttcaagacctattgaagatgaccnagaagtntatgatgatgttncagagccaggatgatattagcagccacagtcagagtggaaagtggagggatattccctccaccaccagatgatgacatttatgatgggattgaagaggaagatgctgatgatggtttccctgctcctcctaaacaattggacatgggagatgaagtttacgatgatgtggatacctctgatttccctgtttcatcagcagagatgagtcaaggaactaattttggaaaagctaagacagaagaaaaggaccttaagaagcta

SEQ ID NO: 270705 - DNA, 445 bp, Homo Sapiens
  misc_feature (125)..(125): n is a, c, g, or t
aatggtgcataattaagaagtcggcttcaaatagagaaccagagatggagctatttaaccaacattgccagaacaatttcttcctaaaattgttctggtgatcataaacaggaagaaagatagcnaggaggggagtgaaagaaagtcttgccacattgaataggactcagaagatgaggccatccccactgataagagtctgttcataagggaagggtggcttaagggtccccttctcctccttcctggatctgcccactccaacctccacctcattgtcactcatgcctatctgcaagggaggtctctcttttgaactcccctcaccagtccctgtctgctttgggccaatttaaacataatttttaaatcttttctgctggatgataatcctttcaaagtaataaattatctctaaggtctctcagtgaccatcatcatacta

SEQ ID NO: 270706 - DNA, 265 bp, Homo Sapiens
  misc_feature (144)..(144): n is a, c, g, or t
atcatggaaaaccttgccagggaggcctgggaagacgtgctgagcaaagtgccagagtcagagcctgtctcttcaaggtgggaggacttctgtgccagaagtgacctggggctctctttcaggatggcaaagcgacagctgagnagttggtgacttgttgtgttttgagttgtgtggtggtgagggttcttcagaaggcgtgctctcttttcctagtgatatcttttcatcttttgtcgtgctggggtctttcctagctcgtgcc

SEQ ID NO: 270707 - DNA, 378 bp, Homo Sapiens
  misc_feature (246)..(246): n is a, c, g, or t
  misc_feature (258)..(258): n is a, c, g, or t
  misc_feature (272)..(272): n is a, c, g, or t
  misc_feature (296)..(296): n is a, c, g, or t
  misc_feature (302)..(302): n is a, c, g, or t
  misc_feature (308)..(308): n is a, c, g, or t
gccaaagtactttgttccccccgacaagggctagaatgtgttcacagaagaaaaagaaccacgtggactacactaaactctacagggccttgtgatttttccattccgtagacctcctgggcattggagcagagaaagactttctataagccagattggtttgacatcgtgggagtctgaagtcaagtgctgtaagggaagctgtgtgtgtcattgacatgtcctcttttcacaaagttttgaggntaacatccactngggggttcagggcnttaggaagtttcttacagttaccntctttntcccantgacctggggatgttgcctgttgggggccacattgttgccatacttgggcattgcttcaacgagggttgg

SEQ ID NO: 270708 - DNA, 385 bp, Homo Sapiens
cagactctacctgacagattatgggtccacagtacttagaatctcaccttaaaagcagagaatggaagtgtgaaagatacagactgtggaattcacattattaaccactactgacatttcttgatctcaaatatgccaggggtgtctaggccattaactgctgccctggggtagggaccctgcccagctgcacatgggtgggaacagcacctccagtggctgccaagcagtgctgcccagcttaaccttcgacaggactcagcagttctcatcacacacctaggtcccaactccagaatcggatttgactgactgggtaagggagcctggcagtgttttgtatcttaaagctccttgagtgtttcccacatacagccagggttaa

SEQ ID NO: 270709 - DNA, 424 bp, Homo Sapiens
aatccctcacctcccacatctaatccatcagccgttcctgtcagttttacatctaaaatactgtgtacctgaatttgaccactcctcatcattcccactcctaccaccatatatttcaggtcatcttccccttcctggactgttgcaatggtctcttccccccgtctctgcttccattcccatcccccaacaatatattcctgccacagaactgtgagagatgatcatacgaaataatataaggtttgagatgtacttcaaaagaatttgagaaatagggggctagatgggtatagagatgaaaagattatccatacaatgataattattgaagctgactgaaaagggtacatggggttcatgatactattttctctactgtgtttgtttgaaattttccataataaaaaaagttgaaggaaaa

SEQ ID NO: 270710 - DNA, 543 bp, Homo Sapiens
  misc_feature (467)..(467): n is a, c, g, or t
  misc_feature (502)..(502): n is a, c, g, or t
  misc_feature (529)..(529): n is a, c, g, or t
taaattaaaattcctcctaaatttgcactcggatgaaggggtaacttcaatgacaggtgtcatattacccaaaaccagttttgtataactgaacacattggagaaatttcagaaaaatctggttcaattgtagttttgaatctcgttgacttatttaggcctacttcacattcattttttattatttttcaattggtagtgttagtatataaaatccgacttaatgagctctaattaaagtaaatttgtttaaaaataagagatcaaaaataaatttaacttcctcccagacatatgctttctaggagtttatagcagtatagtttgaatctgaagaaaaggactaaacagttatttatgaagaaaagaacatatgcctattaggaaaactagttctaaggcatattggaaagcaggagtgatagttgaggatatattaaaaaataaataccactggatgaaaagcnggtttatagtatatttaaaaatacatggttagtantttagaattttaaaactggcttcaccntatacatcggtttt

SEQ ID NO: 270711 - DNA, 378 bp, Homo Sapiens
  misc_feature (342)..(342): n is a, c, g, or t
acaatctgcttcctctaatatatccccagtctaaggcatttaaaattaaacagctcttcaacgccccaagttatttcatcaggctaagaacttctccgagaaacgcacaagaaggcaggcaaacaggtgggtaggtgagaggtcacggggctccatctgcaagctccatctacaaggcatcaatctgcgttgtggcatcaacgttaaaatgttctacagcttagggatcttcttgaagcaaggttccaagcacaaaactagtatgaccggaggcttcaatttagaagatgcagcatctgaaaacctttaccccaggaaaggaggggtgcctggctgggattncatggggctctggaacaagcattttattcaaagctg

SEQ ID NO: 270712 - DNA, 370 bp, Homo Sapiens
cataggctaacaaaaatgagagtagaaagtacccagtcaacatattcatgtcgtctttccatagtgcaagtataatttgggtgttttctctaacttatcagtgacaggcatcctgttttctaggaaataatatctaaatgatataggaaaaactggtaggaaaggattcttatggctttatctatagaacaaaaactagagattctgaagatcatgttaatagattatttgtagatataattgccatgtttcttggaccttagcccattgcttaaattatattcagtagaatattagcactaactaatatgtgctataacctcttcagtcatgaaaaatttagtagttacatacacatgaaataaaagat

SEQ ID NO: 270713 - DNA, 432 bp, Homo Sapiens
ccccaaccagggttgctggaacagagagcgaggtctcagaggcaggtgctggtgaagcatctctgggagacgggcagggagtgactctacgagcctggatcccttgagcaggcaggctctccttctcacccttccccgatgcacccatcctcatggttggaattttcatccaaatccttgaggggtagggaggggctgagtgggatgcgggtagcctgctcctcagaggcagagagactctactgcctggcatagaaaaataaatcagtgtatgaaaccaagccaaggcaaacggcagctttaaaaaagtcatcttccaataaataatttactatagaggaatatttttaacggcaaaacactgataaattcagaagttatttttgtaaaaaaaatatgtttatttactctcatgtataaaaataaggtttt

SEQ ID NO: 270714 - DNA, 377 bp, Homo Sapiens
  misc_feature (15)..(15): n is a, c, g, or t
  misc_feature (42)..(42): n is a, c, g, or t
  misc_feature (66)..(66): n is a, c, g, or t
  misc_feature (82)..(82): n is a, c, g, or t
  misc_feature (132)..(132): n is a, c, g, or t
ccccggagaaattancctttccaaaagagatttccattgccncataagagtggttgtggcctattngataaaaacaattttngtccagtttcctgtcttgaaaaaaaagtggccttagctttttgcaatacntgaataaagtgtgtactcgcaaaagaatttctgtagcacagcattagagactcataacttttctgcaagaaatacaaacttacatcttccttttactaccttaagaatactagtgaataaaacattaattcaaagagcaaattatagaaactacaatgacatttaatgcaaattgtaggaatttacatgtttacaaatcatcttcaactggttgtgcagcaattcaataaaatatctttgtatta

SEQ ID NO: 270715 - DNA, 440 bp, Homo Sapiens
tagcaattaccttactaaagaaacattttttaaggatagaaatagtgtattaaagcacccagcacggcctttgaaatcataaatagtggctacagaggtggttataattatggccatatgacaagaatgacagaaaattgcctcaaaaccaaacagtgacaatgacagaacccaggctccctcaggccctccttcctcagctccctctgtgggagtaggtgcattcctgggcaatcttccctccatctctacctcagctgttcccaaactctcgaagtttgttctgggaggtgttaaaagcagttttctaagacaaagggtcccaaggagaagcctcatttcacattagcatattaaaggatctgataaatcctgcagatggggagacttattttggtttaaccctcggttcccccagatgtgttgaaacccgaaacccg

SEQ ID NO: 270716 - DNA, 444 bp, Homo Sapiens
  misc_feature (11)..(11): n is a, c, g, or t
  misc_feature (95)..(95): n is a, c, g, or t
  misc_feature (98)..(98): n is a, c, g, or t
  misc_feature (302)..(302): n is a, c, g, or t
  misc_feature (315)..(315): n is a, c, g, or t
  misc_feature (329)..(329): n is a, c, g, or t
  misc_feature (337)..(337): n is a, c, g, or t
  misc_feature (393)..(393): n is a, c, g, or t
  misc_feature (402)..(402): n is a, c, g, or t
  misc_feature (428)..(428): n is a, c, g, or t
tggaggaaganaagccttcccgctgaggctggggtggggcggatcggtgttgcttgcctgcagagagggtggggagtgaatgtgcacccttgggnggncctgcagccatccagctgaaagttacaaaaatgcttcatggaccgtggtttgttactatagtgttcctcatggcgagcagatggaaccgggagacatggagtccctggccagtgtgagtcctagcattgcaggaggggagaccctggaggagagagcccgcctcaattgatgcctgcagatttgaatttccagaatcttaggantgatgaagttctncaattgtttctatnttccaggnctttgcttcaggtaagccctgtattcaggaggctaccattttaaagttttgcagangagcttatngggggcaatctttaaaaagtccacantcagatgcatccggct

SEQ ID NO: 270717 - DNA, 526 bp, Homo Sapiens
gagtaggtcttccaagagaagtctaaactgggccatcaatctcatgagtcggaactgtgtaaaacccctgatctcccaggcaaggaacacatgtgcataaactactccagggcccttactgcacccacctggaatgacctaatattcacatttttaatctctaagtttttgcccattaagttctcaaagaaaacacatttgattcatgtcaaatctatcttgccacttcatctacaaagtgttctttccaaggggctggggactgatattctgttctatgattgctaagaaacctatcaggtttcatttctctatagaataatatattatttgcataatacacaaaaagtaatggagaaaatggaaaacacaatatttaaaaattgcataaaccatagaaatgagatcctgctttgttttttaaaatgtcgttttgcaaagtaatattttcacttacatcctggcaactattgacttatacaatttatttgtatgttccaatattagatttgcatcaaacccaaaa

SEQ ID NO: 270718 - DNA, 334 bp, Homo Sapiens
tctttttctggagtcataatttcaggaaagagtaaagataaactttcttattaaaaactggttttaggtccaaataatgaagatgtagaaaaacaacctacagtcccattataacattttgaaattcatttataaaaaatttacagcagctgtaaaagtttcagtatcgtaaggacaacgtgatcctacaaacagccaaaggatgtagacaagatgtttttctgtcttccaaataacacaaactgaaaagaaaagcctttgcttttccttggccacataaaactagtatttccacactactggttaataaccccaagaaacctttgcttctctc

SEQ ID NO: 270719 - DNA, 500 bp, Homo Sapiens
  misc_feature (12)..(12): n is a, c, g, or t
  misc_feature (33)..(33): n is a, c, g, or t
  misc_feature (44)..(44): n is a, c, g, or t
  misc_feature (50)..(50): n is a, c, g, or t
  misc_feature (69)..(69): n is a, c, g, or t
  misc_feature (74)..(74): n is a, c, g, or t
  misc_feature (118)..(118): n is a, c, g, or t
  misc_feature (330)..(330): n is a, c, g, or t
gaaattaaaaangaaggctaaccaagacccccngaatgggcagnccgttngggaaaaattggaagcctnactgnatgccaggcccccaaggagtccaaattgaatatataaattagcnccctgactggtctttagccccaaacagttgagccgtagaagacaggaggaaaaaaatacattgagattggaaaaggaaagtctttcttaaaagaggaaaattttgtgcaatgctctgctcctatgtctatgtcagaaattactttcaggccactgagtgccttatgaaaaatggagtggaagatgataattatttttattgatcacacattncaagttattaattttttagtctactttctttcttttatttttcacaaaaatgttcatgcccagggaattatgtgcattcacaatcctcctctggtttgttctcccctctcctccctctgccctttttctctccgaccgtcacactattaaaaagcgatattgttcctctt

SEQ ID NO: 270720 - DNA, 650 bp, Homo Sapiens
  misc_feature (25)..(25): n is a, c, g, or t
  misc_feature (233)..(233): n is a, c, g, or t
tatggagttttctgtgctacaagcncatgtcactgttggtacttgcaggaggcttctgctgggtatgttttggaagtgagtgtcactacttggctttgcttagcaggttctgcttcacacttgttctttgacctgctgacttgtgacttgcagaaacataggcagtagtcctagcctggtaaagaccctccaccacccctataagtttgattgctatgcaggtttgggagagngaggcctattgggctcttggatggaaccctttcccgtattaaacaaaccagagacagaatcagtgctgactcaggatctcctgggtttggaatcgtaatgtgcctcaatcctctttccaaggcaggcctcaccagtctctttctctttcctgcttcacccctgcaatgagccaagaaccaacactacatccacctagaactgcagaagggcttgtggtttcaaccaagacccatcctgagcaagggacttggcttggtgcttttgatcccaaagttcccacaacggcagtggcctgctggggcaatggcatctgtcacggtgttttctccagcaggtggagattatggaacctacatatgggtctggaaaaactgtacacctgttgtcaccttgaccattaaaaaccagaatgagga

SEQ ID NO: 270721 - DNA, 314 bp, Homo Sapiens
gtgcatgcgacccagcccagctcagtatggttttaatggtaaatatttcactaagccagtacttattttttacacagtagttggtaattcacagaaggtagcaaacagaccacttgtaacaatccaagatacagttttactgagcttatattcatatactgaataataattattaagctatatacttacagaaaagagggatatggaaaatattaatcaagtatgacctctactgggtaacttttatgcactgtcaacaagagatctaagatttttattgagctcctaccataaagacacatcatttcaattca

SEQ ID NO: 270722 - DNA, 643 bp, Homo Sapiens
  misc_feature (367)..(367): n is a, c, g, or t
acagcagaaatgatttttattttaacaaaagattatgatagcccttgtagtgtttaaaagtggtcatatttattactgacttggagtcaggtgttaaaatagccagtgccacagctcgtctcttgccttagtgtgctgctgtgagagtcacagtggaaactgcagggaggaggtgtgttcctaagaaccaaaatccagcacagcatcctgtgaagccacgtgtaatgatggtcccataaggaaagtatgtgaatatggctcttgtaaaggattaactattgtaattttagcttatgctctgtattctgttttctatggaattatttaagcccttttagtgacctttgtcctggcccatttaaaaacntaaaatgtagtatatattgtataaaatggaaatatcattattgcttcattaggggaaactgtacataggcattgaaagaagggtaaaagcaagcagttttatcaggcaattgtaaaacaccaaaaatatagattcgtctttgacgtgtaacacactaaatgtattttgtacagcatctggtttaaaaggtgccttaagagtttaccattacttgctttgttctatatacagattatgtccaatgtatcattttgaagtaaataaccttattttagt

SEQ ID NO: 270723 - DNA, 586 bp, Homo Sapiens
  misc_feature (475)..(475): n is a, c, g, or t
tccatgaagctgaggccttgcacttgaatgctggaacttgaccttcactggctactttacagataacattcataggtcaccacggtaatggtcgcaacagttgtttttcagaaactagggcaagctcctgtccagttcaaaccagttaggaccactgccccttcaactgggcctgagcaagtgccggagaggtggccttttgacattggagggccaaaagctccacctcccccagatcacgctaatgctgccatttactgaacatacttcctttgagatgccatgaaccccgactatgcttgtgcagaatgaacctgtttacttcattttttccccattgccaatcacttttccccacacgttagaccaccctgcttccctaacccataaatatccccgagccttgtcttcagggaggtggatttgagagctgttctcctgcctcacttggtacctttctgaacaaatcttttcncttttggaaaccctccatgtcacagtgattgattcgctgtgctaaggcagaacggacctggacctggctggaagggttctaacacaatcagagggacagatcacaagcaat

SEQ ID NO: 270724 - DNA, 644 bp, Homo Sapiens
  misc_feature (616)..(616): n is a, c, g, or t
ttgagaaccagcttgcagaagtgtatgcatacctcagacaggtcttagaataatagacaaaaggagcagctgggagggagagtaagacgtcacacacaaatgcataatccaagtcctgtgtgcatgctggagactggccacaaatgcatctcagaatttccaagtatccagagattattaagcgtccattaggtggcagcactagaggactggatgctgatgaaccaggctggccgcctcccgcctcccaggaaccttatagaggacttcatcagcacacttcacttgaaatgcacctggctgcaggtaaccatgttagtaaagaatatcctttcttccaggctaccgtttagtgttaattccgaaaaatcaggtttgtgaaaattcagatggtctatgggtgagctgtcactcagttgccaaactgtcttaatcttcttttgaccactatatatttccactctccatttctgtggcttctcactttgatataagttctttacagcagttggtctgactggcagctgaaaaatgtgttgctcatcaagaggatttggttggtaataccttatgcagatctgtgttaaagaaaagaggagttcatgttgagatctantgaaaggcatgcaactgactaatatttc

SEQ ID NO: 270725 - DNA, 467 bp, Homo Sapiens
  misc_feature (11)..(11): n is a, c, g, or t
  misc_feature (46)..(46): n is a, c, g, or t
  misc_feature (77)..(77): n is a, c, g, or t
  misc_feature (109)..(109): n is a, c, g, or t
atggcaacctnaggtttccacccttaggtccaaaacgtcttaaaangttgttcaaaaccacctttaaacctgatcangagcctcctctctctctccctactgcccttcnatgttctgaactcctaagctcttcagactgtctgtccttttctgaagactgtacattttcaggcctctgggctagggctcaatcacttaccttatcctgacagggccactgaaccttgacgcctacgctgattcccagaggcatacctaacttgcctgtctttgctctcccatggaatgtcatctctatttatatgtagcaattatttgattctgcattaggttagttcttcagatgtttgtttccttcgccaatagaaaattcttcaaggacagtattctgtctaactcatcttgtattcccacaatgcccattttaggtactcaataaagagttcataaatgtttaaaaacagtat

SEQ ID NO: 270726 - DNA, 623 bp, Homo Sapiens
gcaaaaaatgttcctaaatcctgtatgggctcagtgttggtatatagttaaggtaaaatggtaataatgagattaattctttactcctaactatgtgctttccttagatagtgagcacagtgattttatgtagcaactgttaagtcggagtgtctccaacagagttctaattaatatcccaaaataaagatgacattattatttatatgcactggatcttattggataatttcttaagtatggtcttcttttccttgtttaataagttgatctagatatttttttcatagtccctattttgctaagtcatcacttctgagagtaatatctgttctgtattatgggcaagcagctgaccgaaaccaaataaaagctaagagaattactcttctggtatgtcacaaaaatgaggtccaagttcaggttagttacattcaaggccactgaggattcttatggttattatcatggtatcactgttattaaactttgaagcatcacaaagaattgggtgaagagccaaaagactgaagactggcacaattgtttaccatcaccttcaataagggatggaaattggattctggaagccacaaaccagaaagtctggtgtcacatcttaa

SEQ ID NO: 270727 - DNA, 361 bp, Homo Sapiens
ttcttcttggaggtggggtggaggtggggagcaagaatttgacctggctctgatccctggtgtgttgtgtgggcctctttaacgtttgccactgagccttaacctcactgtacttcactgtacttcacacgcattggtgttaacattttaatcttagaagaccctgacccactgagggtttgttgtgagaattgctgaagccacgtagaagcaccttgaaatctgtaaaaccacaagaaagtactttataaaaggtatccttatttgaagtggataaatcttgtaactcgaaaagttgtgatttagaagacaggattgtttttgaacattaggaattaaaggctatatctggtccttaaaa

SEQ ID NO: 270728 - DNA, 727 bp, Homo Sapiens
  misc_feature (281)..(281): n is a, c, g, or t
ctgccaagacatcagtgaaaagtctgtatgaagtggatccaaattattagcctgcctaccactccttgtgcgtctcatcaattgaacccatccctagaccaagggccctttaggtgaagaaccagcccagaagggaaagagaaaagagtagaaccaatggacctccagatgggagcggcggtcagtgagtagtttagagccaggtacatgttagcaccctggatacgtgcacatgccctgatctttggcttcccatctgtgaacttcaacacccacgtggnctttttcttatatcctttaaatacatatctggacttagtatcacctcataaaagataaagaatcatagtggaagcagaaacaagccacagaccagtggtacactcaaactgaaatcctctttttcccaccctctccctcaagaaaacatccctgccgacttgagcagtatgatggccaatagcgaagcagagtggcccccagggatcccactctgtccctcgcacacgcgcacacacgaagagcaaatgaagcggatccaaggagtgatgacaagcgctgcacaggaatgtttgccaaaactcttctgggggatccgagtgctctaccaaggacatgagtatgccctgaatttctgcagctaaggccatatagtctggtgaccaagcatttggttcctagcttcagtctttggttcaaatccctgcttggcaacttactaccacac

SEQ ID NO: 270729 - DNA, 452 bp, Homo Sapiens
ggacaatgtctgaactctccagcttcgcgtgagaactccccttccattcccagaggctgggcttcagggcgcacaccatgagaggctctgtgcccccatcaccctcgtttccagtgaattagtgtcatgtcagcatcagctcagggcttcatcgtggggctctcagttccgatttcccaggctgaattgggagtgagatgcctgcatgctgggttctgcacagctggcctcccgcgttgggcaacattgctggctggaagggaggagcgccctctagggagggacatggccccggtgcggctgcagcttcacccaaccccaggggcagaagagacccaaccacttctattttttgaggctatgaatatagtacctgaaaaaatgccaagacatgattatttttttaaaaagcgtactttaaatgtttgtgttaataaattaaaacatgcaca

SEQ ID NO: 270730 - DNA, 302 bp, Homo Sapiens
  misc_feature (246)..(246): n is a, c, g, or t
aattcggcacaggaaaatgggctcagagaaacccatggttatgtggctaggaagtgacagagaattagtacccagcccaacttgaaaaccctagtgctaagaccctgtatttttaaaaggttgtggtctttttagcaagttttacaagtctgatattcagttcagaaaaagaaccactactttatgcgcctataacttcagtctggcaggctttgaattctttagccatgggaccatgcagtggtngaccaaatgttcaaaaggcattgaaaagttagggaaaactattgttttgggctttt

SEQ ID NO: 270731 - DNA, 509 bp, Homo Sapiens
ttaaagactgtcccaacctgcactgcctaactctttcctgcttacccaagcaccacagggcaagctctcaacaagaatgagcttgaggtaccctggcctcattcatggccaaagccctgattctattcctgtctcatatcccccttcctgatatgttcttgcattcctctggctcctgaacttctgtttgcttcctgcttttagtcccgcagttttcctttagatctcacctgtgacacagctgttctgtgactgacctttggttctcttcctcatatgccattctgcctttgcccttaggccctgttctgtctccagctggcaattgtagtaagacaggctggggtcccatgacgaggatcagatgctagtgttcctgtctcctttccacatggttaaaagggactgggaatcatttactgtagagacaaacaaccttatacactacagtaaccctcagagtaagattttaaaataactggagataggggaagggttatagaagatat

SEQ ID NO: 270732 - DNA, 619 bp, Homo Sapiens
ccatatacccctcaggacctgaagcaagagaatgaattaaagaaaactccagagaatgagctgacaacctactccctgggtcagtggctctccatgcctacctgtggtctcttggacacccttgcagaagatgacttcctggggaactcttctgggagtgaatgttatcagcaaattcccaaaacaacaccccttagacaaaaagccctcctcacctatgcattgcctagaccaccccactaaaggtgatggccacaaagaggtggatttgttgagttggtgccattccttctactgccagcttcaccaaaacaatgacacagtcttccttccgcatgggagactcttctctttccctgtgttgcagtggatgcctccgtgcagataagaaatgcttaactgagaaatgctcatgttgggatatcatcgatgagactttaatttgggcatggtgactgtttcccttgctgccacttgactcaatcccaggagcctcagtagaggatataatattacacaagatgctcaaaatggtggaattgctcagtgctcccataaatatacatttataattttcatttgccacatggtaaactgaaaaatacagactatattaaaa

SEQ ID NO: 270733 - DNA, 313 bp, Homo Sapiens
aaaaagaaagaaaaatactgaaggatcaggaagaaataattgatcttggtagcaacatctgctgggaaaacacactagctaagcaagcctggtctcttagagaggcctaagatagggccacttttgccagaaaaatttgtttggatagacagtttaggaaaaggaagtttaactagagagataactgggaggaattcaaggaagaatcaaatcacagttccaaagttttggtagctttggagacaacagtttgtaactgaatttcaaaagttatatctaaagtccagttagatcctatcagtggtatcaagtt

SEQ ID NO: 270734 - DNA, 420 bp, Homo Sapiens
  misc_feature (99)..(99): n is a, c, g, or t
cttaaagaactgccttctggagggagaagagcacaagatcacaattaaccatatacacatcttactgtgcgaggtcattgagcaataccaggagggatnttatacattttagcaactatcttcaaaacctgagctatagttgtattctgcccccttcctctgggcaaaagtgtaaaagtttgctgctacaaagaatacagaaaactcagaaagaaatgctaacatacacatttagctggccctatggatatatcatattaactgcttatcgttaggggctgtatatttgtaaaataaaagaattttgggagttccatctctcggctttggagcccccctccttttgtctctgtatggaggagcttcgtccttctgcctttttctttacctgttaaattctccactccttaaaactaaaaa

SEQ ID NO: 270735 - DNA, 392 bp, Homo Sapiens
tactcttcccgttttctatagtcatttgaatccacgagcttgatttgcactaatttgaccgacattgaatttgtgtgtgaccttggtttatggggccagctgactgaagtaagcagaccttttgggcaaaaataagctttgacagtggtctcccacctatttgttccactgtctgccttcccctggttacttaaaaatcatcagcttgtccaactggaccttctttccttcctgctgaagttgatttgaagtaaaaccttagatttgatgttaaaacagttgtcaaatctgttggtaaataagatttgaaggaccctactctgtctcccttgaaaaaggggaggaatgtcagtgttactgtgtcaataaactgatttaaagttgaaaaaaaa

SEQ ID NO: 270736 - DNA, 478 bp, Homo Sapiens
  misc_feature (370)..(370): n is a, c, g, or t
  misc_feature (415)..(415): n is a, c, g, or t
  misc_feature (454)..(454): n is a, c, g, or t
tttggagtcattaatatcctaggcaagaaacatggaagtgaagacttctttctctgcaagggaaaccgatgatcccactcctgggaaatagtagggaaacttggtatgtgtattcccatgtgtcctctagggagttggtaatggttaacctgacttcagcttccaggaattggctactcttcccgttttctatagtcatttgaatccacgagcttgatttgcactaatttgaccgacattgattttgtgtgtgacttggtttatggggccagctgactgaagtaagcagaccttttgggcaaaaatatggctttggacagtggtctcccacctattttgttccactgtctgccttccccgggttaacttnaaaattcatcagcttgtcccaactgggaccttcctttcccttccnggctgaagttggattaggaagtaaaaaccttaggatttngaagtttaaaaacagttgtccaaa

SEQ ID NO: 270737 - DNA, 430 bp, Homo Sapiens
cagcccctaaactctctcctgtaccctctgttgctgaagtggcctcttcacctgggccctggaaaagccgatggaaaaagtctgttcctgcaagccaaggcctgggtcccaggtgacttaggagtagccataggaaggtgaggaaggagaagtgggcatgtggtgtcatctgtagtccaaggtctctgcgtctcgtcagtgggtgcagtgccttccccctcaggtgtgagcgtgatggactctagactgccttccatgagtgttggtcatgctatgatgtcatcatttgccattaaaacccagtttgtatgatgccaagaggattaattgtgcaagtgactgattcatttaaattgtaatcacatcccttttctgcttcaccaacctgaactgtttttaaaaatatcattaaaagtctgttctctttcaa

SEQ ID NO: 270738 - DNA, 417 bp, Homo Sapiens
  misc_feature (247)..(247): n is a, c, g, or t
aggaaaggccttaccttggaattagagaaaggaatttcttgaagagtttaagatgggcaaggtctgtatgtctagaattttctgcatgttgtttttacttgcagaactagatcgtaaagttgcaaatagtcatttgtcatacacaggaaaattgacctgtagctgtgctgctcttggtaatgtgttaccgagggaagggtgggaaaagtaaggctaagttctccaaccttgacccaggccttgggcnattcctgtggcagcagcatgaaatgctgacagcttcctgcctccttgcaacaacagagtttgtttaaccccttagtgtctatcaagaatctttatttgtagattcacagatttttacagaacaaaactcaactttgttatagtttttaaaaggtaagttctttttgacat

SEQ ID NO: 270739 - DNA, 387 bp, Homo Sapiens
gactaccaggaactcattgaagacatagttcgagatggcaggctctatgcatctgagaaccatcaggaaatacttaaggataagaaacttatcaaggctctgtttgatgtcctggcccatccccagaactatttcaagtacacagcccaggagtcccgagagatgtggccaagatcgttcatccgattgcgacgttccaaagtgtccaggtttttgagaccttacaaaggactcagcccacgtgccactcaatacaaatgttctgctatagggttggggggacagagctgtcttccttctgcatgtcagcacagtcgggtattgctgcctcccgtatcagtgactcattagagttcaatttttatagataatacagatattttggta

SEQ ID NO: 270740 - DNA, 748 bp, Homo Sapiens
caggcatgagccaccgtgaccggccagctgtcattatttttaacattaacaattcatctattaccttagctatggatggtgctatgtaatttgccctgcctgctccttcaccttcacatcctgccactctcccctgttaagtcagaaactgtgaagtgtcttagagtttgtccttcttgcaagctaataggttagcttgccacagtttcatatacatatactgccagaagacaccagactgctgggctggtgccataaaagatttgctactgaaagcacaaagcatttacaacaccttgtgtcatttccccatgccccatttcccgtaaggcaacagatgtttcctgtgcagtgggttgcatcacaggagaagaatcttaaatttagaagcctccaagcttttatcaaagctgctggtgacctacccattcctcccattcaggagagaaattattcattatcttgaaatgtaagtgaatttcctctgggaagaggaagaaggcccctctaggtttatcaccctggaatgtaacacactctggggtttgggaggtggatattaatatcattatgcgctttctcacctacagaagactagtctgaacttgtggcaggaacctagccagcttgattgcctgctaaaacaaaaatatcaacattcttaataggatttaaataagatccagcatctcaaaacagaatattcaaaatatccatgatacggtccaaaattacaaagcaaacaaac

SEQ ID NO: 270741 - DNA, 399 bp, Homo Sapiens
atgaagaaatattagaaggatgttctatgactagtcagtactgctcaaaaatgtcaagattatgaaagacaaagaaagactaaggtactttccagatttaaagaaattaaatagacaggactactaaatgcaatatatgagtctgaattggaccctggactaaaattaggcagacagttggtgaattttgagtcaagtctgtagagtagttaatagtatttctggttttgatcatcataatatggttatttaagatgttaacatttggtggatctgggtgaaaagtatatgaggattctctcgcagtatttttgcaatttttttaaatctgaaattcttttaaaatgagaagttggctgggcacagtggctcacacctgtaatcccagcactggaaaca

SEQ ID NO: 270742 - DNA, 290 bp, Homo Sapiens
gcatctcaaagtgtttgagccacaacacctggcaactcttagctcttgtggccagagcaggtcgtagtcatgccttcaaaattgccttcactcctagaaaaaaatggagaaaggattatttaaaatctagagaaaaaggtgagcccataagtcactctctctgaattccagaagctcagcaaataatctgagttgaaccaattgtgaacaaataccaagtcctgctgatgttgatttggaccaaagtgatggagaatctagtttgggagtctggtaatccttggggaggc

SEQ ID NO: 270743 - DNA, 454 bp, Homo Sapiens
  misc_feature (392)..(392): n is a, c, g, or t
  misc_feature (414)..(414): n is a, c, g, or t
  misc_feature (438)..(438): n is a, c, g, or t
gacaaagatcattgatggctaacatcagaaaaaaataactcgttgttacatgtttgctgatggaagtacacagcaacacttgtgaagtattcttgccaaaaaatctctcgccaaaatctgatcaagcctctagatttaaccatcaatttacaggaaagagaggggaaatttacattgaaataaaatttcaatgacattggcaataagttaaacattaagtgacaccacaggaggcaaacagtaaaaatctgaacacgggaagctataaaacaaatgacctagtttcttcaataaatgagtagcaaatttttctaaaaggttggaaaaacaatgagtggtgatctgtaaaactaaaaaaatatttcctctactaaggcaacatatgggatttntatgggtaaatcacaatataanttccaataactttggacataaaanattcgggtattaaaaa

SEQ ID NO: 270744 - DNA, 482 bp, Homo Sapiens
  misc_feature (441)..(441): n is a, c, g, or t
  misc_feature (452)..(452): n is a, c, g, or t
acaaaataagcctaatcgtaaaatatcactatagtatatagaaccatgtttaggccagatatattcgtcgtctaacttgtatttaacccaaatggtgttgcaatacaaaatgagtttctttttctttaagccaaatttgaatttgctccaatagcttaaaagacaccctagcggcgagtcccttgggatactccttgttgtccccatgcctatattaaggatctctctacagagggttttattagcccaagtttagcaaaagcctagttactcttccctcttaaattcccgtgttctttaaaggtgtaaatatagatagcaaggtgttataaaaatggattatgagctacgaatgggcagtcgaatgtggagcctaaattccatagagatctagagttgggtggagagggggctaaacaaatggaggaaggggaaaggggntaaacagcgtnggcccaagggggaggacctcaaaaggctct

SEQ ID NO: 270745 - DNA, 451 bp, Homo Sapiens
  misc_feature (16)..(16): n is a, c, g, or t
  misc_feature (33)..(33): n is a, c, g, or t
gcccccatctcccaanggaaactttcctttttnctgtccacaatttctgccaggaaccttaagtccactccagaaagggtccagaaaaggaataagcccagtccaggaactccctattcccattcccttcccatggcccatcctgtgggtatttgccttaatgcatcaggagcttcagagagactgaaaacagtttgaaacattcctgaaggtatcacttcggttcagctggggaaggatctatgttactattgcttttgctgttgtctgtcgggggtggaaggtactgaacatcttaggaaattgcaagacatcgcagaaatgctatcataagcatcattaattctatttattggatacccaatcatcaccaggcactgtgcaggtctctgtccatacattatcttttaattctcacaaaatcccatgaagtaagtactactatctattt

SEQ ID NO: 270746 - DNA, 368 bp, Homo Sapiens
  misc_feature (20)..(20): n is a, c, g, or t
  misc_feature (31)..(31): n is a, c, g, or t
  misc_feature (182)..(217): n is a, c, g, or t
ttacaggactgcttctcaanttgacaccccntgccacaaggcattcggagcccccccaggacaccctgccccctccaacactactgtcgcacaggtcttttcaggagagggaggtagggggacatccatattttgtgatgttttaaatctttctgtaacaatgcagcatatatgtatatatnnnnnnnnnnnnnnnnnnnnnnnnnnnnnnnnnnnncatatatagatatatagatttttttcccctcttcaccttgctcatggtgttacttctgctggaaaaccttccctcttctggcacctggcagaactgagttcaaaactcagaaaagagttcaaaactgagttggctaggagtgtgtgtgtca

SEQ ID NO: 270747 - DNA, 499 bp, Homo Sapiens
gatttgtgccacatttgctgtacttacttgaattcagctccctggggcagggactaaagggtaagccaagaaggctgacagaagctcagcaaaaacatctggagggatggaggctggggatagagggaggagaggcaaccatatcggccaacattctgtctcctttcactctttctacttccttttgttcagacagttcattttagtgaggcctcaggatttttgaaattctgcagcgtggggagctgccagggtcagcctttctgttctttcatgtctgagcatatgtgacagtttttcagagaatatatataagagaatgttccattctctagttgggctttcatccaaggtatagattttcagagctgtggacacagccactgaaatagcactcacatgccccggcacaggatggggcagcagcttttatctcagtaggctctggttagaatggtcttttcataatgataaacctttgaacaacagggagtgtacc

SEQ ID NO: 270748 - DNA, 475 bp, Homo Sapiens
  misc_feature (226)..(226): n is a, c, g, or t
  misc_feature (354)..(354): n is a, c, g, or t
  misc_feature (436)..(436): n is a, c, g, or t
  misc_feature (459)..(459): n is a, c, g, or t
gactgcatagggctcggcgtggagtgtgggattgggctaggggaaccagattgctcagccagccactgagctgggcagctgacatcctttcagggcaagtggcaatccatttcttcatcagccaggaagggcactggtgttgaggccgacatacttatcaagaacagtaactaccatggtttccagtgctttcatgaaacctcagacatgtggccttctggcaacnattctggcaatttcatattgtggggagcattcactgtatccctggggggctgcggctctctcagtttgcagggggctgggaccaaggaaaggaagggcattttcagatttcttatgggggcacagatnttcttacaggaagtttattgatggccattgaaatactttcgagggagatgaggggagggcttgctaatcttctcaggaattncaaagtgatttttggggaatatngaggaatttcttttgg

SEQ ID NO: 270749 - DNA, 444 bp, Homo Sapiens
  misc_feature (14)..(14): n is a, c, g, or t
  misc_feature (28)..(28): n is a, c, g, or t
  misc_feature (42)..(42): n is a, c, g, or t
  misc_feature (51)..(51): n is a, c, g, or t
  misc_feature (57)..(57): n is a, c, g, or t
  misc_feature (80)..(80): n is a, c, g, or t
  misc_feature (85)..(85): n is a, c, g, or t
aaggttcttttccncctatcctgtggtnccagtgcctctggngggggccangaccanggctttggggtgtatatgcccancccangatctccattggaaggtatccagcttgtttggtactaggtgccaagtgtagcatgtccacatgtgaccatgttggatcattgacaatttttaggtatgtactgacctacatttatgatgaagatcctgagcggaggttaagatattaagttattttccatatgaatcagaattatattgattctgtgcaatcaaaacaaaaggcagaatagaatgctgagattggttaagtttgcaatgaccatcttgaaccacagatttctgctatgtgtcatcaaaacatctagttctgagtaacattttcacgattgttataaaattataggtgtgaacttctaaaataaaggaatgctaataaaa

SEQ ID NO: 270750 - DNA, 344 bp, Homo Sapiens
  misc_feature (225)..(225): n is a, c, g, or t
gcttttgtaaggattgaggactcattgaagataagttcccaatattacctattaaccagtgtctctgatgttgttttgcttctgagtttgacattgactatttcatccctaaatgaaatagtcccccctctactcctccttcccaaactccacttcaaaagtggcccaaacctttccaatttcaagaaacctcacgaggttcttggtcactctgggcacaccctncacatcccacaaggtgcttggcaattgcctccgctaactgatcatccttttcccacgcactaagcattttacttgatgggtgtgatggttgaactagccttaccaggagcggcaagaaa

SEQ ID NO: 270751 - DNA, 237 bp, Homo Sapiens
cctttacagcagttgaagagacttcactggaaatactagccaaatccagggagtaaatctgatacatctgaggttcccttcaggaaataatagcacagcagggtctgcatggggtgcttgttttcaacgtagctaaaatatcacacatgggctcagggatcttttattcaaattcccaatataaaataaaggtttagacattcaggagccaatatgcccatttttattcattttctt

SEQ ID NO: 270752 - DNA, 195 bp, Homo Sapiens
gagactgcacaaactttagtaagatggatgagatcagtgatgccatagctggaaaaaacagaaagtctacatttctagttccctgctctcctttgttcagactagcatctgaggaaacttgtgaagaaagtcaccgtgaaataaaagtctttgtcaaaaataaaaacaaatacaaacctacaaaagaagtgatgg

SEQ ID NO: 270753 - DNA, 347 bp, Homo Sapiens
  misc_feature (108)..(108): n is a, c, g, or t
  misc_feature (116)..(116): n is a, c, g, or t
  misc_feature (128)..(128): n is a, c, g, or t
  misc_feature (202)..(202): n is a, c, g, or t
  misc_feature (215)..(215): n is a, c, g, or t
  misc_feature (221)..(221): n is a, c, g, or t
cccagtttggaatttgaaaatggcctggaaaggattggtttccaaggaattttaaggaatttcctatccttaaaaggaagttgaattgaaaagggtaatattcctggntaagtccntttaataaattnccgatttttgaaccaaacctgcttttaaatttatgcttttagccatggacctgagaaggaaaaaaaggtgaatnggaaggatatccnggattnctgaagccacagaaccccagaaccaaccagtccaaaccaatgatggaggtgaaactaagatagcagccacaaccagaagttgattcagaaaggaattaattcgggctgggttgtggtcatttatac

SEQ ID NO: 270754 - DNA, 399 bp, Homo Sapiens
acaggaagcttagggccctcttaaacaatgaagattccaggtagtctgcactggtaactcaaagggcagggagactggcccctgtctcaagcccgcacagcctagggcacttttaatatataaagtacaatattgtggggtgggaggaaggcaaccatgagtacgcaccttacagatctccaataacagggagctaactgaccaaggaagggcccagctgctggccgctgaaaccatctgctgcatttgcgccaaggccacagctcccacatgctgctcccagcaaaatgatggagtacagcaggatttaccaatgcaggactcctgagggccttgcccagctacctggggacacttccctccaactttcctggccctctctccatcactggcgcttca

SEQ ID NO: 270755 - DNA, 359 bp, Homo Sapiens
  misc_feature (21)..(21): n is a, c, g, or t
  misc_feature (36)..(36): n is a, c, g, or t
  misc_feature (55)..(55): n is a, c, g, or t
  misc_feature (86)..(86): n is a, c, g, or t
  misc_feature (104)..(104): n is a, c, g, or t
agcctgtaagaaccaatgttnttaagtggtgggtgntaagttacccctccctggncttcccggctcccgggaaaaaatccccattnctagacccaagccaggtnaagccctggatgactgactagaagtaatttcctttctattaggatgtgacatgaacatttaaaaaatggaaaaagtccagtctatagaaattcgtatctctttatctatataactatagtatttatatacttatagacatatagatatatgaaatgaaaactcaagcctgccccactcagctgacagttctcaaatggagcagtgtgtagtagtcatttggtgtggtggtagaggaagtcttatctttaatatgc

SEQ ID NO: 270756 - DNA, 407 bp, Homo Sapiens
ttcttcaagctgatcttcccctatattaagctgagataaaaatcaaactcacctggagagcagtaagtgtttcatcaaaagatactggagtaattgtgcagataatacgtgtctttgcatttcctcccaaggaattctggagaattccgtgttaacttgctatctccgataatttatgaaaccacttagcaaggaataagtttacaggagaaaaagattgagaaccgtttatataataaagtagttggtttttaatgcagaactcttaaatcagccagagtttcaaaaattagtttacaagttatatggaggcagattaaaactactaacttaaaaaatatttaaaacagaaagtaaattccagtagattataatcatatgtgtaagtttttgaatatatggaagaa

SEQ ID NO: 270757 - DNA, 1023 bp, Homo Sapiens
ggcacgagcttacatcatgtacagagaatggcatggatcaagaaaatcccccttgtgaagaagaatcagcagttcttgctttgtataaaacacttcaccagtatacgggaagtgccttgaaagaaataccatccggctggcatctgtggaggagtgtcagagctggaatcatgcctttcctgaagtgttctgctttattttttcattacttaaatgggagttccttccccacccgacattcaagttcctggggaacaagccattttggaacatttatgtaggctattctttccctaccaaacaacctcatttgcctttttcaagaaaatagtgagataatgaagttcactgattgaaagttggtgccggtaacagtgaagttaaaagatatctagaaggtgaaagagatgctataagatatccaagagaatctaacaaattaataaaccttccagaggattacagcagcctcattaatcaagcatccaatttctcgtgcccgaaatcaggtggtgataagagcagagccccaactctgtgccttgtgtgcggatctctgctgtgctcccagagttactgctgccagactgaactggaaggggaggatgtaggagcctgcacagctcacacctactcctgtggctctggagtgggcatcttcctgagagtacgggaatgtcaggtgctatttttagctggcaaaaccaaaggctgtttttattctcctccttaccttgatgactatggggagaccgaccagggactcagacggggaaatcctttacatttatgcaaagagcgattcaagaagattcagaagctctggcaccaacacagtgtcacagaggaaattggacatgcacaggaagccaatcagacactggttggcattgactggcaacatttataattattgcaccaccaaaaaacacaaacttggatttttttaacccagttggctttttaagaaagaaagaagttctgctgaatttggaaataaattctttatttaaactttcaaaa

SEQ ID NO: 270758 - DNA, 544 bp, Homo Sapiens
ccgcgccagtgtccaggaggaagtcagtttcctggccctcaatggttaaacgtacccggggctcagtgagggtgatgacatgagctggcgcttgccccgggcaccctctgtcctgttgttggatcatctggttgggggcttctgacctagggaaccttcgtccgctggggcagtgcaccttccagtgattgcctcggcatagtggacatggacgagggggcagcttgtttctcattggacaatcttttttaaagtgtcctagtaaaccgcatgataaccaagccctaccgggtgattggcctctactatctgtcctctctgaaccactaaggtttgttagtctgagggccataactgaaggctgcggcctttctccaatctcacttttccttttgggcctgttcctcttggtccctattatagaacactgaggttgccaggttttgataatacctccaaattttgttcagggcccagggcttgcttttggagctttctcctgatatctgcggctgattggataataaacttatcttttagaatc

SEQ ID NO: 270759 - DNA, 450 bp, Homo Sapiens
  misc_feature (194)..(396): n is a, c, g, or t
tgctttaagaaaatcctttgaactcccttgttacttgagtttagccaagccaagcacttaaggttttcggcttttgaactttacaaaaagtaacgtcacaggtgaaaccaacaagccttaattaggttatgacttaattgtgagcatacaaggtattttcaaaggggtgataggcagcttttgaaactgtcatnnnnnnnnnnnnnnnnnnnnnnnnnnnnnnnnnnnnnnnnnnnnnnnnnnnnnnnnnnnnnnnnnnnnnnnnnnnnnnnnnnnnnnnnnnnnnnnnnnnnnnnnnnnnnnnnnnnnnnnnnnnnnnnnnnnnnnnnnnnnnnnnnnnnnnnnnnnnnnnnnnnnnnnnnnnnnnnnnnnnnnnnnnnnnnnnnnnnnnnnnnntagaagtgagaatagaagcttcctcttagtctccttcctttctgtatgacccag

SEQ ID NO: 270760 - DNA, 325 bp, Homo Sapiens
  misc_feature (164)..(164): n is a, c, g, or t
  misc_feature (178)..(178): n is a, c, g, or t
  misc_feature (218)..(218): n is a, c, g, or t
  misc_feature (232)..(232): n is a, c, g, or t
  misc_feature (238)..(238): n is a, c, g, or t
  misc_feature (257)..(257): n is a, c, g, or t
  misc_feature (292)..(292): n is a, c, g, or t
  misc_feature (298)..(298): n is a, c, g, or t
ataagccacctcgcctggccaaaactcactcactttttaaaggtgtgtgttgcttagccctctggatgaagattcaaacatgcaacagtcatttgccacggtgcctgctccatgccagggctgtgtggggtcctggggggaaacaacagtaggcttaaggactnggccactgcccttnggggtgctttattcctccagcaggggagaagagggttttncaagcagatagctnggggtncaagggagccagcgccatngggagagaggttccgcaagagggcattgggacggntggggnagcacagattgagttttaggatttgaa

SEQ ID NO: 270761 - DNA, 555 bp, Homo Sapiens
actaagacttgagcttttaaatgtctaacaatatcctgtaatcctttatgaacttcaggccttaagggatattgcgtttgatagggaaaagtggtggggtcttttagcctgatttggattgggcgggcatttttgccattctgcattgtccttccaatgcccagacttccagggttgattccctccacaagcagggggacaacaaaaccggtaacttgttccccatacctcacgtagataatagctccagccttggctaatatgtccctccctaataaggatatggaactttcaggcataacaagaaaggcatgtgaaaagagcaaagtctcccaattacaactaaggaggtgggagaaatacctggttacaggctgtcccaggattcatcagatggtaacagaccttgaggacagccgaccaggacaggagattaacactgagagggccgcaccagtatccaagaggaagtcaatttcctgtccctcaatagttaaatgtacctggggctcagtgagggtgatgacataagccggtgcttgttccaggcaccct

SEQ ID NO: 270762 - DNA, 314 bp, Homo Sapiens
  misc_feature (222)..(222): n is a, c, g, or t
  misc_feature (269)..(269): n is a, c, g, or t
  misc_feature (298)..(298): n is a, c, g, or t
gcgccccggccaacttaagcttattttcaaaaccactcaattttgacattacaaactgggtttttgtttttgtagaaggacattaagaataaagagcaaaggaaacaattatgtgctgggaagggcagtaggagggctgggtcctagtctccctttctctttcgctaagcagctgtgtggctttgggctagtaacctaccctcccacaaaaaaggcttcaanagagagcaagcagagctcagtgggcattaagacatgcgcaactcctntcttttagagattagatgaggtcgactcngtggcttgtaaaactc

SEQ ID NO: 270763 - DNA, 439 bp, Homo Sapiens
  misc_feature (48)..(48): n is a, c, g, or t
  misc_feature (60)..(60): n is a, c, g, or t
  misc_feature (307)..(307): n is a, c, g, or t
  misc_feature (313)..(313): n is a, c, g, or t
  misc_feature (361)..(361): n is a, c, g, or t
  misc_feature (381)..(381): n is a, c, g, or t
caccctactgcgtgcccttggtactgggaaattttcccccttgaaagngcaagataaagntccctgcccctcatggcccgtccttaagtggaggaaccaataaagaacctgaaagctaacagtacaggtgattgggatatagggggtaagaacagggcagtgcaggagtcctgggtccccagttagaagagtgatgggggaatgaggagctggactttgggctctgcaacaaggggggtagtaagcctgggggactggggggccaccatggactgctttgtgcattgcccagactacttcaaaaggnggtggnccaggtgtggggctcatgcctgtaatcccggtgcttcagggagccaanggcaggaagatcgcttgagnggcaggagtttgaagccagcggtgggcaacataccaagatggcccatctctataaaag

SEQ ID NO: 270764 - DNA, 378 bp, Homo Sapiens
  misc_feature (35)..(35): n is a, c, g, or t
  misc_feature (45)..(45): n is a, c, g, or t
  misc_feature (51)..(51): n is a, c, g, or t
  misc_feature (66)..(66): n is a, c, g, or t
  misc_feature (72)..(72): n is a, c, g, or t
  misc_feature (302)..(302): n is a, c, g, or t
  misc_feature (320)..(320): n is a, c, g, or t
  misc_feature (340)..(340): n is a, c, g, or t
  misc_feature (349)..(349): n is a, c, g, or t
agggtaaggtttgggattccatttgaacagccagnagacccactnggtacntggctcatgcctgtnatcctnacaccctgggaggcaaagacagggatcgcttgagcccaggagtttgactgagaccagcctgaacaacaaagggagacccccgtctcttcgaaaatgttagctaggcatggtggtgcatgcatggggtcctagctactcagaagactgaggtgggaggatcacttgagcccaacaagtcaaggctgcagtggagctgtgatcatgccactggcactccagtctgggcaacngagctgtctgagacagangaaaaacacaaaatcctgtntcagaaacnaaaaaacaagaccaaaaaagctagactgg

SEQ ID NO: 270765 - DNA, 764 bp, Homo Sapiens
  misc_feature (337)..(360): n is a, c, g, or t
ccattattgtatataaagaacatggggacttttaatattagcatttttgctttcaacagcaattagcaatctcttggtttgctgtttggtaaagcatcggttaatgaggtcatctagtttaaaatcccagctacttgaaaataacagggaggaggtcaaatctatcatttcatgttatattctctgctctcttttcagttctctaaagaaaagatatctttgttatccacaataagtcattacgacccgttactggccctctgtgttttactaccacctcaagatacagttaggttctctcttgctgaagtactgaaataggataattcatctaatnnnnnnnnnnnnnnnnnnnnnnnntttgagcatctgaggatgaggaattggtttcgcgtaggttgtgttgtctttcctccgacagttctgagttcacgtctagcgaggggttgtctctatggtggaaggggttcccggcgtggttgacctccgagtggctgcttgtggtgtgtccatcgggctcccagtcccgttggtttgcgtgacataggagctgactgcaggtgtgtctccctgctgctgggcctgcagtgtctgtccacagatgtgatggtgcttctccccagctttgtgctggcaaatgaaccacataatctgctgtgttacagccactgcaggtatcactccgtctacggtcacaattctcagaactctcgcttggatactctgctgattgataatctgcagtgccgcctccggcgcctgcc

SEQ ID NO: 270766 - DNA, 401 bp, Homo Sapiens
ttagagaaaataatttaatagagaaacaatgaatgatactctttacactcagcctcctgcagggaggacagacagctcttgcccaaggaagcatttaagggcagaagggctacaaatcaccaacacccgctgattatttaaaagaaactctcaaatacattcttttccaggttaaattcactttgtcctcataagtgcccatgctgtgggctgtgaaggtatcagccccattgaagagatggggagacccaggcccagaaaggggaaagagcttgcccagggctccacggcggcagggcaggcctagaagtggggtggcctagagggcactggggtcagactgtctccaagcctccctctccctgtcccaggctcaaactccagcacaaggcccgcgctgt

SEQ ID NO: 270767 - DNA, 762 bp, Homo Sapiens
  misc_feature (76)..(76): n is a, c, g, or t
  misc_feature (295)..(295): n is a, c, g, or t
  misc_feature (422)..(422): n is a, c, g, or t
  misc_feature (429)..(429): n is a, c, g, or t
  misc_feature (438)..(438): n is a, c, g, or t
  misc_feature (448)..(448): n is a, c, g, or t
  misc_feature (458)..(458): n is a, c, g, or t
  misc_feature (480)..(480): n is a, c, g, or t
cacagcctctccatgaggtggtgtacttcagtgctgcccatgcccttcgtgagcatttaaatgctgctccgcgaanttgccctccatactgcactcaacaatccttactattatctcaagaatgaagcactgaaaagcgaagaaggctgcattccgaatatcgccccagacatctgcatagcatacaaactgcacctagagtgtagcaggctcatcaacctcgtggactggtcagaggcttttgcaacagttgtgacagctgctgaaaaaatggatgcaaattctgcaacctcangaagaaatgaatggaaattatccatgctcggtttattagaggctgtttctgaactagaacttttagggatttataaaaccttaccaaacagaagactggaccatgtggtcaagacttaacagggggnaggctgnctagaaagncaaattaagncaaagccagnaactattcacatttagcttaangagaaaaaggtgaccagtcatatttacatatattagaggagcccgttttgttgagaagataaatgtgtaacccccattgatgtttaaccagaaaagtacattgctaaccccaaacaggcatgtatcaaaacacctgtggagtactttagactccaacaaataataatgtaactaaaactgctcacacattttactgtactttccaaagtcattactaaattgtgagtaaatcattcttgaacttagagtatgtaaatgtaataaattccgttatccaggagt

SEQ ID NO: 270768 - DNA, 407 bp, Homo Sapiens
  misc_feature (31)..(31): n is a, c, g, or t
  misc_feature (50)..(50): n is a, c, g, or t
  misc_feature (58)..(58): n is a, c, g, or t
  misc_feature (66)..(66): n is a, c, g, or t
ccgtttcggagcaggatggaaggcagtgaanccccgcctccagcatggancccggganaaggcccntgactgcagatggagaggctgccctggccgcagcgcacggggctcctgccccacaaaaatcgcgagataatgagttcatgttgtttgaaagtccgtcatttctggtaatttgctatataaaactattgctatacgattaaaaactaatacagaagaatatttctttaacattatgttaaaaaggaaaaaagctaacattttctttgtagcaaaacactgccatgatttacattaaaattaggaacaaattaggatgtctagtatcattactaatattttacaatatcttttctaattaatgtggtaatgtaggaaaataaacacaaatatataactatcaa

SEQ ID NO: 270769 - DNA, 466 bp, Homo Sapiens
atgcagatatgttgtggaaaaggtaagcgtatacacatttgacaaccccagctactacttaattaggctgatcaagaattaccaattgctcctttttggaaagttcactttccctgctttataatttttttcctaactaaaccaagagttgcaattgtgtatctttatttttacttattaagaaatgtttgaaaactaagatgtctcttttcgtttacacgtttcttatgtcaggtccccagtagcatgcagtgactgtatagtggttagcactctgtgttgtggccacagcaaccatggttcaaatctgagtcatgacattgtgggaacatgttccttatttcagccacaaatcaatgaggtctgagtttgtgtagtataaacatttaatgtacagtaaatattttatgacatgaatttgtataatataaatatttaatatacaataaagaataagtaatcattc

SEQ ID NO: 270770 - DNA, 291 bp, Homo Sapiens
  misc_feature (155)..(155): n is a, c, g, or t
aaagtcccaatatgagcaaatatctcaaaatgatctttcagacaaatacaaagaatgttaacaagattgccagaaaaatctaatgaaaaatttctaactattctttgaaggaccagcctcatgagtaaaggagccggcaggagcaagggagcccncctcttcacagcagctgttacagtcgagcacaatactaacatgtatatcagtgtttcactccaccagggcccagtcccatctctcagaatacctagacaatatgtcattattcaaaaagttaagtcttctctcctc

SEQ ID NO: 270771 - DNA, 582 bp, Homo Sapiens
  misc_feature (28)..(28): n is a, c, g, or t
  misc_feature (51)..(51): n is a, c, g, or t
  misc_feature (474)..(474): n is a, c, g, or t
  misc_feature (511)..(511): n is a, c, g, or t
  misc_feature (517)..(517): n is a, c, g, or t
  misc_feature (528)..(528): n is a, c, g, or t
  misc_feature (552)..(552): n is a, c, g, or t
  misc_feature (559)..(559): n is a, c, g, or t
  misc_feature (572)..(572): n is a, c, g, or t
gagctaccacacccagcccctgctcacnatttatatggtaacttattttangaatagtaaagtattgcaaaatagttttttaatacagtaatttattatatattgaaatccaagcttgatgatatttcattaggttttgctgagtgtcatatgctaagttatttgcttatgaatttttctccaattgcctgtatttggtaagtttgcatggaaagttctgacaggaaactcagaaatatttcattgttttaccctactatcttttttgatgtgtcttaaagttgatttgctttaaattgcagtatcatcctttttttctgtacctaaatgtttttaactgaagaacacaatttccctcaaaaccctcatccctaatttagagccctcttatattaatatgagtcattttaaatgtatttcctgaaacacttctcaacttcgtaaataaaaaagagatatatcttaggtccattncagggctacttataaccaaaataggcacattggggtnggcttnttaaaccaacntgaaatttgttttgttcataggtnccggagnccgggggaaggtnccaggagctt

SEQ ID NO: 270772 - DNA, 337 bp, Homo Sapiens
  misc_feature (63)..(63): n is a, c, g, or t
aaaagtgataggattacaggcatgagccacttgcacctggccctacatctttaaaattttagnccacgagacccagtaaaactccttagtttaaaaggacagttgaattcaaatgcagctttgtaaatggaaaggttacagtttgtctgtccttcatggctgaagatcttaccaagttttaagaaaacaggatagcaaatttacatctcaaaacagagaaaattaagcattttcaagaagaagttagggtatgttagagaaagattaaaaatggacaacaagtgatatagtttgagtatttgtcctcttcaaatctcatgttgaaatgttatcccca

SEQ ID NO: 270773 - DNA, 610 bp, Homo Sapiens
  misc_feature (461)..(461): n is a, c, g, or t
  misc_feature (473)..(473): n is a, c, g, or t
  misc_feature (498)..(498): n is a, c, g, or t
  misc_feature (521)..(521): n is a, c, g, or t
  misc_feature (532)..(532): n is a, c, g, or t
  misc_feature (543)..(543): n is a, c, g, or t
  misc_feature (549)..(549): n is a, c, g, or t
  misc_feature (576)..(576): n is a, c, g, or t
  misc_feature (595)..(595): n is a, c, g, or t
gtcatcagatttcaactccttctatcagcatttttcctgaccagcaatcacaataacacaaaatgaaataaagaggggcttcacttgtttttaaaagcatttatagaaatcaagtcagagagacaaaatatttttcagagggtaacttcagaacaatctctcttccttggtaactgcagaagatgggcatctgaactcttccaagtaccaaaattactgtcacaaaaataatgaatttaaaaatagggcaaactttgagaagactacaacaatgcagtcaacactgagacaggttcccccagagaaaaaccttctgcttcagtgggcccctgcagaacaagttgctggctaagaaatttcaagagggtaaaggaggatctctccatagcccaatattaaggaacgcagggccaggagaagggtagccatgattcctcctccctcatgcttcacccaacttntaagtagggggntactggcctgatccttgggtagggncttcagccggggttttccaggtnttaaaattttntttgaggcctngggggnagggcccccatttttgggggtttgggnttgggcaaaccttggggtnttttggggcctttag

SEQ ID NO: 270774 - DNA, 445 bp, Homo Sapiens
  misc_feature (69)..(69): n is a, c, g, or t
caccatgcccccaccaccccactgatctttaactctccaccatgttgggccataagaagtcactatatnaattgttactggaaagcaagacttaacgaacaattctgactatgaaaaatgtctctttcagtttgttctgtaaatatttagaaaagtgccagctgtcaacctcagagtaactatttcgtaaaaatgtaaatatgtattaatccttgtatcttttatggtaattttgcatattgatatgaattatataaaattgtttaaaataaaaggtgtccttgaattactgaccacccgatagatgtctattgttaccaggttttacaatgcaaattttcactaatacctgggtttaatacagctcacatcactgaatgttacacatgagtttaaatgggtaatatacaggttttgttataataaagttactgattaaattagc

SEQ ID NO: 270775 - DNA, 142 bp, Homo Sapiens
gtttctaagtttttgccctattgaagatgacttcagaaaatccattccccagtcatgaaaatgtactgtgctaactttcttttccatagtggaaacacttatttatagtcatcaaaaatagtgaataaaaaacacatttgga

SEQ ID NO: 270776 - DNA, 443 bp, Homo Sapiens
  misc_feature (61)..(134): n is a, c, g, or t
  misc_feature (191)..(319): n is a, c, g, or t
tcacccacggggaaaatcgtgcgcccggcctcgtccaccgccagaagacgccgctacacannnnnnnnnnnnnnnnnnnnnnnnnnnnnnnnnnnnnnnnnnnnnnnnnnnnnnnnnnnnnnnnnnnnnnnnnntgagaggtgaagccagctggacttcctgggtctagtggggacttggagaacttttcnnnnnnnnnnnnnnnnnnnnnnnnnnnnnnnnnnnnnnnnnnnnnnnnnnnnnnnnnnnnnnnnnnnnnnnnnnnnnnnnnnnnnnnnnnnnnnnnnnnnnnnnnnnnnnnnnnnnnnnnnnnnnnnnnaaaatggaccagtcagcaggatgtgggcggggtcaaataaaggaataaaaagctggtagccgagccggcagtggcaaaccgtttgggtccttctcggtaccctggtggctttgttgttttgctc

SEQ ID NO: 270777 - DNA, 359 bp, Homo Sapiens
  misc_feature (47)..(47): n is a, c, g, or t
ggccaaattatgcccggcggtaggaccattaaaccttggaggagccngatggaggcctgatattttcggatgagtttttttcctcctcagcattaaatgctttagcaaatgacacattagacctacctcatttcgatgaatatctgtttgagaattattgaattaatgcttgttaacttttttcatataatatttattattattagaagaacttacaatgtgttcaggtagtgtttatacactggacttgtgtaattacttgtgtaataaccatgaacaaaatgcaaggtttaacctttggttctgcccatgaagcatgtaatctttcttacacattaaaatcactgaatgtgttaaaa

SEQ ID NO: 270778 - DNA, 424 bp, Homo Sapiens
  misc_feature (13)..(13): n is a, c, g, or t
  misc_feature (50)..(50): n is a, c, g, or t
cataaccccaacntttcccccttcctcgggacccttattggggaatccangggcctggccaccttccctgaaacccttcaaccagtcatgccctggatttacaactctggcctctgcctaggaacacaaaatcttgtcaaaggtaaacataaccacttccccaaattccaactcaattcttcctctttaaagctccaagccaggaagaactttcttgagcacctgttatatcacgtatcttcctgttctccattaaatgtcaacatttgatttcaaccaagtaaagcccttgagatgaagaatctgcctgaaatttgtatactctacaaaaccataaatgatataatctcataatatacttccttgtcagaaaatatttgtaatcattccttgtaacaaaaatacacatataaccatatacatt

SEQ ID NO: 270779 - DNA, 473 bp, Homo Sapiens
attttctttacttgatttaaggaggttaaattacagtgagagagttgcacttatttagtttgcataccgtactcaactcttagctagcatagggcaggttccttagttgaaaaatttcccacaaaacatggatgtaaagtggaaagatcagttcccccaaagaatatcagttaccaaagtaggatgaaaggatgttgggtagatcaaaacaacaaatgtccattacagcaattaacaaaagttagggagtggggaagtctgagtgctaatatggatttcaaaacaactttaaaaatggcttcaaacattttatgctttttgtaatttagtcattttaatattagataaatcttcctgtaactgaaagttcttgagttaaagaaaaatattcggtagttcagctcttccttcaattttattagttgctttttcttttgttcaagtgaaataaacataaaaataattttaaaata

SEQ ID NO: 270780 - DNA, 368 bp, Homo Sapiens
  misc_feature (55)..(55): n is a, c, g, or t
  misc_feature (74)..(74): n is a, c, g, or t
  misc_feature (80)..(80): n is a, c, g, or t
  misc_feature (111)..(111): n is a, c, g, or t
cagaaatgagaaccagaacaataatacaatgtgatggacaacaatattaatatangtgcaaagtgctccaggangcccangtattgggacactggactttacaacgatggngcgggaagtctgagaggtcctgggtgaaggaaataggtaagaaactagttccttcgaggaaacgaaccccgagttggggtggtggcaatggaaagcaagtccgcttactagggagttgtttggttacatctctagtgtttgacccacagagtcagctccggggttgggtttttgttttccgagactttggacaaagttgaccaaatgaaaagcaaacctcggggatactgtctgatcatcaacaatcacaattttgc

SEQ ID NO: 270781 - DNA, 444 bp, Homo Sapiens
  misc_feature (19)..(19): n is a, c, g, or t
  misc_feature (76)..(76): n is a, c, g, or t
  misc_feature (86)..(86): n is a, c, g, or t
cccttcctaaggcctattnggtcagctggtcattttattctatcaggtcctccctaatgattccaataaattattnttgtttgttnttttaaaatgatccaaaccctggttttatggattgaaacagaagaatctagctgatataaaaatatttttgactttgtgaaggtttgtaacattcttttctgtaattataattcctatatatcttaattatatacatgtgaatggatttaaacttaactttggtccaattataataatcttttatttgtacatgttgcttgcttagctagatttccttactgagtaacttttcttcaagaatgattcatgggtcctgtatttctagaactcttttatgttcaaaaatacccatgtgctgcctttgtactagaataatattttgactaggtttaatatttttaggtcaaaatttgttgg

SEQ ID NO: 270782 - DNA, 117 bp, Homo Sapiens
ctataaaatataaaacatggaaaatagggaatgctgtttttgaggtaatattaataatacacagaattttcattagtgtcgaaggatctaaaaagacaaagtatatcatgggaataa

SEQ ID NO: 270783 - DNA, 656 bp, Homo Sapiens
  misc_feature (44)..(44): n is a, c, g, or t
  misc_feature (74)..(74): n is a, c, g, or t
  misc_feature (86)..(115): n is a, c, g, or t
  misc_feature (131)..(131): n is a, c, g, or t
  misc_feature (185)..(185): n is a, c, g, or t
gggaaaattgggcctacctagtatgtatcctgaacaggtccccntaatagccctaagaggcccctaagaatgcnagacgggggagnnnnnnnnnnnnnnnnnnnnnnnnnnnnnngacaccctctcccaantgcctggggagggccctgggaaataggtgaaagatcaaaacccacagtgggagnaggagggtaaaagaatgtgagcttccaagcgggtaaatgggcaagcccacacctccccagttccctaggagggaatcgccacggccgacttcagcattctcgtctttactaagacttacccatagagaactacagcaggaaaccgatttcttcattcattctctttaaaaagtatgaatgcccagtattaagcttctatttttatttgaaccaaacatattctttggttaactatgtcatgggttctcactataatcaacaaagcatacttcatatattttatatctaaatgaaaatatgcttaaaattcaactggaaccatggcatttcacatcaatttgagctcagcaatatgcctaatttggacattttaattttagaaaaccaatttttaaaaattcttaaatgcagtgttttcagaacatagttaccaagtcagagaataaccacttatattttaaaaagattaaa

SEQ ID NO: 270784 - DNA, 516 bp, Homo Sapiens
  misc_feature (349)..(349): n is a, c, g, or t
aattcagtccaaacaaaagttatagggcacccactgttacaaagaacatcacaagcactaagaaaacaccatcccagtgtttaagaaaacatggcccggtgtaggagacctccttacacacaaacaactacaacgtaaaccagatttaaccactacatggcaacagaaaccatgtacaatgggtagaggggagaggaagaaggctaatcaaggaaggctggacaaaagaagagatatgtgttccctaccttcttccacaaaagttttgaggcagcctgaaggatgagcagggtttcaacaagcagagcaaaaaccaggcaacccaggcagaaaaacaggcatagaaaangggggaggagggcacagcgggctcaaaagatacttctgttttataaataagggagggtggtgagccatcccgtggaactcgtgctttaattctgacatgtacactagagcacttgaagcgcgcacttttatactttctccctgttagtaatattactgataggttca

SEQ ID NO: 270785 - DNA, 488 bp, Homo Sapiens
  misc_feature (437)..(437): n is a, c, g, or t
  misc_feature (439)..(439): n is a, c, g, or t
gctttgatgagctgatctatttagtacatgaaaataaattcagaagcatattaagatgaaacagtgttcactcacaaatctcccagttgccgttgtgttccccaggcttcacagacagcctggaaaaactcctctagggcttgcagacttagctggaaactaatcctgagcaggaagcttggcttgaagggataagaggggaccctccagggttggccaatcacaccgtttattcgcacttgggcagcaagacaatgggatgatgtgggaggtgccaggcccctgggttggcactaatttggagtatcggttgagacagggctggagagaggcatcttagaggtggcccccaaatccgcaatcgggagaaaaaggcaagaatcgactagagattgtcaggataaagggagcactgcccacccctgctatgtctgctncntccacaggggcttctttaatacctggggttccctgggtgatgaatgtcc

SEQ ID NO: 270786 - DNA, 411 bp, Homo Sapiens
tccggagggcccgaagaagtcccgcccgtccagcagggctgtcagcttcctgtgtggcagcacctggcaacaactggctctggccagcattatgctaaaaccctgttactctccaatgaaaccagggaggcgggctcctctctgcgcctatcccttgagaattctgtcttaccagtgaagggtggggctgcccagatcaggcagcaggagtgaggggcacagtcaccccaggccttgctgagcccaggtctgggtactgagtgtccagagctgcctccccaggaggttaaggtgggggcaaaggggaagcttcaagcactttgcctacttttgttcactccccagtgcactgtgactcaggccttcccatcaggcctatttgtctacccaataaagcgtgttttttccaga

SEQ ID NO: 270787 - DNA, 402 bp, Homo Sapiens
  misc_feature (258)..(302): n is a, c, g, or t
aatgtttcttttaattatacgagatcatgacccatgaggggtctttcgttgtcttaaatgaaagctactataggaataaagtttcttcaaacaagttataaatgcatacctccaaaatgcagccagaagccctccttgaaatcacttataaaaagtttaaaaaggctaaaattgactacaaagttatggaaaatagctccattttgtttctttaatgaaactcagcattgggccgggcacgtctgtcacgcctctaannnnnnnnnnnnnnnnnnnnnnnnnnnnnnnnnnnnnnnnnnnnngaacaaatgcctttttaaaccttttaagaacattttttaaatgtctttttctatgtcaaatgtaacgtttatttttttaaacaataaaattgatttgccg

SEQ ID NO: 270788 - DNA, 423 bp, Homo Sapiens
  misc_feature (12)..(12): n is a, c, g, or t
  misc_feature (46)..(46): n is a, c, g, or t
  misc_feature (71)..(71): n is a, c, g, or t
cccttggttaanaatttccccagcctcagatagtatgtttataccnagtgtggagaatgggactaatgcangatgcctattaatgccttgcttctcaaagtgtgatctatgactggcagcattgtcatgacatgggaatttattagaaatgcagaatctttgccctcatccagaactactgaatctgaatctatattttagctaacttccctaaggtattcctaggctcattaaagtttgagaactgaacaaacttataaaatgcttcagtagatcagcagttgcttttaatataggaggcaatctttataagggtttctaggatatgatccttagtgtgcagctgggtctgtaggaagatttatatctacaaattcctgagttgtacatcacattgctagggaaaaagtagagcttttattg

SEQ ID NO: 270789 - DNA, 142 bp, Homo Sapiens
cctgtgtaagtttgagtctataaagaactctgggctttggaagccttgctaaccacagctttactttgattgttttaaagcactatgtctggtgtgtgctttacattaaaagcagagcttatatggctgatcacctttttaa

SEQ ID NO: 270790 - DNA, 415 bp, Homo Sapiens
  misc_feature (366)..(366): n is a, c, g, or t
  misc_feature (372)..(372): n is a, c, g, or t
  misc_feature (378)..(378): n is a, c, g, or t
tcggacatctcagatgtgactcttgctgccaggctagaatttaggctatgtgataattctcagctgtcctacaatgcctgcttcttgaaagaagtcggcactttctagaatagctaaataacctgggcttattttaaagaactatttgtagctcagattggttttcctatggctaaaataagtgcttcttgtgaaaattaaataaaacagttaattcaaagccttgatatatgttaccactaacaatcatactaaatatattttgaacgtacaaagtttgacatgctctagaatgacaacccaaatgtgtcttacaaaacacgttcctaacaaggtatgctttacacttaccaatgcagaaactgngtttgntttccnctctaaaaaacagggatgtggtcaaaatggataaatt

SEQ ID NO: 270791 - DNA, 397 bp, Homo Sapiens
gaatcctgaagcagcggcccgacctgcgcgccaaccccctgcacagcagcccggccgcgctgcgcaagctggtcatcgacgtggtgccccccaagttcctgggcgactcgctgctgctgctcaacttgcctgtgcgagctctccaaggaggacggcaagcccctcttcgcctggtgagccgccccgcgcccgccgccttgcctgcagtaaacgcgtttgttccaacccggggccgcggtgcctcctgcgcgtccccccggaggggaaagggccgcgtcccccgcgcgcgaggccagagaaggccccgctcccaccggtgctgggccccgaccgcagcccgccgctgcccgcacatgcggagtgcttctcacccctcattaaaatcatccgtttgcaa

SEQ ID NO: 270792 - DNA, 344 bp, Homo Sapiens
  misc_feature (15)..(15): n is a, c, g, or t
  misc_feature (47)..(47): n is a, c, g, or t
  misc_feature (109)..(109): n is a, c, g, or t
  misc_feature (160)..(160): n is a, c, g, or t
catgtatgttgtgcngtgctgcaatgcccagactaaacgtgtgcacncccaccggtttctaaaatggaatagacaggaaaagattgtgttttatatcatccctatctanttgtaacccaaaagacctaccatcgcatcagtgaagtccgaacacatcttntgtttgaaaggcttgtcaatttcataatccttgaattggcttcttggtgaggattttctgacagagtgatacccatcaattttctatcccttagacaatgtagtgtgaagttcacagttgacaaacaacaattaatgtttcccttggatgttttgacaaaaataaacctcatcattgttatcaa

SEQ ID NO: 270793 - DNA, 455 bp, Homo Sapiens
  misc_feature (46)..(204): n is a, c, g, or t
tggccatccaggtaccaaggttttcggggtccaccataggttcccnnnnnnnnnnnnnnnnnnnnnnnnnnnnnnnnnnnnnnnnnnnnnnnnnnnnnnnnnnnnnnnnnnnnnnnnnnnnnnnnnnnnnnnnnnnnnnnnnnnnnnnnnnnnnnnnnnnnnnnnnnnnnnnnnnnnnnnnnnnnnnnnnnnnnnnnnnnnnnnttgtgccttttcttgtctctctagaacatgtgcctctcttacttttcagaatactttttccatgagccatcttcaattattattctttgttgtacatgtatctgcaagcccattttcctaatagtttgtgaccttctgagatgaaaaacatggtgcctgcccttaagagaatcacatctagaaaaatatacaatcaaatcagatattacagtgataataaacactgaaataaaggttattgctaaaaggtg

SEQ ID NO: 270794 - DNA, 429 bp, Homo Sapiens
tctcggaaatcgctgctgcacgttccctctttgtgccccctgactggcttgtggggtctttctctcaccatgcatggcctgtggctctgtcagcaaacgttttctgcaaaaggccacctagtaagtgttttaggcattgtgtgccattattgtctctgttgtgattaatcacctttgccattgtagcacaaaagcagatgtcaatacattggcaaatggctgtgactatgtttcaataaaactttatttacaaaaataggtgctggctcacgtgctgtagtttgctgaccccttgcatcagtgaagattttttcaatatggaaatttcagaatttccaccaaatctacaaaattcagatccgtcattccaatctttattttatcttgctgattaaatggcactttaaaaaccacatgctaaaaggaaaa

SEQ ID NO: 270795 - DNA, 537 bp, Homo Sapiens
  misc_feature (29)..(29): n is a, c, g, or t
  misc_feature (53)..(53): n is a, c, g, or t
  misc_feature (97)..(97): n is a, c, g, or t
atttggcctctgtcacatccagtttcttnaggcttttagggtaagcttctttnggcttttttccatatgttcaccaggctaaaatttaaaataatangaccaggtttctctctctacaagtggattataaacattttcaccaaatcataacaatactccagctttccggtccgacttcctaggagcctggagttagcaaaggttgtctctggatttcattctctgagaatatcacagagcctgggagaagatgaatttacatgaaattgcaacatacacacctttttattttctggtgttaagctagttgtctttcctaccttacaaatcatgttagttttatgatttgttccgcatgttttatgtttattgtagaaatgtttatataacatacgctttccatatcagggaaaatcatatctgtttaataaattggctataactttaatatctgtggacaacttgtaaaatttggaatgtatcatatgtaaaaagtttaaagatatccaaataaatgctttaggtgttggcattaaa

SEQ ID NO: 270796 - DNA, 448 bp, Homo Sapiens
  misc_feature (22)..(22): n is a, c, g, or t
  misc_feature (28)..(28): n is a, c, g, or t
  misc_feature (46)..(46): n is a, c, g, or t
  misc_feature (55)..(55): n is a, c, g, or t
aagggggataataaaacattcncccccnaaatccataacaaatacnccccagctnccggggccccgacctcccccaggacccccctgagtaagcaaagggtggtcctccgggatttccattccccctgagaatatccaccagagcccccgggagaagatgaatttaccatgaaattgcaacatacacaccctttttattttcctggtgttaagcctagttgtctttccctaccttacaaatcatgttagttttatgatttgttccgcatgttttatgtttattgtagaaatgtttatataacatacgctttccatatcagggaaaatcatatctgtttaataaattggctataactttaatatctgtggacaacttgtaaaatttggaatgtatcatatgtaaaaagtttaaagatatccaaataaatgctttaggtgttggtattaa

SEQ ID NO: 270797 - DNA, 423 bp, Homo Sapiens
cattgaatctttaaaactgttcagcagtatatttactattattatccccagtctacagatgaagaaactgaggctcagagaggctaataacttgcccacagtcacatacctttggtgtgagttgctgaggtttaacctaaacattctaactccagagtttgtgctctagccactatgctatactgtagccaaacaccagcatggatatcccaagctcaaaggcacttcaaataccacaaatcaatcaattttccagctgagaaaacaggcctagggagattataggaattacctagtgatagagtcagggttccaggcagatctcttcactccagagttctacactctctccactgcatcagaatacttcaggttcgtagacaagcatgtgggtgcacacttgtagtcccgctatggatcaca

SEQ ID NO: 270798 - DNA, 484 bp, Homo Sapiens
  misc_feature (432)..(432): n is a, c, g, or t
  misc_feature (437)..(437): n is a, c, g, or t
ttaaacctgcctacagaatgttagcttctcacagatacagactgtcttacacaccatctttgcattccagttcttaacaacatttggggtacatggtaagtactgaatcactgttagacagaaatagctaagatatgaaagcctgtcctttatcatgcagaagttagctgacatgggaggaaagtaaactgggctatggataaagtttaagtagctggaaagatgagagaataagaactttcattttacatatatgttacatgcatgttaggaatataagttccctaaggctagagaccatgtcttattaatcttcatgttcccagcacgtaggaccatggtaccaattaaacggtatactgaggtgaaggggtgggtaaacggtatgcctgaggtgaaggggtgggagcctatggtcgccaatgaccgggngcccngggttattgatgcttactatgtacccttatgtttactaccaggcttt

SEQ ID NO: 270799 - DNA, 345 bp, Homo Sapiens
ctggaccaccaatcctggccctataattgactttaaatattaaatatcacttttattgtcttgttattcatgctcttcccatacctatgaatgtaagaattagttttcttctataaatgcagtgatgacggggaactggcccaattctcaggaagacaaattagaacaaaaatactgccacatataatacaaagtaaattggccacacagataattcagagttgacatttcaattcctcacctctttcctttcactacactctccatatagctaccttctacatacatgaagtttctgactcaatcactacatttaactacttcattctttggcccgctacctag

SEQ ID NO: 270800 - DNA, 438 bp, Homo Sapiens
tttgacagagttctgaatgtttcagagtagtccaagtgcacccaaaagcacaataattaaatgaggggcaggagagtggtttagaagaagattgtttttctggattcagctccaacaaagtttgtcctgcaggtcttggtgcggtgccatggtccttctcgccaataatattcagcctggataccccgctgtggctctaccagggaggaaaatattttcctgccactgccctgagcctcctgactgaccccagctgccttagacatcccagcttttgggactaccccagacctccctataaccagcaatcagaggctggcacagcaagggtgctttggaaacctgcctggtgctccagggtgacaggcagcacctgctgtcattggtcagtgtctgtgcagtatttgctagagttttgtgatctcagccttgaaatct

SEQ ID NO: 270801 - DNA, 567 bp, Homo Sapiens
  misc_feature (543)..(543): n is a, c, g, or t
ttttctgcttcattatgaagataactacaggaatatataacattagttcctgttttccaccctgtgaatttacctgaattcatagaatccttgcgtgctttaagcaaaaaatgtattttgtattgaaattgattcttatctcaattccagacacctatacagtgctggagacacctaccctacaccacgaaatgccagacagtaattcctagatcaaagtaaatgatctaaagcatgcatcacatctgatctggaagtggtccagaaacaggtgtgttgcatcttctgtagctgtaaatagagattctggaagggtgatactgtttccttttcagggtaaataacccatacttgttatgccatcaagccaagcagcaaatgaataatgtcatgaaaacattattagaacaaattaacaaattacaattacaattatcaaattaacaattagactatagtagcaccatcattctaaaaatttaaatttgatataaatatacatttccatatcagcctaaatttacaaagtcctataatatgtangatataaggtcaataagttaagaa

SEQ ID NO: 270802 - DNA, 547 bp, Homo Sapiens
  misc_feature (28)..(28): n is a, c, g, or t
  misc_feature (36)..(36): n is a, c, g, or t
  misc_feature (237)..(237): n is a, c, g, or t
  misc_feature (245)..(404): n is a, c, g, or t
aattttataggtccgggtttggaggagntggttccngaatgggtggccatcattttaaggacgtttggcaaagtgccatgtgggaaaggctggtcgcccccacccctaatcttaggccaaatgggcttttcccagttgattgggtccatcttgtgtaacacgtggctggcagagaagggaagatgaagccaccatcttgaaaatgtctagtccttagtttctgctggcattcacccnatgcaagnnnnnnnnnnnnnnnnnnnnnnnnnnnnnnnnnnnnnnnnnnnnnnnnnnnnnnnnnnnnnnnnnnnnnnnnnnnnnnnnnnnnnnnnnnnnnnnnnnnnnnnnnnnnnnnnnnnnnnnnnnnnnnnnnnnnnnnnnnnnnnnnnnnnnnnnnnnnnnnnacagcatgaaataatgatgtatctataaatgagcctttgcaagattaccatttatcaaagaaaaccagtgatgtttagttaactgtttgtaaaaataaatggttagtagaatgtctaattcaataaatgtttcataaatgagt

SEQ ID NO: 270803 - DNA, 601 bp, Homo Sapiens
  misc_feature (43)..(43): n is a, c, g, or t
  misc_feature (79)..(79): n is a, c, g, or t
caaactcatcttgtctacacacggaccaaaacttttccacacntggcacaaaccaagcttagaagaccactgattctcntagatggagggacttaagattttccttttttccctttatcaacatttttacagttattctttcaaatgacaggtgctgctctagtagttttaaaaaatgtatacaaggtatagaaattcccagttcaaaccaccagcagatggagcacacaggcttgttcatattccctctcaaactccatctccaaataacacaaagaattaaaaagacaaagaatggagaggcagaaacgacgaaccagccttggaggactgaagcagccggccacgtgaagactgacttggcacagggaaggctgagtttcaggagcccacagaaggggcatcaactagagatgagaattcaggccacagaactccagagaggcctggacactgatttggcggccagtaagggcagggtgggctgagaacttacaggccagggcagtgggacatgtcccttccttatggctcctggggccagggacacccagcacagccacagggtgaccagacaccatccagaaatagggaacttggt

SEQ ID NO: 270804 - DNA, 875 bp, Homo Sapiens
  misc_feature (825)..(825): n is a, c, g, or t
tgtcgtttatttctatttataacaaactcttgtgttgagggctcttgatggacggcagcaagggagctgctctgctgcatatgaaaccccgacccagagcccctctactcatgcgatgtgtagttgacagccacttcacaaacattttcagctacagaaaatatattcaaggaagaatgttaaaaagtttccttataacctacaaggggttctctctagatgtaaacaaatctggatgaaatattttaatccaagtataccatttcccacgtcgtaaatcttctgggctggtgggagccaatccagttacacactggaaggggagtgagggtcccagggcttccccacacctcacaaggcccacccttgtttccactgaccctctctttgacctgaaacccccaattgcctccacaggcaaaacaaaactcaaatcttctctagactcaaaggacttaagactatgccaacctatttgtttgtaattacactggctcaaggctcctgtttcctctccttcagccattctccagagcgctcctcaagagattttaagtctctcacagccagactgtatttcccttggtcaagaagcaaccacggaatattctacctgcaggagataacaaatgttgactaatttatgtatgagaccattctatagtacttttgcagcgaattaccccctattctgaaggttaatgtttttccttctgatgatctagacggggtccacacactacagcattcagcccaaatccagcccatgagcagagaatcttttttaaaaacaatcctttaaaaatataaaaacctaagactatntgacagagatcatatgtggcctgtaaagtctaaaatatttactgtttggc

SEQ ID NO: 270805 - DNA, 518 bp, Homo Sapiens
  misc_feature (138)..(138): n is a, c, g, or t
  misc_feature (169)..(169): n is a, c, g, or t
cagaggaggcatcgggccaggcaggtgacgccagcttaggaagcatctgatgcaccggtccccacaggaccaaacgcctagagagctggtgtatgggttcagcagacagccatctcgctgcgtgcccctggggtggtnactcagttgcctcgtccataaatggaaatgnctcaatcccttttatgaataccctcaacttaaaataagaagggttggaaaaagaaatgaacatttattgaatatatgtcatgctttattggccatcttgtataataagcacagcaaccctgggtgggagagcaggcaacatggactacacatgggaccccaggaaaagctccttgatggaggtggtgctccagaagccacctgagccaggcccatggagtcttttcctggttgactttactttctgatgtcaccagcaatgaaccacaaatcacaaggatatgacctctcctatctgtcatgacacatcagaaactcagaggtctcccagtaaaagaggccgtggaaga

SEQ ID NO: 270806 - DNA, 572 bp, Homo Sapiens
  misc_feature (24)..(24): n is a, c, g, or t
  misc_feature (41)..(41): n is a, c, g, or t
  misc_feature (68)..(68): n is a, c, g, or t
  misc_feature (78)..(78): n is a, c, g, or t
  misc_feature (518)..(518): n is a, c, g, or t
  misc_feature (529)..(529): n is a, c, g, or t
  misc_feature (536)..(536): n is a, c, g, or t
ccaggtggggtggggatttaaccnctattatttaaggggcncccaggccaaaagggccatggggttgncgccacccgnggcctttattaaatggtggtgggaaattccaaccagcccgaatgcctgggcaaaccaggtgccaagagctgaattaatatttaaacccctacccacccagggggaattgcagtgcatccacgttgacagccacagcacgatgctaatttcattcacaagcttaaaaatctcaatacatttaaacacgtgaatgtattaaattttaaaaagtgtaagtagcataagggtatcccagaactaaaaattgcaatttctctctgggacttcaaattcatttatctagccagaagcatggtgctttttatgaatgaagtatatcttactactttcacatacaaattgtgttctattattatatgtagtgcagactgttactaagcaagattttctcttactttatgtgaaattccttgtaagtcataagaaaaccaaggattcanactatagagtntccagcntctgatatcatacatgaaacagggtatcatggtgct

SEQ ID NO: 270807 - DNA, 529 bp, Homo Sapiens
gaaactccgtctcaaaaaaatgaaaaacagaagattgctaatcagaaacatgggatttgagcctctaaatagctattgactgattaaatacaatgtaaaatgtacccttggggacttatcttcctctgggccctgttctggaattgcaggattgggttatgagtatgaataaaccatgttagccaagcatgttgtgctgagaagtattgaagctgtgtaatatagtgaggagttatagatttcagtgtcagatacaacttggtttaaaacctggcttggctaaatattagttgtttaagaagccatttcagctagctcacaaattcgttaagtgtggcctgtggacccttgggtctctaaggtggtacagaggcaatggagggtaaaactgctcgtgccttagcatgaaccaagggaatgacactagaatatactgattatcattgagttcttcaccaacatgcctgcacagtaaaataaaatgccagtttcacttaactctcaatcctttagaatatccattatttga

SEQ ID NO: 270808 - DNA, 531 bp, Homo Sapiens
  misc_feature (78)..(78): n is a, c, g, or t
caatcccttagtcttgctacaccggatgtgactgaactaggctacacagaggtcgccacttggactctgaggttggtntggaaggggaaaaggggatgagacctgctccccagctcttcctgtcagccggtttaccatgggaacagggttaacatctgtgttaggggaggtcaccttaccctttttcataggggaagagtgtcacactcctggctatctccagggggaatggggaaaagaatctttcaagggcaaagaactcgtgggaggatgtctgttgtatgtaatactcacaatggcttttggttagtgttgaaggtgggaagagcatttgtaggtccagaagagtgaaagagagggaggggtgcagcaacatgtgcacaggcacgcaaatatgtgcacgcacacatacaatctgggttatctttgtgctatatagtggattataattctgtgaaaccaagtttgtatattgaattacatttaaggagtgttctttaaaaagagaaataaatatacaattacatgcaa

SEQ ID NO: 270809 - DNA, 509 bp, Homo Sapiens
  misc_feature (142)..(142): n is a, c, g, or t
  misc_feature (401)..(401): n is a, c, g, or t
  misc_feature (425)..(425): n is a, c, g, or t
  misc_feature (478)..(478): n is a, c, g, or t
ttgaaaagataggtttttattcatcaaaagttaacagcaacaggcacatattaaaatgagtatggcaaagcttttacaaatggctttacactcaagctttctcccaagaaaatggctgttgcaacaaactgtaaacaattantaaacagtcttttacagtaacaagggaaatacaaatgaactaaaagaaagcaccggtttctcttaaaactagattacagttgtgcttactatacataaaacaatttaaaacaaattacaaaagtggaatgtttgaagtttaaaattagtccttatagtttgtcctagaaaacatctgttcacatcaaaaggccccgtcaaagggtaacgtttcatccaaagggagggacaagaaaaccaatgcacttttttccaatcanaaccagaagtttggtcacttagcnatgtgcatagtttaaggccactgggagccatctggttacagcttacctaccancttccctcccccggagtgtggctgctcctta

SEQ ID NO: 270810 - DNA, 623 bp, Homo Sapiens
  misc_feature (174)..(174): n is a, c, g, or t
  misc_feature (270)..(270): n is a, c, g, or t
  misc_feature (493)..(493): n is a, c, g, or t
  misc_feature (531)..(531): n is a, c, g, or t
  misc_feature (534)..(534): n is a, c, g, or t
atgagccaccgcgtacggccaaaaccaatcatttctaaagaagcttcattacagccaacagagtcaacctcccccttgttcagccaagattctggctgggtccaaggtctatattccctgctcaatatctgggagaaagggcaatcaagggggaatttagctaaaaggcagaanggaaggaggaaaagataggcgccaccaaacagcactgcttcacaaaatcagccaagactgcgtcagggagcaaaagcaccttgaccccaaccctanggtacagttcctgggtggtctcttaccgaggttccatggggtggtccactctgctctatcatgttgaactcacaggtttgactagcgaactgggcatattctaacagcccgctgatggggttcttcagctggcactctgtcagtttcttgtagggtgaacaccgtggcaagccatgactgtagaaggagggcatctccatgatggctcgaaactcacctggtntgcgcggatactattcaagtcatctgagatgtcatctngtnccactggccattttcaaagtcaacataccctgcttttgaggggccattgtaatgaacaggtggtttcagtcttgctggttctggtctgg

SEQ ID NO: 270811 - DNA, 635 bp, Homo Sapiens
  misc_feature (18)..(18): n is a, c, g, or t
  misc_feature (94)..(94): n is a, c, g, or t
tggcaaggattggacagnctaggtaggctaaatgtgtgctctgtccctgtttgcttcaacagaggagcaagcctcagctgagaaggagggcacntggaacacctagctcctcccgtgattccccaaacccataacattcttccatagggctggaaccagtgccccgtcctgacagggatgaaaagtgaacccctcaggtcaggagaggccagagttgaggttctgccacttcctgtccctggggagccactcaagttaccagggctaccggctgaaataaatcttttccgggtagggtcaagggcagtgttgttccaaggcaactgatgtaggccagttgcgtgactccaggtttgtcctggtactcagtgggtccaatcacctggcattgatcacctggcattgatcagcacccaccccacccctgaggcttgcccacccccaggccctcagatccctgctcttcctgcctttcctgcccatgtgtcacccagcacccaaggttcagtgacacagggtggtttggagctggtcactgtcatagcagctgtgatttcacaaggaagggtgctgcagggggacctggttgatggggagtgggaaggggaaggaataaagagatcttcctcaggtaa

SEQ ID NO: 270812 - DNA, 365 bp, Homo Sapiens
  misc_feature (34)..(34): n is a, c, g, or t
  misc_feature (44)..(44): n is a, c, g, or t
  misc_feature (57)..(57): n is a, c, g, or t
  misc_feature (72)..(72): n is a, c, g, or t
agaggaggcccattttctccttacttgtcccttntctcccaaangaaaggggggagntaaaacctgaaaaantaccggactgatcagcacccactggccaggcccgtaggttaaagattaacccacaccctaaccgcttgtgctatctatagatcacagacaatggtatggagaaacacttgccttgctcaccacccccacctagccatgtaccccatgcttgttcaatctatcacgaccctttcatgtggaccccttagagctgtaaacccttaaaagggccaagaactctttctctgggactcagttcttgagacgcaagcctgccgatgctcctggccgaataaagcctcttccttctttaa

SEQ ID NO: 270813 - DNA, 483 bp, Homo Sapiens
  misc_feature (39)..(39): n is a, c, g, or t
  misc_feature (54)..(54): n is a, c, g, or t
gcggatttacccccagggcttttttgccttggttgaacnttgaagccggcttcnggggcgtccccaagcgaacgcggggaaaaggggcaagggcgttgaccttgcttgcttgaagcttggcttgggcttggaccccggtcccttaggctgtgaccgccgaactccactgcaaacagacgggcgccacccaaaagccaggccctgagggcctgggagtcctggactgagaaagggggttcctgggcccacctgctctgtgtagggctcgtcctgcggtgcccgagaatcactcgctaacccctatgcccggtcccggaccgacatcctggagccgcctgtgcagcctgatgccccctcgtggctgctcccagggctgcacctgccaggacctaatgttcttaggtccctctggccagaacccacacccggccccttcccacctgtcatactggtaactgtaacaagaaaaacgacatcacttaa

SEQ ID NO: 270814 - DNA, 560 bp, Homo Sapiens
  misc_feature (129)..(147): n is a, c, g, or t
  misc_feature (201)..(509): n is a, c, g, or t
  misc_feature (514)..(514): n is a, c, g, or t
  misc_feature (521)..(521): n is a, c, g, or t
  misc_feature (537)..(537): n is a, c, g, or t
ccaggctatgaattgacaaaaagcagctaaagacaaaaacagtttcataattaccatttgtccaaagtcaacctctgagctaaaacacaatgttttttatgtttctctacttataacaaaatttcgggnnnnnnnnnnnnnnnnnnnttggtacaccaatactaccactgttttatgatctctgtgagaatttaacagttnnnnnnnnnnnnnnnnnnnnnnnnnnnnnnnnnnnnnnnnnnnnnnnnnnnnnnnnnnnnnnnnnnnnnnnnnnnnnnnnnnnnnnnnnnnnnnnnnnnnnnnnnnnnnnnnnnnnnnnnnnnnnnnnnnnnnnnnnnnnnnnnnnnnnnnnnnnnnnnnnnnnnnnnnnnnnnnnnnnnnnnnnnnnnnnnnnnnnnnnnnnnnnnnnnnnnnnnnnnnnnnnnnnnnnnnnnnnnnnnnnnnnnnnnnnnnnnnnnnnnnnnnnnnnnnnnnnnnnnnnnnnnnnnnnnnnnnnnnnnnnnnnnnnnttttntgaaatnccaatacccaatgtcngtaattatgatccggggatgggg

SEQ ID NO: 270815 - DNA, 203 bp, Homo Sapiens
  misc_feature (32)..(33): n is a, c, g, or t
  misc_feature (64)..(64): n is a, c, g, or t
ttcggcacgacggttggctctgattctccaanncagagcctagtatacagtattggcttaagcnaacagccagtggattagaatgtacaacatatatataacgccctgacagttgccaaagtctcatgcaatgcaatgacctggagaggtagtactgacactattaccatttaacagaagaggttaagtctttcgcccaagtt

SEQ ID NO: 270816 - DNA, 524 bp, Homo Sapiens
  misc_feature (51)..(51): n is a, c, g, or t
  misc_feature (285)..(322): n is a, c, g, or t
  misc_feature (336)..(359): n is a, c, g, or t
cctgatttgcatactcttgagtcctgactttctccagaatcttggttggtncttatgctaagcagattagacatccccaagcactttcagcccatcctggctgtgctgtcttttccacaaccaagatggtttatgaaagctaaataaagatgatgttcttgcccaaacagcagctctgcttcagtcatgaaactagcccttcctttccccctgcttcatacaggggacaactacgaaattgctaaaaacgatgcacctctatcaccataaaaagatgtttaaagnnnnnnnnnnnnnnnnnnnnnnnnnnnnnnnnnnnnnncacacacacatacnnnnnnnnnnnnnnnnnnnnnnnnctgagttataaaagaaatggtagaaaaggatataaaaaatgatttcatacagaaacatttgtttctacaaataagacagtaaaatgtataaagatatacaccagtctcttaatgatggtttccctctaggagatgggagtcaggggaaacttgtgcctctaactc

SEQ ID NO: 270817 - DNA, 270 bp, Homo Sapiens
  misc_feature (30)..(30): n is a, c, g, or t
  misc_feature (89)..(89): n is a, c, g, or t
cagaaaatcccccaaagtcaaaagttaatnccatgaagagcatgtgctttctttgtaggacagcatctcagccgcatatgcagtgcccnatttattcatattccatgcataattcccatgtgcttagttttgtttttaggttccaacacatgataaatgaaaatagcaaggtgtatggaggcagcaagagttgtgggtggggtctgttgaccatcagagagataaaggagatccaatcaacaaacatggcactggttagtcgctcgtgcc

SEQ ID NO: 270818 - DNA, 465 bp, Homo Sapiens
  misc_feature (21)..(21): n is a, c, g, or t
  misc_feature (37)..(37): n is a, c, g, or t
  misc_feature (409)..(409): n is a, c, g, or t
  misc_feature (442)..(442): n is a, c, g, or t
  misc_feature (444)..(444): n is a, c, g, or t
aagccaggcctttctccattntttgctactctccagnagaggcggctcactggaggctggagcctgagctgctggagcttgtccccggacaaggagagcaagctcctagtgtcagcctgtgcccagggaacccttggggcccgaggcttgacctggcgttaacttcttactgcttcattccagctctcaacagccagcaggctggagtccttgtgggctggaggggagggagtctgcagggaggacccgggcctggacccagatagtgaggagatgccgggagacagcacagggtgacagaagcaggagaaacgccttcggtttagcctcagttccaaacctcggcgctcctggcattaagggaagggtgatggaagctggggggaaataacagaaaggctcctccccntaatacaccataacagattccagcttcccgtcntncggctctaagcagaaaggaaa

SEQ ID NO: 270819 - DNA, 373 bp, Homo Sapiens
  misc_feature (265)..(309): n is a, c, g, or t
  misc_feature (337)..(337): n is a, c, g, or t
ccagctgtctctatcgactacctcttattccaaaaaataaaaccataatgaagttagacaaaattaaatatacataatataaaaataggttttcttattctaatctagatttgctacacaagaccatctacagaatgaatgccatgaatatacaatctgtacccaataagttgtacagtgtagtaaacattcctgattgtaagggtggcaaatggaaattttggcttcttagatctttactgtgagtttgactgatatcagtacnnnnnnnnnnnnnnnnnnnnnnnnnnnnnnnnnnnnnnnnnnnnncagtgatttttgatgccatgtggctacnattggttttagaatactaataaaatccattgctttt

SEQ ID NO: 270820 - DNA, 563 bp, Homo Sapiens
  misc_feature (56)..(56): n is a, c, g, or t
  misc_feature (112)..(112): n is a, c, g, or t
  misc_feature (533)..(533): n is a, c, g, or t
  misc_feature (540)..(540): n is a, c, g, or t
  misc_feature (553)..(553): n is a, c, g, or t
gatctgccttgcctgtttctgtgccaatgcgacatataatcgacttttagtttgcnaagtttaagacctctgttggatgtgtattacttgccccttaccaatatgcggatancagaacgttctgctttaccaacaatggacaagcattataccttgtttcacctacagaaatccagagacttacttatagtcaagagacctgtgaaaatcttcaggaaatgttgggtgaactcttcactcctgtagaaacacgctcaagcaccaaacaggggattctttaaaggcttatttggaggtggtgcacaatctcttgacagagaagaactatttggagaatcgtcctcaggaaaggcttcaaggagcccttgcacagcatattcctggccctgggtgggcattgaaaggcgtaaaaggggcagcatctggagttgttggtgaattagcacgagccaggctggcactagatgaaagagggcagaaacttggcgatctggaagaaagaactgcggccatggttatcaagtgccgagtcntttttcnaaaacatgctccnggggattttg

SEQ ID NO: 270821 - DNA, 685 bp, Homo Sapiens
  misc_feature (35)..(35): n is a, c, g, or t
  misc_feature (474)..(474): n is a, c, g, or t
aaaggggagaaattggtgaattaccactgtccaanggccaggatacgctgtggtgttaataaggagattggggtctggtttccctaatccaaggactgtaaaatgtttaattaattcctatttgtataaactgaaactagcccttattttcctaggcaacaagttggcaaaaaccttgggtttacccataaagtgaatttcttaagatattttttaagaactcctgtcctgttatatccagagacattatcaaattttaaaaggcaaataattcaaaaagaaacagctattcagtacatataaaggtaaaatacagttatcttgaaaacacttgttttagaaaaggaaataagctaactagacactttactataaaaattttccatatcttaggatggcagtttaagaaacagtcaaatttgaaagtatccatgttttaagcggggaatgaggagtgtgggggaggtggtgccncgtttcactgctgtaagaagcttcagctttgaccgctacagtggtaggtaggctcttgtcacacagtttggaaatactttactttagagagattcagatcaagcaaacaactgtgtctgctcattctcctcaactttgctgtccaaagttgggggctgggggagcacttctgtcgctattcaaatggcagtgttttgagagaatccatttt

SEQ ID NO: 270822 - DNA, 440 bp, Homo Sapiens
  misc_feature (430)..(430): n is a, c, g, or t
gatccaagaaccctctcttggagtcttaaccaggatccctttccagtaacaccagcaggatctgtgagtgccagtttccttctgtggtgcaaaactaggtgctaagtacactttttcccccctttcctctatttttaaaagaactttcagcccttttgaagtgggtacattgtctggagtacataccctggggttcattgttataggagaatttaggacacagacacacgaggagtttaggagcagaggtttaataggtagaagagaagggaaagagaaacagcttcctctatagatgtctgcactgacaccgtggctttaaggcatggcccatggatgtgtctccgagtggaaaagactgggttggtggtgaaatgcgcccaaatttttatagtccggtttgaaggaaggtgggttctggattgggttncatcattatt

SEQ ID NO: 270823 - DNA, 414 bp, Homo Sapiens
  misc_feature (15)..(15): n is a, c, g, or t
  misc_feature (29)..(29): n is a, c, g, or t
  misc_feature (63)..(63): n is a, c, g, or t
  misc_feature (65)..(66): n is a, c, g, or t
  misc_feature (82)..(82): n is a, c, g, or t
  misc_feature (103)..(221): n is a, c, g, or t
gcagtggtggtaccncagctcactgcaanctccgcctcccgggttcacgtcctgtctcagccncnngtgtagctgggattanaggcatgcaccaccatgctcnnnnnnnnnnnnnnnnnnnnnnnnnnnnnnnnnnnnnnnnnnnnnnnnnnnnnnnnnnnnnnnnnnnnnnnnnnnnnnnnnnnnnnnnnnnnnnnnnnnnnnnnnnnnnnnnnnnnnnntgcacccacacccagctccaaactcatcttgtctacacacggacaaacgtgtgcacacatggcacaaaccaagctagaagacactgattctctagatggagggactaagattttcttttttcctttatcaacattttaccagttattccttccaaatgaacagggtgctgctctagtagtttttaaaatggat

SEQ ID NO: 270824 - DNA, 721 bp, Homo Sapiens
  misc_feature (64)..(64): n is a, c, g, or t
  misc_feature (108)..(108): n is a, c, g, or t
  misc_feature (206)..(206): n is a, c, g, or t
  misc_feature (355)..(355): n is a, c, g, or t
  misc_feature (465)..(465): n is a, c, g, or t
  misc_feature (630)..(630): n is a, c, g, or t
  misc_feature (666)..(666): n is a, c, g, or t
ttgaagcacgaagagctttactgagggctcacagaagggccgagagacaacagaaacagacacnggcacaggctgggcaagcagcatggccgctcacacctgcctctncaggttacacagttcaggatccaagtcctgtgcaaatgcatctgactggcgaacagaaattccatcaagaacagctgcagggagactggggtcacggnttttcaagctcctggccaactgcggtccaggaaggccagccaagaccagggcctaagcaaatcccccacattcctccatgaggggaccttgccaagagcgtccaggactccgccgccgccctccgtgctatgtgctgtggggccagctngcctcccagccatggaccaaacctgctcagagttcctttagaagccgggctccttgccttgctgccttggctctggtgacctctgcattttgcagacacccgggaggaantgcccaagacggcagccccactccagaccctgtctgatgggccgtgcacgtctgcacattccacagaatgtgaccagctgtggagctcaatacaaaatgccctctgctggccgggccctgacttcagcctggacactcgtccccatgtcctgcccagatgatcanctggcagagccggagattcctggctgctttggtttnttaacacatgtccaggtttagcccaacctcatatgcagtttacactctcactctt

SEQ ID NO: 270825 - DNA, 588 bp, Homo Sapiens
aggtaaaataagggcacatctttattttgctacaaggcagtaagtacaccgtcatatctcaaaagttcagtgctggccatcttgcatcaaatgttcttaaggcagtgactggctatcaaccacagtttctgtctccccagttgcaaacacaggatccatgcaacagttctgagaccatacacttagaaaccacaggggatgcggatcaaatgcagaactcccaaattataaaacagtcaggctacactcaaaacaaaacatagaacatcaacaacacacatctcccaaaaaagaagtgcaacgcatgcttggtataaaccaacaataacaaaaaaaccacaataaaaaatgcagagtctcccaaacaagttttcaaatgtattgcagaagggcagaagactgtgtttatatattaaattagaaagtctgaaataccagtgcatagtcatttcctaacaccaagtttcttttctttctatccaagctctactgcccctctggtacgagcagcatggctccgtgctgaggccatagcagcaaaaaacgttttcatttgggcttctcaaaattacttgctggataaagata

SEQ ID NO: 270826 - DNA, 411 bp, Homo Sapiens
  misc_feature (75)..(75): n is a, c, g, or t
  misc_feature (164)..(264): n is a, c, g, or t
caggtgcgcacatagaccagcgccacgtgcaggccatctggagaagaggagggggagaaactgtgccagatgagncccaacggagccaggggcctgggtgtaggtacttacaagggtcatgcggcacctaatagccaagggacgggccagctagggttaggcannnnnnnnnnnnnnnnnnnnnnnnnnnnnnnnnnnnnnnnnnnnnnnnnnnnnnnnnnnnnnnnnnnnnnnnnnnnnnnnnnnnnnnnnnnnnnnnnnnnnagtctgggcaaccgcttgagaccctatctcaaaataaataaacaaatgaataaataaatgcttgttcattaattgggcaaatgaagtattcaaaaataactgtaaatagatgacattttagatgcaatttaaattgttatcagaaga

SEQ ID NO: 270827 - DNA, 624 bp, Homo Sapiens
  misc_feature (148)..(148): n is a, c, g, or t
ggtggtcctgagaagcacctactttataaacctgggctaaggaatatggcttggcactgtttgtggccgaccctgtctcttcccgccaggtcctcagctcctcctcagccacagagcggtaccccatgttcaccctggccgaggcatngctcaggaccacagcctggacgacctctgctcccagctcgcccagcccacactccggctccctcgcacagggcggctcctcagggccaaacgccccagctctgaggactttgtgtttttataaagggaggggatgaggggaaagatacaacactatttatttttttatttatgtcatgtcgggtgtgggatcttgagctctggcagtgatgatggtacttcctgttgtcagcccctcaagcccagctgcaaccagtctggggccattcagccagggacagagcccacagagcccatacacctgtctcccaccagcggggccctcctggcagggtagggaaggaggaccccgggcacccccctcagggcctgactcacgtactgtagtttgcactggacgcccgggccctccctgtcccaaaagccccttaggggaactgtggctgctgggggccaataaagctgtgtaacttgaaa

SEQ ID NO: 270828 - DNA, 478 bp, Homo Sapiens
  misc_feature (161)..(161): n is a, c, g, or t
aaaaccagtgctccagagacattccatttaccaacctgttttctattcttggagatgttgttgctctgcaagtcagaaaaaagtaaatataaacacaataaaaatttctctaagctgcattaaagtttttctttctgtatccctctcctctgtctatattntagctttaattctatacattttttaaaaaaatcagtgacagagaaacaaaagaaataaaaatgctgggccctttttctaaatccagggaattattaaacacttaataccagctcccaaggtgctatgaggattaaatcatgtaatgtgttattcccagcaaagtgctctgtaacagtcccttcaggcacatagtacctgcttaataatccattgcattagtacatgtgaaaatggttatttttccttttccatttttcttgagacagagtgttgcctgttggccgtctaggctggagtgcaatgccacgatctcaga

SEQ ID NO: 270829 - DNA, 511 bp, Homo Sapiens
  misc_feature (51)..(51): n is a, c, g, or t
ctggacatgatacatgcctgcccttcttgcttacatgtgaagtataaccantgtgccaaatgcttttataattgactaagcagccacacccaccctgctcagaaacagaaagctactgcaggcccctacaaagtgagtgagagtgtgtgagctcctgctgaagaggtgagaccccagatcatagttcctacttgtttcctctatgaagtggaaatacagaaaaagaagcaaatgtaagcataaattgtctatgttttaaaaacagttcagctcatgacttaaatttggtgtcaagctccttgctctagtatgtgtcctcagggtcaccttcatggcttaattttaagaagagagcaaaacagaattcagctttgatctgaatatgaatttagatagcaagtgagcttgggtgatgacatttctatatcattttctatatttcaaaggacagtgggaggatagaccttgcctttctgattaaagctgaatctaggccgggctcagtggctct

SEQ ID NO: 270830 - DNA, 482 bp, Homo Sapiens
  misc_feature (36)..(36): n is a, c, g, or t
  misc_feature (79)..(79): n is a, c, g, or t
  misc_feature (468)..(468): n is a, c, g, or t
ccccaccaactccagtaacaccagccagaggtcagnggacagaacctgcatctccctggtcctgtgtccctagggggangggatggctgcagtctctgtggaccagcagacttagcctttcctcctggtagttctgaggaatccaggcagcccagacaagtgggttccccgcaagtgaggcactgtgttaaacaggttctgttccccatgccacccaactgggtgaggaccctccaattagaggttgttcagacaccctatacaggagtgctcctactggcatcaggctggtgccctcaaggtcagaagtcccagaagaagaagcaggcactcatctttgctgttctccagcctctttgagtgacatctccaggcacagcagcgaatcagataaataggtcctgaagtgaacccccagcaaactgcagcagccctacagaagagggacctaaccattggaaagaaaanaaacaagcagaatg

SEQ ID NO: 270831 - DNA, 320 bp, Homo Sapiens
  misc_feature (26)..(26): n is a, c, g, or t
  misc_feature (29)..(29): n is a, c, g, or t
  misc_feature (109)..(109): n is a, c, g, or t
tttgtactcttgctgagaaaaaatgnttngatgtctggagaatgtgccccgaacgtgagtgtgtctgtgagcacaagccacaccaccatcagtggaggtggcagccganggaggtggcggcggtggctacggctctggaggtagcagctatggctccggagttggtagctatggttctggaggtggcggcggcggcggctgtgcagctatggctccggagtggcagctatggctctggaggtggcggcggcggcatggcagctacggctccggaagccagcagtgggggctacagaggtggctctggaggcggcggcggc

SEQ ID NO: 270832 - DNA, 462 bp, Homo Sapiens
cattattggaaatatttgaaaactagaaaatgatggataaaagggctgataagaaaatttctgactgtcagtagaagtgagataagatcctcagaggaaacagtaagaagggataatcattaagatagtaaaacaggcaaagcagaatcacatgtgcacacacacatacacatgtaaacattggaatgcataagttttaatattttagcgctatcagtttctaaatgcattaattactaactgccctctcccaagattcatttagttcaaacagtatccgtaaactaggaataatgccacatgcattcaatgggatcttttaagtactcttcagtttgttccaagaaatgtgcctactgaaatcaaattaatttgtattcaatgtgtacttcaagactgctaattgtttcatctgaaagcctacaatgaatcattgttcaaccttgaaaaataaaattttgt

SEQ ID NO: 270833 - DNA, 506 bp, Homo Sapiens
ctcaatgattcctggaatgaggaggcctggtactgtgcatatttagcaattgtagtatgagatctattactttcacaatgccagattttctttgttccagtgggatcccagttttcatctgctggctgcaacaactgtgtcctcacttctaccatatgttcattgttagcttccaccaaagttttagtagagaaaagtcccaggtctaacttaagagctccagcaaggccacgtattactgtaacagggttgttcggatttgtacaaaattgatgtaatggaggaaagaaagcatcacgtttattttccaagtaaatactaggtgtaggtggattcaacttgtcctttggcaagggagggtatggtgaagatggtggtcttggaggtggacatttatccaacaaaatgctactgttagataagccatttttacctagattcctgcatgccctcagaacttctgctgagctggggtatatggacacagacattgatggtatgatctg

SEQ ID NO: 270834 - DNA, 470 bp, Homo Sapiens
  misc_feature (22)..(22): n is a, c, g, or t
  misc_feature (33)..(33): n is a, c, g, or t
  misc_feature (52)..(98): n is a, c, g, or t
  misc_feature (103)..(103): n is a, c, g, or t
gctatggtgtccaggctggttncaaattactcntggactcaagcaatccttnnnnnnnnnnnnnnnnnnnnnnnnnnnnnnnnnnnnnnnnnnnnnnnatacntcagcctggggccttcacttcctgaagcattatcctggcatctatccagaaagggtgaggggacccttttctacaatcattgttttgaatggagccagcatgaccacagattcccctctaatagtcagcacagtcttgtctatagcttgctcgggaaactatgggctgcattgccacccaggataattttagaacccaagttctctccagcctccattccaggaagcaatgttggcagtgtttatgatgagtattaaaatgagtccatatgagctatcaagcatgaaaagacatggaggaacctttaaagcatattactaagtgaaggaagccaatttaaaaaggctacatcaggctgtgccgaaat

SEQ ID NO: 270835 - DNA, 516 bp, Homo Sapiens
gctgaggcattggtgtacccccagatcaccctgagtctgcttccagagccaggccctggtgaccgccataaagacccagcaaagagttctaggacagtgcttggctcagggtgcccacactcttgactccgagtgccaggagtcctgcctttgtgctcagtttgtagggacctgcctagggagggcctctctgcctgagagtgggtggaggtctctgtctgggcaggggagagtcattgcgtccgctcatctgggaggtgactgagaaattttcagattccctggcatctcagtgtcatcttgccatgcttggagatggggattcaaaatgaaattttacatcattttacatcctatgataaaagttggagccctgctcacaggccaggcactttataaagggggctacatacacccaagcagagaggaggaggctgcactgcccatgctctcataagctacttcctagagccctgtagatcctggggccaaacacctcagtttgaagtaatttcc

SEQ ID NO: 270836 - DNA, 546 bp, Homo Sapiens
  misc_feature (402)..(402): n is a, c, g, or t
aatttagctcctaagatgatttagaaaatatttgcattatcttctcaaaggtagcatcacagtgtactaaatagataagctgtgcaatatgtcataggtccttattactcccacttttaggtgagcaaactaaggtacagtttataattgcctgagctttcgtggctgatgtgtatgatttgagatttgaattccagacaggtatgcaaagctaagcctatgccagttgccaattaggtgaagaacgtgacagtcccctcctcacctcccctcacacgattgactctgtttcctcctttagaaagtaactgaactcgagatgaaggtcatctgagcagtggcatagcgaatccagcctgcttggagttgaacacacatgtctgccacttgtcccccttaagnaccaggggcaaatttaaccggtactatgcctcctctgtaaaatgaggatagtagcagcatccatctcacggagtggttagtgaggattaagtgagataatatatgtgaagtgtttatctacaataataagttgtctacatttac

SEQ ID NO: 270837 - DNA, 471 bp, Homo Sapiens
  misc_feature (71)..(71): n is a, c, g, or t
aaaaaaatgaccaagaacctaatagtttcaaacccctttagagtttgagatgtggccagctcggctttggngcccgtggcactgctgtaaaaaggccaacatgggcatttgaaggtcaggcagaagaaccgaatggggtgggtggaagaggttttattttcagtgtagagagataacagatggtccgagtggatactttcagtccaggctcagtatggggcctgcaggaatccactagataaatacagtctataaaccggaaggctgaaaaacaccagccagccatccttgtcattgcttccaactggtggacactgatgcatccggagtcacttatgacacagatcaggtttaacaggggtgcacccgaacgcaagaaggcagctcactatgtccagtcagctctgatcctttcacgcccttggatgtcatgggttcctctgctttcacacgggaactaaggaacactgc

SEQ ID NO: 270838 - DNA, 243 bp, Homo Sapiens
aaaaaggttctctcatagtttatttaatgtattttgttttaggtgaaacacctactggagctatttcacagtataaagaaaggatgccttctgtcactcatagtccagaaataatggatctgtcagaactacgaccattctctaaaccagaaatagcactgacagaaccctgaggcttttggctgatgaggattggtaagttcaccatccttaacttaaaactaagcagagttcaaaagcttt

SEQ ID NO: 270839 - DNA, 539 bp, Homo Sapiens
  misc_feature (115)..(324): n is a, c, g, or t
taaaataataataacatgccatataagttctgggcaacaggcagataatgcaaatcctcagaatcttataccactaaaaggttttttagtgaaagtttgtttttcagtccagttnnnnnnnnnnnnnnnnnnnnnnnnnnnnnnnnnnnnnnnnnnnnnnnnnnnnnnnnnnnnnnnnnnnnnnnnnnnnnnnnnnnnnnnnnnnnnnnnnnnnnnnnnnnnnnnnnnnnnnnnnnnnnnnnnnnnnnnnnnnnnnnnnnnnnnnnnnnnnnnnnnnnnnnnnnnnnnnnnnnnnnnnnnnnnnnnnnnnnnnnnnnnnnnnnncattgatttctattccaggtggtctggattcagtctttactggtagtatgcgtctgtgtgtaaaagtagttactctttctaagggtctctattgacgatgctagtaaagcattcatagcttcataccggcgtagtaatattaacctccatcccagagcttagctgtatagccactttatctaagcaaaacataggcaacacctagcgtggaaatt

SEQ ID NO: 270840 - DNA, 219 bp, Homo Sapiens
aatttagtatttgtgtaaaaccaccttttgaagcagcaactatcaagtctgaaaagcaattgatgtttccattaatctttttctggggggaataccttagttctaaggatttaacatcctgtaagtgaagtttaacataacagtattccataagcagcctttttattgtcagaccattgcctgattttaatataataaaaagtgtgcgttaatatttaa

SEQ ID NO: 270841 - DNA, 437 bp, Homo Sapiens
gtattgatattaagaattacgtatatagatggacatttaccaatttgtcagaggtttttctccaagtaaattattaaattagtattacttttttctctggagaaacaaaaccgttgcaaaatgtaatcttctataatgatttttttaaaaaaagtttctactgttgaaatatgtgcctggtgtaatgaaagggaggttgtacaataatccaaacaaaattaaattaacttctgtgaaggaaaagtcatttagtttttgagagattatattcctttgaactggaatgattttaaagtgatttatattaccaagaaaattaccatgtcaaaacggaaaaggaaatccttgcattggacactggtgattttgcccatttaagacatctttggggtgactttttaacttgagagaaaactcagggcatacaaacgattgtg

SEQ ID NO: 270842 - DNA, 498 bp, Homo Sapiens
  misc_feature (27)..(27): n is a, c, g, or t
  misc_feature (263)..(263): n is a, c, g, or t
ggccatggctgatttaccatgtcactncctactgtgacttcatgcccttttgggataagaaaccacaaaacgcatggaacaactatccatggctcttagcagaaatgtcttgcctctggtctctgaaaagctggggtgagtggttacctcaaagacaattgcctccaagtttgggggctcctctcagggttcaccctgtcaccggggcgtgggaccgacctgggaaatttccactagagttttgccctcagctcctccctgcnagcatcccagtcaccaccaggtggcgcttctgacacggtccacgtgcctggctctgaaggcccaactgtcagaccagacccctcactcatggtggggagacttgacttcctcgggctcttcaggagactgagacagagaagacaagtgaaagcgcagcctgtacatgactctctgtggtccacgtcctgcctctccctggggtttacacggccccaataaagcctgctctggcca

SEQ ID NO: 270843 - DNA, 638 bp, Homo Sapiens
  misc_feature (36)..(38): n is a, c, g, or t
  misc_feature (44)..(44): n is a, c, g, or t
gaccgtggagaccgagcggcgtggggaagacctagnnngttggntgggggaagcagacaggagaacactcgaaatcaagcgctttacagattattttattttgtatagagaacacgtagcgactccgaagatcagccccaatgaacatgtcagtgttgactttacaagaatatgaattcgaaaagcagttcaacgagaatgaagccatccaatggatgcaggaaaactgggtgatgtctgcgcgacagggaaggcgggagagatgccacagtccagatccgcctaacctgtgctcccctcccctcccccggttttcatctagatttgggttttctcgcttggcctctcccgcaaccggagtgtgaaaggcagtggagggaggaccttgtctcctgttgcctttaaccctctcccgcccgccgcccttggccctggtcctcgctgtctctccatccctcgtgtccttcctttctccttgcagcgctcctacttcaccgtcctcctctgtctgccgctcctcaggcggatgccccctttttagtacccctttccccacgcggttccctttccggtttcatagagagaccgggtgggagggaggaggggacaatgaaaacagtaataaatgaatgaacccg

SEQ ID NO: 270844 - DNA, 414 bp, Homo Sapiens
aggtcccattttataagccagctgtgaaatttaagtgaaaggttctttgtaaacattggtactattttaaatgaataatgaccttatgaagtatgctatctgtaggctggaaattataggtacatctgttttcactatatgatattaagaaagcgtgaaatgacttaaatgttcatttttttctgtatagatactttatcatgttttcatgattttaggaattactgctttgttgatattcaaagtgtgaaactaaaactttatggttgtactttaattcttggcatgttgcctctatgtcccatttaaaataaaatacattctcattaactttagatgggaaataaggttgtatgttgatggatgaattttggcatgatgactgtactctcaataaaggctgaaaatgttgtt

SEQ ID NO: 270845 - DNA, 492 bp, Homo Sapiens
  misc_feature (437)..(437): n is a, c, g, or t
  misc_feature (459)..(459): n is a, c, g, or t
ttgagacaagagtcttgctctgtccagcctgggtaacagccagaccctgtctcttaataaacaaataagcaagcaggtatggaacattctcagctgggttctttaagctgtctgacaaggtttcgggttgtaatacatgcttctaatgtaaatatgttaaaatgcacataattgaaatggagtaaagtaagctgattatacgttgctttgtgcatttagactattattgtattttattttccatgagattatgaggagattgatgatgttaaaaggtgagaagaaatagagaaccatttcgatttagtctgtagaaaatgtattttcacttttttgctactatctttgtaaatgaaattgcagaaaaattacttagactcccattggtttttttcaatttgaaaatgagtatcttcgaaccaggaatatcttggggnccactgggggggctagctgtcnaaggggcactttgcctgggaaagaccttcctga

SEQ ID NO: 270846 - DNA, 491 bp, Homo Sapiens
  misc_feature (13)..(13): n is a, c, g, or t
  misc_feature (27)..(27): n is a, c, g, or t
  misc_feature (38)..(38): n is a, c, g, or t
  misc_feature (50)..(50): n is a, c, g, or t
  misc_feature (57)..(57): n is a, c, g, or t
tttggagattggncatgaaggataggntgctctatttngtaatagaaacnttcccanggctcttccagctccccctttttctcgcccattcttttagctgtagtccatggaatagtctcccatgattttcaaaattgattccctttaaaagtgcaaaatggtcaccttctaaaagatatattcatagttattaatgaccctattcccaccacaaattttaaagtgctcctaagcccataacttgcctgtttgaactatggtaatgggtggaagaggagttcaccagtttcaaagatcagactctgtatcaaaagtacctttgcccttaggaagagtgagtattggagtcatcttatctattactccaaacctccctttttatttcttgagcctggcttggaccttggcattccgtttgaattccttctaactggaacatttgtgttgtatctgtaacactggcactgaaataaagaccacacggttaaaga

SEQ ID NO: 270847 - DNA, 450 bp, Homo Sapiens
  misc_feature (97)..(97): n is a, c, g, or t
  misc_feature (222)..(222): n is a, c, g, or t
aacagccccagggaagaaccaaagccccccaaaaattcctccaaagtttttggattaattgtgggttcactgattccagtgccaacttggagcttcnagagaagaggctccctcctgtgtcatagaaatccttgcttttgggtctccctgcagagttcaataggtttagtaaggctaatcgattgtttcaagagatgcttatcaaaagcatatggtgtcacntgaaggagtattctaaaccaggacacagccacttcatgccagtctagagatgctgggggtaaatgctttgtgagtcctggcaggaatcttcttgcaagtcaagggccgagctggagggggcactcaggagtcacacagcataggttctagccccggatcaggtgcaccggaggcttgggaggaggtttcctctcagagtctaggtcttcctttatcaggaaaagaaac

SEQ ID NO: 270848 - DNA, 584 bp, Homo Sapiens
  misc_feature (49)..(49): n is a, c, g, or t
  misc_feature (100)..(100): n is a, c, g, or t
tgtggacactctttggaaagccaacttggtcctccagttatccagatangaacctgtcatttctctcattcactctgtcagccttgagatactccaagcngacttacctctgtgttgtacaccccatatatcaggaagatgaagagaccctgtaaaataaaatggaggggaaaagctgttaacgctaatcatttcagcagtagaaatacctgaaataaactttcctgggaacagacaaaagaagacacacttcatcaaggtcaatttattttcctatttttcaacattagaaggtgtaccttgagcatttatatgataacattagcaagcacatcacttataatggttgtgctattcaattctttagaagtacaaaataaaaataccatcccaagtacaaagaatattaattagaaaaatcaatataccagttctgaaagatagctgggtaatgaaaaaattaaactcaggaaatgttattaaagtaatcatagaaataacactaagcatcagtatttccaagcactgttttagactgtagcaactagaatatatttgttacaatcttcaacagggttaaaatt

SEQ ID NO: 270849 - DNA, 480 bp, Homo Sapiens
  misc_feature (389)..(389): n is a, c, g, or t
  misc_feature (440)..(440): n is a, c, g, or t
  misc_feature (463)..(463): n is a, c, g, or t
cacaaataaaccaactttaatagatattattttgtatttatatagtgccttcttcaagaaccttaaatgctttacagacattatctctaattaatccccacaacaaccctgtgaggtaggtattactcccattttacaagacagggagactgaagcacagagaggttaagtgacttgcccaaggtcacacagttaaattcactgaagagccaggagcatgagcgctttagcctcccagctcccagccaaatacctcatgatagaatctttaataaaaagtgtttttaaagaaagtatcaagagtagttatgttatgaaaatgaggtctttctactgccatcaaggaaagaaaaaaccctatactgatggttagaggccccaaggacccntataatacaacatttcccctctttccctggttcccaagcctcctggttccngtcctaaataatcctttaaaggnaaaatttcccagacaga

SEQ ID NO: 270850 - DNA, 125 bp, Homo Sapiens
ttttcagtctattccccctgtctggaaggcccttcatcctactctcttggcctcttctaatttttttcagtggagtccaaagtactcataaacacattcattaaaaatgtaagaagccaaagggc

SEQ ID NO: 270851 - DNA, 398 bp, Homo Sapiens
  misc_feature (17)..(17): n is a, c, g, or t
  misc_feature (72)..(81): n is a, c, g, or t
  misc_feature (90)..(90): n is a, c, g, or t
cccccaaagggcccatnagccattttccccccccagttttggccatatttagggttacccttccagtttttnnnnnnnnnntagaaaagncccctaccaccataaaatattttccctacatttcctgtttatttcccctagattcccccagcagtggaatttcccaagcccaaaagcttttggtacatgttataaattgcttttaagaatgtgtatcaattataatgtccagtgtttgctttaaaacattctagcaaagaaaaaagtataggggattagatgaggagaaactggcaaaatggtaacagttgaagctaggtgaggtgcctggagattcattttgctattattctcttttgtgtatgtctgaaaattacaaagatttctaaattgaattg

SEQ ID NO: 270852 - DNA, 478 bp, Homo Sapiens
  misc_feature (328)..(328): n is a, c, g, or t
atcacatgtaacagagcacatccctaagcaacaattagactctcagttcttctatcaccaaaggggcgacagattcattctattactaaaactagaagctgcttcagggataagaaatagatttcttccatcttctataaccctaaaggcaagaaagaaaattggttccatggacatagtcatttcctctgtgattccactgttcttcttccatcctatatgctatattcatgagtcaagttctcaaatattaatacttattagcttattaaatagttttcaactcttctctacttctcattgtcccaatggctaattaatggtatangccaaggattgaaattcggttttcccattggcctgacttcttcctggaaaagctggaattcctggtcccaaaaaacggaaaactttccagagattcaccccggattccagactcccctcagaactataagtcccagggacctgatcgggg

SEQ ID NO: 270853 - DNA, 467 bp, Homo Sapiens
  misc_feature (380)..(380): n is a, c, g, or t
gcaagttagagcactatatttaattcaacatggttgacctagaaatggaaggaatagtgaattaggatatggtaaacactgtttatcacaaagacccaaaatagcagtggcttaaatctgatagtttattcttctttcacatgaacgtttgagcagctacggttcctcttctctacagaatcatcagagtccttggttccttttatctttgtcttcatccacatagtccaaggtagctcactaccaagtccacattccagtcagcgggaaggaagacagcaaaggatgggaatcatcacacttttcaaggacagaagccagaagttgaaacatgtgccttctatccatatcctcttaaccaggagttaggttacatggancactgtggacctcatgttccactgtgagggagagggagggatctttatctcatttgaactgaggggaggaggaaaatttccacatcg

SEQ ID NO: 270854 - DNA, 361 bp, Homo Sapiens
  misc_feature (22)..(22): n is a, c, g, or t
  misc_feature (29)..(29): n is a, c, g, or t
tccccccaacaatttctcttcnttagtcnctctctttatttttcaatctctgaatattttagtctctctctgagtcccattttttaaaatgctcttttagaacgggaaacggctcagatcctgctgtggcacggggcctatgtgtctctgtcgcgtctgctgtgaagcacatgatgctctatttattgtagagagtgactttatttgctttctagaattgtttataacagatggtataagagaggtaataaacagagaaaaatctatgcttgtaaagaatacaaaagttaattttacctactataatatgactgtctgaaacttattttctctctgagaaataaatgttctaatgggcagt

SEQ ID NO: 270855 - DNA, 508 bp, Homo Sapiens
  misc_feature (249)..(249): n is a, c, g, or t
  misc_feature (251)..(251): n is a, c, g, or t
  misc_feature (253)..(253): n is a, c, g, or t
  misc_feature (257)..(257): n is a, c, g, or t
  misc_feature (270)..(270): n is a, c, g, or t
  misc_feature (280)..(280): n is a, c, g, or t
  misc_feature (296)..(296): n is a, c, g, or t
  misc_feature (300)..(300): n is a, c, g, or t
  misc_feature (330)..(330): n is a, c, g, or t
aataatatttaaatcttgaataaaatgttatcatgaaaacaaaacctaaaaaagttaggagagccagaagcaaaaactatggaattttttaaatagcttgagaaactatgaaagctttttccctttaactctcatgtgacaacaaattttgatatctgggaaagaaagtttgctgaagcttacaatgaatttagatcaatgtaaaccagtttgtggttttccaaataaatttccccggttagggtaacnantnatcncctgtgtaattantgtgccgtgnccccattattaaaagncagngaaccaaactacccaaggttaaaccaattngtgttgtagtatatcgttaggtgtacaccatcgctccccaccccctcacaaacacatccatttccaattatgtgcacctttcaagagtcactgtttacctgctacagaatgcatgttcaagtctcctggaggcctgagctgtctctcctgcaggcagataactcatggttttcgccgc

SEQ ID NO: 270856 - DNA, 652 bp, Homo Sapiens
  misc_feature (83)..(92): n is a, c, g, or t
  misc_feature (473)..(473): n is a, c, g, or t
cttaataatcatggccgtttcagatcctcccatttcacagaactgaaaaaagatgaaaatgtgagcgagcccctgaaaatctnnnnnnnnnnttctctttccatgtctttaaatgcgtacgtagaaagggagctgtattgcttttaggccaaaatttcatccgaggaaatgtacccttctttaggggtacattcaagggagcccagcacttgtgagcacgcacggcggccatgcggtttaaccaccaactcagtccaaacccacagagcacgcgcaccctcctccagccacgtaggtgggcgagaactcgagtgggtgaaggaatccgtgtgcgcacccttctccgtcctgttcgccccgccctttggccacacagaaacgcttccaggccaaccgacgaggaaggctagagggactctgctaggaagctcttccctacacttgccagaactgaaaacgtaggcaggggatcnaaactcagtgctccaaaaacgcaagaccccgacccgcccacatggccccgactcggccctcggggactcccagataactgcctgacgcccgagccggtggtgcggcagccaccattgcgcaagttcgagcgcccggctctggctgctcacatgatggaggatggggaaggtcctctgcc

SEQ ID NO: 270857 - DNA, 702 bp, Homo Sapiens
agacctccctggcctgagataaacataagttgcaaaagtggcttcctgcagcccattttccaggttgggaaactgaggcatgggcctaaggtcccacagccacaccgaggaaagcagcccccactgaatgtcaccatgcaccaaagtgatgtacctcgtgacacaaagaggggagatgacagtggctggagttgtcagagctgctttgaggaagctccaggcctgataggcttgacagggccaaggggaactattgtggaatgtcttggccttgaatgacaggctgctgattttggatctggagaaagctcacactgactcttcctgctcccccagtctgtttttctcctggctactccatccatgtatccctgagtttggggccacagtccctccacttggtttgcatgtcccaccttctttgtttggcaagctcctattcatccttcaaagccctagcttcaatacctgctacttcatgcagccattgcttatccttcaaggagagcctacttccctcaaggaccctgctgcttccagtctcaccttctgactcactcgggatccactgaactgggaggtctgtgtctcctcccagcagagtcatcactacctttggggccgcaggatcacccagcttggaactagatacagaaatgctgttttgagagtgtactgaataaaagattacatgtttgaaaa

SEQ ID NO: 270858 - DNA, 433 bp, Homo Sapiens
  misc_feature (21)..(21): n is a, c, g, or t
  misc_feature (27)..(27): n is a, c, g, or t
  misc_feature (40)..(40): n is a, c, g, or t
  misc_feature (65)..(65): n is a, c, g, or t
  misc_feature (88)..(88): n is a, c, g, or t
ttacccacggttgaatatgtngtaatnccggtaatgccanaatgcattttttaaacttaaaaggnctttaaaaatattagataaaggncatgtattccattatgtgaatgtttaatttggtggttgatatgaattcttcatcacttttgagtaacttactgtttttgtttaggttggcaacaatgagtaaaccagaattaaaggaagacaagatgctggaggttcactttgtgggagatgatgatgttcttaatcacattctagatagagaaggaggtattaagtgattgtacaatttgaagagatgcttattataatgtttatggattatttcacttttaaaacttttaacattttcttttgaaaatatagcgcaaaggattgatctggttagtaaaactaaataaaaactgctttaatttttagtttaaaa

SEQ ID NO: 270859 - DNA, 524 bp, Homo Sapiens
  misc_feature (412)..(412): n is a, c, g, or t
  misc_feature (456)..(456): n is a, c, g, or t
  misc_feature (490)..(490): n is a, c, g, or t
gctttagaagaagcaatgtccacagaattaaaggatgtcaaacagggctgacttttggttaaaggttttctattagtagagtctttagtgtgaaaagaagctgcagtaaccactgtatatgacagaggtctggtgttagtaatttgccgtgctttcattgcttgctgttgtttttccagagcagctaacatgtcccctaaatctagctgcacaggtgttttattcttttttccagctgcttttgataaagcttcctgtaattttttttgctccatacttatttctgaatactcttgagctgtggcaagggctgctgctaaagctttcttcttctgactttttgcacgtttgggaactgaggtggtaataggaattggagtctgaactatattgattggtgagttttcagggnaaatcatccaataccttagaagaaagttttttgttgaaaaatcncatccctaagcatttccaattcccattaagttcnttgaaacccatccttcatcctgtgaaataattcc

SEQ ID NO: 270860 - DNA, 239 bp, Homo Sapiens
cgtatcagtcaccattttaatatggggacaatgaagacaagcacacaggaggtagaatatcagagtggggctggatcaagggcaaaaactggtcattaagtcatctgacattaaatcatttagccactaagttatttgtctactctcactttaaactcaccaaagaagattctcttaaagaaattatgaaaaatgtacaatttaacattttaaataaatagtgacagaagttgtttaaa

SEQ ID NO: 270861 - DNA, 413 bp, Homo Sapiens
aaaaaagtctaaaattgctttacagccttgataaaacaaagactggtgtgttgatgtggctgcttttgtatgatttccgaggtgaatttagatgactggaagatagatgggtgccagatgcagtttgacatagattcaggcagcttgctcctgggctaggtttcattagctggtaagtgctccagcagaagcagcagagcgaggccccaaatgccaaaatgacagtgagaacagtggaacaatacaatattcaccaagtgattttaatctcgaagattaaatgtcacccaatcagtttccaggtcttaaaaaaccaacttgcatgaaaccattagaaggcccaagtctttgttcaccagaagaaacaagttttactgtttttgaagggggagggtggttagttttaaaacacc

SEQ ID NO: 270862 - DNA, 444 bp, Homo Sapiens
  misc_feature (36)..(36): n is a, c, g, or t
  misc_feature (91)..(91): n is a, c, g, or t
  misc_feature (252)..(252): n is a, c, g, or t
  misc_feature (265)..(265): n is a, c, g, or t
tctgctagttactcagtctcgttgaagcctcaatancccatatgtaagattaaggcccttaaaaggtaaaattctacaattctaatcaacnatctctttcttacaaaacagaagttgtatgtgtctctcatgatttgccaaccactttatctcttgcttttcatagcatcctacccaacagtgtatactccatccacactgaagtacatcgtggctcccagaattcaacacgctctttggcctcaattcctntacacatgctatnttctccacctgagcccacctttactcaccactgacatagaggactcaagtcaggtctcctctaatttccccctccctttcctgcaaacactcaagtctgagttaggcactacaaacaacatggctgaaactatagtttttcagggacctatgaggaagaaaaagactggtttcaaaatc

SEQ ID NO: 270863 - DNA, 891 bp, Homo Sapiens
  misc_feature (341)..(341): n is a, c, g, or t
  misc_feature (346)..(346): n is a, c, g, or t
  misc_feature (779)..(800): n is a, c, g, or t
gatactttctagttatttaatgatactaagaaatggtgctgtttcactggatttcattgatgagatttaagacgtatgaaagagaaagtctctttagacagggacatgaaaggtagccatcaataaaagttactaaaagtaaactcagaaagaaagaagtgataaaccatccaatcccctaatgaaccttagctcctggcagagagacagctcacaccttctggggtgcaggtgcccatccctgtgctcagaaaaaagcgttaagtaaggcaaaaagtgattcctcctattttaaatgagttggggtacagaggggagctgcctgtagtcttgaattcttnttttnccagtattaaagcctttctgcggtttgagatagacatgcggttgggctgggccatgcttgctgtgaatgtcaggtgttgagattagcaccacaccattccccgggtctgagtcttgcatgcgtctttgtccatcattgtctagaatgtgagaaaggtaagcatgggaacgccattttggggaagaaacaccagctatagaaagcaaagggatgcataggagataaaaagtctggggaaaaggatgtgaggtagcaagcgagttctcagctccccccagagaccagctgaaaagaagactgggtcagataccccctatctggcagatatatcacccctcaaaactggaacatgccccaggaaatgttcttggtggtttttttctccttgctcattttagcccaaactctaacaatgttgaaaatatctcgaaannnnnnnnnnnnnnnnnnnnnnacctagaggttataggaagggatgaacagagatgacagacaagacaaaaaaggttatgagagaattcctcattatacatgggtagaattca

SEQ ID NO: 270864 - DNA, 667 bp, Homo Sapiens
aagatctgaacagacctaggaggaaccccctttggacaggatgatagatggttcctccaaagctattaagggaaaaagacacaatgggtattcagtaagtgataaggaaactcttgtagaagcagagttaggaaagttgcttaataattggtctgctcaaacgtgtgagctgtttgcactcagccaaaccttaaagtacttacagcatcagaaaggagccatctataccaattctaagttaatatggactgaacgaggtcttattaatagcaaagaataattgaaatcccaaacttacaaggtttttgacaaaagtaaagcttgctaaaagttaacagtgtaacatggtatttatcctaacttctaatcttggaggaaatcagaccatattagtgcccctcaaagctgaagtctgtcagtgcagggccatacaactaataaccttacttatagggttaggaatgggccactggctacaggaaccagaatcgccagtttatctactttactatcctactaccacacactctcaaaggatttctcagacagtttacaagaaataacaaaatccatccttactctacaatcccagatagactctttggtagcagtgactctccaaaaactctgaggcctagaccttctcactgctgaggaagggaggatc

SEQ ID NO: 270865 - DNA, 402 bp, Homo Sapiens
cggctgggaatgacctgggtacaccctagatgctatacagctccagagctccagagtccttgtctgattgctgtggcgctgagctatgccagggccctagggaatgagacattacgtggagggtacctaggataaaatcagccactggtgaaaacagatcagagataagcaaacgtcaagatttcagaacattagtcctgttccaaaagctgaagtctggaatgctgaaaattatgaattgtgttacgaagataagtctgagtagaatcattcataaacacagtaaaatggtttgtactcatgtttcataataaatattattgtttgagtgtttgaatgataaactttggaatttactgcatccagttagaaaagtttacctttggccaggtgttgcgcgca

SEQ ID NO: 270866 - DNA, 1141 bp, Homo Sapiens
  misc_feature (525)..(525): n is a, c, g, or t
caaactttacccctgctcaagcagtaggtgaaatgaaacatcagttttaaagaaaaaaaaccctgtaattctaagcttctttaaccacatgccactgcccaccacttccccaaagcccttcctttgtttccagggcaggtgacaaccctcactttttctagggtgtatgtgcacccctgcaaagattcctgctccaggtagtcaagtcagtcctgtcctgcacacacttcattggtattcaatgatgagtgccaccaatttgaagcaggaaaccaggacataagctaagcaacttgactcttcttgctgcctggcaaattagcaccacaactggtaaagaaaggctaagccttagagacagaggctcctgcctggatctctaagcaactacacttcacccacacacattggaagaatgtcaacatagagagaagaaagggtggaacagaaaggtctaaagagtgagccacatagcttcttttggcaaaccaacactcccaaaggaaacattagggaaaatactgncttctacaacaaaagagaagctttgcagctaggattattttccaaaagcagtatttttaggatggaaaaattgcctaggtctatggaatctgaattctgatgactaaaccttctatctctccaggatgtaacatgtgaaaacttaagaaagatcccctggctgtctcccaccctgccttctccctacttcccaaagcctacaaaccaatctagacaagttcctgactgtaccataaaccatttctcagggagctggaatgcattcatacttgacttcaacttgctggaagtgagagtgacagcaggcaggaggagacaagtataactgccagggaaagagagaccaaaccagactgccaaaaataaccaaggccttagcagaagcctgggccacagtataacatcctgccatggccggcaaagggcctagggtccaaatactgcccctttttgaaaggttgacccacatcttagatgaaggggctggaacagttaggtggccttctaccctgcttcttccttgtctttgtggggaagggaagaagacactgtagtacacaaggttgcttgggaaaatggattattctaataaaactttattttttcaaacacaaaa

SEQ ID NO: 270867 - DNA, 573 bp, Homo Sapiens
aaagaacgccaccgctgagaactgaccctcacatctcccttcctgaatttctttagggaaagcaacaaccatccctgtaagccatgggttttcatgcggaggaaggagagggctagttgtctgagagggtaactgcttaaggctgcagactaggaaatgggattccaggtttaagatagctcctttctggacctcagtccttcacctagtcacctagtcacagggtggattgcctctaaggatacttaggggaaaaggaaccaaatttgggatggttctccttgctttaagccttgataggagacggggaggccaacccttctctgcagaccgtgatcctcactagacagaggagctccaaacctgcccatctcatccccatcagccgacggtgcctggcctggctccaaactcccgaaaggaactattttacaggtgccaaaaaggggacagtgttgataataataataaaatgaaacaatctgattggggcattgctggatcagaaaatgtgtgacctttttaaagttaaattgttaaaaaattttaactattaaacattttaaatattaa

SEQ ID NO: 270868 - DNA, 479 bp, Homo Sapiens
  misc_feature (28)..(28): n is a, c, g, or t
ccatgcatttcggagactttaagtcagntggtttttattagctgcttggtatgcagtaacttgggtggaggcaaaacactaataaaagggctaaaaaggaaaatgatgcttttcttctatattcttactctgtacaaataaagaagttgcttgttgtttcagaagtttaaccccgttgcttgttgttctgcagccctgtctacttgggcacccccaccacctgttagctgtggttgtgcactgtcttttgtagctctggactggaggggtagatggggagtcaattacccatcacataaatatgaaacatttatcagaaatgttgccattttaatgagatgattttcttcatctcataattaaaatacctgactttagagagagtaaaatgtgccaggagccataggaatatctgtatgttggatgactttaatgctacattttaaaaaaagaaaataaagtaataatataactcaaaa

SEQ ID NO: 270869 - DNA, 588 bp, Homo Sapiens
  misc_feature (126)..(126): n is a, c, g, or t
ggattacaggcgggcacccacgcctggcccaaccagtactttttaaaaaatatgagcagaaaaatcacatgtgaagactgttttaatgacagatatcatctcttacaaaaggcagactgaaatcangaattcccagccatatatataccagctgctatttgctagtggaattctggccaacactagttccaagttgttagctacattatgggataaactgggaatatagtcacttggccaatattccctaatattatttctaggggaaaatatgctctgaattgatatcaactaagttagaagtattccttggggatgaaaaacccacttgtaaattggtaacttttctgaatgtttaatgaaatacctacttgcatgctgaaagcagtgcagcagaagtgaaaagtggcctggataagtcaagatccacttgctgtgtctggggaagactggactcatagctttttagtatctttgaagccatgttcactgcttctatacagctaaactgtacagctaggtctcttattccaatatttgaattcaggcccagtaaacactcaaaagatttaagacagctctgatatg

SEQ ID NO: 270870 - DNA, 501 bp, Homo Sapiens
  misc_feature (373)..(373): n is a, c, g, or t
  misc_feature (389)..(389): n is a, c, g, or t
  misc_feature (399)..(399): n is a, c, g, or t
  misc_feature (412)..(412): n is a, c, g, or t
  misc_feature (443)..(443): n is a, c, g, or t
aaatatgtcactctgaaagctgtatggagaagggacagggagtgctaaaggagtgttccagggcaggatgaaagttacttgtactatgtcagatatggtgcaagaaacagagagacattgatggatttggagatagagtcaacatgagcttgtgaccagctcaggatggagggctgggaagagtcagaggtgcccctgcatttccagcatgtgtgagaacgactggggggcagtcacaggaagacaggaagaacagcccacctcattcatcgcttagtctacaaatagtcattagtatggaatggactgtggacacaggccctaaggatataggtttgcctcggaggcaaacgaagacatcccaggggctttngggagctcacaacccncaagctgggnggttggtgttcgngggtcagatgttttgagaatcacctctcaanacaaatattaaattggacccacaacagcagctctagggaaaaggtctccaatgagtcc

SEQ ID NO: 270871 - DNA, 456 bp, Homo Sapiens
  misc_feature (13)..(13): n is a, c, g, or t
  misc_feature (291)..(300): n is a, c, g, or t
gtggagcccctgntcgggacgatggcctccagaggagcacgctgcagggcacgttctgggcttagcgacagaggcaagcaagggactggtgtctctggtgagaggtgggtttgatgtatctctgtcctatgctggtctctcttctcctttataaaatcctctgtggtcaactgactactgcgtatcgcagtcggaataagactgcacagttgctggtaggtgagtttaaagtcttaatctatgcattcagagaaatatttttatatgctttgtgtaatttataacaaggannnnnnnnnnagcttggttaactgtgaattcacccctcctcctccactgcatatttaaagcatgtgttcacactgtgtgtaaacattcactggaagatttttctttgtgcattgctgactgttcaaacataacaagtattattaaaattaaatattaactgaccga

SEQ ID NO: 270872 - DNA, 732 bp, Homo Sapiens
  misc_feature (208)..(208): n is a, c, g, or t
  misc_feature (267)..(267): n is a, c, g, or t
  misc_feature (308)..(308): n is a, c, g, or t
aagcctgaatatttacttctgctcccacttcagatttgaggtaacttgggagaagccacttaaatctcttggtatctcagtttccccaggtgttgtaaattgtttgtacgtcgtattttcagggacctgaagagacgatataggaaaaggagctgaaaagagctctgtcactgggagttgtgtttctgactttgcctttagccattanggtaagattctgaatgtaaagactggataaaatagagctatgcaaatgtaaaccacccnatttgccctagggaatcaaagtggacccaccaaagtacttnggtgcaaggctcccatttgctgaggtgcagaaagggttaaagtccaaggggtggggactccagagtttcttagagagtgatattgcatagcttttcttaatcccacacctgcagcacattagagaaagtggggttagtcaatcatgtactgttatttttacttatggttgggcagtccatgcctgtagggggttcaaaaccttcttccaagcattctccggttacactgtcacatgggcctcccccgcagttgcacactgcacagttcttggctatcctggcgtccccatagtagccaggagcgcaacgttcacacttgaatccagtggtgttgcgtaagcaattcctacactggccagtgacttcatcacaatcttcaaagatcaggttgggatctgaatttccactgcagtcacatttcttc

SEQ ID NO: 270873 - DNA, 477 bp, Homo Sapiens
  misc_feature (14)..(14): n is a, c, g, or t
  misc_feature (40)..(40): n is a, c, g, or t
  misc_feature (333)..(333): n is a, c, g, or t
cttttccaccatanttggccccaaccaaaacctcttgctnggcctggagtgctgcccctgtactgccaggttggaaggtttaccatttggtcttaacccctaaagacttttcaaagtgaaaattatttttaggttcttaacaaggtttttctatgccaaggtaaaattttcaaggccatatgaggtatttactgtctcactcagagttctgtttaagtgagcacatgggcatgcatgttggagaaagtgttgtgagctcttacagataaagtttgaaatgcaacctattttcaatagaaaaaagcctcttactctcagatagctcagaaaaancttaggattttacaatccttttaagacttaagactcttaggtctgtggagtcaaaatgctacgtgatatttgtggtggatgaattactgaaaaacagaattcctcagcgaatcaagtgtctgatgcataataaaccaacccaac

SEQ ID NO: 270874 - DNA, 232 bp, Homo Sapiens
atgagcactgtgcctggctagatgccttttatttctttttcttgcctggatgctctaactagaacttccaaaactatgttcaataagtggtcaaaatgggcatccctgtcttgttccagttctaggaagaatgctttcaacttttccccattcagtatgatgttggctatggggtttgttgtatatggcttttattattttgagggtatgtttcttctgtgtctagtttgtt

SEQ ID NO: 270875 - DNA, 457 bp, Homo Sapiens
  misc_feature (21)..(21): n is a, c, g, or t
  misc_feature (47)..(47): n is a, c, g, or t
  misc_feature (95)..(95): n is a, c, g, or t
tgactgcattcagctggcagnttctgggaaggcgggcctcttccctnatccccagttgttgaaggccccctctgtctcccatgtgatatcctccnaaagggcccccttcagcaaagtaacccagcctcccctatgtggcccttaagcatctgagagggcaaaggcagagactccccaagccttctcaaggcattggcctgaaactggttcagcatctctgctgccacattttcaggactaaagcaagtcacagactcagccaggatccaaagggaagggactatgcaagggcatttataaacgttgacaaggttcgattatagaacaccattgtaatggactatcccaagcatgtaccactgtgtctcatgcatggtaaaggtcccataaatgttattgctctcttgcagtatagtagtaatagtagtggtagctgttttaggagtaaaaacagcta

SEQ ID NO: 270876 - DNA, 186 bp, Homo Sapiens
acatatttgtatgcagtagagggcctgttgtagaaaacgctccctgtatcttgctgtactgttaaagaaagctgaattccacattgccaacaaaagcgtgaaaatgttcatgaaccttcctccaggaaaagccattcaagcctgattatttttctaagtaacttcaattaaattgaagaaaaaaaa

SEQ ID NO: 270877 - DNA, 329 bp, Homo Sapiens
gtgtcacattggaaatgccacttttttctccattgtatttttgttaccctaacccatgccctcaccatctgaggactgtgtgtatttttacaattaatagctctcatactcactggtttggggaaactgagcattccccctttatccagaggccagttgtggtaagtgtcttgttttcttcagatcccaaccacgggtctctaaaggtatctaagatctgtatggtcacatctgcttttccaagtaacagctagaaatattttaccatgccttcactatagcctaggctataataaagtttacaatcagaggctgggcacgggttgtca

SEQ ID NO: 270878 - DNA, 318 bp, Homo Sapiens
agctatggcattcttctggcatctaactttcctttgacaagttcttttcaagttttttatgcttcttttcttacccttatccccatagcaaaatctccttgtaaaaaattcactttttaaatcagtctgccctcttaacatctcccagttcttccattttagccattttaccatttctcctccgaaatgcccccttaagttcccaaccttcactttagctttttgggtctagtaatatcctctaatatacgacagtcattgagctacagaagtttcacaacagcttaagcttgtggatttaatgatagcagtagtaag

SEQ ID NO: 270879 - DNA, 427 bp, Homo Sapiens
caacctctactacgccccaattcagcaggaagcagttagagcggtcgtcggccaacctccccaacagcacttaggttttcctgttgagatgggggactgagagacaggactagctggatttcctaggctgactaagaatccctaagcctagctgggaaggtgaccacatccacctttaaacacggggcttgcaacttagctcacacctgaccaatcagagagctcactaaaatgctaattaggcaaagacaggaggtaaagaaatagccaatcatctattgcctgagagcacagcaggagggacaatgatcgggatataaacccaagtcttcgaccggcaacggcaaccccctttgggtcccctccctttgtatgggagctctgttttcatgctatttcactctattaaatcttgcaactgcaaaaa

SEQ ID NO: 270880 - DNA, 214 bp, Homo Sapiens
atcatgtgacataaggtttactgactttgtatcagcatttaagtattgttaaatgtatgtaatagtatttgggttagggattggtgagtttctagttgtacaaaggatagttgtattatgttaggcataattatgaccttattattggctttatttgaagattatgtatgacctcaggagatgtgtatcagttcaagttgacaaggggtagaca

SEQ ID NO: 270881 - DNA, 694 bp, Homo Sapiens
ttaagaggcagatcttgctcttccgtggcagtccagcacctgctgcctcgccctactgcggcccactttggaggcgaggcttctacccgctcctttccgtgcatcatactttgttttctgttgaatactttcctcttagatcaccaccctgagatggtagaaaacataaaaatccctgtgtacacgtggagggagaccctctgggcctgtggagcccaaatatgaatctaaggcaatgggtggattctggattaactgcgtttcacgctgggaagtgactgcggggagtttgggtcctgtgtggtggtgaccgacgattctgtcctagatcccagtggagaacaccaaagcgagcgaggaggaggaggacccgaccttctgtgaggtgtgcggcaggagcgaccgtgaggacaggcttttgctctgcgacggctgcgatgcggggtaagggacggttgggactggcacacgtgccctgctgcgtgcaaggcgggccaggcgcaggagggatgcagagcctcttcgctctgtgaagtctgagtcccagcacctggagctgtgctcaccaccctcagcagcgcggttcagtctgcgggccttcctgttacactcatttacacttcagtctttccccaaaaaacattctgaggctgcccacagaagtgcaggtaatacatcaagacaaaaaagaaaa

SEQ ID NO: 270882 - DNA, 423 bp, Homo Sapiens
  misc_feature (16)..(16): n is a, c, g, or t
  misc_feature (24)..(24): n is a, c, g, or t
  misc_feature (44)..(44): n is a, c, g, or t
  misc_feature (51)..(51): n is a, c, g, or t
  misc_feature (69)..(69): n is a, c, g, or t
  misc_feature (75)..(75): n is a, c, g, or t
  misc_feature (102)..(102): n is a, c, g, or t
  misc_feature (189)..(189): n is a, c, g, or t
atcctcaggcagattngttggaanacccctgttcctatcccctnctcctanccccacccctgccttganaatatngttagccccatacccccaaataactgnctatattagacacccccccagccagtttctggctgcctgtctttgctgccatgcctttacaagaaggaaagaattcttgctatttgnttttcataatttactatttatgatgtatttaagtgttttattaaggacagagttctgttaggggtgggagggaatatttgagggagggctgggtcttagggaaaggaatggggaagcaacatttttattaagtgttactatttgcctctactttgtattgttcagaaatggcaaatacaatataaaagtgatatatggttttaatgtaataaactttaatgagttatttagaaa

SEQ ID NO: 270883 - DNA, 602 bp, Homo Sapiens
  misc_feature (88)..(88): n is a, c, g, or t
  misc_feature (533)..(533): n is a, c, g, or t
cccagctgaaatcagccatttgcaggcagttttccagaagctggatgaaaggattcattctgtattaccatcagcctgaccatattcngatttatatcagcctgacatttctgattttctaggactttttagtttttttcctgccgtacagtgtattgactaccatttccagctctttcagttggcaaacttgataatagttttagttaaataactagtttgtgttttcgattttaaaaaatgttgtgaagatcagtattagttaggaagccctgcagcatatctgtagaaccttctttccaggttgacctttatcttatgccagactctttgggtaaacttattcaagcattcgttaatttgttgaattatattatcctctagctcacctttctcagtcttgtctacagagatgttttgagacacattttcagacacctgccaaaatccttcccctgatgtaaggctgcgaatctataatatcaaaaaaggaaactaggtttatttggtataacttgctcttattaataaanatgctgctgtctgttgacatcatttcccatcctcagtgccaataaaaccatgaatgtaggatttgtcgg

SEQ ID NO: 270884 - DNA, 733 bp, Homo Sapiens
  misc_feature (579)..(579): n is a, c, g, or t
tagtacacaggccatattccatattaatattatttcttataatcctcctgaagtaatcactatgaagagtgtaaagtgggtcttttcaggacctttttccccatgtatgtctttttttcctgacaaatggactgtggtgttttcctctcctggcccctcagccatgtataagagctgtaagagtgtacaggtcacatgtgaaacttcagtgtttctggcccctgaaggcagagtaagaaaagtgatgaaattgcaaaaatccaccctaagagtgctctacaaagacacacaaaagcatatgggaatataagctgggcttccgacagtccgaaagtgaaaaatcgatactttcacggctgtgtcattaacacattacaagagaagcccaggaacaccaccgaaggctgttcccacccatgaaggacctggcatttctccatgtctgacacctatttatagcagacatgatttctgcagacaagtatttatgcacattagatatgcattatttaatggtactactacaccaaaatggggaattttctacgaatccttgaataggccctcaaactctccctncccttcaataattacggttcagttttaaataacttaaatcttcaactttaattgaaaacaaagcatctctatttaaaacctctggatcagagtgttttactgtcttaataaaacaagtgactgaaaggaagactaagagagacttcctatagtt

SEQ ID NO: 270885 - DNA, 329 bp, Homo Sapiens
  misc_feature (45)..(92): n is a, c, g, or t
aactgaaaatttagttcctcggtcacactatctatgtttcaaggnnnnnnnnnnnnnnnnnnnnnnnnnnnnnnnnnnnnnnnnnnnnnnnnttgtagagacagtcatctgtattttcttttagtacttgtgtgattttatcatgaacatttacatgtatgaatttattttgttgtatggtatggagaatggatctaatttttgcaacatggctatctggcatcacaaaccgcttattaaaaagtccatctttggctaggcagaaggatcacttgaggccaggaatttgagacccagccagggcaatataatgagacctcatctcctcc

SEQ ID NO: 270886 - DNA, 621 bp, Homo Sapiens
  misc_feature (97)..(117): n is a, c, g, or t
aggtagaacagaaccttctcgtacaatctcacaaacaggttaaagatccatttgaagctacttcagtaactaagacaatgcctgaagagaggagacnnnnnnnnnnnnnnnnnnnnnagcaaggcgcatagacaggtagtgaggacagggcagtgagtacctttctaaaagagagagatttagcgggactaaaggtctgctctgtaagctcgagcccttcgatagtttccgtacagtcagagagaggtgcatcctgaaacagtaaactgagtcaccagagcacaccaggcccagcctgtgaaatatcagctgagagcacaggatggagctggctaagagcatgcagcagggacagctgtcaacagtaagtgtggcagtgatgatggcaggacatgcagacactgaacatgaaaccaggaccacggctggacaaatccaacaatcgtctacccctggcagagtcaggtgttaaagcattaggtggcatattagttttcagagataactacttacacaattatcttcaatgtgccacaaggtagagtcattttgtagaaatgtgtgtaaatgtgcaccacacttacaggcacccacccctctgcaacccaagcagcactttgt

SEQ ID NO: 270887 - DNA, 948 bp, Homo Sapiens
ccctttgaggagactaaatgtatttcatgctggaaagaacagattttctctcattaaaaatagccccactaaaggagaccaacatgctagaagtgcggcaccagggcctcaagactacacttcggaacatggaagagggctggggaccgctcggcccaagtctggatcttgtaaccaacagatgccgagcttgccgttcaactaggcacagaaagcagactcggtctgggattccagttggtctgattcagttcaagagggtcacagtcagaagaaagctttttccattaggagcttcagcagagtgaagagttcaacacagcaaacaggcaggcagctcctttgtatatgtgacggggtggccctgactgtaaacacagccctaccagtcactgcagctcatggcctgagaagacattccagtggcagcctcgggtgtccactcagttcacatattctggtttcacctgcccaagctgtcttcaggcatgaggtcttgtcagaattgggatgtggatgtctcctatgttaccatttattgtgtggggggcagccatcatcctatttgtctgggtccatcaagcttcccagtttcccgctgcacaaggtcccgcatctcttctgtccagcccagaagctccactaggctttccacgccatgaaccacgtcccccagcttgggccacgtcccttgctgcgaggatgccaagccaagggccccaccaagtcccggttgatgagcagtcggggaacttgagctccgcacggcctcggtcaagctggcaaaaggctccgacctccagggaggtcccaaggatgagcagcagatctgccatggggaaatcaaccacatgcagcaagaacctctggggcagcggctccccaaagaacacaatgtcgggcttcacaacggcaggtgcagaccgggcagcggggaaccctgtctgc

SEQ ID NO: 270888 - DNA, 455 bp, Homo Sapiens
  misc_feature (321)..(379): n is a, c, g, or t
tgagtctcagaaacaagctctttaataaggaaaatccagaagctataaaactggggggcaaggtatgagggaggctggaaaacgttggagaagaaggtaaatggaggctagtggcgccacagcagagtattcggtcggtgtgccatcagccctcacagctgactcatgccatgactaagggaaattggtcgtggagccatcaaagagggcaaatgtcaactgctggagagagtgcatggacagaaagttgcaagcaaaataaagtccagctcttccaggttgaccactttgtgcccctacttcacagagctgtgatctaannnnnnnnnnnnnnnnnnnnnnnnnnnnnnnnnnnnnnnnnnnnnnnnnnnnnnnnnnntgatgaaaatactaaataattaattctaccctctggttacttcctagagaaaacttaagcagatttcagaacaaag

SEQ ID NO: 270889 - DNA, 637 bp, Homo Sapiens
  misc_feature (48)..(48): n is a, c, g, or t
  misc_feature (131)..(146): n is a, c, g, or t
  misc_feature (170)..(170): n is a, c, g, or t
taagcttaggaattaaaaaaggtttggtgtttcctagggagagacctnccagccagtggagttccttaagcagacatccttgtgccagatttggcccctgaaagaagagatgccctcattcccaccaccannnnnnnnnnnnnnnnagggactgggtactaccttactgncccttacaagagtggagggccagacacagatgttgtcagcatccttattcctgctccagatgcatctctgttcatgactgtgtgagctcctgtccttttcctggagaccctgtgtcgggctgttaaagagaatgagttaccaaagaaggaatgacgtgcccctgcgaatcagggaccaacaggagagagctcttgagtgggcttagtgactccccctgcagcctggtggagatggtgtgaggagcgaagagccctctgctctaggatttgggttgaaaaacagagagagaagtggggagttgccacaggagctaacacgctgggaggcagttgggggcgggtgaactttgtgtagccgaggccgcaccctccctcattccaggctcattcattttcatgctccattgccagactcttgctgggagcccgtccagaatgtcctcccaataaaactccatcctatgaaa

SEQ ID NO: 270890 - DNA, 458 bp, Homo Sapiens
  misc_feature (153)..(153): n is a, c, g, or t
  misc_feature (205)..(205): n is a, c, g, or t
  misc_feature (337)..(392): n is a, c, g, or t
  misc_feature (448)..(448): n is a, c, g, or t
tgacacacgcacccagccatctgcaagacttttatcaaaactttttgtcattacccaacctgctgtgtgaacgtgatatctcgttttattagtttgcatttctcttgttgaaccttagtattttgctctctctgaaatatttgtttgagcccntttgcgttttatatgtgtatttggttatttgtctgtatctctacatgaacantagaggtcctatctatatcttttaaggaaattaccctttgtgatatgaaataaaaccttttaaatcagtttatctttttatctttttgatttggtttgtgttttctcatctctagccatttttaaagtcacnnnnnnnnnnnnnnnnnnnnnnnnnnnnnnnnnnnnnnnnnnnnnnnnnnnnnnnntcattattagaaaggcttgtctctgcgactcaaaaataattcttccatagtttctntaatattact

SEQ ID NO: 270891 - DNA, 501 bp, Homo Sapiens
ggcatccatacaccccagaagacttcccaaaatgaggccagactcagggtcacggggaatgtgcttctgcccctgtaagggctttggggaaagggggcaaacatagtagagggctggaaagagccccccaaacctgtgcccatgccccctccagccctgcgtttccattctgccttctcagagtgcccttgctgcacccagaccaccggccaggagagaccttctctcccactccagcccctctcactgcccttcaactagagctttcacctttttacatttcccttctgaaggacacaaatctgcttttctgcccatacactggcccaagggctcacctaacttgggagggaaggggctgttggtacaaggatgattttctgttagactgccattttgcacggtctcccccttcccatctgatgtgtcctgcccttcagctctttgccttatctgtgtcactgtcactttagcaaaaatacagcggccatttgtatcagc

SEQ ID NO: 270892 - DNA, 300 bp, Homo Sapiens
tcaagtttctagttggtttttcaatccttcctagaaaaaagttaacacaggccaacaagttataggtcacatgtaacttttttttctgtgaaatttaaattttcttctcaaagaggcgaatgcatataatgccaaggaaaacaaaaatttccttcagctttttcactaattatcaaatctaaaagaatttttcattttcaaaaaaaatcactcaagtctcaatcagtatagaaaggaaaattacttggcctttgggtattacaaaagtaataccttttgtaatattgtattacaatatct

SEQ ID NO: 270893 - DNA, 576 bp, Homo Sapiens
tccccagcccttaccagttgtgaagccagcaagtcaaatagttcttaaaactcaaaaagcagcttgtaacctcaaaatacttagcaaactttgtatctgacctgcattgtttagtccacctatttacattttgacaacatctgctctttacccaataatcctttaaggctgtttttggtttctccaatgattaaagtcacgtgaactgaaaggtatcacagtttttatcttccctttaaaaaatattagatccaagtgcttgtctttgtttaggccaaattaattagagctctttttacagataccacacacagtatatacacagacaggcaaaagaaaacccagtcactgggtggggccctttaagagacagggctaggaagacatgcagatatggaaccagagagggctcatcccctaaggcaggattgctaaacaaagccttgccactggagttagaagccatgccctcaggatgtaaaacaagatggaagcctgatttcacaaccaacaccttgcagagaatacaaacagtgatagttccggggtgggggtctggcctagtaaagtgttttc

SEQ ID NO: 270894 - DNA, 551 bp, Homo Sapiens
  misc_feature (32)..(32): n is a, c, g, or t
  misc_feature (51)..(51): n is a, c, g, or t
  misc_feature (67)..(67): n is a, c, g, or t
  misc_feature (130)..(130): n is a, c, g, or t
  misc_feature (136)..(136): n is a, c, g, or t
  misc_feature (141)..(141): n is a, c, g, or t
  misc_feature (419)..(427): n is a, c, g, or t
ggcccctctaaagcctttcctatcatcccagngtgtctaccccaagacccnttgcgcggccccattncctgggggccggcgtcctgtccccgagcctgggaggccggctttggatggtccggggcgtcangaagcnagggntgggcccggggaggggtccctttgcggtgagctaggtttacatgacacagtgtgcccaaagtgacttactgcgggttgcgttagtttctagtcatcaggactatctcaccctcccactcctgtttttaaaactcagaattctttcctaagagcccttcgagcaaagcgtgccgaagttagttgtcttctctgtggtggtcctttcttatgtcctcataaaagctcagatgatggtatctgtgagtatgttttgcaaattcaaaatatagtttggtaannnnnnnnnccagttgatttttaaaaagaactgctgtacagagcttgtactttgtccattttatagatggaaaccatccttgaaaattgtttaacttaaataaagagaagatactttctagataccgctaaaa

SEQ ID NO: 270895 - DNA, 396 bp, Homo Sapiens
  misc_feature (340)..(340): n is a, c, g, or t
ttgcatatactgactacaagagtttaaaaattcatgagaactgaagtctaattttttttctatcttcgtgctgttgcattgatctacctttctttttcaaggaaagtagcacaatgttttcattacctcagttttatactaaattgtgatatttggtatagctagcatgactcatctttgattttttgttctaaaagattttaaacgtacagacatggaaataatgaagtaataaacatttatgtactcacaacccaaattaacaaatactcactctgtcacccaggggctgggagtacagtgggtgcaatcatgggctcgctgcagcccttgacccccngggggttcaaggcgatccctccccaccctcagcttcccaagtaggttaggggctac

SEQ ID NO: 270896 - DNA, 524 bp, Homo Sapiens
  misc_feature (221)..(221): n is a, c, g, or t
  misc_feature (259)..(259): n is a, c, g, or t
  misc_feature (275)..(275): n is a, c, g, or t
  misc_feature (296)..(296): n is a, c, g, or t
aaatttaaaacactgtgtattgcagaaaaaaaggtaaaagttatgtgaaaagtagagagaatatttgcaaactaatggggcttatatttgtgatatgttaggcagacttactgaccaacagtgggtcaatgatgtcaaaagaaaattcactgaaagagcaatatttatgtcagtaaacattgctaatgaaatatcaatgaaagtcagagatatattaagtnaaataggaaaattgccagaagaatatgttatgactacncgtttttgaagaatanggggaatttggaaaatttaanggtgaaatattttcctttatatgtagctatacagtagtaaattaccgtgtacataaacacatctgggagaacatggcacctattttcagtggaaaatctttggggtcagggagtgagagtcaggcagatgaaaggataaatttaatttacacatacaccttttttggcctggtttgaaattttgtaatcaggaacatttattaagataaaaatttgtaggccggcgca

SEQ ID NO: 270897 - DNA, 699 bp, Homo Sapiens
  misc_feature (25)..(25): n is a, c, g, or t
  misc_feature (37)..(37): n is a, c, g, or t
  misc_feature (83)..(83): n is a, c, g, or t
  misc_feature (115)..(115): n is a, c, g, or t
  misc_feature (473)..(482): n is a, c, g, or t
atgccctaaagctagtcctgtaaanaatggtgccccnagaaagctgcaggtggtgtttggagaagcagttacttttcagttanaagacccatctccctagtctcagccttacaanaccacgggactaaggaagagcacttccttagcctccgtaaggccagaggaagaaccatcccaatcatttgatctcccagctccacagtagagagaaacctacaaaatgtcaaaccagcttcccgactcccaggagctcaagccaagcccagaggcagtggctggggtccctgcaggtcatgaggggcctatgcctttactccttttaaacaccagcacccgtcttttccctcccagtcttcacatcactctggcctcatcaccaaggtgacagaggacacaggggagggggaaaacccacacacactccttggaatgggtcctgttatttatgcttgctgcacagacatattagaagnnnnnnnnnngctttgtattattcttccacatatgctggctgctgtttacacaccctgccaatgccttagcactggagagctttttgcaatatgctggggaaaggggagggagggaacgaaagtgccaaagaaaacatgtttttaagaactcgggttttatacaatagaatgttttctagcagatgcctcttgttttaatatattaaaattttgcaaagccctttga

SEQ ID NO: 270898 - DNA, 821 bp, Homo Sapiens
  misc_feature (414)..(423): n is a, c, g, or t
gaaccatcccaatcatttgatctccagctccacagtagagagaaacctacaaaatgtcaaaccagcttcccgactcccaggagctcaagccaagcccagaggcagtggctggggtccctgcaggtcatgaggggcctatgcctttactccttttaaacaccagcacccgtcttttccccaacctaaaaccaaccaccagcatttcactacaggaccaaatggaaaccgagggaaccctgggtcttgggaagaacaacaggaaaccaaggtctgacctagggttccctcccagtcttcacatcactctggcctcatcaccaaggtgacagaggacacaggggagggggaaaacccacacacactccttggaatgggtcctgttatttatgcttgctgcacagacatattagaagnnnnnnnnnngctttgtattattcttccacatatgctggctgctgtttacacaccctgccaatgccttagcactggagagctttttgcaatatgctggggaaaggggagggagggaatgaaagtgccaaagaaaacatgtttttaagaactcgggttttatacaatagaatgttttctagcagatgcctcttgttttaatatattaaaattttgcaaagccctttgagctactgccttagtctacccactgtccttttgttatgaggtagaggatctcatgacaccatacacacaaacccatcattgcctgtgaatgcacgtagggccagaaatccccagttcccgctcctctgagggttgatactgctgggaatgccaaccactccacaagcagagggaagccccct

SEQ ID NO: 270899 - DNA, 333 bp, Homo Sapiens
aagctccaaaggtcaagaaatggaaaaattccttgaaacaaatgataatggaaacacaacatacccaaacctgtgggatatagcgaaagcagtactaggagggaagttcatagctattagtgcctacatagaaaagaataaaaacttcagataaataacaatgcatcttaactaaaaaagcaagagcaaaccaaacccaaaattagtagaagaaaaagtaaagatacgagcagaaatacatgaatttgagatgagaaataatacaagaaatcaatgaaacaaacagttggctgtttaaaagttaaacaaaagagacaaacctttagccagact

SEQ ID NO: 270900 - DNA, 369 bp, Homo Sapiens
agaactgagggtctctgctgatgtccctctgcagctgtcctgccagtgaggcactgttgacccatcgtgcctgggcctaactgtcatgtagaaatagtttctcggaagtcatctttaaactggtctggtgagtattctaagtgcgaccaacatcccctttccttctcctgacctagttggccccttctgtgggttccagatagcctttttctgtgggttcatttgtaatgctctagaacaggataaagatattgtctaactttaggctttgctaagttaaaatatgaaaagttaaaattttctggccaggcgcccttggctcatgccctgtaatccccagtactttaggaggctgaggtgggcggatcg

SEQ ID NO: 270901 - DNA, 494 bp, Homo Sapiens
tattaaagggcatattaatgtaaaactataaaggccctgaattattttcttaggtgatttaaatttttctctttaactacaaattgtgtttcaatattaatagaagtcttaaaatattagataaatgaaccctagttattttgaggtagctccttgaaagtaaggcaactccagctacccttttaacctgctaagtggttacgttttgtcttgtttccttaaaaaaaccataaatagtcttattaaggaaataatgaaaaggtttccagaaatagacttttctcaccaacagtttaatagccgacatttattgaacgtacacattttaatgagaattaggataaaatattaactgcctctgttatacagagaaagatgacatgcttttcctcatagcccaaacggtacatgctgaaatgacagcagaggatttttgtctgtgttccctgaaccaaagttttatcagtctaaaataaaatttgtgtttttatttt

SEQ ID NO: 270902 - DNA, 738 bp, Homo Sapiens
ggggcaacgaccatgactctgtggggtcatcagtccatgacccctggagagaagggccttgcccctggggggtcatcaatctgtgaccactggacagaagaccctgacctctgtgggttatcagtctgtgacccctggggaaaaagaccctgacccctgtgagtcatcagtctgtgagccctggaggaacgactatgacccctgtccattttcagactgagacccttagacagaatacagtggcccctagaaggaaggctgtggcccgtgaaaaggtgactgtcccctccagaaacatatcagtcacccctgaagggcagactatgcctttaagaggggagaatttgacttctgaggtgggcactcagcccaggatgggtaacttgggtcttcagatggaagctgaaaacaggatgatgctgtcctccagccctgtcatccagctcccgggaacaaactcctctagcttttgacaaccgctttgttcccatctatggaaaccattcctctgtcaactcagtaacccctcaaacaagtcctctttctctaaaaaaagaaatcccagaaaactctgctgtggatcaagaagcctaagcccctctggtgtcagaaaccagggaaaacccttgtcttttcttctaagtgacatgttggaagccttctcatcccggggcaaagcaggcatcaaaaccagaataggccaatctcttttccattaaataaactgtaaacacaaga

SEQ ID NO: 270903 - DNA, 262 bp, Homo Sapiens
tctttagcctatgctcgggttaattacattgatcgatttctgaatgttgaaccagccttgcttgtataactcaaataaatcccacttggttattatggtgtatactttttacatgactgttttctatttggcaagaattttgttaaagatttttgctactaaatttatgagaggtatatgtctgtagttgtattatttttgtactgtctgtatgattttggcatcaaaataattttttaaatgtgttaagaaatgttccctc

SEQ ID NO: 270904 - DNA, 416 bp, Homo Sapiens
  misc_feature (67)..(67): n is a, c, g, or t
  misc_feature (365)..(365): n is a, c, g, or t
  misc_feature (386)..(386): n is a, c, g, or t
  misc_feature (406)..(406): n is a, c, g, or t
gtagtgctgcctctgtgctgatgcacctccatgtggacttgtccgcaacttggccacgcagggcagntgcctgcatttgagttgctcatggccttccccatggtgccactggaaggagtggggtcctggcctgcgcctggccactgccgcctcatgctcctgcctccaatatccttactcacatttctgaggaagccctacattttcaatgattatttagtagttagctctttcccttttaaaactagaatcaaaagtgatgaatatattcctatcactatattattgatggggaattaaggaaaatttttaaaaaatgaggggcctcttgccaacctacaaatgacacattattttgctttggnggtcattttaacctcatttanggggtttcccggtaggaccnggaaaaccgg

SEQ ID NO: 270905 - DNA, 139 bp, Homo Sapiens
tttccttataaaattcaaagagaaaatttctacacctttatccctcaaataaaacaagtgctcagttcttaccgtgcccttgcaaggtctatatgtaaaagaaatctgaaatttagctgtagaataaaacttgataaat

SEQ ID NO: 270906 - DNA, 414 bp, Homo Sapiens
ttagggtcttggtttgaatccagactagaaaatcattacttattaaaagccttgaggatatgggtctaggaaagtctatgtgaagagataatagtttggaaaaagttttgcagaactaaagaaaagtttccacagttaccttttctgtcctaatgtagagcatctttgttaactaggtcttggatcaatccaagctgtgtctgagaataaccatttataatttctcactggccagcactaacaccctttagaaaaggaactcgaaagcagccctagcagccagagtcatgcgatcatggtgggagtacagctcctcaccaaggtcagctcctcagtgaaatccatgccttctggaggactgcttgtaaataaatattaagcacaaccattaaaaaataatttggatgtgaccaa

SEQ ID NO: 270907 - DNA, 965 bp, Homo Sapiens
  misc_feature (688)..(688): n is a, c, g, or t
  misc_feature (693)..(694): n is a, c, g, or t
ctgtggaaaaccactgctggcacaagcagtgactgtttggcagcttcaagtttagagctgtgaagacaggctgccattcacagtattttgctttttgacagtacaagatgctgtgtaactgttttaatacagcaaatagtaactctccaaatcctgttgcttttatgttaaataagataacaagaattggagcatgcaaagaatgggacttggataatgacttaagctttatatgtaaagaattttagaagatcttggtgctgctattcctgctggaggaatgaatagatggctgtttcagttaagctattagtaataaaagtgaacattgctactatctgagcctacatacataacttgtgtgatttcaaattaaacttgcattatgtgttaattttcttgcatctaaaaaagcatagaattcctactcacacagctcagcaacaaccattttgatggtaacagttaatttctttcattagttttttaaattcagggttctggatattaaattaaaatggcattcttaaagattttcttcaaaaagcaatcctaaatgaaagtgtgtaaattataagaagctggcgatcttttgatatgctgtttcacaggatcctgacactggagggcagctgtcttgtgcattacttgtgtttccagcaccaaagttgtgggacatgttgctggntaacnntgcgcagtcctgggtgcattcagtctctctgcctctgcctgcctcctggtccccactttaaaggctgtgcagctccttaaataataaagctggaaaatatttttagtcgggttatcaaatttgatttacaaaaacgctaactttgtttgaaatgcaaacaggtttgaaaatatgtattaagtactttgtattctggaagcgtgaattgcttttgaagtctgtcagtattactggtatttttaaataaagaagaatttttctccaaatttta

SEQ ID NO: 270908 - DNA, 194 bp, Homo Sapiens; identical to SEQ ID NO: 12308

SEQ ID NO: 270909 - DNA, 522 bp, Homo Sapiens
  misc_feature (13)..(13): n is a, c, g, or t
  misc_feature (198)..(198): n is a, c, g, or t
actgggagctgcnatattttaacaaggttcacctacctgttcttatggtcaggactgagtttgggaaaaccacaaatctcaccatctgatatggaaatatcacttaagaagacccatgtgttctgaaggcaaagggtgacccacctactgagaaacagcagagtccttctacagtcgctttctggataatgcccatcnttggcatctattagaactgcatttttatgggatgcattaatttcattttcctatcatctttgtagtcagttaacgtggattagtttagagtgatgccaacctcattgttctgtgcctgtgctaaaaattggataaaagaccatctaatttttgtccattccctttcctcctccctttcttatcatctcacttttctttcttacctttcactccactttcattcttctgtgaccgtattcttagatggaatatagtaggggcaaaagtaatagaaatattttcatgtgcacagggcattttagggaagtgcatgttttgtgatat

SEQ ID NO: 270910 - DNA, 199 bp, Homo Sapiens
  misc_feature (138)..(138): n is a, c, g, or t
caagtaatttgtgtgtatttctaactgattgtattgaaaaaattcctagtatttcagtaaaaatgcctgttgtgagatgaacctcctgtaacttctatctgttcttttttgaggctcagggagaaactagcatttttntttttccaaactactttttgtcactgtgacagttgtaaataaagtttgaaaatgctttcca

SEQ ID NO: 270911 - DNA, 498 bp, Homo Sapiens
  misc_feature (166)..(179): n is a, c, g, or t
cacctataacaaaatgtgtttggtagcagattgtccagaaagccattttaaatgaagaggtataaacccttaagggccaaaattctgtatattagattactcttaaacgaaaaacccaggccgcttttatgtacacatattacatacgagtaggcagcagactttnnnnnnnnnnnnnncctaggcatgttgatgttgcaaaatgctgtataaagctgaaacctgttcattcagtgccattgtagttgacatgaagcgattgtaaaactgtctccgatttttctctggtttattaaaatgctaactataacattttttgtgaatactttgaatgtttcctaacagttgtgatgttactgttccgttttatgctcttattccaagttcatttttaatggtttggaagccatttttgtaatgaataaatgttcatgctgtacagtatctgtagcatgccgttctggattaataaaagcaacttagtatgtgcagataaaa

SEQ ID NO: 270912 - DNA, 589 bp, Homo Sapiens
aagtactgactgttcaaagctcaggcaaaccatgcagatccacgtgttgttggaggaggcgctcccttcaggagaccacagagggggagtgactgtggctgaccatgtgggcagaggggctggcgggctggcccctgcgagaggcggactcagggctgatggatgctccgtccttggccgctttgatctggagccacgtgtcacccagagctttggcaaagtggtcgtccacggagcccgtgatggacacggagttggggtgccggctcgggctccttgtaattcttgcccagggctcctgcgggaaatgctcctccaccacggggtcacaggtggtggcagctgcaggcaagcaggaaggcaggcagtcagacacaggtggctgcagacagacaggcacggtttgcagcaccctccctcaggcagcccagagccggactggctgccacggtcagcgtgggctctgcagacagaacccacctcccccggctaagtcaggcacttgggcaggtcacttttctgtaaaatggtgatgtaccaactgcactgggccagagtccgagttcagaaagagaatgtggcattaaat

SEQ ID NO: 270913 - DNA, 563 bp, Homo Sapiens
  misc_feature (37)..(37): n is a, c, g, or t
  misc_feature (48)..(48): n is a, c, g, or t
  misc_feature (120)..(120): n is a, c, g, or t
  misc_feature (360)..(360): n is a, c, g, or t
  misc_feature (444)..(498): n is a, c, g, or t
atctcacccctcatgccggatgctcttctccggaccntaatctgaccnttctcagttcatctggataaaacctgctgtgctttcctgtccctgtgagtgggaaggtcttctgctcccaanaccacctgctccagagcctgccctccacagcttgcttccaactactccctccctccctggacttctcatctgtcacaagatggggatcatgggggtttcttaccacacctatgtccccctcttccccaccctgtccctgtagaaaaccagtgaagcaggtacggagctgaggactgggccccaggaggtggggacaggcgtctgaatgccgagtccctgaattcacccaggaccatccanaggggccaccgcagcattggccccatcaccacgtcctcacccaactctccctgatgaatagaatatacacactgtgctaggtgnnnnnnnnnnnnnnnnnnnnnnnnnnnnnnnnnnnnnnnnnnnnnnnnnnnnnnnggaaatgactgttctgctgttaagataatgtatactcttttattttcttcctttcatggttaaga

SEQ ID NO: 270914 - DNA, 868 bp, Homo Sapiens
  misc_feature (13)..(13): n is a, c, g, or t
  misc_feature (514)..(553): n is a, c, g, or t
gattcggcacganaagtgatccaatctaagaaaatggtaaaacgagctctggccacagcacagaattttatgtgaggaactcagatttttgaagacttaacaattgcagagaaaggttgcagcctgcacaccatagcccacctctctgagcagactttggttttgtgtggtgacgtggcacatgtttgtacactgggatttttcaaaggacgctacgcaagcagactgacttgcctcttctgtgagcactgtggcttttgtcagatggagtgccggtctgcagaggactgctctttcgaatccacagtgttatctgtgtaaatagctttaatttttcttctgtgtcttaggtgaagttttgttcatgtagcaaccaggtagacagtgaccaaataaggctgtaaatgtgctgtagttttctactgtgatgtacttgaaggagaacctgtgtcctctactttcctgatctcccacaagtattttgtgtttgtttcctgagtcctgaggttattannnnnnnnnnnnnnnnnnnnnnnnnnnnnnnnnnnnnnnnctggagacccagggaggcccatggtggagatcatttgtaaggaatggatcatggtctgggtttccaaaactaccctagtacagtgaatgagagaaatctgcctggaaattgtttcagaaccatgtacctttatgctttgtgattgtgaaacattgacttttttgtaaccccaaaatgaaaactgtttagtaaaggggatctattttgtgtgttttgaaacttaggtgcaatgtcccctggaaaaagctaaagaaatgtatatgttcaatgacattttaaaataaaatattatatatatgtatatacgacatattc

SEQ ID NO: 270915 - DNA, 668 bp, Homo Sapiens
aagttacagccaacaacttcctgaaggaatgaatgttggataagaagataagacagcaagagtcaagaatgactccaaggtttctggcctgagcaactggaaagctgccaagaactgagatgaggaaggctatgtggacagagtaggtatgagagagcaggtttgggagggaaaagcaagaattccattttggacatgttgagtgtgagatgtttaagagccattcaacataggcaactggatataaaaataaggagttacggagagagatctgggctgaaaaaattcatttgagaaaaaaatattcaaagccagattcccaagtgcctgatcatacctcccagtctcaggaagatatttgcttaccccttagaccaagaatcttaagatcttccccagctatgaagcctatcttggaatgggaaaccatgaaatttgtcttttaaaagaaagggaagaaatagccttacagcccctgttcctccaagtgcacatttagccttaaaatcctgggagtcgggagacaccgtggagtccttacatccacagtgtctgctggtcgtggtcagaaggcagtaatgcaagagtccttttgtgaagagtgtttctatgtagagatgtttatatttaagtagttcttttataaataaaagcatttctaatggcaa

SEQ ID NO: 270916 - DNA, 453 bp, Homo Sapiens
  misc_feature (314)..(314): n is a, c, g, or t
ttctaattatcaaacaaatactatattatgttttattgaaagatattttgttttaactttaccaaattctgtgcagaagtactggacaccatttccattttcccaatgaaggggatcccttttgaggagcagaaagacataaaactctgacatggcacacacagaggggaggagcttgcaaacgggggaaatctgaggcaagtctcaaaatatgaaaaacagttgctgcttctggccccctgatggatgaaccactacttcttacttttaagttgttcctcacagcattcctggacccagctcacaggtcagtnggttactcagctagaaagagctggagtttaccatccaaggtagctgtggcaagctggggcgctgatgggttgaaggccactccagtgacagtgtctgtgtgcccagccagccggtgagaaaacgtgcttgagcccattt

SEQ ID NO: 270917 - DNA, 446 bp, Homo Sapiens
gagtgaaaaacacatgaatgcacagaataggagattgaaatataaaccacagaacattcatacaatggaatactctgcagtcataaaaatcttctcatagaagaatatttgacagcatagggatatctgtggcatattaagtagaaagtcagacttgtaaacattatatacatattcacatatatttaaacaccatgatcccatatttagatataacaactaaaagttcagatggctatatatcaaaatgtgtcaaatgttcaaccttgcataggctgactgtagatgaattttatattattctttgtgctttcttgtagttcccaaattttctttactgaatctatattacttttgcaatttaaagaatttaatttataaaattttataaaataacttataaatttgaaatgtattgcatttaagaataaaaagtgtttaattac

SEQ ID NO: 270918 - DNA, 736 bp, Homo Sapiens
  misc_feature (462)..(462): n is a, c, g, or t
  misc_feature (492)..(492): n is a, c, g, or t
  misc_feature (499)..(508): n is a, c, g, or t
ggaaacttgtaatcataagtacattttcttcaaaaagatgaataaggaaatgggaaataacatatttcctatgttttccctaaggtagacctgtcgtaacacagattcagaaagaaaaatcagtaagaaggggtttctccatgtaatccacagttttccccctgctttgaaacagaaatcatcgttcactacagaagtatctgtaagcaaaacacactttatcctctctagggaggagaaagggttaactagctacagtcaccagcaggaccaccacagagcaggactggctgggcccaaacctgctcccccatcccttcaactcctctaactcacagctccttgttttttttctttcttaccttcctcgtaattctctcatgtaaacctcatgcccagtgatgtttgcccaatttctgggaaaagataaagctccagaaacaatttgattttcctctaacnttttcaaattattccaggtcaaaacctganccttggnnnnnnnnnnggaaatctttgaaaacagcttcaatcactgtccaggttcacaaatatctagttaccagactcatagttttcctactttaaacaatgaagaactatcagacaaaagaagaaatgttgaaaaatttagatgacaatgaatttcattgctgcttgctctcagggagtgttattgctaacttagtaaacaaaaagggagcttgtcacagatgaatgaacatttcaaaactgg

SEQ ID NO: 270919 - DNA, 707 bp, Homo Sapiens
  misc_feature (61)..(78): n is a, c, g, or t
  misc_feature (98)..(144): n is a, c, g, or t
gagaaaaagtaattattttattttagttttattgtggtaaaattgttgccattttaagccnnnnnnnnnnnnnnnnnnaagtgacaaggtctcacttnnnnnnnnnnnnnnnnnnnnnnnnnnnnnnnnnnnnnnnnnnnnnnnaccatgctcctgggctcaagcaatccttacacctcagtcttctgcactttgaagagttcctgaataagcaggttcatctaggaggacattatctccagggattaatgatcatttcaaacacctaacaaaagaagcataggttagcttgttagtcagcataggttagtactgtttccatgctcagaagcccattttttagtttgagctcacatggttctagagtaagaattagcaaattgtttataaaggggccaaacagtaaacactttgcgggtcatagtatctctgttgcaactaccctgcaactactctgcctctatagtgaaaaagtagccatagacaatatataaatgaatgggtgtgactgagttccaataaaactttatttacaaaatttgatgaagggctggatttggctctcaaaccatagtttgccaactcctgttccagagaaaggtgaacagaggtttggctgctaacattcatttattccttttattgcttctttgaaaatctattaaatgtttactatacgccaggcctgtgtaaagtgtcagagataa

SEQ ID NO: 270920 - DNA, 500 bp, Homo Sapiens
  misc_feature (478)..(478): n is a, c, g, or t
  misc_feature (487)..(487): n is a, c, g, or t
ttcggtgctactgtaaacaatgctatggtgatcatctttgtaactgagtctttgaggtcagtaacaaactatcctctggagtgatttatgctgactaagcagtgactgagcaagaatacaggtttccccattttggttggcattacctttacccctgttctaagcacattagaaaagccctgaggcctcagctgtgggttttgggctcttccaaggagacaaaggagctatcataatgctgggaatgatggatccaggctgtggggatgctattgtggacacagggcagcatcagagcttggaaaagcctgcatggctggccaggctcagcgtttccaagaaagggatcttaaaggatgggatgaagcatctcctatcctcaacagggcagcctcagggatgggctatttcagctagggtgctttttaacctccaagtaattaagcatcctgacttcaaccagcgtaagtggcaaggnaaatttacnatcctaatgccaa

SEQ ID NO: 270921 - DNA, 406 bp, Homo Sapiens
  misc_feature (144)..(144): n is a, c, g, or t
  misc_feature (149)..(149): n is a, c, g, or t
cacattagcacatgaagatgcgcttcattctgtttaatggccgtgtgtcattctattatgtagatgtgccgtaagtatttatccctcttcagttggtgggcagcatgtatgttatttccagtttttagtcattacaaaaggtantggcngtgaacatccttgtacatatatcgttgtatagttgcgcaggtatatatgaaaaattcccagcagccaagctaaaaaatcgaagaatatgcacatttaaaattgagttagatattgctaaggttttcctgccaaagattattgtaatcatatatacttcccacccaacagtgtatgaccagtgctttcttccccacatcattgccagcactggtacgatcatactttaaaaactttgttggccgggcgcgggttgtca

SEQ ID NO: 270922 - DNA, 469 bp, Homo Sapiens
  misc_feature (117)..(117): n is a, c, g, or t
ggaggacaccagcataggagcagagtttagaacttaagaggacaagaaagctgctcagtggctggcgtatagctgtgaaggtaaccaaacaccaaagagggagtctgtccatttttnataaggctggaagcgaatgttccttttcttaccttaacatacagtttagggggttgcaccaagacaaagtttccaggctggagggtaatacatatccagcgcgagtgaagtccccactccaacatataccctttttgggtgggtaaacacctctttgcatgtggacagaaaatgtttatacttaaacagacatattttgcatatttttatctggagacttcttctagttttatactcttcccacatctatgccaatgccaccattctaaaacttacactccttttctacccctggtcttttccttgtccttccctacaacttggtagaggtccattttgtcttacttcacac

SEQ ID NO: 270923 - DNA, 496 bp, Homo Sapiens
tcggccacgagggaatctgtagggtcaatggaggagttcagagaaggtgcaacatttctgaccccctacaaaggtgcttgcttaacctgcccaggcaccctttccataccttgtctcagttcagctccccaccttggataaacaagaaaccttggttgcagaggaaaaaagaggctggaaacaaaggggtagaaatggggtagcgggggagattgcctgatcaactgccaaatggtacccagttctggaaaagcacaaaaaatgtgcacacacgggttcttcccactttaacccctgaggaatctgaggcctgctcctgaaacagactgggcagtggctagtgactctaggtataggagtatccagccctgctcacccaggctagagcttaggggaccaagaggaaagaggtgcctgttgggggtagaggacagagtctattttatattgggtttaatttaagcgggcgaagcttatttcccttagttaaggttaa

SEQ ID NO: 270924 - DNA, 501 bp, Homo Sapiens
  misc_feature (63)..(186): n is a, c, g, or t
tgggcttaagcaatcctcccaccttgacccttcaagtagctcggaccacaggtgtgtgacacnnnnnnnnnnnnnnnnnnnnnnnnnnnnnnnnnnnnnnnnnnnnnnnnnnnnnnnnnnnnnnnnnnnnnnnnnnnnnnnnnnnnnnnnnnnnnnnnnnnnnnnnnnnnnnnnnnnnnnnnnnnngtatgagccaccaggcccagctgtttttttattactgagaatcagtcacaaaaagtgaagtatgtatattgccacattttcattatcttagttaaaatgttaaaagggggaaacttcctgggaaacgtgaactcctatccagttaactatgccagaaataacaacattattataatgttgtaataatggaaaaccaaatacctgcatgttctcacttataagtgggagctaaacatatggtacacctcgacataaagatgggaacaacagccactggggaatataagaagagggagggagagggccaaactaagc

SEQ ID NO: 270925 - DNA, 445 bp, Homo Sapiens
  misc_feature (29)..(29): n is a, c, g, or t
  misc_feature (35)..(35): n is a, c, g, or t
  misc_feature (94)..(94): n is a, c, g, or t
  misc_feature (111)..(111): n is a, c, g, or t
  misc_feature (201)..(245): n is a, c, g, or t
  misc_feature (255)..(327): n is a, c, g, or t
  misc_feature (435)..(435): n is a, c, g, or t
ggaaaacagcctatgaacatgatttaccnaatttnaatacgactccacgtataggggaaatttgccccttcgaggccaagaaattccggcacgnaggtaatctgtgacaantaacatattaaagagggaaagacagatttataggagcatagtatatactattggatcttaagctggtattattcaaactaggttgttacnnnnnnnnnnnnnnnnnnnnnnnnnnnnnnnnnnnnnnnnnnnnnatttttgtannnnnnnnnnnnnnnnnnnnnnnnnnnnnnnnnnnnnnnnnnnnnnnnnnnnnnnnnnnnnnnnnnnnnnnnngaccgcccaaagcgttgggattacaggcatgaactactgcacccggccggaaattaacactcttaaatacaaatgagctaacaaagaattacaagagaaattagatantaccttaaga

SEQ ID NO: 270926 - DNA, 499 bp, Homo Sapiens
  misc_feature (30)..(30): n is a, c, g, or t
atgatgatgcagtccggccggaaagggccngattattatgtccacggggacagttgactgctggagggaagattgcaaaaggacgaaggagccaaggccttctttccaaaggtgcctggtcccaatgtgctgagaggccatgggcggtgcttttggtattggtgttgtatgatgagatccaaaaaatatgtcttaatgtaattaaaacacaagttcacagatttaccagtgaacttgatcttacaagttcacagatccattgtgtggtttaatagactattcctaggggaagtaaaaagatctgggataaaaccagactgaaaggaatacctcagaagagatgcttcattgagtgttcattaaaccacacatgtattttgtatttattttacatttaaattcccacagcaaatagaaaataatttatcatacttgtacaattaactgaagaattgataataactgaatgtgaaacatcaataaagaccacttaatgcaa

SEQ ID NO: 270927 - DNA, 489 bp, Homo Sapiens
  misc_feature (24)..(24): n is a, c, g, or t
  misc_feature (39)..(39): n is a, c, g, or t
  misc_feature (54)..(54): n is a, c, g, or t
  misc_feature (73)..(73): n is a, c, g, or t
  misc_feature (326)..(326): n is a, c, g, or t
cggcttcccgtcaccttatgccangatggtagtttctgnggcctccccatccangcctcctgtacagctggtngaactgtgagtcaattaaacctcttttctccataaaatttccccagtctcgggtatttctttatagccagtgtgagaatggaataatacacctttgggatactagacctaaaaatacttattcatcattttatttgatttacctgcaaatttcaacaatgttaactattccttcctcaaagtatcttcttcacatgccttatgtaatgtatcatcaccctctagtttttctccctttcttgatatctaattcnaaaattatttccttcttaccaagttaccaaaagattgatttcccaatatttgtcttagtgcttttctcatctcactctacagtttccatcaaactgttatcatctatatatattatctatgtcaaggtttctatcaatatctatatccgagataactcacaat

SEQ ID NO: 270928 - DNA, 441 bp, Homo Sapiens
  misc_feature (223)..(243): n is a, c, g, or t
gtgtgagccatagcgcctggccccattaagggaaatttagatgttccattttatttttatatccaatgataaattccccaagggtaataactgtatcatgggtattaggagaatacccttaagctgaggacatacatacttaagtatctaggggtaaagaggcatgatgtctgcaatttattctcaaatggttcagcaaaaaagcataaagcatgtgtatgtnnnnnnnnnnnnnnnnnnnnngaatagggatggatggagagggaaaaataaagcaaatacggcaaagtaactcataaaaatcttcctataactagaactattctattctttaaaaaaatacaaaaatctcatacaaaatatgctactatatgcagagcttcctaatggggtctgacacccgtggtacccttcatgtaatgatttttgttcttctgatag

SEQ ID NO: 270929 - DNA, 373 bp, Homo Sapiens
  misc_feature (22)..(22): n is a, c, g, or t
  misc_feature (32)..(32): n is a, c, g, or t
  misc_feature (152)..(152): n is a, c, g, or t
gttaataaaaatttcgctgggnagcccaatangcttgaaatggctcctgcactttggggttcctaagtcagcaaactgaaactcaactcagagtgaaagtgttgtgtgtaaccttgggagcaggaaacttcagcttaaccagtcagaaactncccgactaacctctaacaagggatttatggtccagttaacctcttaaattatgaacttttccactctaaccaatcaaaatagtttctttgtcttgctcccagagacaccttgtaagtgtcccctctggtttcctcggtggtggcgccctgaactgctggcggtctgccactgcctgattgataaaattgctgaatgctcaaataaacctgttaaaattgta

SEQ ID NO: 270930 - DNA, 426 bp, Homo Sapiens
ttaaatgggatttggtccatatatccttttggatttgtggatttgacatgtgaaattaggggttgtgtataagtaagttagttactaaacatatggcatggttattgataaacttgttgctatttttttccaaatgctatccagtgtttgtggacttttaaaaattagtttgaattttggaatgttctgtgataaaatataatttcaactattttgtacatttaaatatgccatgttgtatatgtctgtatttaaaaatgttgtaaatatctgcattttaagaattatgaaagattttcctcaaaaatgacagaactctccatacttaattgtgacacattataagatatctgattttaagcttttggattttgttctaaaaattaagtttaaacatgctgaaaattccataaaaataaaattttg

SEQ ID NO: 270931 - DNA, 460 bp, Homo Sapiens
  misc_feature (40)..(40): n is a, c, g, or t
  misc_feature (119)..(234): n is a, c, g, or t
gcagtgttaggagtactgcgatctattatccatatttatngtctatccacaccatcaccacccaccaccacacccctcctccctcaacatacaatttttctttattttaaaaaaaatannnnnnnnnnnnnnnnnnnnnnnnnnnnnnnnnnnnnnnnnnnnnnnnnnnnnnnnnnnnnnnnnnnnnnnnnnnnnnnnnnnnnnnnnnnnnnnnnnnnnnnnnnnnnnnnnnnncacaaaatttttaaaatcggaatattttaaagcaaatcacacaaattatttcacttataatacttcagtaaggcctttaaaaaatccacagtgatattattactcctaacaaaaacaataattacttagtatcatctaatatgtggttcatatttaaatttgttgttttgagatgggtcttacaattggtttattcaattgcattttttctaactcgtgtctcaag

SEQ ID NO: 270932 - DNA, 478 bp, Homo Sapiens
  misc_feature (204)..(204): n is a, c, g, or t
caggagtctcaccagtagaactttatagtattgcggtttcgattacatgtgtgtgaattttaaaaactgattaccctccagtaaaaatgtggaaccaatttgcatttggattaaaacattaggtttggggacaaaaggggaccccatgctgcctgagatgaagagagagagcaggagggcagaggaatcaccagctcaagaaanccccaagacttggacagtcttccagcagaagaggccagggtctctcagtgtacgtactcccaaacaggcctctcctagagatgtagtctgggaaggtccaaaacccaccagacaggcacatccagtggggaaaagacttcccattccagtgtggcctgcatccctcacctctgcttcccagtcttctgctgacctcagaggagcagggtggccattgctgatctgggttagggagatgccagaaacacacccaggtttgaaccacaggttagaa

SEQ ID NO: 270933 - DNA, 261 bp, Homo Sapiens
  misc_feature (113)..(113): n is a, c, g, or t
cagcgtgccaccgcacccagcctttggttgctgcttgagggaaaactcccaatgagttgaatgaactttgacatgatgactcccagcgctttttgaaaatggcatttctactnctaaattctcatgtcatttaatgcaaatgaccacaactggggtaattacaaacagacaaaatatcagtcttgtagcatagaatgtaaaaagcacagaatctggaggaaaaaggccttgaatacatgtgctccatcaaaagacatgaca

SEQ ID NO: 270934 - DNA, 493 bp, Homo Sapiens
  misc_feature (170)..(170): n is a, c, g, or t
  misc_feature (175)..(175): n is a, c, g, or t
  misc_feature (179)..(179): n is a, c, g, or t
  misc_feature (187)..(187): n is a, c, g, or t
ttgaagcatgagagatgagcattgctgtcaagtccccacagctgccacagaaacgcatgtgctgctttccatcatcccttgcattcaaaatgctactgatgcatagcacctaatcaagtccccaggctgcagttccactcggaggaagctacgtcacctccatcgctacngtgtntgtntccgctangtgtgttcagtgctggcttttctgattcatgattttccctgttgaaataaagttcaatcaattacttatctacaacataaatattcagcaaatgaacattatcttcccaacaaaaagtttatttttattaacaggaagaaattgggactctttgggaacaagctagcaagtagaggaatacgaatctttatagtttattatcagaaatcaggctaatgttgactataaataaattccacagtcaactacattaccatcaaaattatagtagtactcaagcaacctagatgttaaaaacaactcggg

SEQ ID NO: 270935 - DNA, 308 bp, Homo Sapiens
aagcacaaacctgttgtgaagtgtgcatgcgagggatctagttgtgtactccttatggggaatctaatgcctgatattctgttactgtttcccatcaccccagatggacagtctagttgcaggaaaacaagctcagagatcccactgagtctacggttatagtgagttgtagaatcatttcattatatattactatgtagtaataatagaaataaagtgcacaatatatgtaatgcacttgaatcatcctgaaattattccctcactcccagtctgtggaaaaattgtcttccacacattcactctgt

SEQ ID NO: 270936 - DNA, 634 bp, Homo Sapiens
  misc_feature (441)..(528): n is a, c, g, or t
tgtctctggacattgccaaatgtctcctgaggttgggggagtgagaatcactgccccacagttacatcctggcagagttaagcaatgaaacaaaatcactggccattaataatactatatgattttcaattaagagcttatttacacaccaagtaccttagaaacctgatctcatcccatcctcatcaaaaccttatggtgtgtacaagctggaatgatgcctattttataggttagggcactgaggcacaaagagtttagtggatgcctagctgcacagtagtgacccgatagagcaggcatttgaaacctgccctgccatcttagtcagtgcaccgagatatgaagagcatttttaaagtgtgctaggctctttcattttcattacatgtccactgatatggtttgactctgtgtccccaccgaaatctcatgtcgaannnnnnnnnnnnnnnnnnnnnnnnnnnnnnnnnnnnnnnnnnnnnnnnnnnnnnnnnnnnnnnnnnnnnnnnnnnnnnnnnnnnnnnnaaggaagaggaagaaataaaaggcatcaaaattggaaaggaagaagtgaaattatctctgttcagactacttgatcttgtatgtagaaaacctgaagattccaccc

SEQ ID NO: 270937 - DNA, 460 bp, Homo Sapiens
  misc_feature (70)..(71): n is a, c, g, or t
tccggccgccggaacccgacgcggcagcgcgggtctgttgcacaaacacaggcagaggggcacctcctcnncccattctgcgtgcttccggcgagcaaagccccgcccaaggtgtctcctagctggggaaccagtaccggcccctggtgcactgtccagctctggagagataaaaggaagagctggtgccttccagtggactacttcatcctagaagccctcgggatgcaacgtttcactggaagaaaggcctagcttgggtaggtccctagaaagaggggatacccctggaggagggggtatcctattacccccactctctaaaaggaaggatggaaatgtacatgctacccaaggacattcttctagaagaagcctggctctttatatatgttgtcattttatcctcacagcaactccaagagatgttttacaaataaaacaggtctcagcaagaaaa

SEQ ID NO: 270938 - DNA, 785 bp, Homo Sapiens
  misc_feature (220)..(220): n is a, c, g, or t
ttaattaaagcataatcacatgcattaaagctttatcacatatataattgttgtgtatgttgacatacgtattttcctttccagtgttttaaaatttctccttagattttctctagttgctattttaaagctttgttctaataataaaaatgtttgtagtcattatgaattttgggaaatagaaaaaaagaagtcgccaatactcttataacgcagtganttttagcattcataaagatttgaatatataattttccttctatatctttagaaattgccaagtaaaacagtctagaagtcacagtggcttcaactgctcattctctcatgtaaaagaagtcctgagataggcagtctagatctgatatggtggctccattaagttgtcaagaattcagatttctgtctctctgccctgctggtcatcttaatgggggctccttagagagacttcaaggtcacttcatgccccaagagggctgttagagttgcagccatgttttctgcattccagggatgcaagaagggaaaagggcagacaaagggtgaactccctgccctctaaggagctttcccaaaaattagatctacccctccagagctgaccagaatttagttacatggactcacctagctaagggaagccagaaagcattcaccagtcttacacatttccatatctttccctatgcatatagattcagtaagggtgttttcttgaagctgtctcaaatagtttgtggaaagagttaaggtataaataaacctcaatgaaaatatcaata

SEQ ID NO: 270939 - DNA, 672 bp, Homo Sapiens
aacatgacagttatattccctgctcagagaggatacacgtagctgttacagaaatggcagcattattccccaaaaaacccaagtctgatatggtgaggacttcccttcgtttactgacgtccagtgcctaccgactgcagtcagagtgcaagaagaccctcccaggggaccccggctcacccacagacgttcagctggtcacgcagcaggtcatccagtgtgcgtacgacatcgccaaggctgccaagcagctggttaccatcaccaccaaagagaacaacaactgacaagggcagggcaccgcctcctctgttttctaggctttataaagtccaatttcaaattcagacgcagaactcttcagatttctacaaaaagaaacatttaatgacggtttaaaactttttaaaagaaaactcagtattatttttgcatgttttctaaccaattttcaactatttaacccacttgccttattttgtgcctatttgctggtttagtttctgatgttcggttgtgttgtcaacaactgttgagttgatcacatacatccaaaagtatagtttcattgtctaaagtttgtgaaaacttttccatcccttaaaactccctgctatggctgaaactataaatgaaatttttcataaaacattttcttgagagagttcagtt

SEQ ID NO: 270940 - DNA, 417 bp, Homo Sapiens
ccagtgggtacccatcttctaaaccaggaccatcagccccaagagactcttctaaaactccagtatagggaggggcaaggttattcccatcctgccccttctcagaaccagtcccctgctgacctcaagttctcctccttgatcaccgtggccagagcatctcgtgtggaccatctaggctccttgggcttcaagcaggacctgagccacatgctccctgtacgagctgtgctatacctgtcccacatgagcacggagagcctcatgttggtgggtttccagagtgatgtgaaagcctctcaccccaatcctcggagactgagttccacaacttttttagtagctcatagtgttatttttctactctcttcatgaaactaactttattttataataaatatatattttctgttgaaa

SEQ ID NO: 270941 - DNA, 500 bp, Homo Sapiens
  misc_feature (75)..(184): n is a, c, g, or t
  misc_feature (341)..(341): n is a, c, g, or t
  misc_feature (347)..(347): n is a, c, g, or t
  misc_feature (358)..(358): n is a, c, g, or t
gttcaaaagattctggtgccttagcctcctatgcagttaggactgcaggagtgggccaccacacctggctaattnnnnnnnnnnnnnnnnnnnnnnnnnnnnnnnnnnnnnnnnnnnnnnnnnnnnnnnnnnnnnnnnnnnnnnnnnnnnnnnnnnnnnnnnnnnnnnnnnnnnnnnnnnnnnntgagccacagcgcccggccagttcactctttcctacccacaatcatcttcaacttcccatgaccaagagactaatgcttgaagttaacataataacaaatcagtagagaggggcacagggccaccatgagaaattaataaatcagaaaacacccttnatgccnatggatttttntaacactttggtgtaatcatcatcattttgctacacacacgtttaataagcagaaacagaaatataatgactttcttaaaactatggaacatcatatcaaattcttgctatgaattaggagaggctatattctcacaaaaaa

SEQ ID NO: 270942 - DNA, 380 bp, Homo Sapiens
aaaatagccagacccagactttggcccatggggaaagaaagtgctgtgttctaccccaagatattatggaagattcttaagaatgggacttttagtcttaagaaaaaacagaatgtggcagggagacgagggccttctaggcaaagagaatgaatgaatagcttatacgaaggcacaggggcaaggggagaacaaacaaaacaagcatagactgttcaagaacttcaagtgacttaggtgactcctgagcctcagaattcatgcggcaggagcagcagccgcgagatgactctagaaagctggactaggaaggtaccaggaaaggccttgtaggcgtttactaaattccgttaatggacagtgctgagagaactgttcat

SEQ ID NO: 270943 - DNA, 453 bp, Homo Sapiens
  misc_feature (115)..(124): n is a, c, g, or t
ggatgacagaggtgaatagttgcaacagagactggctggtctgcaaagcctaaaatatgtcctgtgtggccctttacagaaaaagttttctaacccctgctctaggttacggagnnnnnnnnnntggaataatgttctctgctacttttaacctgattttctttgttacctaaattagcagctagaatgctgcctatattttaaataaggatttgggatctcacaagacacccttaggccttacacaagttgttccagattcctttgcccccagttcctaatcctagtgacaaaggcatagaattctcctcccacaggaatgtatttctattttcaaggtgttaattagttccagttttggttttgtcgttttccccatgtccgatgcttatattggatgatttctgataaaccctgactattccaataaaccctaggcatttttgaatttaa

SEQ ID NO: 270944 - DNA, 633 bp, Homo Sapiens
  misc_feature (331)..(454): n is a, c, g, or t
gatccttaagtacacacctttttaatatttggtgtaatcggatggaaagtgaacataaagcccttctgctgcagatgaaagtctgttagtcatcttgagaaaagcatttgtgctgttgtttgtgagctgaactagctcccctttcaggaaacatgaattttgcctggaagcacagctgacaatccatggctattcacagttgggtattcagagaccactgtctagaacaatgaacaaagtgagcctgtcaacttcaaggtaaacaattgatagtactttccaataacaataaaatgtgagcttcagagaaaaactagaattttgggccgannnnnnnnnnnnnnnnnnnnnnnnnnnnnnnnnnnnnnnnnnnnnnnnnnnnnnnnnnnnnnnnnnnnnnnnnnnnnnnnnnnnnnnnnnnnnnnnnnnnnnnnnnnnnnnnnnnnnnnnnnnnacaagaatacaaaaattagcccagggttggtggcatgtacctgtctgtagtcccagctacttgggaggctaaggtgggaggatcgcttgaccccgggagtttgaggctgcagtgggctgtggttgtgccattgtactctagcctttgtgacagaatgaaaccctgtcttaaaaaaacac

SEQ ID NO: 270945 - DNA, 532 bp, Homo Sapiens
  misc_feature (15)..(15): n is a, c, g, or t
  misc_feature (33)..(33): n is a, c, g, or t
  misc_feature (43)..(43): n is a, c, g, or t
  misc_feature (58)..(58): n is a, c, g, or t
  misc_feature (124)..(124): n is a, c, g, or t
  misc_feature (132)..(132): n is a, c, g, or t
  misc_feature (170)..(170): n is a, c, g, or t
  misc_feature (192)..(192): n is a, c, g, or t
ggatttcaactaggntttccaaaaaagggaatncaatttaacngctcttgggagcctnaaccctgtttctcatcccggtgtttccaatggaaggatgccaaagaacagagacacacgagaaagntggacagncagagtcaaagaatgaaaacgggaatgaggtctctgtnaaacaaagctggataatgtccnatttccctgagcttgagtctgttcctctctgttcctccttctgttttttctctctcctcactggagtgctaatgaataccttccactgctctggaatgccattatgttgtgattgtcctcccttgcgaggtctttgcagaggccacgatgagaccggtctcatccacgggctttgtgtcctcctccctgatacagtccccaaaggccctctccactcagggctcaagttccactcactgggtgggtcatacccccagccctgtaaaatgtttctgaaggattggggctctgacatacctcacccaaatcttttgcatctttaataaacgaagttagtacc

SEQ ID NO: 270946 - DNA, 455 bp, Homo Sapiens
  misc_feature (29)..(29): n is a, c, g, or t
acttggtccagatgatggtattttaaaanggtatgttaaaataacttggtactgtggcagacatcagtgggtcatttggcatccagtgttaaagtacccttgccaagagaagatggcacagtcaaagcagacctaccatgaataattttaatggcctttgcatcatcagtggaaagtaattgaatgatcattgccaatttcaggtagcactacatatcttttattaacaaaatttttctttattgagacaaatcctgtaagtgaaaagacctgaggttgcccagcaggattcatttccaagtttctttggcctgagttcatatcaagaaatacctcctgggggtgatgaaataatctgcacaccaaacccctgcaacatccaatttgcttatataacaaatctgcacatatatccctggacctaaattaaaataataaataaattcaaaagtttc

SEQ ID NO: 270947 - DNA, 487 bp, Homo Sapiens
  misc_feature (279)..(279): n is a, c, g, or t
tttttcagtattcataagtgtttaataaaaacaatctataacttaaaaattacaaatttatatagttagcccgttttgcatcactataaaggaataactgaggctgggtaatttataaagaaaaaaggtttgttttggcttacggttctgcaggccatactagcacggcaccaatatttgcctggcctttgatgaaggccccaggaaggttacaatcacaatggaaggcaaaagggggaagcagactcttttaaagccaccagatctcacacgaactgnagtgagaactcactcatcaccagtggctctaagccattcatgagggatcatccaccatgacccaaacacttcccatcaggccccacctccacccccaacactggggattacatttaaacatgaaatttgaaggagacaaacatctaaacaatgtcattctacccccagccccccaaatctaatgtctttctcacattgcaaaatataa

SEQ ID NO: 270948 - DNA, 453 bp, Homo Sapiens
agtgtgtttaatatgtactgtttagtaaacaggtactggtagcccttggcttttatatcattgacttttcaaataactggcacatggaatactatacgtgtcacctctgaaatgcccatttatatactggattttgacttacgaacatcatttgatgaatgccttttttgggctgtttgtgttgctgtcttgccaagtaacccccacctgctacagaactgtgactttgccacttttggcaaaaatttcaaaaattatttggaaaattttattgctttttaccttattttaacaaaacaagtggaaaaaggggaaatgaaagcatctagttatgagaaagtttattatcttgatataaaattgagacaataatcattagatgtgctgaaagtgatgaatctttattggaagtgctgcatggagttaagctgatgaattgtgaaaaaaattgtg

SEQ ID NO: 270949 - DNA, 923 bp, Homo Sapiens
gaataggcctttgaggtctgggattctagcagtctcctttctggtttccttccctccccatcatcactccagtcccccacaaatccatgtgtctgggctaaaagagatgttggcccaaaagagatgttggcccttaactggtgagttgatgtagacaggacctgtgatgcttcctgaatcagtctgtgaggcattgctagtgaatggtatctgtggttgatttcctgagtgagcccttcccatgagagtgtctcctcgagtgtccccacaggccgatctttcatttgtttctgctttacctctggcttcctggaacagttctgttatgtgactttatagcagcgctgagagctgatggtaagccttctgagacacagaggcttgggtttttacgtcagtggcccttgtaggccaagggagtgaaaagtaaaggaattgagataaaatgctgtccttgccaaattgtggtttctgctttatctttcaagaagtctccattttctcttaagtcacagttcccagaggtgcatgtgggggttccagtgacctttcatgtgtggttcctgtctcagagaatggggtgcaaaaagcccagcgtagttaagcttttcagattttatattctgtgctttattacagtcatacaaattttgtaacccctgttaggggctttattaatgtatttatttgtaatttagacttacacattgatggcagacactttcacttttagttttggtagcctctcagcttcctgtctgaaaagttccagacttactagtttttgttgattagaaatcacatctgttgcttcctaagggccaggaaactcacccttcccatcagatcacttgagtcgttgttcctctcattaagctgtaatctgtctcctggtctccaaataaagacacaaacaccgaaaa

SEQ ID NO: 270950 - DNA, 537 bp, Homo Sapiens
  misc_feature (308)..(430): n is a, c, g, or t
ttattatggagttaagaacataaataatgtcaacatcatccttgggagtaattagtaggatgacatctgcatcccactgcccacatgcttaccttgagaacaactgacttggtgaatgagccaacaccccgtttcttaagtaagcgctccgttaggaaacctcactgtcaaatatattatatgctgtttttgactcctaaaaattatttttcattaaatagatcaataatttatatttcaatctctgtgtctgaataatactcagacactttcaatctgtcacaattaatattcttaaaaaatgtatnnnnnnnnnnnnnnnnnnnnnnnnnnnnnnnnnnnnnnnnnnnnnnnnnnnnnnnnnnnnnnnnnnnnnnnnnnnnnnnnnnnnnnnnnnnnnnnnnnnnnnnnnnnnnnnnnnnnnnnnnnngcgtagtgggtgtatgcctgcagtctcagctttccaaaagggctgagggtgggaagactgagcctaggtggtttgagggtatagtgagctatgatcgcgccaatgga

SEQ ID NO: 270951 - DNA, 482 bp, Homo Sapiens
  misc_feature (76)..(76): n is a, c, g, or t
  misc_feature (375)..(387): n is a, c, g, or t
  misc_feature (432)..(432): n is a, c, g, or t
  misc_feature (437)..(437): n is a, c, g, or t
  misc_feature (456)..(456): n is a, c, g, or t
taatgtgcaggctattcaagttcaatagtaaaagctcaaaaatgaatgttctactccatgctgaaggagctgaaantgccttcttcatattttgcactttctggtagttcccctgttttttctaattccctaaaattgtgtgggtggagtggagccctgcagttggggggtaacatggaccactgattttgccctttgaccctgcacaatgacctttgcatcagccaaactcattgccatgacaactctttgtactgtgtccgtgccacagatctgttggtcacattgttaatagtaaaggggacaagttgggagacgggtcaatttttacattttttgttgcaattttttcttcaatgggttggtaaggtaggnnnnnnnnnnnnntaataataaaaggggttcactaggttaatactctaggaaatatcngtgtngttgccaattcaaatgtangttgagggttgtggaaaaggcgcttc

SEQ ID NO: 270952 - DNA, 589 bp, Homo Sapiens
  misc_feature (151)..(251): n is a, c, g, or t
  misc_feature (358)..(485): n is a, c, g, or t
  misc_feature (578)..(578): n is a, c, g, or t
ttgaattaacacaatgtttggcaaaagttcggcatcctaggaagtctgttcaacaattcatttgccattttttcccccgctcttcactagtattcttcatattccatacaagtttatagtttgtatagtaagttttagaaattgtactgannnnnnnnnnnnnnnnnnnnnnnnnnnnnnnnnnnnnnnnnnnnnnnnnnnnnnnnnnnnnnnnnnnnnnnnnnnnnnnnnnnnnnnnnnnnnnnnnnnnnatagcagtgcacacctgtaggatcagctgctcaggaggctgaggtaggaggatcagtgagcccagaaatttaaggatgcagtgatctgtggtcgtgccactgtactnnnnnnnnnnnnnnnnnnnnnnnnnnnnnnnnnnnnnnnnnnnnnnnnnnnnnnnnnnnnnnnnnnnnnnnnnnnnnnnnnnnnnnnnnnnnnnnnnnnnnnnnnnnnnnnnnnnnnnnnnnnnnnnnatcaagaccatcttagccaacatggtgaaaccctgtctcagctaaaatacaaaaaattagttgggcatggtagcatgtgcctgtaatcccacntacttgggagg

SEQ ID NO: 270953 - DNA, 288 bp, Homo Sapiens
ccttggagatggctctgtctatctcaccagcctgactgaactcggccttgtgcctcttgctactccctagccctggcttattatagttttgcataataatatgaaataccaataagaattgtttgcatcttaaatgatcaataagggctgattagcttactaactcttgctacataggatgagaggcataagaaaagaatgtctgagctctccaggcttcagaaaaccattctacaacaaggaagggtgtgggcagataagtggatggatggaagaattaaaagttgg

SEQ ID NO: 270954 - DNA, 448 bp, Homo Sapiens
ctgaatgtaaaccaaaaaggcttaaccaagacttactaaatacactctcactctttcactttaaggcaatttattccagtatacttagagttgggaaaattgaaatactaatttctaatatgactttgtcaatttaatttttaataaaatgttttaaatatttattttcatgaaattttgggctgcagatttaactaattcaagtcataaaaacttgcattgcattatacagacctctccccacttactccaacttgacttttgtctacacacggctggtggcaacaattcacagccactgccaaagaccagcctctctggtttcacgtgggcaggtccatccctggatgctgcactcaccctgggggcactggaactatggaagcagtgaaaccaccaaggctgcctctgagagctgccaagtgctacatcgggtaagcaagctgcc

SEQ ID NO: 270955 - DNA, 450 bp, Homo Sapiens
  misc_feature (145)..(145): n is a, c, g, or t
  misc_feature (307)..(307): n is a, c, g, or t
  misc_feature (353)..(353): n is a, c, g, or t
  misc_feature (384)..(384): n is a, c, g, or t
  misc_feature (440)..(440): n is a, c, g, or t
gagactgcatagggctcggcgtcggaaactgctcttgggtccccctggagcacataggtctggaccagagtggggaggccacaggtctctgagctgttatgggactcccagggcaccggcttcttttcatcctcctccagcactngtgagcttggtgatgggtggcgtgccaaggccgggcagctggaaggcatcctcctccatgattgtgggcacccatggagcccaaggctgctgtgagctgggtctgggacacttggccagaggggattcttcctgttggggctgcaacagagccaggcagttnccacagaggcaggtgagcaacagcaggaaggccgaacaacccaagngatgatgtgtagctccgacccctctgcagtnaagggcagggccggaaagaagtttagaatgcatgtttgggaaagctgggtctcctnccctccgaac

SEQ ID NO: 270956 - DNA, 475 bp, Homo Sapiens
  misc_feature (16)..(16): n is a, c, g, or t
  misc_feature (33)..(33): n is a, c, g, or t
tcgggctttcttacgngaaggtattacctgaanggtattattcccaaatattatttgggtttattatgcgggatctttttttatatatgcagtcccaatcccttctgtgcccactcaaatgcccatcccagacatggtttttccctccaggggcctttcttcttccagagggcacttcggctgcctctgcttcctctcattcgaggcccggctcttgctgacagaataggttccgttctgggcggtggttctcgagcctgccattcaaaaccaaagcaaattggagcatttctcacaacatggtattgaagttcctttttgttctcaaaagttgtgaccgtgttaaattgtactcccttagtcctgtaaggtatgttaagtgaatcgcagttacgctgtacttttattaatatttaacataattaaagatggacccataagagtgacgcctgtggagcgcgtgctcttcctctgc

SEQ ID NO: 270957 - DNA, 413 bp, Homo Sapiens
acctccaaaacaccatccaagggacaacctataaagctcgccactgcagtggggccacagaccctcataggaaaccccaagccaacagtgacgtgactcagaccatcaatacagtcgcataccatgcgagacccgattctgatcagcgcttctgcacacagtatatcatctatgaagatttgtgtaattatcacccagagagggttcggcagggcaaagtctggaaggctccttcgagctggtttatagactgtgtgatgtcctttgagttgcttcctcttgacagctgaatattataccagatgaacatttcaaattgaatttgcacggtttgtgagagcccagtcattgtactgtttttaatgttcacatttttacaaataggtagagtcattcatatttgtctttgaatc

SEQ ID NO: 270958 - DNA, 505 bp, Homo Sapiens
  misc_feature (34)..(34): n is a, c, g, or t
  misc_feature (59)..(59): n is a, c, g, or t
  misc_feature (79)..(79): n is a, c, g, or t
  misc_feature (102)..(102): n is a, c, g, or t
tttgtcctgaaaacctcaaaggccctaaaggaanaaatgaataggaagaccttaggganaagaagctgacccccttgcnccccccaggctggggaaggctgnaagccccttttaagatgccccacttacctgtaaagtgggcccagaaatacccagagagggtggggttccccatgggtcaaaatgcacatgtagggtgtttaccctttacatttggaatcacccttgtagtcttttaaattcttgggtccctgaggccaagtccacaacttgccttctagtcacttgcctgcccgcagtggtggtggatgtgttagctggtagatttggaatcagtcaccagtctttctgtactgtcttggttagctctatataagtaggggcagcttagccctgaggcccagagacctgctgtcctttttctccttgagggaggaaataaaactgcggaatacaatgtccttccatagcatgggaagaagaaaataaacatctcctttccaac

SEQ ID NO: 270959 - DNA, 489 bp, Homo Sapiens
  misc_feature (448)..(448): n is a, c, g, or t
  misc_feature (469)..(469): n is a, c, g, or t
tcagagagcaagctatctgtacttgtgcgtttctcctaccagattgtgcatgcctcctgtgggcagagctgctgctgacttgctcctgggtctccagcatcacccagtctggagctgaggacctgggtacctacagatttccttccacactgtcagaattgagatgaaggaagcccagagaaatcaagtaccctccaccaggcagagcaaagtcctgggtgcccaaaatccagggaaggcaagggctgggggtacaagcagaggatctgaagaggtatatgagagtggccagcacagacctcggcataagcttgggtgctcagtgaaggttacctcgatgttgctgggcaccagggtgatgcagtgcaaagggccttggcaaacccactttgcagcataactgggtgacctgggtacagattacatcgcatttcagagcttcagtttnccctcaggcagagaaagttgncaagagaagcccggaagggt

SEQ ID NO: 270960 - DNA, 529 bp, Homo Sapiens
ccctgacattcccttagattccataatgttaggagcatttaacctgtattttacaagttaggaagcagaggatcagagatgggaaaggacttaccccaaggcccaacattaacaagcccctcctaacaaaaactttacaatacatttatgttgaaatggaactcccaagatcctcaccctctcccatcccaggaatggagtcccatgtaatcaaagtgaacttaaaaataggacagtttcaacaagtcaggagattcacagcaactgatcaaagggagtccagtcaacgtgagcaagcgtgattatgatgaggaagccccctctgctttaatccacacaaggaacgtaacctgaagtaacctgatgttaaccaatctgctgtgtctactatgctgtttccttgttcctgctagtgctgctttacaaatgcagaccattctatcaatacctggcggggcttctgttttattttgtaggctggatgctacccagttcatgaatcgctaataaaagccaattagatctttaa

SEQ ID NO: 270961 - DNA, 565 bp, Homo Sapiens
taggaaagagcgcagatgcactcagctcgtcatctcagatccgactccagtgaatacaacacaaagaagcgagattctataactgacagcacagaatgcagtggaacgcagagtcctaagcgccattctgggtcttatcttgtgacatctgtttaaaagagaggaagaaggaaactaagaaaattctatgttaaattaccaactgctatatagacattttgtttccaaatgaaactttaaaagactgaaaaattttgtaaataggtttgattcgtgttagagggtttttgttctggaagccatatttgatagtatactttgtcttcactggtcttattttgggaggcactcttgatggttaggaaaaaaatagtaaagccaagtatgtttgtacagtatgttttacatgtatttaaagtagcatcccatcccaacttcctttaattattgcttgtcttaaaataatgaacactacagatagaaaatatgatatattgctgttatcaatcatttctagattataaactgactaaacttacatcagggaaaaattggtatttatgca

SEQ ID NO: 270962 - DNA, 529 bp, Homo Sapiens
  misc_feature (18)..(18): n is a, c, g, or t
  misc_feature (53)..(53): n is a, c, g, or t
  misc_feature (65)..(65): n is a, c, g, or t
  misc_feature (186)..(186): n is a, c, g, or t
  misc_feature (194)..(194): n is a, c, g, or t
  misc_feature (204)..(204): n is a, c, g, or t
ccctacccaattggaaanacccgtaaggaattgggccctgtaaaccccctggnaaggggtccccnaagttggtttaaaaaattccctgaaaccctccctgaagcgccccgtccttgggtcctaaaacccccaagtcgtgaatgaattccaaaacttccctaaagccgcatgttgtcttgccctcantcatgaanctggtcaaancgtttccgtctctttaaactgacatgttcccccagtgctgtttgaactgttgaagtttccgttgctggctgagtgcgttttgtccttcacgtaaccttcgctggtaaaaataagcccatgtgatgtccaccagtggatgaatgctggaccgagagccctagcttctggatccgaggtctaggcccttcatctgctgctctgtggcccagggcaggtttgcttgacctctgcctcagttctcgactctaaaggacatactgacctacctcacaggggtgttgtgaggattaataaatgttggtactctgctttggaaatgtgaaaa

SEQ ID NO: 270963 - DNA, 283 bp, Homo Sapiens
  misc_feature (222)..(232): n is a, c, g, or t
gtttgtgtgtgcataagttggggaccctgttgtgacgtaaaatcctgggctcctatccagacacttacttctgtaagactgagcccagaaatctgcatttgtgatgagcatcccaggggattctgatgtgggcaaactgagaagcagacttcgaaaacacttgtcttgctcatgactgcctctagggagtgctttctcagaacatgccctaaatctagtgannnnnnnnnnnccttctgccttaggaaagccttttattttagatgggttcacaaaaccaggg

SEQ ID NO: 270964 - DNA, 501 bp, Homo Sapiens
cagccaaaactgaagacttactgggctatgtggtggataagtcacagctgaagagagacttagggaagtggaagggagaactgtagaagttacccagtgggcagcacaggcccttggtcagtgtgagggaggccgagccaggaggaggaggacaataagaaggcctaacaggcatctgaagaattccagaaggaagggcccagaggaggagatggcttaacttttccagaattgctaactacggggccctgggagtcagggagcaagcaggatgtcgaagggtcactgagagcctcaagttctggaggcagagccatgtattggacagagcctcactctaggatggcgaaggggcagtgagagccttaagttctgggggcagagccatgtattggaccaagcctcactccttgagggagaagtgcattttgtcgttgatcatcttgcgctcggggttgagtcgcttgaggatctgggccaacacgttcactgtctgctcgc

SEQ ID NO: 270965 - DNA, 660 bp, Homo Sapiens
  misc_feature (18)..(18): n is a, c, g, or t
ccagactgaatctggtcncagtgcttaaggcagggtgctgtcaccctcctaaaaccagatgggatgagcactgttgaacgtgccaggagcacaacatggagcaaatcctaccaaaatttgagccagtcagccttccctgcttatagctccaaccatggccttgctacttgcaacagatagggtgggaggctccgattttgtgggagaagaacagccaatgtttaattccattacaaagaataccaaggtgacattcaatctttacgtgaggaaatgaaatatggttgtttcaaatgtacttttaaacaaagggccaataactaaggccaaggaatgcttttatcattaacaaactcacctgggtatttattgtaatgaaatctgacctataattaaataccagaattttaagatttctcctacagtttccccaaaatttcacctggctactgtcttttccctttatcttcatccgtgaaacagtgccacaatctggctaaagatggaagtatttccaagaatgactatactaatttctaatttgatgccccctcgaaaatagttagaaataagtaatcgatataaaaatattacacaacaaatcttctagaaatctctagcatggtagggttacttactttgtcagttaatttaagctct

SEQ ID NO: 270966 - DNA, 167 bp, Homo Sapiens
ggggctggatcgtgttgctgccctgttaaacatgatgccctttgaaaactctccgccttttgaaacttttcctaccccctcccttcaatcttatccctaacccaaatgagaataatgacatattgaaaacagcctctagctttcaggctgggcacggtggctcacag

SEQ ID NO: 270967 - DNA, 522 bp, Homo Sapiens
  misc_feature (60)..(60): n is a, c, g, or t
  misc_feature (221)..(221): n is a, c, g, or t
ctggaagaagggatgatagcaggggactttgggtctagcctggtggggagagccagagantgagggagtgatggacagagggaaggtggtggttccgtgtactggagtttcttttgggttcataaagaaagaattcagattccttgagtctacccaaagtcagtagaatgcagctcagtcctgtacttcaccagagggactgagggttccctgagcacctnctgagcatgccacacatgctcattggcaggagggcaaggacatggttcaacacctaactctggaactctgctcagcatggcaggggctccactacaaagaagcataaaaatccagatactattttagtaccgtgatccatgtggtggctacattttgaagccctgcaccctttcagacatctgatggaagctctggggcatcttcacatttccatcttgcatagatccatacttgtagaattctgcatttaattttagggttacttgagcatgagagaatcctgtctgtggacctacgaac

SEQ ID NO: 270968 - DNA, 326 bp, Homo Sapiens
gaaaaggatgacagatgttaagagttttgtaaagtatatatcagtagctattattagtatcatttagctattaagttcttctaagaaccgtacaaggatatgaatgtcctgccaggaagtgactaatagaaagattatgccagtctctccccaacctggccatacaagtgaaggctcacttaggcaccgaggattatagccacagaggggatgttcaagaagaaccacgatgcaatgtcaatgtcctgaagatcctgaacactttcctcttcatcaccaaaacactgtacggctccagcctgggagacagagcaagactctgtctc

SEQ ID NO: 270969 - DNA, 428 bp, Homo Sapiens
  misc_feature (91)..(91): n is a, c, g, or t
aacaaaatggaaaccgggaacctgaggggaatatttaaggatcccccacagaagccgtaaaaatggaccatgggtagaaagtaatagaaanccctaaatgtcctgtcattaaagggatagggttaaaggtgtggttccagcccatataggaatatcctcgtatctgttaaaatgaataaagtacattcattgtgtatggaaaaatggccatgatacattaggtgaaacaagttattaatagaaaagtgtacagtgtgaactcattttaaaatgtgtgtgcttatgtttataaatgcatagaaaggtctattcacagctttctttgaacagtgtagatcacatgaaactttcaactttatacatttctgtattaatattttacactacccacattatttttaaactttattttaaataaagaattttta

SEQ ID NO: 270970 - DNA, 734 bp, Homo Sapiens
  misc_feature (74)..(127): n is a, c, g, or t
  misc_feature (605)..(662): n is a, c, g, or t
cttaattaagggatatctttaatcaggtttaacttcacaggcttaaattgattattcaacatggattaagcaannnnnnnnnnnnnnnnnnnnnnnnnnnnnnnnnnnnnnnnnnnnnnnnnnnnnngtctttcatccatgaccaacatatcccatacagtttatttctacttctttgtggtttacctaattactttctccctccattgtctaattactgagagcattggtcactgaagcaagtccctctgtgcagaatctggtgccacttagggggaattgaggaatcaggactacctcagggcttttgtttatcagatgcttttggcttttctgtaaaatcaaaagccaccagggttggggagagagagaggtcccctggatgttgctgtctgtgtgcttgaaatttgtcagtcagtcttcttgttgagcagatggcatccaaatgtatcttaagtcacttggggaccacgccatggggacatgaagagacctaatggagtgcaattaaatattaaagataagttctcttacatttctattgtacaaaacagtctttgccccaaatgcttcttatttgagcttttgtagttggcaaaggcaannnnnnnnnnnnnnnnnnnnnnnnnnnnnnnnnnnnnnnnnnnnnnnnnnnnnnnnnntgcagtggcatttctggtagaagaaagcccaaagcttaagttctctgtcccttactcctccatcagctctac

SEQ ID NO: 270971 - DNA, 519 bp, Homo Sapiens
tcctccccttttgcccccgtggggctcccggcatcctgaaagccagcaaagcctccagcatcttttccatcctgaggtgcctcccagtggcctggcttgtcggagcaagtttcatcagccctagggaaaacacggccctcctgggaacctccttacctggagtaaccggacaccttagacggaggtgcctgagggtggggtgggatttgcagggtcattatcagaacatgaggataacttccttgcccctgctctgtagccacctccttggcaccggcctctatttgtcataaggcggcgtgggcgaggcctgacacaggccagccttggcacgaggggggccaggggttctgagaagcgctgccctgtgagagccatgctggccttcgtctccatctctggttgacgggctgtccgtgtgcctcctgtgtgtctgcagacaagtcttgctgtgctttatttgtgaaactttaatgaggaaaaaacaaataataaatgttctcgttttgaaactcaaaa

SEQ ID NO: 270972 - DNA, 525 bp, Homo Sapiens
  misc_feature (42)..(42): n is a, c, g, or t
  misc_feature (51)..(51): n is a, c, g, or t
  misc_feature (72)..(72): n is a, c, g, or t
  misc_feature (106)..(106): n is a, c, g, or t
  misc_feature (124)..(124): n is a, c, g, or t
  misc_feature (130)..(130): n is a, c, g, or t
  misc_feature (351)..(351): n is a, c, g, or t
  misc_feature (366)..(366): n is a, c, g, or t
  misc_feature (368)..(368): n is a, c, g, or t
  misc_feature (387)..(414): n is a, c, g, or t
ttttcctgaccttttcttcagggcttgttcacaagggggccncccccttgnccccttcccttttcgaacgtncggccccccaaacccccggattctgcccttcctnccagttattgaatggcanccgctnttcccgccccaggccaggccaaacctcttccttgaaacagacttcttctggaggcaacagcagccaaccagattctacagaaagcccctgaaatggaggctcaggccttcaccttagctccaggcccgcactccacagaaaaaaagattcacccggcgtgggggtaggggcttccagagatggcaaccctctggcaggaatccctcaggatcctgtcaganccctggtctcttggnanttgacggagggagggaggnnnnnnnnnnnnnnnnnnnnnnnnnnnnttatcccagaatgtgcaggggagggagcataagcaaggctcaggctcagagagacctgagcccaggcacatgcttgctgtgtgacctcggataaaacacttaacttctctg

SEQ ID NO: 270973 - DNA, 1117 bp, Homo Sapiens
  misc_feature (51)..(51): n is a, c, g, or t
  misc_feature (71)..(71): n is a, c, g, or t
  misc_feature (114)..(114): n is a, c, g, or t
  misc_feature (127)..(127): n is a, c, g, or t
  misc_feature (1006)..(1059): n is a, c, g, or t
cagcacggccacgacacgggccacttccagacagagcccctggctgctggntagggaccgcagcaccttcngagaaaccctttctggggtcacttctggcaccctctgcaaacntcaagggggagcntgaggctggggctgtccatcagggtccaggcacctcctgaaggaacctctcaaagcccagcgatcaccggctccagacccacgctgtcagacatctctgtggccaccagaccactgccactctcacgggtgtgatgacatgggacctgcctactggtagtcttctgccttcgtggaattctgcaacttccttcctgcctcggccacagcatgtcagccaagcacctgtcagggtccctccctggcaggacgatgtttagaagctcaacaccttgctcctgcctcctcttcagacccatcagaacttgctaccatgggtgtgttttaataaataacttcatttctgcagcaaataaataaataaataaatgtagttgcaatattgcctttaaaagcacttttaagcatcaattgtgaaataaaaagcccgagcaaaagccctctttgagcgtgaagtgtctaaacgtttatttgtactactattgttgtaaagggtagattttgtagcattttgaggtggtgattcaactgcattaacagcatcccgagaccgcctgccacgatctggaggaaacgcacggccagggcccacgtgcagggtagggtcctgccaggctcccaaaatgccccgtcccagcactcagtcccatggaggcagcacagcctcagggaggccagcgactctgggcctgcgggtgagtccttcagcccctgcacagcccaatccatctgccacccacttggtgaccccaaattgtagtaagtcaacacttccagttactcaacagcttctgaaatttaaatctctggaacaatttacagtaataagaccctaggtgcacctgtctactatccttgtcctccctaatgaaatgggctnnnnnnnnnnnnnnnnnnnnnnnnnnnnnnnnnnnnnnnnnnnnnnnnnnnnnnctgcttgagcccaggtgttgggagaccagcctgggtaacatggcgagacctcacatct

SEQ ID NO: 270974 - DNA, 475 bp, Homo Sapiens
  misc_feature (137)..(271): n is a, c, g, or t
  misc_feature (444)..(444): n is a, c, g, or t
cgacacagggtctcactgtgttgcccaggctagagtgctgtggccaatcttgcctcactgcagcctcaaccttacaggctcaagcaaacctcccacctcagcctcccaagtggctgggactgcaggtgcatgccacnnnnnnnnnnnnnnnnnnnnnnnnnnnnnnnnnnnnnnnnnnnnnnnnnnnnnnnnnnnnnnnnnnnnnnnnnnnnnnnnnnnnnnnnnnnnnnnnnnnnnnnnnnnnnnnnnnnnnnnnnnnnnnnnnnnnnnntgcacctggccactgcatgatttctttaaccatttcccttgtagctaagtaggtaagaagatacaaatataagaaaagctgaactctgaagtgtcaggagaaaatatataatctagacagtggacgtatttttaaatgcatgatattaagaatagaaacgtatgccgggcgcnagcgcacgcctgtaatcccagcactttggga

SEQ ID NO: 270975 - DNA, 507 bp, Homo Sapiens
  misc_feature (81)..(81): n is a, c, g, or t
  misc_feature (238)..(238): n is a, c, g, or t
  misc_feature (241)..(241): n is a, c, g, or t
  misc_feature (345)..(345): n is a, c, g, or t
  misc_feature (391)..(391): n is a, c, g, or t
  misc_feature (468)..(468): n is a, c, g, or t
gaatgcccatattggcccatgcaagcccctgctgctcccccatgtgtgagggcagcacagatcttgtgtcattcccctatngaaaggtggtcacatagcacggggaggctggtgctgtgatcctcacttcagagatgaggaagctgaggtccaatcacggaagaggttgcatgaggttcctcagctggtaagtggcagagctggagtttggatcaaggtccctggggcagtaatgctngtngcttttgtgtttacaaaggttcagggagatggcagaaaacattgacacagtccctggacccacaggtggcttgggtttgctgcaggtcagcataaagagggctntgacagaggaagtacaagttactgggggggaccgggtaaagagggntaaagggtgttccaggcagagggcacagcacgtgcaaagtccaggaaggcaggaagcagcaccatgcatttgagganactgaaagaagagcagttggggccgggtgcagtgctcat

SEQ ID NO: 270976 - DNA, 684 bp, Homo Sapiens
  misc_feature (47)..(47): n is a, c, g, or t
  misc_feature (67)..(67): n is a, c, g, or t
  misc_feature (370)..(370): n is a, c, g, or t
  misc_feature (660)..(660): n is a, c, g, or t
ttcagttcattaggtatatattctattggtcaagatcacaacaggcnaacagtattggcaaaatttncggccacttcataaccagggtcactttttctccagcctccaatagtaattcctgtagtatcttcctctaagtattcactagaagtctccttcaggtttttctattctcattaacagtgtcctcaagatctttgcagcgtttgctcattgtatggttccaaaaccatggccacatgttttaagatagttatggcaagcactccacttccaggtatcaaattctgttcttattatctactgcagcatagcaaattactccaaaacttaagtggctaaaaataaaccaatcattttattatatcanggaccttgttgcttgggcatttgggcatgcctctgctgggtgattcttccgctcccatttcaaattgactgaggacactcaatggttttcagctggtgggtcggcttgtcaggagggtcaggatggctttcctcacatgacctccactggctagaaagtggggttcagctgggcttgttgtctggagtgtctacacatggcctctctagtagggtggctttagggtagtagaacttcttacatagtgactaagtgtttccagagagagtgttccaagagacagaaagtgntagctaccagtttcataaggtgta

SEQ ID NO: 270977 - DNA, 457 bp, Homo Sapiens
  misc_feature (15)..(15): n is a, c, g, or t
  misc_feature (41)..(41): n is a, c, g, or t
  misc_feature (96)..(96): n is a, c, g, or t
ataaattgctttcanccccttagaggctcccattagccacnttatgcctcccctttccccccccttcccttttaaaatcattctggaaagaaaacntatttttgtgccctttggggactcctgtctgtctgttacagtttacccaagatggagctgggttaggaaagaagtgagggcccattttgtggttcaagtgcactagacagctgctggggtaggaagcacaggcaatgtctgcaatcagctgtgggagagcagtgactgagaacagtctgaggcctggctccacttggaagtatctggggtgcggatgaaatcacaattatcttgaagcctaaagagggaactacaagactgttaactaagatcaatgtgggcacctaaaagggtatgttaaaatcaccatttctcaggtcaaaatactgtgaataagtcttcaataaaatcactaatggtt

SEQ ID NO: 270978 - DNA, 501 bp, Homo Sapiens
  misc_feature (26)..(26): n is a, c, g, or t
  misc_feature (161)..(211): n is a, c, g, or t
agtcttaagggtgccttattcacccncaggaaatgttccggttagcctggccagtggttccattcctgcagtcccaactactggagaggctgaggtgggaggactgcttgggccccaggagttccaaggtcagcctcggcaatataatgagactgtctctnnnnnnnnnnnnnnnnnnnnnnnnnnnnnnnnnnnnnnnnnnnnnnnnnnngtcatgatagctcaggtttcagagaggatgctgcactactctgggaaaaaagtgaagtgacagctcagccctgacagcaggacctagaagggctgagatgaagaggctgacctgtagagctcagcctggacccacaggaggggtagttgagttcacagagggatactgccatttaagctggttgtgaatggggtggtatgaagaccgactgcactagtattctctccaggttacaaataccatgaccaaactgtgtaatgtgatactaatatgcagaataaagcatatta

SEQ ID NO: 270979 - DNA, 418 bp, Homo Sapiens
atatatggaacaaccaggagataaatgagccatccattgtcatcggaaaaggaaaatgtgtgaaatggccaccagtggtgacagacaaagagactcagaagttaatttcaaggaactgagaacagcaaaaatgaaacctgaactactgagtggacacatccccccaggccacattcctaaacctatcgtgatgcccgactatgtggcaaaataccctgtgattcagacagatgatgagcgagaacgctataaagctgtgttccaagaccagttttcagagtacaaagagctgtctgcagaagttcaggctgtcctgaggaagtttgatgagctggatgcagtgatgagcagattgccacatcattcggaaagccgacaggaacatgagagaatttcaagaatccatgaagagtttaag

SEQ ID NO: 270980 - DNA, 639 bp, Homo Sapiens
  misc_feature (16)..(16): n is a, c, g, or t
  misc_feature (23)..(23): n is a, c, g, or t
  misc_feature (67)..(67): n is a, c, g, or t
  misc_feature (103)..(103): n is a, c, g, or t
  misc_feature (115)..(115): n is a, c, g, or t
cccggccgttgaaggncaaaggngactctgggaagggctagcagctgaaggctctaaaccaatgatngtattacatcgtcctctgctccccatgcagggaccngaccaaaccatntaccaaagggggggaaaatcccacacctctgggtaactggaaaggctgaggccatgggtgagagcacctcccatttcccctgggaaaggagaataagtaaaacttgaattccttcaattagagactcatctaagaatcctttctatcttccccactctgttttgaagtaggacagggggcccagcatcacagacgacaaggttcttaccttgtaagttctggtctcatttgtttctgtatttatcaagcctggtacataaacacagtaggtaggtggatggatgaatttgctgtccggtcaagacttcagctagcacattcctaattgacctgcctttacatatatggtttctaaaacactttcacactgggatgatgacagagttctggagatggatggtggtgatggttgcacacactattgggaatatacttaatgacgttgaattgtacatttttaaatggttaaaattgtaaattttatggtatgtatattttaccacaataaaaaattttaagaagaa

SEQ ID NO: 270981 - DNA, 447 bp, Homo Sapiens
cccccacagtcacatggcactctgacagctgaatttatggggataaacaaggtggccccccaccaagctgtgctgaatgatatcctcctaagaaaattagggtccccattagtcccacccacagcccaccttcagtcagtgcatggaataagccccttaacatcgtttggatcagctccttcatcagagggagcgaagaatggtcaagaaagtggactcgaaattggaactgacacaattcagtttggtgctccagcctcaaatggaaatgaaaatgaagttgttcctgtgctttcggaaaaatctgctgacaaaatacctgaacctaaagaacagcggcagaagcagccacgagcaggacctatcaaagcccagaagcttccagatttgagtccagtagaaaacaaagaacacaaacctggtcccattggaaaggaacgttcatta

SEQ ID NO: 270982 - DNA, 460 bp, Homo Sapiens
  misc_feature (126)..(126): n is a, c, g, or t
  misc_feature (313)..(313): n is a, c, g, or t
gagcttatataaaacagctgagctgccagtttattctgggcttctggtggtttgggctgaccaggcttggtggagtctggggacctgcctcagggactggccccctggcctgcgagccagggtatnctgggggcctggctcaatccagggcctctgtggtggcacacagcaggccagccagaagagccaggcccagcgcggcaacggcgaccagcgccacgtcccacaagacccccgggcgcacccaggacgcctgcagctgccagccacagctgcccagctggtagcctgtcagccggcccagccgatcgcnggcatgcgaggctgggggctggcacagcggaacctgcagcagggcctcgggcgttgcggtcctccagccagaggcgcagataggtgaggatgcagtcacagtgccaggggttctgcgtcacatcgagggtttgcagctggggcaggt

SEQ ID NO: 270983 - DNA, 405 bp, Homo Sapiens
ccgcttgtatcatggagtgtcagcttgctggaagccgaatgaattccgcgatgatatgtgcagaaaagagatccagggctttttcgattgtgcttcaagggcttaggaagcctaaaaaatgagatcaatacaggagaccctgggagagtctgggagtttacctcccaataaatagagtaagttgtcatagaggtttcctaagacacctcacctaagcttaaaatggaaaagcattttcaatgatttctggactatagcttctgaccaattatgcagaggcattttatagatgtttgcattgctgtgacctctttgaaggataagatgaggaaaaacactttttctaacctttggaatcaatagtatgggtagaagttatgttttatcttgaaataaaatcctctg

SEQ ID NO: 270984 - DNA, 703 bp, Homo Sapiens
tctaataacagtgaacatttatagaatacttgcagcttgtttcatattcacattctcaataaatgcagacagatgatgtcttcacaatttagtagtctgaccctttccacctatataacatggacaaatgtttatcacctcctaacacagcaagaacatctagcacacatatccgcacacacacacttatagaaagaaggggactaaaatgattgagtcccatatttcaggtgctgttctaggcatctgaaagatataaaacacactccccaaagtcctgctcatgtgtctgtgtgtgtctagttcaatcccctcagtcccagaatacccttgccttaccaccccttgtaccacatgtatcttccttttaactccacacatttattctctggagatataataatctcagtggctgtcatgggttgaattatgatcccccaaaaagctgtgttgaagtcccaaccctcagtactactgaatgtgaccttactaggaaatacagtctttcctaatgtaattggttgataagctcagatgagtggggtgggctccttatacgactggtgtcttataagaagatgccctaggaaagcaatacagtggcctaggaagggaatgtgtgcgtgtatgcatgtgcactggacactgggattatgccttgtgtgtggaataacaatgtatatgtgtatgtgtgtgagagagg

SEQ ID NO: 270985 - DNA, 260 bp, Homo Sapiens
  misc_feature (25)..(25): n is a, c, g, or t
aatttcggttccccttttgcccccnacattgacgccaccggggacgtccggcccagctcaggactgtgagtaaaacactgggcaaagccatctgttcagaacgccggatggcccagcacctggtgacagacctgttgtcccaccatactcagggcccagcagagtccggccaacccaacaactggagcagacagaaattctggtcactggcacatcataaggatttattgaaataaattgagaactgcctccccttcaaa

SEQ ID NO: 270986 - DNA, 584 bp, Homo Sapiens
  misc_feature (71)..(71): n is a, c, g, or t
tcccatcttgactttcaattcctcatcagaagtactggcttctttagagagtagtaagcatggctgcctantgcttggagtcataagtgttatttggactataccctgagataagcttatagatcaagtttggctcccttgaaaagcatttctctcatgtgcgccctcaggcttccagcaggattgagtcaccctgacgatgaccggggagaagccgtgtgctcttcattattttcagctggaggacagagctcagtgcctgactgcctagggtctcatggactgtaggcagcctgccagtgaaggtcactggactctagcctacaacatgctgagctacagcccagaagccagacatgcctgtcttagctgacctgtttttggtccacttttgcccttccatgactaataaggaagatcatgtgtgtatttcatacacacacaaggacctggattaaaaatccaaaaagtgattctcttctatgatttatttcaaactcatccatagataattcaagatttgtattcaaaataaacatagttttcacagttacaaaataaatcacctattttatcttttcctt

SEQ ID NO: 270987 - DNA, 287 bp, Homo Sapiens
  misc_feature (30)..(30): n is a, c, g, or t
  misc_feature (37)..(37): n is a, c, g, or t
  misc_feature (87)..(87): n is a, c, g, or t
ttgaaaccagtgattttagggcttcccctntgggagnaccggggtaccccggcccgggaccaaattccctaccccaagtggcctccnagcttgtcccgtttactccgcgtctcctgttccccatctgcaagacagggatagcaatagtgcttgtctcctagagtcgttgggaggtttaactgagctgacatttgcaaagggccttggggcagaaccctggcacatggcaagtgccacatgagcgtctgtgttataaaagcgtcgcccagggctgggtgcgatgtgca

SEQ ID NO: 270988 - DNA, 655 bp, Homo Sapiens
  misc_feature (14)..(14): n is a, c, g, or t
  misc_feature (24)..(24): n is a, c, g, or t
  misc_feature (50)..(50): n is a, c, g, or t
  misc_feature (56)..(56): n is a, c, g, or t
  misc_feature (108)..(108): n is a, c, g, or t
  misc_feature (114)..(114): n is a, c, g, or t
ggaaatgttgacgnctggccaaanaagccagtccccgggggaaccggtcncggacncccaaaaggaggggaacggccaacaagtctctcaaacacattgccagatgcntcaggngccttagtggacgggttcttggatcagccaaagtttaggcacaacttacatcaaataaggaactcttctggtgttggactttaggaatggcttcaatttagatgaagtattttctttttagaagatcttataagtttgggtcaagatcctggttcttatgggtccatgaacacacttgtgaccttagtacttggtcatccagcatcatacaggcatctccaagttagactctatgcagcatcatcttttgcagcattcctctgctcctgctgatctgtgccactgaactccagttcttctggtcattttgcatggtagctcttgtcacgttccttccttcctcactctctatttctctttccctctccctgtccctctctttctttgtgtttgttgattttggtgtcaattttgtggacatttggcaggagttttgactggggtaggagaaacccatgacattagaattgaataaaacctagaagttggatattggcatattggttgttgaaaaataaatttcatcctcacttatgagtaa

SEQ ID NO: 270989 - DNA, 440 bp, Homo Sapiens
  misc_feature (40)..(40): n is a, c, g, or t
  misc_feature (60)..(60): n is a, c, g, or t
  misc_feature (70)..(70): n is a, c, g, or t
  misc_feature (182)..(182): n is a, c, g, or t
  misc_feature (201)..(201): n is a, c, g, or t
  misc_feature (224)..(316): n is a, c, g, or t
  misc_feature (319)..(335): n is a, c, g, or t
tggcccttttcctaaaaacagccttgtgtttcaaaacccnttaaaaaaggctttctaccntcttttttanccctgttaaattcctactttctggggggttttcccttaaggaattaatttccaaaattgggaaaaagcttaaaaagccggaaaaaattgttgaaccatgacattatttatancctgtggaaagattggagncttgggcacagtggcttatgctnnnnnnnnnnnnnnnnnnnnnnnnnnnnnnnnnnnnnnnnnnnnnnnnnnnnnnnnnnnnnnnnnnnnnnnnnnnnnnnnnnnnnnnnnnnnnttnnnnnnnnnnnnnnnnnttagctgagtgtggtggaacgtgcctgtagtcccagctacttgggaggctgaggtgggaggattgcttgagcctaggaaatagaggctacagtgactgtgatcac

SEQ ID NO: 270990 - DNA, 389 bp, Homo Sapiens
  misc_feature (176)..(191): n is a, c, g, or t
ggtgggtcattgacagactgtctgagcacatagttgcctcccttataacttcagttttttcgtttggaatatgaatccaaaaagagaacatatcactcttgaaatacttgaatcatgaacgccaacctagaaagacaatgtgaagcaagtacacataccatttaaatttaaacacnnnnnnnnnnnnnnnnttagtttctagtttttcacttttttcatgttatatggaagttgttgctaagaaacatatatactgaaaaaaaatagctttttaactttgtttgcactgggtgtgtttccgtccttaggtctaccatgtttgggagggagggaaattcaaaagaattgttgggggaggggggagggaagacttgacggagcctcacttt

SEQ ID NO: 270991 - DNA, 529 bp, Homo Sapiens
  misc_feature (377)..(377): n is a, c, g, or t
gagctagcaccatgagcttcaataccctgttggtgattacattggttgaagttattgctccctcatttcgtgtaataaaataacacactactacattatggaaaacccacacataaatctaaaagacaaatattcttattaacaccatttgtatcctagaaataaattagcttccttaaaaaatcttttcaattattcacaaaatccatccttattttctgaatgaacaaggctgaattttagaagtgcaatgaaaagttcttgaggttcccctgcagtgtagacaggccttcttagtggattccgaggcgcagcttcttgtcctggtgctgctcttccttctgtgggacaggtctcaacacacccattttctctcntttcaggctcattttgttcaagaccataagctcctgatggattcagctgccacgtaaatttgctaacaccttcaagctccccgaacctcatgtaagagatgtctgccttcttttttccaacatctacatctcctgcatagatttgttttatg

SEQ ID NO: 270992 - DNA, 462 bp, Homo Sapiens
agccctagtgatactaactgaaaaagaaattgtctttgacctttgccacaactttagtcatccctttgcaataaagtgcccatagctggcattcaatgactgttgagaaaacttaataaacagaaataaatagaataaaagcatgtctttatgagacagagaaaaaaagttaagtaaaatgtgacaaatagatacaaaataggcccaccgttttataagatgtgtttaacataagactcaacatgctggttctttaaagtgaactgagtaggtaactctataggccaaacttttttttaaggttattttaagatgagttcttgccatgttgcccaggcttgcctccgaactcctaggctcaagggatcctcccacctcagcctcctcagtagctgggactacacgaacataccactatggcctggctccctaaatcatatttaagtgtttaagatattgttg

SEQ ID NO: 270993 - DNA, 599 bp, Homo Sapiens
  misc_feature (156)..(156): n is a, c, g, or t
  misc_feature (453)..(453): n is a, c, g, or t
  misc_feature (471)..(471): n is a, c, g, or t
  misc_feature (504)..(504): n is a, c, g, or t
  misc_feature (577)..(577): n is a, c, g, or t
gtactgacaatagtaaactatcccttctcccccaccagaagacaaccagacaccaagaaacagaactgcagaagggagacaggaaagaaaaagagtgaaaacacacagagaaagcacagagacaaacatagcaataacattaaagagataagggtnggggaggaaagagtaatcagaagaagaatagagacacacaacagacacagtgggaaccagagagaaccgagggtgggccatgtggggcacaagtgcacgtgtgggtgagcagaggcagacagaacagagaaacagacagagtgcaaagatgattcatagagagagaagagggcctggactgcagagactgcaggggagacagcaccggggcagagagaaacccagaaagagcgagtcaacagtttctttgttatgtccctttcctggttttgggtattagggtgatactgggtttcncataatgattttaagganggatttccccctttatcctttggaattgtttcngtaggatttgtaccaattcttctttgaatgtctgatagattccgctgtgaatccatctggtccccgtgccgantcttggcctcgaggccaattcc

SEQ ID NO: 270994 - DNA, 599 bp, Homo Sapiens
  misc_feature (14)..(14): n is a, c, g, or t
  misc_feature (39)..(39): n is a, c, g, or t
  misc_feature (52)..(52): n is a, c, g, or t
  misc_feature (60)..(60): n is a, c, g, or t
atttgccctcgggnccaagaattccgcccgaggaaaagnccggaaattgggnatcccatnccttcacaggggccccttgttagagtgacctttgcacatctaggtacccagcgagcccccaagtacacacttgctctgggcttgggtgcgtagatggccaaggatggattgtctctacccattcctcaacccagctgaggcccctgaaatcttcccttagccagatttcgggacaaaggagcactagatattattaaaaggactccttttgctagtcctttgaagcccgaattgggattgaaagtgagaggaacaagggcctgggctcagaagggggatataaggaaagcagaacccagtgtgcctgtgtcagtgtcgtctggagaaaaagctcttgatgatatctaatagctgttattcacatcaaaactctctaaggccctccacctattttctcgtttatgggaaatgaaacattcagagaaagggactttgcccaagtcacctcagatgggctcagctggaaactagaagtgagattccgacatagtggaaatgtgtagcatacgggtgagccactttccaacttagccgattaa

SEQ ID NO: 270995 - DNA, 1067 bp, Homo Sapiens
catttgcttttggggatttttttaaagcagagtataattcagtggaagtgtgtctttgtccccagaggtttctgcatgtgcaagcattttaatctacactgccagaacccccaggctttttagtgaagtttgcagaggaagacttatctgtattgacttatatgttgcacagaacaaatgaaagtctcagacagtccttttttacccaacaaaggcttatttttttccatcctttgcttgggctcaagcactcctgccctgcgtgcctccactttaaacatgatcagaactgtgcttcattgcaaataacaactgaccaacaatgggccctgcttcatagatttgggaatgtttggcttaagctgccaatgactgaaggcctttaattcccaccggccagtcacagtctgctttgttgttgtctgttgatgtgtctgtgctcattattccttgacatgcaacatcccccctccaccctccaaccatccacaaccgcacagaaagcaagattcaaatgggaacagctgtagtggtccaatgggaaatgatgcctcttgtgccaaaggggagggagacagaaaagggagagggcctatttgaaaaaggcaacagctttcagaaagtctcctttaagaaatctacttttgaatatacttcagtgaaatcattgttgaaataggctgacaatggaaatctgcccagattgaaaatgccagtcctaattcaaaaaacaattcctagctaatcgcttgttgcaatttttaaattatttctagactttgagctttagaattaaatggctaactgggaaatgttaccattttgtatatatgttgtgggtataaatgggcacagatctacacccagctgtaagtggaatttttttctaacacgtttttgatttatggtatctataaggattattttttaaggatcatcaggatgtaaaacagagtgtgtgtgaaagtaaccattggtttagaatgttgatctaacatggaaataaaatttgtaacaccacactataaggttaaaaagaaaactgtataataaaggaaatacaaagg

SEQ ID NO: 270996 - DNA, 289 bp, Homo Sapiens
catgcccagccatgagacaattcttattccactgtggcccagggaagccaaaaggttggaaatccctgttctaaagccaatgcaggcttcacatgtgactagttttatgagagccaatacagattacctatctcctaaaaattctaccttgcttcccttcagcactatcactttttaaaaggttttatttagaaaacacttcaggtaaaatatttacaaaggaatgaagtactaatacatgctacaatatacatgaaccttgaaaacatgctaaatgaaagaagccaga

SEQ ID NO: 270997 - DNA, 301 bp, Homo Sapiens
  misc_feature (47)..(47): n is a, c, g, or t
gaccagctcagcgaggacccataatgtgcatatgtgcacaagcaggnttgggggaggggggtgtgaggggttgtgccccaggtgttgccccctatctcctggggagggtgaggcagggcagggacagtctcccagggtcagtccctggatgggtggttacctccccttcctccaccctaagccctggggccctgaaatggggtgggagggcaggggtgggagccctcctagtgggtttggggggttgggttcctgaatgcaccataatcgctgtatgaaatattaaaaagtctaaagtgac

SEQ ID NO: 270998 - DNA, 262 bp, Homo Sapiens
  misc_feature (12)..(12): n is a, c, g, or t
aagcatagtaantagttcacaactgagaaatattatgtctgtagtagataaatattagttgtgcattttaatttaattctcctttttccattttggtctcatggaagtaccttattgcaaaaatcccactgagtaatagctcataaattataatctttcaaatagccatgctaccagcgtacaacagtgatacatgtaaccccaaatgtgatgtgagaggacgattactttgtaaataaaacttgttattgacattttaaaa

SEQ ID NO: 270999 - DNA, 324 bp, Homo Sapiens
  misc_feature (39)..(39): n is a, c, g, or t
caccttctgagtagctgcttgtcccacacaatagggtantgaagtgcgctcctccatcgggtttggggagggagcactctgggactgtgagacaaggaagcagggccagcagtgagactatgagccaagcaaagagaagtctcagtggagcatgaggagggagcagtccagatgccaacaaggaaatgcgtttatggctacaagagtgcctctgctttctcctcctctcctcccaccaaggattcttccaccttaatcttgttttcatatgcctcttcttacttcacccatgtttgttgttatgcaaataaaggttttctctcc

SEQ ID NO: 271000 - DNA, 431 bp, Homo Sapiens
  misc_feature (216)..(216): n is a, c, g, or t
  misc_feature (225)..(225): n is a, c, g, or t
gaaactggatggatggaaccttattaggttgcagagttttggaagaaaatcaaaatgttcgtataacctaaaaaataagatggcattttagggaagagagaagaaatgcttccttaccttggacatggctttaaggattccagaatttgacagttcttctgtcctactccttcagctcctctgtgggagagggaccagtatcctgagaaagtcganctggaaganggaaaggaaccccttaaaatgccaggccctgccctgcagcttctcagtatcatcagccttagaaacctttccttctctttctccttctttccccaacctcaggaggtaaattagaggtatcactgagcaagtcatttatatctaaatttacaattctttttcccacatgctttggatcttaagaatacaacatacgggccaggcgc

SEQ ID NO: 271001 - DNA, 865 bp, Homo Sapiens
  misc_feature (73)..(73): n is a, c, g, or t
  misc_feature (76)..(109): n is a, c, g, or t
aaaaatatttttgtagagaccaggtctcactatgttgcctggtttggtatcaaactcctggccttaagggatnctnnnnnnnnnnnnnnnnnnnnnnnnnnnnnnnnnngtgtgagccatcatgcccagccagagcaccagaaatagctcccaactgtagaaggagcctcccttgtaagcgctgttggctcccaaccatcctgtggagtctccaacagcaagtccctcccccaaccatgaggcccagagaggcttaacaactttgctgtcacccaacagaaatgctttaagtactgaccactgctggagggaaaagctaccgctaacacttgggatgttttctgacagcctctgaaacttctacgaacttgctgaggcataggatcctctcctaaaatttctcccagatcttaacgtcagggctgtctggccctttcatgagtatgtgggttatagtctctggcaggcacttgtgaagagtgtgactgattgacacttttttgccttggttgctgggaagctcagatctcccctctgcatgtcccttgcttaggacctcccatggtgtacttggagttgggacctcacctggctctccctaatctttccggctgccattttttcccctttctaactttctttcccatacaccttatttgaaatattacctcacggtaacgaaataaagtgtctgtcacctcctgctgtgttgtcatcttgcatgagctatctaagttctctgttcttcagtttctgcatctgtaaaacgatgacaatgacagagccaacctcgctttgaggatcacatgagttaataaaggcctggcacacagttagcactcaataaatgttagttatgattttt

SEQ ID NO: 271002 - DNA, 465 bp, Homo Sapiens
tatttatggctacaagtcaaactgatttcatatgtatgcatacatatagtctaatagagatgattgtaattcattataatcttgagttttttaaattagtaagatggctactattgctgttttggggtttttaaggttagatatatatcatgtttaactttttcccctatctttttatctttacttctttgttctctacatgctgtgtttaaacctttctgctctcttcacctgaacacatcgtgtttgacatcatctttgtgttgatgtttattacatagtaccacaaagcctgctccacacctggatggggtgcatgtagtctttggactggttatttctggttttgaagtaatcgaacaaattgaaaatctgaagaccgatgctgcaagcagaccatatgcagatgtgcgagttattgactgtggagtacttgccacaaaatcaataaaagatgtttttgag

SEQ ID NO: 271003 - DNA, 396 bp, Homo Sapiens
  misc_feature (349)..(349): n is a, c, g, or t
ataaagcaattatatcattagcttaaaattttatcatcaattaaaaataaatttaaaaacaaatacttaaaataatgtaacaatttatcaccaggcaatttggactcacgacaatgtatgctgttagtcagacatgcactgttgcaatgcagcttgactgtcttgcagacagcctcaatgctatttttaaattggcagaggcagcaggccatatggctaggtaagatcctataagatgaaaacacaaaacaataaattagtggtaaagcagttacttgagtaggcaaaggaggcaggccaaccgctaccacaagggctgggcagaaaaggtgttacctgaaggcctgtngactgggacaagtttgggtaaggaaccagaaagggcaattgggggaa

SEQ ID NO: 271004 - DNA, 460 bp, Homo Sapiens
  misc_feature (22)..(22): n is a, c, g, or t
  misc_feature (59)..(59): n is a, c, g, or t
  misc_feature (72)..(72): n is a, c, g, or t
  misc_feature (89)..(114): n is a, c, g, or t
  misc_feature (249)..(249): n is a, c, g, or t
ctcccggacctcaaaatagtcnagcctgaagtccctcaatgtgccctgccttcccgggnccttgtaaaaccncccttccatgaaaacgnnnnnnnnnnnnnnnnnnnnnnnnnntacagatgccttccttccaggaacaaatgtatgcctgttaagtccagaccatgccagtgttgcaaatgccagccttgaaccgtcttgcaagacagccctcaatgcctatttttaaattggcagaggcagccaggnccatatggcctaggtaagatccctatagatgaaaacacaaaacaataaattagtggtaaagcggttacttgagtaggtaaaggaggcagccaacgctaccacagggctgggcaaagaggtgttactgagacccgtggactggacacttgggtaggaccagaaggccaatgggaaggaggacacaggtgcccaactgaagggtaagcatggc

SEQ ID NO: 271005 - DNA, 770 bp, Homo Sapiens
  misc_feature (42)..(42): n is a, c, g, or t
  misc_feature (63)..(63): n is a, c, g, or t
  misc_feature (67)..(135): n is a, c, g, or t
agcctaagattttccccccagggaggggtgcccttttgatgnccatttaaccatccagatccntggnnnnnnnnnnnnnnnnnnnnnnnnnnnnnnnnnnnnnnnnnnnnnnnnnnnnnnnnnnnnnnnnnnnnngttttacagcttcgattctggaagagacaaagttaacaaggaggttaaagatacagggtccaaagaggagtagcaatattatagctgctagaggtcctaagaaggggagaatccagggcatccattggctgaggaggccccagggtccagtgtttcgaagctcctctgctctacgttgtattcgatctcgaatttctttaactttcctcagtgacgattccggattgattaacataataacagcattcttcccctaaaaataaacaggttccccctctttcagcggttagcaagtctaaagctcttcgattttgaaggactactgctgctagggagttaagttgatcttgcaaggtgaccagggagtcggcgacccgttccatgtccccatttagttcttgagatagtttgtagtagaactgagtagaggttgtgataccgccaatgccagtacctagtgcacctaggcactcctgctcctattaacaaaaggaagaaggggtactcttttgttgcggggcttagatatgacataactgtataaatcttgttcagtgtagatggtcatagggggcactaagaatgagaggaagcacatagattctgaagagccattcaaacaacgataggctgag

SEQ ID NO: 271006 - DNA, 546 bp, Homo Sapiens
gtgttcacagaactgcagaaaagtaatggggagattgaagagatgaatgtgtgcgacaaccttggggaccacctcgtgggcaacgtctatgtcaagttccggagggaggaggatggagagcgggccgtggctgaactcagtaaccgctggttcaacgggcaggctgtgcacgggaatgtacccgaggtggcttctgcaacttcatgcatctgcggcccatttcccagaacctccagaggcagctctatgggcggggacccaggcgcaggtcacccccgaggttccatactggccaccatccccgagagaggaaccatcggtgttcccctgatcactggcatggccgcttctgaggccctggcccccttacccttcacccccaacagggacagatgttcctggcaggacctctcctcaaagcccccttcactctcctgccccatccttcccaggctcccgggctccataatgtaatctgttcagcatggagaccttcttctaccgcccctgtcttaataaagctgcgtgtttcacttcggcaaaaaa

SEQ ID NO: 271007 - DNA, 440 bp, Homo Sapiens
  misc_feature (42)..(42): n is a, c, g, or t
  misc_feature (251)..(251): n is a, c, g, or t
  misc_feature (255)..(255): n is a, c, g, or t
cccggtttccgccgcagccttcaccaaaagacctgggcctcntcggtcacccttccggccctccagcagctgcaggattgggtccccgttgggtgcggggtacgtgaggggcaggcaggtctgaggcacctcaccaggctcctcagagccactcagcccgggcacctcacgcagcggcaggaaggcctcgccttccaggtcgtcggcccccagcgtgtcgtagtccagcacggtgagcaggaggcatgccnccanttgcggcacggctcagcaggcaccaggaattcaaaggtctcatcaaacaatgggtgaaggtccttcttgtgcttctgggtctcccgggcggccagctcagggaactcatgcctgggctccaaggtcagctggacaaaggggtcgctggagccattggagtccaggggcagcaggctggaggcgct

SEQ ID NO: 271008 - DNA, 372 bp, Homo Sapiens
  misc_feature (20)..(20): n is a, c, g, or t
  misc_feature (26)..(26): n is a, c, g, or t
  misc_feature (34)..(34): n is a, c, g, or t
  misc_feature (45)..(45): n is a, c, g, or t
gagccagatgttgggatttntagagnccgacggnaggccaccagnctgggcctggagggccaccaagatgcaggagttgggcctggagaggctgcaaagaagcatgagctgggcctggtgaggtcgacttgagaaagttcagggcctggagagaaggctgggaggcaggagctgggtctaaagaggccattgtaacgatggagctgtgcctgtggaggctgttgtgaggcagtaggctcatctgcggagactgccgtgaggtagggtatggcctaaataggccattgtgagtcatgagcttggtctgtagaggctgactggagaaagttctgggcctggagaggctgccgggaggtaggagctgggccaaaa

SEQ ID NO: 271009 - DNA, 426 bp, Homo Sapiens
  misc_feature (43)..(51): n is a, c, g, or t
ccactgcacttcagcctggatgatagagcaagactgtgtctcnnnnnnnnntaattctagatatttgaaaaataagatagggtgatgaatgtttatcaccggatattagggtgtactcaatggtaagtataaagggaaaccagcaatgggtaggctagttcaaaagatgtattatatttccagatattctgataacagtgataaagacttgatggtgaataggtatgtcgatagcagtactgcagatgctcagtttgagtaagtcacccacactaccaaaagatgaatattctttttgagaacagaagaattctagtaatcatgagctaaggatgctggaaattcattcctgaaaatgtatatgtaccaagtagttgttttctgttctcccattcttcattaaacctgtccttatcaagaacaaaa

SEQ ID NO: 271010 - DNA, 401 bp, Homo Sapiens
gcccatcctataaccattcataacaactcagattatagagacttgggtgaagtgttcatctttgaaggctggtcaaccccactgaaagtagcagggactgaaaagtaggggaagggctggggtttccaaaaggttaatctaaagtgttgcttacccaagggttgctgtgattcgaaaatcataactggtcaagtgtggtggctcatgcctctaatcccagtgctttgggaggttgggcagtaggattgtttgatgacaggagctcaaggccagactgggcatcattgcgagaccccaactcaaaaaaaagtagttaaaaagacattagccatgtatagtggcacctttagttctaggtactcaggatgctggggtgggaagattgcttcatcccaggagtt

SEQ ID NO: 271011 - DNA, 490 bp, Homo Sapiens
  misc_feature (287)..(287): n is a, c, g, or t
  misc_feature (293)..(294): n is a, c, g, or t
  misc_feature (406)..(406): n is a, c, g, or t
  misc_feature (429)..(429): n is a, c, g, or t
  misc_feature (434)..(434): n is a, c, g, or t
  misc_feature (455)..(455): n is a, c, g, or t
ccaatagacatgaaattcaactgaatgttgatgtgccttttgaaatcatagtgtggttctaaaaacatgtgtttgcctgccatcctttacattatgacattctgatttgccttttccctccttaaatgatggcagcgaagggcacatttaagggtcccattcagcacaggagatctcatacagagtcatggagaaacctcactgagcaccagcatacaggccgacgcccaggggcaccttaggattaggagtcaagggcaaaacaacagttccagtgggccgcggcncctttnnctggcatccggggagctcccacctggcaactttaacccgcggggttcttcatttacggccagcggaccttcacattcacggttgctacttcggaggctggaacagccctttnaaaaaccttttaggaggaatttnggggnaattcagatgttttttccacnggggatttttgtttaggcagcgtttttggccgagt

SEQ ID NO: 271012 - DNA, 463 bp, Homo Sapiens
  misc_feature (56)..(56): n is a, c, g, or t
  misc_feature (64)..(64): n is a, c, g, or t
ccaaaaaacaaaaagcaccattcaaaaacttttaggacctcttctaagttccttgntcgttttntaatttaatgactatagatgccaggcactacagttctttatcatttttacgtaaggccctcacaattggaaatttcactcactcattctctgaccattgcctgaggacacatcctgtccccatgctaggtcttgtggatatcatagtgaacacagagcccctaccctgccctaacaaagtcctcacagagcccctaccctgccctaacaaagtccttggtctagtggggaaggcatgaggcttgttcagaggactgtggagcacatagcaagggaacctaaccaagacttgaagggtctaaaccgaggcttaaagtaaaagctaattatccccagttctttctttcaaccatttctcatatgacatgattttcagacccatcctggtcactatcttctg

SEQ ID NO: 271013 - DNA, 429 bp, Homo Sapiens
atccagatgcagactacagtccctgcaattgggtctctggcaggcaatagttgaaggactcctgttccgttggggccagcacaccgggatggatggagggagagcagaggcctttgcttctctgcctacgtccccttagatgggcagcagaggcaactcccgcatcctttgctctgcctgtcggtggtcagagcggtgagcgaggtgggttggagactcagcaggctccgtgcagcccttgggaacagtgagaggttgaaggtcataacgagagtgggaactcaacccagatcccgcccctcctgtcctctgtgttcccgcggaaaccaaccaaaccgtgcgctgtgacccattgctgttctctgtatcgtgatctatcctcaacaacaacagaaaaaaggaataaaatatcctttgtttcctaaaaaa

SEQ ID NO: 271014 - DNA, 480 bp, Homo Sapiens
  misc_feature (418)..(418): n is a, c, g, or t
  misc_feature (425)..(425): n is a, c, g, or t
  misc_feature (438)..(438): n is a, c, g, or t
  misc_feature (451)..(451): n is a, c, g, or t
  misc_feature (454)..(454): n is a, c, g, or t
gagactgcatagggctcggcgtggaaagtggccatatgtttggtaaccttgcaggctgccgtgaggggcattgtcatgctaatgggggatgttacaaagggacttctgtcatagtctgtaggaggcaaggcagcatggttcagaggtaggcctttggaggcagagtggatgttttgaattgcagaggaaatggtcaggtcagagggcatagcttggatcacctgagacatggcttctagcttaagtccattggctcggatgagggcttttttctgttgcttcagggccctgtctctcttgtacatttggcccaaacttattccttcctccacgcattcggtcggcccttacagcttctagcttcattccaacacttagacatttttgaaaacgacagtaaggacaacgctttctctgngttttgncaattcggcagtnctggttttatatncangtgtaccttttattattttggactgt

SEQ ID NO: 271015 - DNA, 439 bp, Homo Sapiens
  misc_feature (263)..(263): n is a, c, g, or t
atatcttttgtttcaggataattttaattgattttgaagcatttttatgatggatgctttaaaatccttgtcagaaaattccaacatctgattcatcttgtattggtgactgttgattgtcttttctgattcaatttgtggtttcctttgttgatggtatgacaagtgatttgctattatatcatgaacatcttggtctattatgttagaagtctctaacataggcttctattaaaatcttttaacagttaagccaccctgtntagttttagcacgagtatcttggtctacttttctaggctatcgttccaatagcagactaatttacagagcctttgcagtgttatttagcctgctttgtttatctagtgcctttgagctcccattggtctctgctgggcactggcctggagagggtaaagaagttccctgagccagg

SEQ ID NO: 271016 - DNA, 209 bp, Homo Sapiens
aatgtgaacatagatgcagcaccgactttttaaacttgaaaaaactggtataatgttaacttttaaaaataacatttggacacactagtaattgatttttgtttacagattgttttgtttacaaattgttagtctttgtttctatgagatacttttagtgtgactttttaaatgtcttagaaattaaaagttgtacaaaaagtgaaaaa

SEQ ID NO: 271017 - DNA, 629 bp, Homo Sapiens
cagtagagaagtgcttagggttgaaaattgatttcatttgctactgaatttggtaaatcctgggtaacttttatcaagatgaagacattttaccctacctactctagaaatatacaacaatgttatattttacactccttggaaacatttgaggaaaaaaatgcaatttgcacttcactttgttggaatatcccatagcactcaataaactcagctgctagagtgccgatgtcaggagggctgtgtcgggtaatgcgtgtggctgaatgggcataaccactgtggcttcttgtgctgcagaagctcgttgacaagactgaggaggatttcaagagcaaccaagtaaagtcatgcattttctaattttgtgtatatggaatatatttttaaatagagatttttctactttagataatgtgttaatattgctattacctaggttaagcactattgtctgtgctagtaagaaaaagaaaggaaaaccatcattgctttatagtagcttatatcaatttagatttcatcattactattttgcatactggaatttataaatgtgtaaattatcattttcttagttttgtaataccttttttatttgtgaataaaattatcacctggtattcttg

SEQ ID NO: 271018 - DNA, 453 bp, Homo Sapiens
  misc_feature (30)..(30): n is a, c, g, or t
  misc_feature (209)..(209): n is a, c, g, or t
  misc_feature (211)..(213): n is a, c, g, or t
  misc_feature (224)..(224): n is a, c, g, or t
  misc_feature (270)..(270): n is a, c, g, or t
gcaagtcccaaccttctaatcctgccttgnctttctggtgaccagcccccatcctgaaactacctggggggctatcagcatcagtcaatagtttgtcattagtatacaaaaagacattacttttcgagattcctttgccaggaaacaggatgaagagcaaatacatatttcactgtatcacaggtgctaattttggtttagcaaatctnannnccatagtcttnccctttttgagggaagaagctgggtcaacccttggtggaagtcaangatggaatccaaatacagtcccaagccccctaagaagtattggatccagcagaggaggtgagatgaccacagccataatttaaggcagaaggtattagaaaattacaaaatacaatggaagagagaggtaacttctagtttgggaggttggaaagtactttctaaaaacatgcctggcattta

SEQ ID NO: 271019 - DNA, 347 bp, Homo Sapiens
  misc_feature (21)..(21): n is a, c, g, or t
  misc_feature (274)..(274): n is a, c, g, or t
  misc_feature (294)..(294): n is a, c, g, or t
gggggaaggaataacaatggnattggaagaatgatagactgccatttcccactactttttagaaatgtgtctagcccttttgttttcattctcatactgttctctttctagaactgccaccttggaaactctcctgggaatatctaacagaaatgcatctcttaagaataagtgtgtaacatagttctcataataaccttaattaggtactgtatataattagatcatggaatttgagcaatagaatatttactaattgtgtttgacctttttnttatttaaacaactttcttntgcaattaacttagaagaaaggggcattaaaatgaaaaaaggaagctgagtgt

SEQ ID NO: 271020 - DNA, 622 bp, Homo Sapiens
  misc_feature (576)..(576): n is a, c, g, or t
  misc_feature (581)..(581): n is a, c, g, or t
  misc_feature (588)..(588): n is a, c, g, or t
  misc_feature (596)..(596): n is a, c, g, or t
  misc_feature (605)..(605): n is a, c, g, or t
gcagacggtgttacacgggtaaactatgattcaaatgcaggctttgtgacttcagggctcacattcttaattggctctccagaatattacctgccgtctgtacaaccttgtggtctacacaatgactacagagctacattggaagatgtcattgcattctgcagaagctgaggttcagaaatcgtccagtgactagctcaagatcagattgctgctaggaaacagagccagggctcatcccatctgacaccaagtccagtgctcctgtaccacatgcaccctcaagtgggcacacaagcaggaaagaacctcacgaggccatttaatctttggctgtttcaaggaaggactggcccctgaactaacacatcagaaacagatcctcaaagtggggagcttgaatgctacctggtgttcctatgatccattcctggctctggtttactctcccacttgcctgaatggctagtttcacaacctcctcccctaactgctggcagagggagggggccttgcttcccatttcactaaggaaaattttaggcctgggggtgggtgggttcatgcctggtaatnccagnaattttnggaggccnagattgggnaattacttgagctccgg

SEQ ID NO: 271021 - DNA, 414 bp, Homo Sapiens
gctgtggagcaaaggctcacctttgtggagaggataaaacctgcccaacctacctcaccatggtttttcacattgcaaagggtaataacatgggcagtgcggacttaggctaccccctccagtttgctttccgtaaatgcaaattgtccttactgcaagtcaggaatgattgctgactcacagtagggctgctatgcctgtgtgtaaacttggggatggctgagggaacatagactcactcttccacattcccaagttggtctagtgtgctgcccagtagcaaaccatggcagactcaccacctattctgagttccagggctgctgtagggcagggtgggcttcctcccagacttgccttaccctgggctgatctttgcccctggtatgcattaatggactccactgaatcctg

SEQ ID NO: 271022 - DNA, 407 bp, Homo Sapiens
  misc_feature (371)..(371): n is a, c, g, or t
atgagcaccacgcccagctagttaggttttcttaatggaaagaaatgaaattctttcaaccctgttagaatatatagcaggattagaggtaactgataagacattgtgccaagtaaaatacatatacttcctatcattgtttgccttacagctgaaaaacacctaaaaaaacttacctagcttcatgaaggagatatacattcaaagtataaccattctttcattattagctgacacactattctttgtctaaagatttaccgtgtaaatatattcttagtcaaacacgattcagttattaaatttgtttgtagcatggtagcacttctgtggcactgtaataactttatgctgtaaactagaccctttantactcggtcagcagttcctttctaagcatcattgcc

SEQ ID NO: 271023 - DNA, 449 bp, Homo Sapiens
ttaaatagagatgaggtttcactatgttgcccaggctgatctcgaactcctaggctcaagcaatcctcccaatatgctgggattacaggcatgagccaccacctggcccaagcaagaaattgacactatatagttatttaaggtagtcaggcagtagaaacattgccagaaggatagaaaggaatttggattatatataaggaaaataacaaatcggtgtttttaagactatcactgtcatatattaagatccttgtattaagtccatccattaatattacgttctattcgtggtgctaggtagcttgacaggtatgatatgcataagtcatagctctattcttaagtgtcataaagtgtaagctaatttataagctctaagtaatcagctttatctaattttgagggcattaaaattactgcctagaactttgagaagagaaaaattc

SEQ ID NO: 271024 - DNA, 370 bp, Homo Sapiens
  misc_feature (86)..(86): n is a, c, g, or t
  misc_feature (97)..(97): n is a, c, g, or t
aagggccggggattacccaggccgtgagccccactgcacccggccccccagccatagaaattccccaaagggggatataaattaanccatatccaancccaaattaccagtttaagttaacattttttaaccctgtccctcagttattacactgtatttttagtcccaaaaaaagatgaaaggatttatcaggatgttttgaggggatagatttttaaataggtcattttgaagatacttttgagtagacatagtcattacatagtcattaaaaaaccagagctttacatatttttataaaataatttttaaattctaaaagtaataaatgaccttagggaagatttggaaaatacaaacaagtatgaag

SEQ ID NO: 271025 - DNA, 282 bp, Homo Sapiens
  misc_feature (246)..(246): n is a, c, g, or t
tcccccattgacctgcatcagatgttctgcagagccaaagaaatagaacaggaaaagggaagtacaggaaaggcatctcattcaagttctcttcagagcaccacatttgttaaccaggcaaatattttagctgaattcaggcattctatcgcctgagatggacaagttgaaagttagctatcatactaataaagggttctttacttttatttgggccaataaataaaaaccccagtgttgacatcnagaaagggtccaagttcgactcctaactctgccatg

SEQ ID NO: 271026 - DNA, 456 bp, Homo Sapiens
  misc_feature (34)..(34): n is a, c, g, or t
cctttgacccaccttaaaaactttccacagtggntcccgctcgacacccattgttttattatattatatcagccaattggcaaaaaaagtctgtgcccagtaaatttcagccttataattagcaaaaacatcttcccagagaataaagtcttctgtggctttagtggctatcactgaaactctttcctcttttcaacctgggaacaaattttagttttcattttaggtttctgtactttctgtagtttctgtgtaaactgccatatgtttacatggaaactacaggaaaaaattggctacatttctcacttctcctatcatgtggtcaaagttattgttgtataccagcgatgggatgtatacttttgtccttcattcatggattcagagaaagctctgggaatgacttatggtccaaaaaagtgacccaatggcaacaaataaaaattgaaatgc

SEQ ID NO: 271027 - DNA, 405 bp, Homo Sapiens
  misc_feature (42)..(42): n is a, c, g, or t
  misc_feature (48)..(48): n is a, c, g, or t
  misc_feature (53)..(53): n is a, c, g, or t
  misc_feature (61)..(61): n is a, c, g, or t
  misc_feature (75)..(75): n is a, c, g, or t
aaagccccgaggggaaaagccctcccaagaggccccccaagnaggttnagggnaaattgtnggggcccccggggnctttggaaaaatcattcaaacttgcccatgtgcctttccccagggtgacactgtgctttgaaattattgtaacatcctcagtaaatatataggcctatgtcttttaccctctatatgtaataaccctgataaatgaatacagtgatataagactgtgaaggcggtaagtcagctggtcacatacatattgaaagaaaaacccttgggtacagtggctcatacctgtagtcccagctatttgggaggctaagatggaaggatcatttgaggaatttgagtccagcctgggcaatgtggtgagaccctgtctgtaaaagaactttaaaattt

SEQ ID NO: 271028 - DNA, 180 bp, Homo Sapiens
  misc_feature (165)..(165): n is a, c, g, or t
aactatgtattacaaattgataaaaattctgaatgagatgacttctttgtaggacatacttgtttattctaagctctgtatgagctccaaataaaatgcaaaaataaatcattgctttatagttatcacttatcaagtcaaaaagtctttaaaatgtttgattantgtcacaaaaagtaa

SEQ ID NO: 271029 - DNA, 551 bp, Homo Sapiens
tggagaggacagagttgtctctgagcagcctcaagtgggcacacttgaagaaaggaatgacgtcgtggaagcactgacaggcagtgcagcctcgaggctccgcgggggcacttcctccagacgcctctcttccacaccccttccaaaagcaaaaagaagcctcgaaagtgaaatgtatctggaaggtctgggcagatcacacattgcttcccccagtccttgtcctgacagaatgcccctaccatcacccactgagtctaggcacagcctctccatccctcctgtctccagccctccggagcagaaagtgggtctttatcgaagacaaactgaacttcaagacaaaagtgaattttcagatgtggacaagctagcttttaaggataatgaggagtttgaatcatcttttgaatctgcagggaacatgccaaggcagttggaaatgggcgggctttctcctgccggggatatgtctcatgtggacgctgctgcagctgctgtgcccctctcatatcagcacccaagtgtagatcagaaacaaattgaagaac

SEQ ID NO: 271030 - DNA, 405 bp, Homo Sapiens
tgcaagctgcagactggtgaccgccctcagatggtgtcctccctcattgttgtcttagtaaagatgtgttcctgttagcaagctcactcagtactctatagcttatgttgtagttccatcatagtgcagctagctcatcttgccaggggtgttcagaacttaatctctttgaaagttgtccttggtggaaataaaaacattatctcctttttactcttgttggaaactcaagtttgctgcggggggaagggtggcagggtgtgaggtatttcaggtgcagtattaatattatgtcttatgaaatagcatcagccaacacgaacacactcaggaattatatctctcaaaagacagaaggcaaaagggagggactaaaatcctaccttgcatgttaagtaaaagcaa

SEQ ID NO: 271031 - DNA, 507 bp, Homo Sapiens
  misc_feature (17)..(17): n is a, c, g, or t
  misc_feature (57)..(57): n is a, c, g, or t
  misc_feature (481)..(481): n is a, c, g, or t
cctttatcccataaggngcccacatggagtcagtctgagcagagccctttccatctnggtttcctccctgggctccggctcctgctgtcagacattttgttcctctctgcccagctctccagcactctgcccccgacaatgtatctctcactgagaaaaggtggtcccatggtttgtctttactattttctataacattttcctttccaactcattttcccatattttcacttctgcttagagactgatctgtgctgatatcaaacaagcacattagtttttcttgtcttatacaagagtcactaatctataggattaatatgtaagaagaaagatagggatgactgaactgattaaaacttcaagacatctttgcggaaaataaagtgagctacatgttcttcctcttatcttcatttatcactggggtgtctgtttctgcctccatgctgggtgcttgatggagggggctcacttgggnctctgggcaggagggggccaaatccc

SEQ ID NO: 271032 - DNA, 751 bp, Homo Sapiens
gcaaaggacagatccatgtgcttggtccgccttggtgtccagtttgcggttttagctgcggggcgtctctgttgaacacatattgtggctttagtaggatctggccagtgagttgccataactgacgtttcccctaccctccctttagagaagagagaacagagctgaggcctgggaacctaacccctcagtgttactgatttctttcatggaagcccttgtgggaggtgtcatcgtaaagctaacatcctctctctgtttggaatttcagcaaagctctgcaggaatattctcagagcttcatcgtgtcactcgtcctggggaaggatgtgattcccagggctcagtgtgaccaacttgggaagatctgaagagaagaatcttgcgagttggtcgcgcactgcaataaacccaaggtaagcgggtgcccttgttgagagggtcagcaggacacggggcctgtcccctgagatcctgtggagagccgggaggaattgcaccctcaatgcagggcactctatgctgttgctggaagttctccttccaccatctgatcagattctgggctaggactctgtgatgtctaagaaagcaaatggctgcagcaagtgcgggaaatgtcacagggaggaaacaggatctgggctgggagcagtggtgtatgcctggaatcccagcacctcaggagccaaggcaggaggatcccttgaggccaacctgggcaacacaacaagaccctgtctctattcta

SEQ ID NO: 271033 - DNA, 845 bp, Homo Sapiens
  misc_feature (587)..(587): n is a, c, g, or t
tggaagatctgaagagaagaatcttgcgagtggtcgcgcactgcaataaacccaagtacaagatcttgctgcacggtttgtggtacgaactgtttggaggaaaccccaacaacttgcccacggagctggacgggggcgaccaggaagtcctgacacagcctcttctgggggagcagagcctactgacgcgctggtccccggcctacagcttctccagcgactccccactggactcttctcccaagtacccccctctctaccctcccggcaggatcatccacctgcaggaggagggcgcctcggggcggtattggctgctgctctgctgctcactatagcgccaagtggtcacacgaagcggaattcagcaaaatactcataggtccgaagatgctcaccgaccacatgccagacatcctgatgcgggccttggacagcgtggtctccgacagagcggcctgcgtctcctgtccagcacaaggggtctccagtgtggacgtggcctgaccagggcactggaaactgtccaggaacgatggactacgcttgtgtcttaactgacttacatccgagagtcgatgacgcanacaggatgtcatcacaggatcgatggacagaatcatgtctaatcgtagttatgaacatgtgcatatgtcagattacacactagtatgcatctaacacgcgtggaactcgaactcctgatgcatgtcttgtctaaatggatcaagcgcggaaggtcactttggcgctctccaagatataatgggttaggctaaaagggggggttgcagctgtggaacatatgccgacatttgttatttttggtaagaaatattgggact

SEQ ID NO: 271034 - DNA, 668 bp, Homo Sapiens
  misc_feature (508)..(508): n is a, c, g, or t
ggaaacacagaatgctaaaagccacctttccactttggcaagttttctttcgatcagtccatttcccaaacaaaccagctttgtccttctgaccttttttttaaggggttggggtggggaggaataaaagaaggaaatgaggaagaaaagaaggtagacaactaggattggaaaagaggaaaaaggaaccttgggaagggagtggggacaagggacaggatgttcccaattattaattggtaatccattttaacagcctttcttcccactgtaaaaaaggtgaggaagatgaagggaggaaggttaaataagaattttaaatgccagtattacaggggtaacatttggatgaaattcttctccacttacaagccacaaaggacttagaagagcagcattttcaatggcacctgcatcatataggagtcttgagccaaatcacaggcgctctgcttgtcaccagcaggcaagcctcagatttgaaggaatgttatttattcccacatangatcatgacggagcccagtgttataaagatggtctagctcagcagaaaggctccaaaatgttcaggttcttgctttacccccagatttagaacagatatccaaagcctggccctgctctattctgaggcgattcgtgccgtcagttttcctcagtttccc

SEQ ID NO: 271035 - DNA, 466 bp, Homo Sapiens
ccccggtctcctcggttgtaaagttagagcctgagaggattaatttcgcacatataaagtacttagtgcctggtaccagggtaagtattctgtaagtattagctatttggcctattttgttggagtaaagtgggttatagttaaaatcctaagatttttaaagtccctcaagttcatgtggacatctgcctaggtcctactatcctagaattcgcatgtcttatcacacaaataactgattcttccatatcttataaataaaggtttgatttagcaaagtcacatgttgtgtaatagctcgaagaagccctttttgtccacagttgccagagcttttggagaacagtccttatgttattgaaacaaacctaatctgtagctgagttgggagggagctaagtggacagagagtcctccacccaaacaaaagaatctttgattcttgggcataatgggagcaatattt

SEQ ID NO: 271036 - DNA, 426 bp, Homo Sapiens
ttgtaactttcctcatcttacataagcaaatcaaacactgtaaaataaaaactagatgaaattaaacattatcacaagacatgaaaaagatgtgtgctgtcattttaggattcataataaagataaatcagttgtttttagcagtgtgctatgagtctatgaagggcatgacagataataggctcgaaatttctgaagttattgtacagcaaaatttgttttttcctcaggcattcaatctttttctccagtaattttgaacatgacaaactttttagtggatgcattaataatctataagtaatgggttgtcaggtgtcagttaagataagattaaaagactgttttaagcattatccatttgcttccttgcatgagttttataggtcagcagaaataactttttggattgtgggttgtgtggac

SEQ ID NO: 271037 - DNA, 758 bp, Homo Sapiens
  misc_feature (228)..(228): n is a, c, g, or t
  misc_feature (311)..(311): n is a, c, g, or t
  misc_feature (316)..(338): n is a, c, g, or t
  misc_feature (520)..(556): n is a, c, g, or t
tgtttctatttcaaacatactttcttggttttctaatggagtatatagtttagtcatttcacagactctggcctcctctcctgaaatccttttggatggggaaagggaaggtggggagggtccgaggggaaggggaccccagcttccctgtgcccgctcaccccactccaccagtccccggtcgccagagccggagttctcctctctacggccactgtcacaccgtangcccaaatggatagcacagttgtaagacaagattccttcaagatttccgagttgcctaccggttgttttcgttgttgttgttngttgnnnnnnnnnnnnnnnnnnnnnnngaagacagcaataaccacagtacatattactgtagttctctatagttttacatacattcataccataactctgttctctcctcttttttgttttcaactttaaaaacaaaaataaacgatgataatctttactggtgaaaaggatggaaaaataaatcaacaaatgcaaccagtttgtgagnnnnnnnnnnnnnnnnnnnnnnnnnnnnnnnnnnnnncacctgaatgcggaagagctcggctcccgtttagcattttgtacttaaggaaataaaaaaccaacaaaggatctcacattttcttaaaaagtgaagattgctgtatactatttattcaacttataatttatgttactccttgatctttgtcttttgtcatgacaaagcatttatttaataaagttatgcattcagttaaaaa

SEQ ID NO: 271038 - DNA, 372 bp, Homo Sapiens
  misc_feature (259)..(311): n is a, c, g, or t
taggcagctaaatgactgagaacatgagttagaatgcagttgctttgagttatacaccatagtattttgaacacatattaacaagttttacagtaagccagttcttgctgagaattatttattcaaacataaattcaggtcatgcctctagggcatatacgatctccaagatgtatctcactagaagaaaggctgttggctctaaatatgagatagcatgaagtagaaaagagacatgaatgagagagattagaagggnnnnnnnnnnnnnnnnnnnnnnnnnnnnnnnnnnnnnnnnnnnnnnnnnnnnnttacaggcatgaaccaaccctcccagatgattgtttcttttatacagcccacctataacaa

SEQ ID NO: 271039 - DNA, 429 bp, Homo Sapiens
gctaggagactaacgtaaggtcctgaatgcaagcccaaccttgattatgattaaaacagaaaaagatatacttcacaccttggtttttccatctctaaaatgggtagaattatcttccttgtgccttcttaggaggtgacacaatgatacccatgggcagcattttctttctttttaatcagtaaacgtaaacaaaaacctttgtaaggatggaagctattggaaagtaccatataaaggattaggaccgtaaatccaggggaaattctaagcattctgaaagctggcttttagggcagggcagcagccaaaagaccagctggtagattgagacctttctggaaaaacctgacttcattcccttgtggttccattttcctttttttcaaatggggtctagtggcttagctgtgggtattccacagctga

SEQ ID NO: 271040 - DNA, 185 bp, Homo Sapiens
  misc_feature (12)..(12): n is a, c, g, or t
agctctaatatnggtagtaaagcccttatgtgtatttagctgctctcccgattcacagatgagaaaaatgaggcccagagaggttaagtgatttacctgaggtcacaaaactaataggtggggaattcaaactcaggcgcatctttctgcaaaacgcattcttttttcactactccctgatatct

SEQ ID NO: 271041 - DNA, 428 bp, Homo Sapiens
  misc_feature (27)..(27): n is a, c, g, or t
  misc_feature (32)..(32): n is a, c, g, or t
  misc_feature (44)..(44): n is a, c, g, or t
  misc_feature (59)..(59): n is a, c, g, or t
  misc_feature (91)..(91): n is a, c, g, or t
  misc_feature (106)..(106): n is a, c, g, or t
  misc_feature (118)..(118): n is a, c, g, or t
  misc_feature (157)..(157): n is a, c, g, or t
ttttgcaggcctcatattacccacaangcaantagtctctaatngatacataaaattgnaaagcaagaagttaaaacatactaccacacanagtccttatacacanaaaagaaaggangaaggtatatagagggcttacaaagtaaccacaaaacanataacaaaacggcagttataaattcttacctattaattgcattgaatgtacatggactaaattctccaattaaaagacatgaaatagctgaatgggttaaaaaacaaggcccaactctaagttcctacaagtaattgtacttcacctgtaaaattacacctgcactagaaatgaatggagagaaaaaggtattccatgcaaacagagggcaaaaaagagcaggagctgctatggtgatatccaataaaatagatttcacatcaatactgta

SEQ ID NO: 271042 - DNA, 250 bp, Homo Sapiens
ttaaagtgaacaattccctgacatttgcacattcacaatgttgtgcaaccatcaccaccatctagttccaaaatattttgtcaccttgaaagaaaaactcatacccactaccattcattccctactccccaccaccatccaccagcccctggcaactactaatctacttctgtctctatgaatttacctattctggatatttcctataaatggaatcataaaatacgtgccatctggggtctttcactta

SEQ ID NO: 271043 - DNA, 444 bp, Homo Sapiens
  misc_feature (380)..(380): n is a, c, g, or t
  misc_feature (416)..(416): n is a, c, g, or t
ctgttaaactgtttaatgaatgcataaaaaggcagaaaaatatataaagccaaaagctcataataaaattaaatcatgatacaaccaccacaggcaattaccatcaaatacattcccatgatttacaaatgtatcgcttatacagaggaagttgcaaaatcactgccagtacagacacatccagtctaattaactatcgtctattcatacaacagcaacaactgcagctcctgagaccacagaaggacacagtgagcagctggtgactgagccaggggtagcctccgatcaataactgatcagagtaatgagactttgagagggaatgcctattaaggaaatctccaaaagggtatttgtttggggtgcaggaaaccaantgcaccctccacatttggggtttttctctaggaggntctgtgggccaaatctcttatcccatgg

SEQ ID NO: 271044 - DNA, 216 bp, Homo Sapiens
gactagaatcagttgagcgaaaaatttataaagcttacaagtggctccgctactcttatatctcctactcaaataacaaagatggagagacctccttggtgaccggggaggcagatgaagggagagcaggaaccagccacaaagacaacccagccccttcttccagtaaggaagcctgtctaaacatagcaatggcacatgaaaccagggcctgaa

SEQ ID NO: 271045 - DNA, 459 bp, Homo Sapiens
aaatgaactacactgtaactttaatacttattccatatgaaaaaccaaactgtttctggcaatttgattgatctcttgagagtctgcagtgcattcattccatggttaaaaccgtgtgtaggcattgcgttcctcgctgctgctgtaatggctgctgggcttgctgctgttgtaagcgaatttgctgggaataagggtcttccagggattttacaaatatggtagttctgggaccagtcttccatactataccattggcatctttcacagaagattccactgtaatgttgtgtgttccaaggatagcaaagttcaacagaaattcgagtactgaagtaatcattatgaggttcaaccctttgctccatctcattggtcatgttgtcaatgggtatcttgtagtcttgtccagatttactctgcagtgtggaagaaacattcagacagacagactgaatt

SEQ ID NO: 271046 - DNA, 426 bp, Homo Sapiens
  misc_feature (170)..(170): n is a, c, g, or t
  misc_feature (173)..(173): n is a, c, g, or t
  misc_feature (271)..(271): n is a, c, g, or t
  misc_feature (357)..(357): n is a, c, g, or t
  misc_feature (377)..(377): n is a, c, g, or t
gtataatgccctacaaaaaagcaggaagacctaatgattacaagttcactagttctaaccttattctttcctatacatatagtggtagtgaccaaggtagaatcttatatttttcttcatcttcaaatgttatcatttaaacccttgacattattgacttgagaataaangtngtgaaaatcatggactgagcactctatactgtctgagtagtttatattttaagagtttcttaaagagtaacttgggaaatcagtccattaactactanttgcagtgactgtggcacaagggtatattggttttatttgctgggttgtgccaagagcaatacctagcaaaaaaatttttttcacntgggagatttaaaaaattcntacatttttttcccccgggagaggggagataccaaattaggggttaaaa

SEQ ID NO: 271047 - DNA, 450 bp, Homo Sapiens
catccaccttttcagactgagctgtctctactatttaggggttgaaaatcccattacacagtccactttacgttaacattgggtcatcttatgtttgtatgagacggatgtgggatttgaggggaacattgtcattcccttaaaataactatcatgaaaaaaatagcaacagtatgtaaagggaccaagagtggcagcctttagggaaaatggagcagagaagagctgtgaacaaagctcatttatttgaaataagcgtgctttatttcacatagaggggcatcagacgttacatttcattcggacgaaattactgaacagccgaagtgattgtttccaatgtaggttattataattattggatacaaagatttaactagtgtttctgggttggatttttgaaatagtatgcaagtcataagcacagtttcaataaaacacgtattctgg

SEQ ID NO: 271048 - DNA, 429 bp, Homo Sapiens
  misc_feature (61)..(174): n is a, c, g, or t
gttcaagcaattctcctgcctcagcctctggagtagctgggaatacccatgcccagctaannnnnnnnnnnnnnnnnnnnnnnnnnnnnnnnnnnnnnnnnnnnnnnnnnnnnnnnnnnnnnnnnnnnnnnnnnnnnnnnnnnnnnnnnnnnnnnnnnnnnnnnnnnnnnnnnngaatcactatttttaactcaggggaaaaatgaaaaacaataaaaacatttccctggcaatgtatactatgtatcacagtaagtttatgtctacattaaactcattgcagtgcaataaagtctaccagaaaaaacactagatagcgtatttaatggaattgtgtcatttgcaaaatctttacagagtgctttatttgatccctaaattatgttaaagttatctccaaatacctagtgaacatgtgcctttctctcc

SEQ ID NO: 271049 - DNA, 433 bp, Homo Sapiens
  misc_feature (379)..(379): n is a, c, g, or t
  misc_feature (382)..(382): n is a, c, g, or t
  misc_feature (395)..(395): n is a, c, g, or t
gaccccacctctggccccacctccctcaaagtctgcgccccgtccccagccagacccactcgctgccgggaccctttcactgccccggtggagtgaatagaggatgaggggccctgaccctgtgtctccaactgctgcaccccatcccgaccctgtctccgccacctcgcagccccattaaagcgctctcatctgggctccggttcactcactcgctgtggccgcgacttgctctctccttctcgggatttaataccgcgatctcagccaaactccggccgagaagttgagaaatgtcttcaccccctctcgacattcgttcgtgcttcttcgccttggctggagcgataggggcgagcaggggtggggccggctggtngtntacgcaggccgtncagcggcttaataagtgacataaaatgtctacacgcat

SEQ ID NO: 271050 - DNA, 317 bp, Homo Sapiens
  misc_feature (25)..(25): n is a, c, g, or t
  misc_feature (36)..(36): n is a, c, g, or t
  misc_feature (207)..(207): n is a, c, g, or t
ctccgctcaaattggaataattggngatctcctgtncatttgtcccttggaccttaaccatttgcattttggagaaaatttttcctgctttaaaagtctgtaatttcagtttttgtgtcggggagagggaaaaactatttgtctgtagttgctttttgtgacaaagtgaatacccactgggctaagtttcatatctaaagcttgtcnctaagaattttcatttttaggggtcaaaaacctattttgaaaatagtgttgtgtgaatgctgtaagtgttgtacatgtctctggtttcagaattaaaagaattcagagtt

SEQ ID NO: 271051 - DNA, 609 bp, Homo Sapiens
  misc_feature (137)..(137): n is a, c, g, or t
  misc_feature (309)..(309): n is a, c, g, or t
  misc_feature (329)..(329): n is a, c, g, or t
  misc_feature (398)..(398): n is a, c, g, or t
tcctgtccatcaattcactggttgtaaatgcttcctgagagctgtttaggtctgtatcccagattgttgcttaatgacatctgacagatgcattgttttctgaaatcagcttaagacaccaattgtggcaactgganactcattacctgctgcattggatcaactatggaagttggagcaggggtgggcggaggtcacctaaccaatcaatggaaggcaactcacacctgctccaagcctcagctttgagaaacaaacacgtttataagaaaaaatatatagctattattacagaagttgaatatgttngtgctctcttactgctcctnggtgcattgacaagtttctgtatctcaaccctatttcatctttatgaaaaaagcattctgaagatctantcctcagcactgctgagtgtgcagtcacactttcctaccaacccccttcttaccatctctagctgccatttgtggggggaacaaaacaagggaatcctgattgtgtacagtataaattgtattatattttttgtacttatgttttatgtaaatagtttgtctcattcaattgtatgtgagcattgaaataaatcctaccatttaggggaca

SEQ ID NO: 271052 - DNA, 544 bp, Homo Sapiens
actggacaagaggtttcaaaggagtcaaactcctcccaatatcatttgttaagtaccacctaattaacttgaaagtcactccttacattctcaattctcgtttccatctaccacaacacatggtcttagcttcttgattcaatgacatgcatccaggtcccacctaggtcaggttcagcactgtgccagcaatgcagccagaggtgactacagatcacacccatctcagctgacctagttgccagtgggcaggacactggcagcaggtacttatgtgtctcattttctaagtctcccctacctttttctctaactctcggagttgggccagaattctctccttctcttcatcagcttcctgaagttggagatctgtaaggccttggatttcctccatactttttagattttcttgcaaatagtgaatttcattctccatttgctggattcttgcttcatgttgccttatcaaaattcatctgtgaagaaatacaatttcaagaatgatttttaggcaaaatatgttttaagcaaaataaaaaaa

SEQ ID NO: 271053 - DNA, 274 bp, Homo Sapiens
gtctgcacgtcattgacatttccagattgctggcttcttcaactacacatctgcaatatacatgacaaaactgaattgccatatacagaagaatgaaagtggacctatatctctcaccatatacaaaagtaaagtcaagatagattaaatacttaaatgtaagacttgagactataaaaatattagaggaaaaacctaaggaaatctcttctgggcattggtctaggcagataattcatgactgagacctcaaaatcacaggcaacaaaaaccg

SEQ ID NO: 271054 - DNA, 463 bp, Homo Sapiens
  misc_feature (26)..(26): n is a, c, g, or t
  misc_feature (37)..(37): n is a, c, g, or t
caacagcgcggctgggaccgattcgntgacggcccangggaagctgggcgcagggctcgcctctcccgcctggatcctgcaccttcctctcccaggtcgctgctgcagccaacccagtagcccccttagcgcccccgcggaccccgaagctccagactccgctttggcacctctgctccggctggcatggctgcacgctccggctgctagtaggagccgttaggggaggagtttggggtctccacacgatgcctagagaatgctgcagtctgcacattagacgctttttagaagttttgaaattaccttgatttttttaattgttatgaaaatggatcttttcttgactctcccacatgctctgttatgggagagaatcccctaccctactctgatgtatagaccattctcccttcaccagccgaaccaatgtcaaaattaataaagaaatggactaatggca

SEQ ID NO: 271055 - DNA, 214 bp, Homo Sapiens
atgagcaccatgcccagccctctgttcccattctaatagatgttctactatggattctacattatggcctatagagttagccttcgactgacgtaaaactcagggaataccttgaggaaatctaagtgagcagaacaagggccaaagcgagctgggaagttgcagaacatacgttcctgggtccaaattatagggacaaaagagaaaaacagtg

SEQ ID NO: 271056 - DNA, 480 bp, Homo Sapiens
cgctcctggcgcagcaccgttggcgttggccgattgctgctggtggggggcgggggtgcaggccccagtctctatgcaaatcagggatcagaagatcggaatttccaccaatcagcgggaagcctcggccctgtaactgctaatgggagacagcagcgccacgccacaggcttttcccctggtttcgggaggggtggggagccaggtggggctcccgcccagaccctttcccgaggtccgccctctccgccttttctctaaattcctcttttgagtgccctcccttccggttgagaggcgggggttggcccgtagttgtacactcagtcaccctgcactgtggaggcgggggcctcccttgtggactgatttgcgtgggatttggttgttttattaagagatttaaaaaattcagatgacttactagtatgactgttttgtcatatttgcttccaggttaacaaatgacaaaaatgaaaa

SEQ ID NO: 271057 - DNA, 459 bp, Homo Sapiens
  misc_feature (427)..(427): n is a, c, g, or t
  misc_feature (439)..(439): n is a, c, g, or t
aactaatattaaatagtaaatttaatgtgtattaatattgtcatataatattgtaattactcatgtaaatgtaaatattacattgaggatatagtaaatattaaatttactatgtcattgaggacagtatttcaaactagcttttttaaaaagaaaaacagaagatggcagtgaatagaacagtgattgttcatactacttggatctactgccttaatttatactaggatgtcaatccaccattgattttggaccatcagtgcaaatgtcaacgtagcaaaaaaggcaaataatgtctgagtactattactaaaataattttcgactttgtcaagccctgaaaggtactccaggaccctcatgggtttgtggatcaacttaaagaaccattgataaaatcaaatgagcaaactgggcttatgtttcntgaaaatattcnggatgaaaatgatggctatt

SEQ ID NO: 271058 - DNA, 416 bp, Homo Sapiens
  misc_feature (282)..(282): n is a, c, g, or t
  misc_feature (387)..(387): n is a, c, g, or t
cgctcatttctgggtttgaactgtataaagagctcacactgaggaccaggactcaagatagcacacaacaatactggtttacaatattgtccattccccttattactcagaatatttgtaaaagtaatgccctgggctctcctattttcgcttcttctgcaataaggccaattagaataattattcctgaagtgatcttttagcaattaacatgatttagaaataattttatccaaagcaattattaatgtaaaagaaactgatgaatctaaggtattaaangtgaactaagttagaaaatgttgatcttaaccagacagtaaagtgaattggggacccaaaagaattaggaccgaacactgaataaaaggaagagttaattttccntaactgttaaactacattaccaaatcggg

SEQ ID NO: 271059 - DNA, 580 bp, Homo Sapiens
gtgttaagggaagacactgtgggtggcatgctcttgtgatgtagtcgtaggtcggtaaaagaccacttatgaatcaagtatattctgacaagtggaaaaggatatgaatgctctcctgggtaaaattaacctcctttgcatttcattctcacattctcgcacaaaatgaattatcaagatggattttataatagctgattctctgaagaatccctgagactttgtatgattctttagtatagcagtggctttcgatgtgccaagtctacctcctcccatactgggacactcaagcaacacagatgtacacgggaattttgggtattctatactgagaatactgcacacatatcgttagtcatcttaatgttgtaacttaccaaactcttaaggtttgcaaatgtgattttgttggcatctagaaccagtgtattttttatttatgtctgaaaaataatcattgtggggttttaaaatgaaaaatcatgtagctaatgcctatccatagatgaaattgttatgttgggaaaatgtgtacttaatctttgctttagtaaaatgattattataaaaatgaaaa

SEQ ID NO: 271060 - DNA, 590 bp, Homo Sapiens
caggcaggacgagggggcagtctggaggggggtggacacacagctgtccccagggagcccagcgcggtgccggtcacatgccgtgggagtggagggtcttgagcagacgcctcccttggagaagagccaccatctcaccttcccacgcaacaaattatctattaccagcacccgatgaggccgtccctcccaaattccacagtgcccaccactcgcactaccccccccgtgccacagaagcagtgtcagcagcctcgccacggttttcacgtcatgcagaaatggtcattccatgttctatggccaccagattctgctgagagtgtcgggatccttgactgcccagccacaccttgtgtgtgtctggtgtagtgtgtagtttacgaaacaaacggaaaagctcaaagacagcgatccaagacatgatcagcaatttggtcccaaattaggagaggaggaagaggagtatcaattttgtcaccaaaatgttaaaaaaaatgtccttggcgctctttttagctttcccgtttactaccagtccagacatgcaaaaaaaccttgtttattgaaaaataaacaacaagggctaa

SEQ ID NO: 271061 - DNA, 509 bp, Homo Sapiens
  misc_feature (39)..(39): n is a, c, g, or t
  misc_feature (66)..(66): n is a, c, g, or t
  misc_feature (72)..(72): n is a, c, g, or t
  misc_feature (122)..(152): n is a, c, g, or t
  misc_feature (169)..(169): n is a, c, g, or t
cttaataaaagggtttggggcggcatggtactatgctgnaatcccacagtttggaggtaaggcagnagactnttaagcccaagagtcaagaccacccgggcaaccaaggaggccttatctcnnnnnnnnnnnnnnnnnnnnnnnnnnnnnnngattatctaagccaaantcctcaactgactgtgccctgtagggggaacattagtcaatgcctggatacgcttttggatgtcacaactcagaggaaggtacactactggcatctagtgggtggaggccaagaaggctgctaaacatcccacaatacacaggacagacttcgcagcaaagaatcttccagcctaaaatgtcagtggtctgaggttgagaaaaccttttctgagctagtgttactgatctgtttaaggaagtctcataactaacatctcagttgtgtgtcagcaaatgggtggtgctatgtgatgcaaaagctctacaaataccttttctcaacttcctaaatatttctt

SEQ ID NO: 271062 - DNA, 366 bp, Homo Sapiens
ataaatacaaagcttgcagaaatgtcaggaaaataaataaattaaatgctaaatagtcaatgagggatattaggcaaaggccagttttggtggcattttaacctatggagactcagtgcctctgtgtgtcccattatcacctccaagacatcctggcaacaccaccgcttgggactagccagcagggaggcccaggacacctgccacctgataaagtggctcctgctctctattgggcttcttatgaacactactgggctcttacctatctatcttgaagcctctatggacaaaaaagaggccaaaagaggaatgggcacaatggtatcaactcaaacgtgtgagcccggcatggtgctcacgctg

SEQ ID NO: 271063 - DNA, 256 bp, Homo Sapiens
aacggactgcttttagttaaattgaagaaagtcagctcttgtcaaaaggtctaaactttcccgcctcaatcctaaaagcatgtcaacaatccacatcagatgccataaatatgaactgcaggataaaatggtacaatcttagtgaatgggaattggaatcaaaagagtttgctgtccttcttagaatgttctaaaatgtcaaggcagttgcttgtgtttaactgtgaacaaataaaaatttattgttttgcactac

SEQ ID NO: 271064 - DNA, 500 bp, Homo Sapiens
  misc_feature (12)..(12): n is a, c, g, or t
  misc_feature (21)..(21): n is a, c, g, or t
gtatgccagggntgcagcccntcttctcttcctccccaggttgaacaatacggacagttttcacacatatctacctgtataaccctctgtacctctcataactggtcaacgactgtaacaggttacatcaggtgtttttctacatactttttacacagattctatgcgattaatgtaatttaattcaatgcatcattttattgtactagttcttaggcttgtccttatttttttctaagtgattgtggtttttcccgtggtttttattgtaaaaaatgaaaggctgttgatgcttattctctgtaactaagaatttttaccttttgggggaaaaaagcattgctatgaactaatgaattgaaacttcatttactcattgtaaatacactattgtgcaaaaaaagttttcactcaattgaattgctagtgttaactgaattttgtctagacaccatttctgttgatgaaataaagacatatcattatgcattgtaaactga

SEQ ID NO: 271065 - DNA, 265 bp, Homo Sapiens
ttaattaaagatatttgataagcacccatgctcgaaagaaatgaagtggggagggaggatgccaaaaaaagagttatcttttacagagaaattaaaaatcacaggaagtattcaataacccaagaaggcatgtagaaaccttccatttgaatccttttatctaagcatgctggttagaatttcggtacttctcatttcttctggtcagtatggtaaccggaaatgatacaggtatatagacaatcttcccccaaccctgcccccc

SEQ ID NO: 271066 - DNA, 453 bp, Homo Sapiens
gagactgcatagggctcggcgtggttcttgtccataagcagctgcacgtgctgctgtagctcctgcacctgctgctcccgcaggctcgctgtgtgcgccaggctctcccgctcctgctccagggcctccacccgccggcccagctccgcgatctgccgcactttgtgccgcaccagctccagccggtccttgtcctcagccgccgccaggtatgcgctggacgcccgcttctcctgctgggcggcctccagtgccttgtgcaggatcttcactaagctccttctgaagactttaactccttggtgagcatcagaacctgttgctccaaggctgccactttctcctggggcaagttcggttccgtgtgaattccttcagaaaagaatggggaaggtgttgttctggcgcttggctttctgaagcgaaactgatggtcagagaaaggctggggtg

SEQ ID NO: 271067 - DNA, 241 bp, Homo Sapiens
gtcagtggaatgcagtttttttactattccatcatgaggaacaacatagattccatgatctttttaatgacagtacagactgagatttgaaggaaacatgcacaaatctgtaaaacatagaccttcgctttatttttgtaagtatcacctgccaccatgttttgtaatttgaggtcttgatttcaccattgtcggtgaagaaaattttcaataaatatgtattacccgtctgaagcttaaa

SEQ ID NO: 271068 - DNA, 618 bp, Homo Sapiens
  misc_feature (61)..(61): n is a, c, g, or t
  misc_feature (135)..(414): n is a, c, g, or t
tgagactgcatagggctcggcgtgggggtagagttcccttatttataaagaaggctgaaanaactggccaactctgcctggagctattgcttacaggaaataactcttaagttgcatgacccagacacagcttcnnnnnnnnnnnnnnnnnnnnnnnnnnnnnnnnnnnnnnnnnnnnnnnnnnnnnnnnnnnnnnnnnnnnnnnnnnnnnnnnnnnnnnnnnnnnnnnnnnnnnnnnnnnnnnnnnnnnnnnnnnnnnnnnnnnnnnnnnnnnnnnnnnnnnnnnnnnnnnnnnnnnnnnnnnnnnnnnnnnnnnnnnnnnnnnnnnnnnnnnnnnnnnnnnnnnnnnnnnnnnnnnnnnnnnnnnnnnnnnnnnnnnnnnnnnnnnnnnnnnnnnnnnnnnnnnnnnnnnnnctagaaaaaaaccaaaccaaacaagaaaagagaccaagccacctgctagttctgtgactggatctgcaatatccacaatatcaacagtatctctaaggagcaggaactctaaactttgttctagaattggggtctagaggcaatcaaaactactgtacaagaaagagaaaacacaagacggacagtgaaagccagttctccata

SEQ ID NO: 271069 - DNA, 456 bp, Homo Sapiens
aatttaaaaactgtcacatggctttctatgtgaaatgtgattcttgaaaataacagatacgcaaatatcaaaggattatcaaacgcagacacactcgcctttctcaggtggaaaggcccatttccccgcactgcatcctacctctccccactgccaacctcatcccgtgccagtctacttgcccatcacaagctcaacctgggaggcccattcacctctgctctctgcaatgcaggcctcccacctcctaagactggatcgcccccaggctcgccaggatacatcacagccctcctgcccggagaaggcaacagagagagacttgacttagaatcagaagcttctctttaactttcaactcagactcatgtcttccaacggttaaaggggaatgatgacactgattttacaaaattgctctaagaattaaacaaaatggtctggtgaaacagctgg

SEQ ID NO: 271070 - DNA, 439 bp, Homo Sapiens
  misc_feature (18)..(18): n is a, c, g, or t
  misc_feature (46)..(46): n is a, c, g, or t
  misc_feature (67)..(67): n is a, c, g, or t
  misc_feature (75)..(75): n is a, c, g, or t
  misc_feature (86)..(86): n is a, c, g, or t
  misc_feature (96)..(96): n is a, c, g, or t
gggctgagttggaggatngaaaagttgggccaccatggggagcccnggggtcccattaaggattggnctaacccngttaaaattanggtaattttnccccccattgtggatcccggatgaaagtccagccccgaagattttaatggagtttaataaaatgaatcttcctggagaggttacttttctgcctcttaacaagttagatgtcagggatacagcctatcctgaaaccaatgtgagtcattgtgtgataaggtgtatttctcttttataatgttattttttatcacataatctaacacatgctagtgcccaggcactatacactgggattcagtggtgtatgagataaaaatatctgtcttcccatggaccttagtgctgagtgggttttggggagggagacagaagtcacagctatgattggtgtggtgatgca

SEQ ID NO: 271071 - DNA, 647 bp, Homo Sapiens
gctgctcggagctcagtgccgcagcatggctgtggtcggacgcgggaaacaacgggaaagttcttgacagagtctgtgtccgctcagtccctgcacttttccttttcaaatgcatctcgttggatatggaatagatcgtagatgttgtagactgagatttgggactatgttgggaccgtacaggtgaatgtgccacctccacaaatggcttctccgagtgagtcacgtcacctggtgcgtggaggtggagcctgcgctgcgacgtaaggcttgctgtggggacgccctcgtactttgctctccttgcgggtggttgccgagccgagagcaattggatcctccccgactgtggctagttgtctgtccggtggctgggagggggtgtggtgggaaaaagtcggaatctctgcaatctgtgtcatggactgtactattgtaaggtctatattctgtatgtggtcccagaccctgatcaggaaatgagcctcatgtgtgtcgttaacatttatatatttccattcaaaatatgtattcagtgtttatttcctcaaaacagactttgttaatgtaggaaatctctccaagtggaaacgtgctaactttttctgtaaatctgaaataaaaggtgctgttccttcctctgaaaa

SEQ ID NO: 271072 - DNA, 384 bp, Homo Sapiens
  misc_feature (203)..(203): n is a, c, g, or t
tcacagctacaaggggtggcaagtcctagaaccacagtccttgctgtccaacattcccgctgaggccttacttcttctcctctctcttctagagctgaactgcccgaaagccaggtgtacctgcagtgcgggaccccctgcaacctgacctgccgctctctctcttacccggatgaggaatgcaatgaggcctgcctggaggntggcttctgccccccagggtcctacatggatgagaggggggactgcgtgcccaaggccagtgcccctgttactatgacggtgagatcttccaagccagaagacatctttctcagacccattcacaccaatggtggtaaagttgaaggcaggaagtgttcaggggacctctaaaaacaggca

SEQ ID NO: 271073 - DNA, 439 bp, Homo Sapiens
agaaggtaaagctagaaattagaaggtaaagctagaaatgcaatggacgaaaggtttggatgccaagttaagaactgaaatttcatttcaaataattaggctagcaacagtcctaaaacaacatgctggaggacaaactagaggggtgtagatggggctggaggtgctgggcagaattaagagactgtctcagtggtacaagtgtgcagtggaggaggcaggagagaagtattacaaaagaagctcagcaggacttggtggctaaggataagggatgatgaaaagcccaaaggcagcctgtaagtatctggaagacggtaagactaaatctgcaagaagtaaggcaatctagagggtcagttggtttgggatgactctggtttttaaaaatactgatttgtagggagattagaactcgtgccgaattcttggcctcgag

SEQ ID NO: 271074 - DNA, 480 bp, Homo Sapiens
aagccctgccaactctttcctgacctgaggcagggctgaatgtaggaggttagggaattagaaacctaagggttgtcttgtttaattattattccggctatgtggagatctgagccattttccgttgtaagggcaaactgggctgatgtaaatgttttactttcaactgtgttctttaaaataaatcctacctggtttttaaattttatttttcatgaaaatgctcctttctctacatttattcatcctatatacatcaggctgtaagaccccccccagtcatcattaatacaatgtgttgggattctgtgactggaaaaggtgacaagttggtgactttgacactgcaggtattccattttcatggtttactatgaaaagtcatttttcatattatgtaatatattgttagattaaaaccattgtattaagactttaaaatgtaagcattgtaattctgaaaatacacattttaagaag

SEQ ID NO: 271075 - DNA, 471 bp, Homo Sapiens
ctctcaaaggttctttgttcctcccactttcaagtcggttggcaatccagtggaagcacgcagatggctaagacaagcccagagcaaacttctcagctgcccaggaatgaccttcataaaaatgccaatgagtgggtgtgctttaaatgttacctttctaccaagttagctttgattgcagctgactatgctgtgaggggaaagtctgataaagatgtaaaaccaactgcacttgctcagaaaatagaggaatatagtcagcaacttgaaggactgacaaatgatgttcacacattggaagcttatggtgtagacagtttaaaaacaagataccctgatttgcttccctttcctcagatcccaaatgacaggttcacttctgaggttgctatgagggtgatggaatgtactgcctgtatcataataaaacttgaaaattttatgcaacaaaaagtgtgaagatatttaacg

SEQ ID NO: 271076 - DNA, 515 bp, Homo Sapiens
  misc_feature (465)..(465): n is a, c, g, or t
atcaagaagcaacgagccataaatctgaaagacagcaacagaacaaagaaaaatgccccccttcagccggacagacttactctcaaaggttctttgttcctcccactttcaagtcggttggcaatccagtggaagcacgcagatggctaagacaagccagagcaaacttctcagctgccaggaatgaccttcataaaaatgccaatgagtgggtgtgctttaaatgttacctttctaccaagttagctttgattgcagctgactatgctgtgaggggaaagtctgataaagatgtaaaaccaactgcacttgctcagaaaatagaggaatatagtcagcaactttgaaggactgacaaatgatgttcacacatttgggaagcttatgggtgtagacagttttaaaaacaagataccctggattttgcttccctttcctcagatcccaaatgaacaggttcacttnctgaaggttgctatgaagggtgatgggaaatgtacttgcctgtatcataa

SEQ ID NO: 271077 - DNA, 427 bp, Homo Sapiens
  misc_feature (109)..(117): n is a, c, g, or t
  misc_feature (344)..(344): n is a, c, g, or t
tttaggtagaaatcatttcctccgccaccccaggaaaacatagatacattatcacaaatgtattctccaaaatcagtcgtaaacttaggtcttacaaattaaacagcannnnnnnnncacacatcctgagctgttaaatgaaaacaattatgagtcatcaattccaggctcgagaattccactttggtttacctggatcaaggttactgtcaggccagctacctgcctagattccagactccagcctttctgagggcctttccttcctgagttccattagcaaaagaggtattgccggatgtaattttcccttgaaattacacaacctcatccacttgaaactngaggactaaagctactaaatcccacctctgtgaagagcgaagatctcaatgcatgggcggatttgagagcccccttctgtcct

SEQ ID NO: 271078 - DNA, 727 bp, Homo Sapiens
  misc_feature (100)..(100): n is a, c, g, or t
  misc_feature (232)..(232): n is a, c, g, or t
  misc_feature (313)..(313): n is a, c, g, or t
agtaacatggagcggctgctgcatgccaaggcgcatggggtccgagtgattggaagctccacattggcactctgccacctggcctcaggggcgcaggatnctattaccagtttggcctgcactgctgggatctggcggctgcacagtcatcatcagagaagcaggcggcatcgtgatagacacttcgggtggacccctcgacctcatggcttgcagagtggttgcggccaanacccgggagatggcgatgctcatagctcaggccttacagacgattaactatgggcgggatgatgagaagttactgcggctngaggcaaagctgctcccaaggcctccctgggctgctgtgggctcctggggaggtggccctcgtggcccacgctcccatgccagtggtcaagctctgctcctggctaccccagagggagttgtcacgctacagtgagtggctggccttttaaatcgacgtctctctcaccaggatttggtgtttagctgtttctctctttaatctcacgtagcctttttcaggttagtacgtgttcttctgtcagggccaaaactcaaatctcctgtgaaatacgtattgataatccaatcttgatttttccccccagaatataaatctcaggtaataaggctttagaactgctgataaagcggatcgttctcaggccctccccccggagtacttcagaatgcaataaatcaaaataatggcaaa

SEQ ID NO: 271079 - DNA, 124 bp, Homo Sapiens
atgagacgttagcgtgtgccaaagtgactgtgaaaatgacctttcattcttactaatgatggaaagacctcctgtcatgcatcccacaaataaactcaataaaagttccatgaaactgggaaaa

SEQ ID NO: 271080 - DNA, 419 bp, Homo Sapiens
  misc_feature (47)..(47): n is a, c, g, or t
ggccattttaaggattctccaggggcaggggatgggagttggagggnccagactctttcttaggtaacttagttaggcattatacccaatgaatccatggccaagaccgtggagagcagttgaagacatttgaatgttaaaagataagaaattagcatgtgaagtgttaaatatttagttctctcagttttatttatacagaagaaacagaccagaaatcaggaaactttggtgtggtttcagctctgggagtggttctgggaagtccccacatatcttgcagactttagtttcaattgaaacaaatttgaactaaataataaatatgactgtaattctacagttttacaattgtaaatatagactatatgaaagactacacattttcaaattgtgtgtgtataagaatataactgagg

SEQ ID NO: 271081 - DNA, 420 bp, Homo Sapiens
  misc_feature (379)..(379): n is a, c, g, or t
ttaagagacaggttctcactctgttgcccaagctggattgcagtggacaatcatagctcactgtaaattcaaattcctgggcccaagcaatcctcccctcagcctctggagtagctacatgtgcgaccatgcccgctaatttatcttaattttttagaagttaggtcttgctatgttgcccaggccggtcctgaagtcctggcctcaagcgatcctcctgcgtcaccaacccaaagtgcttggagtagaagtctgagctaccacgcctggccctgaaagctattttatggaagaatttaaactaaagatctccaaatattattcataattacatacccatgttggtatctatggtttacttaatctaccatttttatanggatttacaatatgacaatataaaataaatcgggctggtat

SEQ ID NO: 271082 - DNA, 546 bp, Homo Sapiens
actgcctctcgttctacaaatatttattctgtacgtactattctgtgcaaagcacaatgggtatatatacatgtgtaaataatgtgcctttcagaagcctaacaccgtccaacatcaaggtagaggaaccgtccagatgcaagacataagctacagttcttatccttggcctcttgaagtattgattatcctcccagggctttatgattcatagggcctaataagaacctttcttttatgagtatagtaatctttgtatataattctggcttttcccagtacttgagtaaaatactgaattgagacaatacggaagttcatttctctgctcctttccttcctgatctcaggtacttgctaaagaagctcctccagcttcaggctctaactgaaggggaagtacaggctgcagctccttcccacagttccagtttgcccctgacttatggtgtggccagctctgtgggaactatacagggaactgggcctatttcagggcccagcactggggctgaggaaccatttgggaagaaaactaagaaggag

SEQ ID NO: 271083 - DNA, 521 bp, Homo Sapiens
agcaccactcctccctcacagcacagcaaggccaccactaggagggggtctcaggttggtcctcccaaaccttgtccaaagactggagttattagttggctgactcagccacataatgggcccaagaaatgccagcgtcctagcagttcccttggttctgggtcagctgaaagagcttggctcttttttaggaactttggtgcctgaacattaagagtagatcactgctttattcttgagctgttcaccctccatgaagctctcaagtcctgcatcctgaggatccagatggatgacaaggacacaggactgccattgagaaatgaagatgaactgtgtcacagatgcagtggattactgactgcccttgtaatagtccattttgcatctgttggtaattcattgaggcactcttggttttctatgagtttgtattttttgaattcaagaattgtaacatcactgttagatccctccttatttaatgagagaaataaaatatttgacacgagaaaatttaa

SEQ ID NO: 271084 - DNA, 390 bp, Homo Sapiens
  misc_feature (178)..(282): n is a, c, g, or t
  misc_feature (312)..(326): n is a, c, g, or t
tcgcattaagagtattgaggctttggaacacctgaagtgagaagcacactaggaaatcaacacaaaatgaatcaatgaatcacaggaatgtaaaactgcaatatgatctggttgaagttagtgtcactttaacatgattctttttttattccccctggaggcaggacatctctctatnnnnnnnnnnnnnnnnnnnnnnnnnnnnnnnnnnnnnnnnnnnnnnnnnnnnnnnnnnnnnnnnnnnnnnnnnnnnnnnnnnnnnnnnnnnnnnnnnnnnnnnnngtgcacaccaccatgcctggctatttaaannnnnnnnnnnnnnnggtagagatgagatctcactattttacccaggttggtctcgaactcctgggctcaaggatcctg

SEQ ID NO: 271085 - DNA, 483 bp, Homo Sapiens
  misc_feature (97)..(97): n is a, c, g, or t
  misc_feature (228)..(228): n is a, c, g, or t
  misc_feature (404)..(404): n is a, c, g, or t
aactcttagttgagtagattgtctacttagttttcattttagagcaccctgaagttggggttctaaagccttgttttaaagccaatagagcctttgntgacagtcttttggaagttagggtttttataaaacaaatgcattgttggtgacatgataaatgcagatcgagaatagagcacaaatctgctaaaaatttagaatttttaaaaatgataatggaaataactncccaagaacatataaactatgatctgttcaacatgcaggtcttttcagcttttctttctctttgtcccggagctaaagcttgattcaggacctggctgtgtgtcctacttggagctgctggaaaaggtccccacacattccagtcaacctatatcttccttctccaggggaccttngtccatctcagcgagtagatttaatttgtccttaatattaaatatggttcagtaagtatgtgtggtatgtacgtgtgtc

SEQ ID NO: 271086 - DNA, 481 bp, Homo Sapiens
  misc_feature (69)..(365): n is a, c, g, or t
acctctctgaatgatgaccccttccttaaatactgggtgatgtgtgaatatttgtttgttggccagacnnnnnnnnnnnnnnnnnnnnnnnnnnnnnnnnnnnnnnnnnnnnnnnnnnnnnnnnnnnnnnnnnnnnnnnnnnnnnnnnnnnnnnnnnnnnnnnnnnnnnnnnnnnnnnnnnnnnnnnnnnnnnnnnnnnnnnnnnnnnnnnnnnnnnnnnnnnnnnnnnnnnnnnnnnnnnnnnnnnnnnnnnnnnnnnnnnnnnnnnnnnnnnnnnnnnnnnnnnnnnnnnnnnnnnnnnnnnnnnnnnnnnnnnnnnnnnnnnnnnnnnnnnnnnnnnnnnnnnnnnnnnnnnnnnnnnnnnngagaggtcataagcagtggttttggccataccgtattataccatatacatcagtaagagctcatcttggaacctgttttgcagtttcaaaaattaaagacctacatcacacggtta

SEQ ID NO: 271087 - DNA, 340 bp, Homo Sapiens
  misc_feature (26)..(26): n is a, c, g, or t
  misc_feature (51)..(51): n is a, c, g, or t
  misc_feature (72)..(72): n is a, c, g, or t
  misc_feature (85)..(85): n is a, c, g, or t
ctccctgaaggtagctggggacctanagggttccctacccctggggaagcngggagagtgtgcctatttggnatggacaaagggngccaaggtagggcccggggactacacagagagggaagtggatttgttccaaatcaggatatacatgtctagatggttacagcaaagccccaactaatctttagaagcatattggaactgataactccattttaaaatgagcaaagaatttatttcttataccaacaggtatatgaaaatatgctcaatatcactaataactgggaaaatacaaatcaaaatcatagtaaaatattacctgttttcatggtgctaa

SEQ ID NO: 271088 - DNA, 569 bp, Homo Sapiens
  misc_feature (19)..(19): n is a, c, g, or t
  misc_feature (43)..(43): n is a, c, g, or t
  misc_feature (53)..(53): n is a, c, g, or t
  misc_feature (81)..(81): n is a, c, g, or t
  misc_feature (95)..(150): n is a, c, g, or t
  misc_feature (157)..(157): n is a, c, g, or t
  misc_feature (176)..(176): n is a, c, g, or t
  misc_feature (208)..(208): n is a, c, g, or t
aatttggaatttggaaggnagagacacgggttcaccccaggtngcctcaggcnggtcctgggaactcccggaccctcaggngatcccacccctcnnnnnnnnnnnnnnnnnnnnnnnnnnnnnnnnnnnnnnnnnnnnnnnnnnnnnnnnctagaancctataatccctaacccanttggtaagcccatgatgggcacaccttcctantttataatcctaggctcctagacacatagaaagtttgtccatagttgacattataatttatgtaactattgctgccagcacctaaatcttccatataagaatttgcaatgatttgattactatttgttaagtaaataaagcatttaaaaagaactattataatcctaaaaaaatcccattatggttatgaagacactattcaagcatgaagaacttcctatgtggcaagtttaagcttttccttttgtgttttcatttcagatgtcaatactttgtgtgctcttgaaataggaaatgtacagatccctattgccagacacatcattctctccatccagaaagccaactttgcaaggaaaaa

SEQ ID NO: 271089 - DNA, 445 bp, Homo Sapiens
aaggccatggtggaaactattccccattgtacccacgggcagagttccaggaccaggatatcggtgagtgtggtgaccccacagttgtacttcacacatgctccctgctctttccctcagacagagctggttagatggatttcatctgcggcatagtctttgtaattagcttgacagtaagtgcgtgacatgtgtgttttgtacctttccttttcattacattctaaaactggagtaagaatcctactgactactaacaaatataaaataaataaatttggtatttttcacgcacgtgttttaacagtgaaggattattatgtattttaattattttaagcttcagagaaataggaagaattgaaaagcaagcattagattgaactatatgggagtccaagagtttgagaccaacctggggaacatagtgagtccccatctctac

SEQ ID NO: 271090 - DNA, 749 bp, Homo Sapiens
  misc_feature (144)..(144): n is a, c, g, or t
  misc_feature (237)..(237): n is a, c, g, or t
  misc_feature (270)..(271): n is a, c, g, or t
  misc_feature (273)..(335): n is a, c, g, or t
gcccagcgcctcacgatccctcacccagagcacacggccgcggagatgacgtcacgcaagcaacggcgctgacgtcacatatcaccgtggtgatggcgtcacgtggccatgtagacgtcacgaagagatatagcgatggcgtcngtgcagatgcagcacgtcgcacacagacatggggaacttggcatgacgtcacaccgagatgcagcaacgacgtcacgggccatgtcgacgttncacatattaatgtcacacagacgcggcgatggnntnnnnnnnnnnnnnnnnnnnnnnnnnnnnnnnnnnnnnnnnnnnnnnnnnnnnnnnnnnnnnnnctatagatatggcaccaacatcacatgcacgcatgccctttcacacacactttctacccaattctcaccttagtgtcacgttcccccgaccctggcacacgggcgcaaggtacccacaggatcccatcccctcccgcacagccctgggccccagcacctcccctcctccagcttcctggcctcccagccacttcctcacccccagtgcctggacccggaggtgagaacaggaagccattcacctccgctccttgagcgtgagtgtttccaggacccctcggggccctgagccgggggtgagggtcacctgttgtcgggaggggagccactccttctcccccaactcccagccctgcctgtggcccgttgaaatgttggtggcacttaataaatattagtaaatccttcaaagac

SEQ ID NO: 271091 - DNA, 348 bp, Homo Sapiens
aggccactcaacttgtaattttagtttttaaacccaagtccctctaactttgcctttgataccaaacaattcaaaagttggatctgagtttggagaaagatatttccaacctaagtgggtattattttgaaaccagatttttaatttaatagcctatatttgtagtctgttggataggtgtttccaaagtgtgtcttctcaagtgaaaacgcaactctaggtttcaagtactccttttctccgatcctgtggtacttgaatatccaaaaaccctgcactttgaacaatcagctgttgctatctggaactaaacagaactatgagtaaaattgcctggatattattcta

SEQ ID NO: 271092 - DNA, 571 bp, Homo Sapiens
acatgcacctggagaacagcttaagtgcagagacgagaatcaagctggaccttgttctccgcactggggcgatgcaaagcggcagtcagaagattggcccaaggacaaatccttcagaaagatcaggaaatcaaggacctaaaacagaagatagccgaagtcatggccgtcatgcccagcataacatacagtgccgccaccagccccctgagccctgtttccccccactactcttccaaatttgtggagaccagcccctctggacttgaccccaatgcctctgtttaccagcccctgaagaaatgaaggccagctgtgtgttgtgcccaaaaatttggttaccggaaggcattgcaaaggagcgtctctggcagtcaagataaaaaaacagtttctattgtattttgtggaactgtatctgttgtcatttttaaaaaggggggaaaagataacatccaagtctgattagaactgcccatcagtttttcttgtaaatttttagaagacctcacagaactttacagtttatttttctcggccaacacattaaaaccattcttggatttcaagt

SEQ ID NO: 271093 - DNA, 487 bp, Homo Sapiens
cgcgcgaccaccgtgcctggccgaaagtcgtttttttggaggctttaaatcctgggatttatgggaaccagggaagagtataaagaaaaacaacagtaagattctctacaagtttatcacaggatgcagtttactagaaatagtatagataagctgtgtggtaatatccatctggatttattagacatacatgtaatccaagccaatttacctaaaatacctagacctcagactccccaccttgtagagcaggaatacttaccaacttcactgaggaattatggagataaaaaaattaatggatctgatattgtgggtgcttaacgaatctggttttctttctcctcctgtattcagtttttttacatgaccaaactttcctcacctgctggccaagtgcctgatctgttactaaatttaatattggcaaatacagttaatgccaactgtttgccaaaatgtgtatactccaccaaattacacttgt

SEQ ID NO: 271094 - DNA, 727 bp, Homo Sapiens
  misc_feature (35)..(35): n is a, c, g, or t
  misc_feature (49)..(49): n is a, c, g, or t
  misc_feature (78)..(167): n is a, c, g, or t
  misc_feature (170)..(180): n is a, c, g, or t
ggttcgagaccctgtttctacaataacatataaanattaggtgtagtgncatgtagttctagctgctcaggagggtgnnnnnnnnnnnnnnnnnnnnnnnnnnnnnnnnnnnnnnnnnnnnnnnnnnnnnnnnnnnnnnnnnnnnnnnnnnnnnnnnnnnnnnnnnngtnnnnnnnnnnncagtatgaggaagtgtgtcaacactgggaagatctgtgtaactcattgaaccaatattttcccaaatgaccaattcatgttacaaaatcgtgcatgggtaggcgatcccgttcaaagtacaacatagacaaatggatttttatatacaccagagccaaaaaagttcactgatacagtgaattccacattgcaactaacctttcagaattgccacttgagttttggtgttgaataaaagatgaatatccattgttttctgagaaggctgttaaaatactcctctcttccaattagctgtccatgtgagacacgttttcttcatgtactttaaacaaaacaacatatcatagcagattgaatgcagaagcagatatgggaatccagctgtctcctattaagctaggcattaagagaaatttgtgaagatgtaaaacagtgttactctgattcctgactttgttttagaaaattctgtttttcataagatgtttatattaacgtaatgggtttattattttaaatgaattaataaagcaaataccgaaaa

SEQ ID NO: 271095 - DNA, 343 bp, Homo Sapiens
  misc_feature (121)..(121): n is a, c, g, or t
  misc_feature (214)..(214): n is a, c, g, or t
tgacaacccgcacccggccagaatttctttaagtctagtagttggaaaaccagaactctattccaaatggatatagatatcttgactgttaagagttggagacgtttcagaagttctcacnatactcctacggatcccagactgaagcaggaatttacaaaggaagtgagctactactggcttgataccaagctaagacagagacacaaaccgntgaagcctatcaatacttaagccagagacccacctacaaaaagaggattggtcatagcagatccttagggcacagagatgaaccccaaatccaggtggaacaatttaatgcaagatgataaaactcaaa

SEQ ID NO: 271096 - DNA, 573 bp, Homo Sapiens
  misc_feature (45)..(272): n is a, c, g, or t
  misc_feature (438)..(438): n is a, c, g, or t
ttgtagaaaaaaaggtctcactgtgctcaggctggtcttgagctnnnnnnnnnnnnnnnnnnnnnnnnnnnnnnnnnnnnnnnnnnnnnnnnnnnnnnnnnnnnnnnnnnnnnnnnnnnnnnnnnnnnnnnnnnnnnnnnnnnnnnnnnnnnnnnnnnnnnnnnnnnnnnnnnnnnnnnnnnnnnnnnnnnnnnnnnnnnnnnnnnnnnnnnnnnnnnnnnnnnnnnnnnnnnnnnnnnnnnnnnnnnnnnnnnnnnnnnnnnnnnnnnnnngaatctaatctatctaggcaacttccagaccttaggtttgatccccactttgtcacttccctacatgtatgatgttggatctcaatttccaaacagtgacatgagtaccataacctttcaaaaagtatctatggggtagcctactggggtgctggctattgttctnagtgctttgggacagattaagtaaaaccaagcaaaccaaagatctctggccctgtgggaattcatattcttggtgagggcccatttactttttccttctttttggattcatatatcccttttggttataattcag

SEQ ID NO: 271097 - DNA, 442 bp, Homo Sapiens
  misc_feature (13)..(13): n is a, c, g, or t
  misc_feature (25)..(25): n is a, c, g, or t
  misc_feature (32)..(32): n is a, c, g, or t
  misc_feature (63)..(63): n is a, c, g, or t
  misc_feature (143)..(143): n is a, c, g, or t
gagaaaagcggtnaaggaaaaactntaacccnagggcccctcttaactaagaggctgggtcgnttggtgactgggccaacaaagatggtggctatggcccaggggacatctgagtatgtgcccgagtcatccttttttcacanggttgaagggagagaaaagattttgagttaaggtcattggctgctctactctgtcccctacctggtcacctagtgatagccccagtggagatactgtccatacgaaggtcttcccagaggctggataccacagtaaaaggccaggcccaggaggggtaggagactatggagatcttacctcctgataaatgtgctacaccccctaatctgagcccttcctttccgtgttccccaacaacctcatgcttacgtgatttttattcaaattaaaaattttcattgctacagaaatcagaaaa

SEQ ID NO: 271098 - DNA, 471 bp, Homo Sapiens
  misc_feature (45)..(45): n is a, c, g, or t
  misc_feature (53)..(53): n is a, c, g, or t
  misc_feature (324)..(324): n is a, c, g, or t
  misc_feature (391)..(391): n is a, c, g, or t
ccattattgcctggtctggaattaaccaggcctgttaaataatcntggccttnctctgcccagggcagaggccctgtttttgtgctacaggcccctctggcagtctattgaggccgatggtccccttctccagaataatgttttagaatacacaaaagaagatatgtaagattatagaggaaacatttcatacaagtggaattatcaaaatattaacaacaaacttttggtctagtattatatgtgcttctttattagtttaggaaaatggaaatcttttccaaaagtctgctagccaacttaccctcccatctcataatggcnagatgactagttgttctttcaaaatccattctgcccattttctggggcatatagctgataagctagncactccgttttctgtacttcttgcagttaaatgtggtcatgtgactgtgctatcactaatataaaattcaatggaacatg

SEQ ID NO: 271099 - DNA, 489 bp, Homo Sapiens
tggaaacattctgaaaaatctcagagaactgaacccttacaaactttgttttccctcataaccaaagcttcaggttagaagtttagaaaaatagaatggttgggtacatgatctaaatgtttaatgctaaaggtatatcgtaaagggtagtgtttgtttttgaacgataatttagaagttctcatagaaagcgtataacataggtcttcagaaactataaaagaattttcatatagtattaaaatccatagacgtaaaatctgagaattttttaacatatgcaagtcagccaaacataagctaccaaaataaagagcaatgtgttctggctgttttatacttcaacagttttttccctaagtggtaagcaattactttaaaacatatttttaaaaacatcggtatcgggagctgcggtggctccggccggttgtcctggcacacaaggaggcgaggctatgcgttcgaggccaacctaggcaaaattgg

SEQ ID NO: 271100 - DNA, 612 bp, Homo Sapiens
  misc_feature (258)..(258): n is a, c, g, or t
  misc_feature (267)..(267): n is a, c, g, or t
  misc_feature (275)..(275): n is a, c, g, or t
  misc_feature (288)..(288): n is a, c, g, or t
  misc_feature (290)..(291): n is a, c, g, or t
  misc_feature (302)..(303): n is a, c, g, or t
  misc_feature (310)..(310): n is a, c, g, or t
  misc_feature (314)..(314): n is a, c, g, or t
  misc_feature (321)..(321): n is a, c, g, or t
  misc_feature (323)..(323): n is a, c, g, or t
  misc_feature (326)..(329): n is a, c, g, or t
  misc_feature (335)..(335): n is a, c, g, or t
  misc_feature (337)..(337): n is a, c, g, or t
  misc_feature (340)..(341): n is a, c, g, or t
  misc_feature (347)..(347): n is a, c, g, or t
  misc_feature (351)..(351): n is a, c, g, or t
  misc_feature (356)..(356): n is a, c, g, or t
  misc_feature (363)..(364): n is a, c, g, or t
  misc_feature (368)..(368): n is a, c, g, or t
  misc_feature (371)..(372): n is a, c, g, or t
  misc_feature (380)..(382): n is a, c, g, or t
  misc_feature (385)..(385): n is a, c, g, or t
  misc_feature (390)..(390): n is a, c, g, or t
  misc_feature (394)..(394): n is a, c, g, or t
  misc_feature (404)..(404): n is a, c, g, or t
  misc_feature (406)..(406): n is a, c, g, or t
  misc_feature (408)..(409): n is a, c, g, or t
  misc_feature (411)..(411): n is a, c, g, or t
  misc_feature (419)..(420): n is a, c, g, or t
  misc_feature (424)..(424): n is a, c, g, or t
  misc_feature (426)..(428): n is a, c, g, or t
  misc_feature (430)..(431): n is a, c, g, or t
  misc_feature (437)..(437): n is a, c, g, or t
  misc_feature (439)..(439): n is a, c, g, or t
  misc_feature (442)..(442): n is a, c, g, or t
  misc_feature (447)..(447): n is a, c, g, or t
  misc_feature (452)..(452): n is a, c, g, or t
  misc_feature (456)..(456): n is a, c, g, or t
  misc_feature (459)..(459): n is a, c, g, or t
  misc_feature (461)..(461): n is a, c, g, or t
  misc_feature (467)..(468): n is a, c, g, or t
  misc_feature (472)..(473): n is a, c, g, or t
  misc_feature (477)..(477): n is a, c, g, or t
  misc_feature (487)..(487): n is a, c, g, or t
  misc_feature (593)..(593): n is a, c, g, or t
acacccacatcctctcttttccacacacaactatctgtttattttttgtagcagtggccgaaagtcctgcaaggtcataaatctttcagagtgacatcaccaactgtactgcatcttactgggatttaggacttctgagatgcttgtgaagtatagatgtggttgtggtcttagattgacagcattagagaagactggttagaacatctggtctcgctggttagtgcctcgttggctgaggactaggtgtgcaccccncctaccacncacacctncacaaccacccancnncagctccaccnntacattngtgngacgtgncntgnnnngtgttngngcnntcgttngggngtgtnggtgggnngggngcnncaccccannncantgacncatngtcatgacancnanngnacacacanncagncnnngnncagttncnccnaaacnccatncaanacntnttgttnntccnntcantaacctaaangctttcaggttagaagtttagaaaaataagaatggttggggtacatgatctaaatgtttaatgctaatatattcgtaagggtagtgttttgttttttgaacgatanatttagaaagtttctcata

SEQ ID NO: 271101 - DNA, 380 bp, Homo Sapiens
taatatctatgccttggctttgctagacaacacaacagcgtgtagaggttaggaacacagactttggagccaggttacccaggctcaggtcccagcaccgcgactctcaatctcatgaccttgggcaagttacttgttccctctgtgcttcagtttcctcattggttcagtgggcaaaataagactaacataaagttattgcaaaaatggaatgagataataaatgttaagcttttagaacagtacttggcacatagtaagcactagggaagtgtttttattgttgtggttgtgagatttaaatgaatgtgtagaaaatacctagcatggtgcaaatgctcagtaaaatttttttctgacactaaattctatgctaacta

SEQ ID NO: 271102 - DNA, 326 bp, Homo Sapiens
gctttgagcagagtgggggatgttgagggagagtccagtcacagtacagcctgcctgctggtgttgggggtttcctctaattcttcatttttccccaacccttaccacctgccaccaccaccatcaggacaaaccctatgactgactcatgacgtcccactgaccacagctcccctctctggacagcgtgttattagttccgctccttctggttactcctcccttccagtggtgagaagagaagagaaagcccagcctcctgggttctcccctcccctagaagctacatttgagtgtttgtgtgatctcatctcaaggcttgttaa

SEQ ID NO: 271103 - DNA, 555 bp, Homo Sapiens
  misc_feature (255)..(255): n is a, c, g, or t
ttcacccaatctgcttgactcaaaaaaacaccaatttaaatgtgactctcatctaaaaacatcctcacagaaacatccaaaatagtgtttgaccaaatatctgtacaatgtggcccatctaaattgacataaaattaaccatcacatataatgatcatacctagatgtgatttagtctgagtatgccataagacctcacaagtctttctcaggctctacgtgaagtcatttcctgtggggattcaagctcaccangttaatgcctactgctttattcccaccagaaacccaccatttctttctatcttgtcctatagctttctacccacaaacaaaggtgatatgtatttcagcacactatggcacgacaggcatgtagaagctctattttgtccatcgtaaccaggaacctttctaagcttttagtcattgaggcttacagttacacagtgatcagtcctctgggagttgtatactgcataatttgatagcccagccaggagcagtttctggaaattcttcccaaatgatatcctttgtagtagatgtaaccta

SEQ ID NO: 271104 - DNA, 329 bp, Homo Sapiens
atacacacatgccataaagcctggctaattttcttattttttcgtagagatggggtcttgctattgccccagatggtcttgaactcctggcctcaagtgattctcccagcttggttccccaaagtgctagaattataggcgtgcaacctggtaccttgcctacaaccaaattttgagtaacagattatatttgtgaaactgtttagtatacatggcttccatgtaacattttatttggggaaagaatgtttcattgcttaaaaaagctcataaatcacgaatgcatgttagttatcattttatagggtacaatatcagaaaaagaaatc

SEQ ID NO: 271105 - DNA, 522 bp, Homo Sapiens
  misc_feature (112)..(125): n is a, c, g, or t
catacaattgaagatttatgtaagttacttacttatttttaaactgcacaatgctgaagccagtctaaaaaagaatcaaacacaccactgcaagttaattcaatgagttacnnnnnnnnnnnnnnaaacagatttgtacagcaaaaagttcccagatcacagtctctaccatacagtcacctgtccagtgtgcaggaagccacaggggccctggcaagaggggcaaagagcagaagctgcactgcagagtttacttctacctacaggtgacatgtggctggaagaatcttgagttccctttgttctccagtgtatcttgtacaaaatattacatttgtttaaacacatatttacagagtttgcacaaatagaaaatggttacaaattacaaccaggcttggcaggataccagttcccctccccactgaccaaggtcagatgtgatgaccatttcatatttacagttgcaatttaaaaagtctgtggtttagagacctaaatgaagtttataaaaactggtta

SEQ ID NO: 271106 - DNA, 440 bp, Homo Sapiens
  misc_feature (423)..(423): n is a, c, g, or t
gaagaactcggaattattcaagtcagtctcctgaaggcttggaggttagagtttttcaaggagagtttggtgggcaggaggctagggaatgggaaatgttgattagttggggatgcagtcataggagcctggaaaaatggtccttatgtgctgagtcagcctctggatgggggccacaggaccatttcagtcacgagtcatggtctgggtagagtcagttggttgccataaatgtaaaagtctaaaaacatctcaaaaggccagtcttaggttctaccgatagtgatgttatctacaggaataattgggagaagttacacatattgtgacctctggaacaatggctggttattggtttaactatgcctggtatccttaaccagaattccaggcccctcctccataatccctaaccttgtgggncttccggtaatttttac

SEQ ID NO: 271107 - DNA, 390 bp, Homo Sapiens
agtttacccccttggctttgtgttcttgcatggatttggggttggaggggccattccggaggctaaataaagtctcctggatttaaattatcctgggtctcttacttatggcttatgaaagtaccaaatgtataaccactagaagaaaatttaacatatgagtcgatcccttgttttatccattgaaagtagcagagtctggtgtcattaacctgacttgcttgtgagaaatttagattgtagagtcatttctgaaacatgacctaattcatcttgtgacttttaaatagtcttaaataccaagttcagtcattgtcttagagcacatgaatttcattataatagatttatcatgcccccctctcaaatatacacagttttggcaagcca

SEQ ID NO: 271108 - DNA, 434 bp, Homo Sapiens
  misc_feature (56)..(276): n is a, c, g, or t
agagtttgaaatctgtaagcaggcccagtatgttgtaaagtacggaagaactggtnnnnnnnnnnnnnnnnnnnnnnnnnnnnnnnnnnnnnnnnnnnnnnnnnnnnnnnnnnnnnnnnnnnnnnnnnnnnnnnnnnnnnnnnnnnnnnnnnnnnnnnnnnnnnnnnnnnnnnnnnnnnnnnnnnnnnnnnnnnnnnnnnnnnnnnnnnnnnnnnnnnnnnnnnnnnnnnnnnnnnnnnnnnnnnnnnnnnnnnnnnnnnnnnnnnnnnnnnnnnntgaatcttcaccattcgaaaattatcagataaaaatctggaactatagccataggaggtaagtatgagttaatttgttttactagaattttgaatagcatatatactttccaaatcaccagtggggaaaaaatgaaagaaaccataaaataaataata

SEQ ID NO: 271109 - DNA, 496 bp, Homo Sapiens
  misc_feature (483)..(483): n is a, c, g, or t
gggtgtggtgatgtatttattcataatatattttcagaacacattaataatggagaataacacttattcatatactgaatataacttttcctggagcactctagagcttgtttggagttggagaatactgccaggcttttcctaatctctttggtctttggaagtgggcagggtttctcaaaccaagtgtcttccatgggccattggcaaaggcttcccttcatcagcttggaggggcagaaagaccatggcttcagcacttccattttggaaagaagtaacaaaaaagtgaattaatgagcaatcggaaagactcaaagcattttgtactccacagttcatttcttcacacaaacgtccattactgcagcgggcatgaaaaccggcagggtgttaggctcatggcctgaagagaagtcacatcaccagccgatgttttcatgcaaaaggcaatcgtgatgattcagaacctggttctgaatntctccaggtgtgc

SEQ ID NO: 271110 - DNA, 432 bp, Homo Sapiens
aaggtaaacagtcttacgaatgtaattccttaggaagacttgtacaaacttttattaggatatctatttatttaatactggaactttggcctactttgtgataagactataaaccaaattgaggaaatcactatttctcacttctgtattttctcaaaaaataattttgttacagagttcaatatactgtgtaccactgatcttctattgtgaaagcaaagaatttcatcaaaatattttaaattatgagtgaaaattgtgtatgttaattttgcagctataatattaatcaaattttgtgtaattctaatcacaaaatgacgtgccttaagtgcccctccagctgtgggttggcagtgtccagacagggagggcccatcaccgaaatcctgaacgattactagaccaattctattaaaaacatttcaaggc

SEQ ID NO: 271111 - DNA, 435 bp, Homo Sapiens
gaatgacccaccgcgccaggcctttaatcccttctttaccacttcaaaacaaacttctaaaatagttcttagtttactgaattatgatttgtttctaacactgaactgtgaaaaactcattatgtccctaaacagtatctccatggtaaacattggcttattaatcatttaggttaataaaaagaaacttaatattctgctggtatcaaaagatagtattccacaaaaagtttagttagttcggaaaactgaactagttcccgtttaaaaataaactttagctccattaaataccaaaaagtgaagttaactacccaccacaaacaaaagaggaaaggatttagaagtggtttaaaaatcacagaagtgatgtcttcagaattccactcacaagtgtattgtttcaacttttactgtgcaacactaagagagatc

SEQ ID NO: 271112 - DNA, 552 bp, Homo Sapiens
aagtaatcctagatttcatcctaaaaatcttgattacttttctggttagactcttaaaaacacccgagcactcttgagttttttaaagtgtccttccctttgttgtgtagataactgtttggacatatctgttctcccttattctcgtctgcaaaataagccaattaaagagtctgggaaaacatgtaacacttgagataattttcacccatattaaaagtctaacatagaagagttaaaatgtgctgtttttgaactaattggttgggaaacactttgttgtctgtaggaagccatagatgaccttgcctacggtcctaaaagtgtgcacgcctggttgaaaggatgtacagccacatcgccgcacgagctgaggagtttgctgtgttttccccatttatggtggcccagtacggtgttggaggtacagaaggtaaaattgggttcaatgtctttcaccaagtactgtgtttatggtccttaagcagggtttctcaaccaaaatggcaagcggtgttctggatctgacagttctctgttgctgtgtgcaag

SEQ ID NO: 271113 - DNA, 521 bp, Homo Sapiens
  misc_feature (74)..(166): n is a, c, g, or t
agttcaagcgattctcgtgtcttaagattcctgagtagctgggattacaggcgcacaccactatgcctggttannnnnnnnnnnnnnnnnnnnnnnnnnnnnnnnnnnnnnnnnnnnnnnnnnnnnnnnnnnnnnnnnnnnnnnnnnnnnnnnnnnnnnnnnnnnnatgggcgaccacacctggcctactttacacactctaactaaaccctgtgaagtagatgagaacgctgtgatgagggaacttaaattaactggccagggtcccttaagaaagtggcagttcgaacatttgaatccagcttgattccaaagcccaaacacattccgtcatattacacagcttttcacaaaccctgttatctgctagatcccatgctacagtaccaatgacttagatcattttggtacctaaagactcaactcagccttgcgccaaacttccagatctatttttattcttagtggtctttaaaactacctggctttcatgtggtaggttgcaaaaatattttgaagct

SEQ ID NO: 271114 - DNA, 367 bp, Homo Sapiens
  misc_feature (289)..(289): n is a, c, g, or t
  misc_feature (303)..(303): n is a, c, g, or t
gtgtaagcccccaagcctggcccaaacgtttatcaaaacatctactcgtgtttcagacaatgcgcaagacactgggcttatgaaagtgagacagcccccacacttgaagcccttataatccagtggagtatgatttatttggaagttagaaattttaagacagtcatcagtattacacacagaaacaaacatgtgattcaagaatgctgtctacaatactccaattttcaattatgaatttttcaatagggccacaattattccaccatattcctggaagaacattttncatcctaacttttnttgtgcttgtggggtggtgttaattgtggcatatgcaaaaacctttatcacttttcgattatga

SEQ ID NO: 271115 - DNA, 529 bp, Homo Sapiens
  misc_feature (31)..(31): n is a, c, g, or t
  misc_feature (75)..(75): n is a, c, g, or t
  misc_feature (89)..(89): n is a, c, g, or t
ctggggtacctcacccctagcaaagcccaanaatgccccaaggcccccaaacaggacttttacctttggtttggnccaaaaaacaaagncatataggccaatacaaatcaaaatgcccggagggtgtttggatggccatatttgcaaattgtcatctattgaaattctcgtcacactacatagacataattgttatctccttttggcttatgtgattttctgtttacaagtagaatagccaattatttaaatgtttagttgccacagtgaaccaggagtcactgagccaatgactttaccagctgctgactaatcttcatcaccactgtagattttgctgcatgtgcaggtcctctatttttaattgctgttttcgttgctgcagtactttacaaacttctagttcgttgagacttagtgaccatttggcatcaagttaacatcacacaataggaaacaccacttccacaagtctcaagcctcagtgctaaagtactactgaaaaggaactaggaagtttggccaatta

SEQ ID NO: 271116 - DNA, 720 bp, Homo Sapiens
  misc_feature (31)..(31): n is a, c, g, or t
  misc_feature (51)..(51): n is a, c, g, or t
  misc_feature (53)..(53): n is a, c, g, or t
  misc_feature (77)..(77): n is a, c, g, or t
ggggatctgcctgaagcagggatgggacacnaagtccctccagcttatctntncacaacaaccctttccctgcaganatggtttgtataccacaagccctcttagcacgcaaaagccaaaatctaaagatcaaccatttatcctgaacaacaccatttgagaaagaggtaaccatctttggttctacatggtttggagagtatagtggtaggaggggctccctgattcccctaaagctatgcacaccacaaggggctctgctcttctgtctgggatcttcttataaaggtgttcccatgatccattctctaaaagtcacaagggaagctttactcatcatactaagtgtgcccaagggggagttcactcattactgtgaccttccagctcagtccccacccatgggagcctgtgttgctcctctcactccatgtgtctaagtcatgtcttttacatagtgtcctttgacctgttggcccccatggtctggttagttatgtgagttgaatcaagaggctctaggccagatgtttacataattttaacctatatgattttatttttaactttgtatttctccctagaaatcttaataagacaattatgccatcagacaatgttaagaagaacgatccttggagatcccgtaatcccactacccttctttggctcagagaggataatttgcctaatgatacattaaagttagtggcaaaactt

SEQ ID NO: 271117 - DNA, 457 bp, Homo Sapiens
  misc_feature (412)..(412): n is a, c, g, or t
  misc_feature (430)..(430): n is a, c, g, or t
aaatttctcgacactatccacctacagatggcctgattttttttaaggcaatagtaactctgttggtcgtaactagttttgaaatggacatatgaccaatctagtccataagatcagtaattccccacctttttggcaccaggggaccagttttcgtggaagacaatttatccacagactgcggggagtagggggagatggttttggggatgaaacggttccacctcagatcatcagggcattaggattctcataagggagtgcataacctggatcccttgcatgtgcagttcacaataaggttcacactcctatggagaatctaaccgctggccgctggatctgacaggaggccgaagcttaggcggtaatgctcactgggcccgctgctcacctccctggctggtacgancccatttcccaataggcnaaggactggaagaaccgggagtttggg

SEQ ID NO: 271118 - DNA, 451 bp, Homo Sapiens
  misc_feature (14)..(14): n is a, c, g, or t
tgtaggtgtgagcntcaagagggtgcatgggaatgttccagagcccctttccataacagcccccaaactggaaataaccccatccaacagaatgggaaaatgaatgatgcccctactcacctacccatgcacatagacacagcaacgggattgacatgcccggctacacacagcaacatagacaagtcacatgatgaaatcttgagtgacagaagccaaatgcaacagtacatactagatggttccaggtgtattacgttcagaaccagacaaaactaatttatagtgcaccaaagtcaagatagtgatcgcccttagggttgggaggggacgaggggagagcttctgggagctgatccagttctgttgtgtaatctggtgctggttccctgggcatatgtattctgtgaaaatccatcacatgacttaaataaaatgtacattacttata

SEQ ID NO: 271119 - DNA, 371 bp, Homo Sapiens
  misc_feature (344)..(344): n is a, c, g, or t
ttttacattttttggttcattctgtatcaatgagcagttgtgatatgacagttatgtgtgaattcatctataacagtggattttggggaaatgaataggccaaaaaggaagatattctccaaaactcttaaaatttaaaggttgcagtaggatgctactccagctaattttaagctagccctcctgtattcttacagttatttctctctctctttctttcacacacatgtactcattttcttattctattttataacaatttccccttatgctgacttcgaaaacttattatcttaaaaaatccttattgcatgcattcctgtaagcagctacctcaaacgctntttgagccaggctgaaaataaataaag

SEQ ID NO: 271120 - DNA, 431 bp, Homo Sapiens
ggggtttagagcaagtggaaacaacagatgttcactatagaaagcaagaatgaaaaccatgaagtggttgaagattagccttacagtaattttattctgatcacttaatacagtagagtcaaacaggaatccaagtttccaactttattatttttggcactgaagaattacaaagaactctagcgtctttatacctccgtggttcactggagttaaagcaatcggggcgttgtacagctcacttgagtttttaaaggttctactaaaaagtgagaattccacagcaatatgggtcattgttgcagaatatcacaaaggtctgttgtgtatactccttttcaccaggaaagggacaataatagtttttttcaatgtatatatatataagtgatctaactttttattaataaaagtaaacaactctaaaatgt

SEQ ID NO: 271121 - DNA, 433 bp, Homo Sapiens
  misc_feature (109)..(109): n is a, c, g, or t
  misc_feature (111)..(111): n is a, c, g, or t
acaccaaaaacacagtgaactgaactggagtttgaaagtgaactgacttaaaatttgaaaatatttttcacaggatagcagagttggaagaggccattggagtcgatcncnagcatacgcacggccaaaccatgtggagtttacgctttgccttttctagtgctcactgggcatctgttttcaaggtggaacccgtagccaatggtccctaaaattattaatgtgtttataaattattgtgcctgtaaaattatgtccattgccattggtagctgacaggctttataaagtgtgaatgagtgaatgattggctatttcttatcagattgaattccttttaggatagttcatatttggcataacttccaaggaggattttcccattattacatatcacctgatcatagctgttgttttggatcagtgtgtattg

SEQ ID NO: 271122 - DNA, 629 bp, Homo Sapiens
tttcggcacagaagaccaactatatatttcacaatatcacagctgcccagagtgagatcggcagcctttaaggtattcatccagctgaatgttcccacatgccctcaagtacttaccacccaactctgtagcagtgcacagtggacataaggtggtgttggcagtctcagtcctatttaatgatggccagagatacctcctggtcagccaaagccctggctgactgccaggcagttgcgcagtagctcttcctgtagtgaaactgttcttcttatcattgttgactaaactctgttggaagttgtctcactagccatatgaggccacagctgtctctatcctgaatagcttaatgagccataggttgctgactcctggactgcaggaaccttttagttgcctctcgccacagttgaatttccttctggacctccatctctcttcatcacagttgtcaacacttgagccttctcccatgttacttcttatgcagtgtcccttctacttaactgtaagttttataaaagcagaaaaccgtcttattcagttttttgcttatgcagtaaacattgaataattgtcaaatgaataaataattgtcaaataaatgaatatattgaataaccata

SEQ ID NO: 271123 - DNA, 538 bp, Homo Sapiens
cttttttttcatcttatatataaagggttcttcattagctaataaagtcccagaaaggctggctctcctctaagggcagagccatcgttctgcctagtttcaaagcctcttcaagtggagaacttgacaccaggctgggcggggcaggcctggctgaggtgccctggtgtatatgctccccctggcttctggcctctggttcccacagtgctgaggcatggggtggccctgggatgactaggtggtccttctcgaggcaactggctcaacacttcctcctcctaatagtgagatgggctttgttccaaacagacctgaaatggtgtgccctcgatcaccaaccccatcaaaactgcaaaccaacaccagggcaagaagcaacaccccatccaaggtaatagaacggccccttctagctctgtgtcctacatgaaacgctgtgaactgcttcccaagggcactggtcttgaagtcgtaagggaatcaggctagtgagctgtcaccaggcactcattactctcatacatgtctggcctgt

SEQ ID NO: 271124 - DNA, 167 bp, Homo Sapiens
aagagaaaactagaattgttgaccacattaccaaggaagaataagaatagagaattttattgttaagccacaccaaatttctgccttgttaagagaatggcattactgaaaaactgaagacttcatcaagaaaatgtacataagctaacaatataagattaatcact

SEQ ID NO: 271125 - DNA, 473 bp, Homo Sapiens
gtaaaacccaaaggcaaagttcgatggactggttctcggacacgtggcagatggaaatattccagcaatgatgaaagtgaagggtctggcagtgaaaaatcatctgcagcttcagaagaggaggaagaaaaggaaagtgaagaagccatcctagcagatgatgatgaaccatgcaaaaaatgtggccttccaaaccatcctgagctaattcttctgtgtgactcttgcgatagtggataccatactgcctgcctttcgccctcctctgatgatcatcccagatggagaatggttctgcccaccttgccaacataaactgctctgtgaaaaattagaggaacagttgcaggatttggatgttgccttaaagaagaaagagcgtgccgaacgaagaaaagaacgcttggtgtatgttggtatcagtattgaaaacatcattcctccacaagagccagacttttctgaagatcaaa

SEQ ID NO: 271126 - DNA, 462 bp, Homo Sapiens
  misc_feature (434)..(434): n is a, c, g, or t
tggatatatgctgcatctataccatgtgtattcttggcaaaacaggtaaatggatgtttataaaatctactttcaatttccgatatattaagcactgtgatgagggtactccttcttttgtttgcaggattttccacactattccgagagagagagtaaataaacttgtgtaagttaattgcatcaactacaaataagacctgtataccctgtgtatttccttatttgtgacaaaattgccactgaaataatcaccctgcccaatcacagtcacaacattcagactgctggcaacactaatctgagattttataaccccaagaccactgtcagtaacaggctcagtagcagagaaagcaaaaaaattaccacttccaagaagaaaaatgtagacaaatgcattgtgtctccatggggcacagaggagcactaancaagaggagattggggcagatgcaaagt

SEQ ID NO: 271127 - DNA, 512 bp, Homo Sapiens
  misc_feature (469)..(469): n is a, c, g, or t
ttgctaagctaagtagaatttataagatcttgtacatttaaggtaaaaaatacttgtcattgtggtgcaaattacagaccacttagaagcctttctcttacgttatacatgttgcaacatttcaacgaagcaattatctttcattattcttcatattcctcaagtagcttagaagagactcattaatgagctcaagaatcaggcaatccactgctctcgaaagcctctactggtttcctactgctcatctatgggacaaggatctcctgggcttcccatgacctctccttcacaacacctgcaaagcactttgtcatctgccccaatctcctcttgtttaggtgtctcctctgtgccccatgggaggaacacaatggcatttggtctacatttttcttcttgggagtggggaatttttttgctttctctggctactgaggcctgttactgacagtggggcttggggggntataaaatctcaggatagggggttgccaggcaggtctggaatg

SEQ ID NO: 271128 - DNA, 438 bp, Homo Sapiens
  misc_feature (11)..(11): n is a, c, g, or t
  misc_feature (34)..(34): n is a, c, g, or t
  misc_feature (39)..(39): n is a, c, g, or t
  misc_feature (46)..(46): n is a, c, g, or t
  misc_feature (69)..(69): n is a, c, g, or t
  misc_feature (74)..(74): n is a, c, g, or t
  misc_feature (90)..(90): n is a, c, g, or t
aaaaccaccangcccattggccccctacaatttnccccncccgggnaagtgggtaatttttttggcctnccccnggcctactgaaccccngttaccggacagtggtcctgggggttaataaaaatccccagaataagtgttggcccagccagtcctgaaatgttgtgactgtgaattgggcagggtgattatttccagtggcaattttgtcacaaataaggaaatacacagggtatacaggtcttatttgtagttgatgcaattaacttacacaagtttatttactctctctctcgaatagtgtggaaaatcctgcaaacaaaagaaggagtaccctcatcacagtgcttaatatatcggaaattgaaagtagattttataaacatccatttacctgttttgccaagaatacacatggtatagatgcagcatatatcc

SEQ ID NO: 271129 - DNA, 557 bp, Homo Sapiens
  misc_feature (130)..(130): n is a, c, g, or t
ttaagaaaggcagactgccacatgcagcacttcatttggatgtgtctggaatcttggaagcttgactaccctatgttctcctacaaatggacttgagagcttgtctggaggttccagcagggaagcgcantactcgtatacccttgaccaaagactggtcctcttctagtggagatggttgtcctctttgactgagaacacagctttgggaggcatgaacatggagtggtgagggaggaaggggacagccacttagccagccagatcagccgaatcaaccctggcgattaatggggtgacagatgtcacagccagatcgccctcacattccatgactttgttttatgtaatattcaataaccatggagggctggtgttacccccattttatagatgagaaaatcaatgcttagagtagttaggtagcttggcaggaaatcacaagattaggaagtgtgaaagcctgcactcaaccccaggctttcctactttcatagtcagctcttaataatacagcttgctcttttgcaagacctatcataagaaagaagctgttt

SEQ ID NO: 271130 - DNA, 493 bp, Homo Sapiens
  misc_feature (62)..(205): n is a, c, g, or t
  misc_feature (321)..(330): n is a, c, g, or t
  misc_feature (381)..(381): n is a, c, g, or t
atagagacaaggtctttccagccctgggaacgtggaaagaccttgtctctatagacaccaannnnnnnnnnnnnnnnnnnnnnnnnnnnnnnnnnnnnnnnnnnnnnnnnnnnnnnnnnnnnnnnnnnnnnnnnnnnnnnnnnnnnnnnnnnnnnnnnnnnnnnnnnnnnnnnnnnnnnnnnnnnnnnnnnnnnnnnnnnnnnnngaatgaggaaaaaagacattaaatacagttttaagacagtgtttatagtaataaaggaaaatcaccatattcaaaatactatatgcactatacagtttctataaataacatactgnnnnnnnnnntctttcctctgcctcgtatcagttattaatgataagaaaacatggcttggnctggtggctcacacctgtaatactcgcactttgggagacccaggtgggtagatctcttgaggactggaattcaagaccagtctggccagcatggcaaaggcctgtttctact

SEQ ID NO: 271131 - DNA, 421 bp, Homo Sapiens
atattttcatatgctgtgggtgacttaagtttgatggattatgtcacaaaatgcaaagtaaatacacattgaatattttttcattataatagtagtgactttggcagagtaaatgcattgttccaaagggatttttaaatgggttaatctagatggctctccttgagttagaatttgctcagctggctggaagtatatgcttcaggagtgtggttcatagatttgaccctaaggggacgccctggcaatggcagacactagccttgcacaatcattgcctgaggattcatttgtagtcaccagaggtaggggatgtccaggtaatccagcatcacaattaagaagaaaactatacataatttcactcattccatttattccatagatacacacctgagcatcttaaatgtggcaaaacact

SEQ ID NO: 271132 - DNA, 439 bp, Homo Sapiens
  misc_feature (13)..(13): n is a, c, g, or t
  misc_feature (49)..(49): n is a, c, g, or t
  misc_feature (115)..(175): n is a, c, g, or t
ccttggggtttcntgaatttaaattgtaatagtccatttttttctgccnattagtacccaaggaaaaaaagcccaatattttagggcacagaatggtagaaaggggtcatacttnnnnnnnnnnnnnnnnnnnnnnnnnnnnnnnnnnnnnnnnnnnnnnnnnnnnnnnnnnnnncgcctatagagaaaagaaagcttactgaactaggagtcagaacacctgtgttgaagtttgggcacattccccaattccccaagcctcagtttgctcatctataaaatagccggagtgatccttgcctcacctgattcgtggttggtgatgatcaaatgaggcaatgaatgagaaagcctttgcgttagcctctgttttgctggttattaaacagatgccttcctcccttgactgttctttgagaataaagccagaaaagatttg

SEQ ID NO: 271133 - DNA, 168 bp, Homo Sapiens
cgggaaaatgaatgattattcaaaaagctctaaactatgtccctgtatagtcagacatatatatttatcaacaaaacaatgtccctgtagcaccagatatacatatctggtcatttaaatatatatctatatagagaaatagatacatttacatatcaaataacaagt

SEQ ID NO: 271134 - DNA, 368 bp, Homo Sapiens
  misc_feature (334)..(334): n is a, c, g, or t
ttggagagagcaccttctgcccgctgcaccttcttagtgtatgttttctccgtaacatttttctaaagaggtaccagtagctctgggcagttggaatcgggttggggtgagaggtcagggtctctgctaagtaagcctcctgtgctctctggccctgacagaaacgtatgcaccgtcctcccaccatagggcgcggggcattaaagcgcagaccggatccctgaagatgcctgccaacaaagagaagaccccgagggaagcttccccacaaaaagaacagacaccaatacccagtatcctgaatttgtggtgcgttttttttgaaacttaattnccattctccttccaaatttcctcctttggcaaaa

SEQ ID NO: 271135 - DNA, 758 bp, Homo Sapiens
taacagaaagaaaaaagttcctggacaccagacccacatatggtatttacaaatttggtgtgaaccctgcctctggttctgcccagagctgaagagtgaatctattacagagatcagagctgtcaggataattatcaagtgcagtaaaaaatagcattttgaaaaaaatatatacctttagtattgcctttctagaattaactataagcaagaaaaacttattttttaaagaagaaaagaatactttttcactcttacttataagagctggttgtagcagcactactaaagctagttggtatgctggaaagaaatctaaaaggaattctatgaatcaaaaagaaactctccagagattttctctaaaaatccaaacgaattctggccccttttggcctaaatccaactcaggagccccctctttggcacaagtcctttagctgagtcccacggtgcatgggatggcacagggtgatgctgtgtaaaggcctttctttgctcagacatgcaggagacagctgtggcttaatggctgcaagctcagttctggagctgggcagactcaggttcaagccctcctcgcccctcaagagttgtgtggctctgggcagtttccttggctgtagggggactaatattgccgatctcacagggctacggagaagatgaaacaggacaacccatgagcaattcccagcacagtgtgtggcatgcaggaagcgggagtatcactaaatggttcatagaaatatgaggcc

SEQ ID NO: 271136 - DNA, 377 bp, Homo Sapiens
acaaatgcaccaaagcccagtacttccccataaaaagggaaactgttaaggcaaaattttaagcatgccaagaactgcatcctgtaggccaaacgtagtgcgcttcaaatctctctatcctctgctctcctaagttcaggcaggatagatctacaggtctacaaggtttccagccttggcatcaccagcttctcttaacccagtcaaatctagattcacgaaggagctccaactggacccatgctggaaatgcttttcagccacgttgaacaaaacatgttttacatcatttctttgcaggaagttttgtccctggctttccaggacttccccccaagtggcaacaagggtcaaagaattaggaactgcaaaaatct

SEQ ID NO: 271137 - DNA, 471 bp, Homo Sapiens
  misc_feature (81)..(90): n is a, c, g, or t
  misc_feature (338)..(338): n is a, c, g, or t
  misc_feature (461)..(461): n is a, c, g, or t
taaagtttgggataattaaaaataacctaatatcttattgtgcctaattagatgggtttacaggtcatttccaacttggannnnnnnnnnaaattatactcaacagatgctaaagaacagatctctaaactgtcttgacaagccagttttctacattacaatttgattagagttatctgagcaaatagttcaaagatgccaccagaacacatggaatatgttcagtgatgtccagtgagtaacagacacaggctctgatgactacattttcccccatgctaccctcctgaatcatgatctaattctgccagccccagcacactccccatctacacctngctcccctggctcccaacaacaaagtggacatcttggggctgttgtagagcctcggtttaaaacactaatccactaaggggagattcagtaaggggcagcagaaggccactggtccccttaancttaaccgcc

SEQ ID NO: 271138 - DNA, 488 bp, Homo Sapiens
  misc_feature (26)..(26): n is a, c, g, or t
aaataggctcctggccccatgacccnttctccctgtccccagctcccatcccagttgtgggttaagaataggctagagcagacattgggtgtttccatgctgtaggctggtgggggaccatgtgcctctaggcagtgactaaggtgcccccacccctcaggaagaacacaggtgggctcctagcagctgatccccaatgcctggccttaaagccgagctcagttaccatagggacaggtccacctctactgggccctcatgcttgcctttcctgcccccaggcccagcccctttttactggggcagtttcgttattttgacttgatgccttttgaataactttcaatagaattgtctaaaattatcttactggttgttaggcctttggtgtctcagagaaggagtctaggtctttgatgtgtgatttaatcttttatttgtttataataaaaaatagactgatatgtaccctccgatgggcacatgaa

SEQ ID NO: 271139 - DNA, 392 bp, Homo Sapiens
tacacacagcattacagtgagtgagtaaaaagttgtcacttcctggcaggcctaggaacctcaagacactagataaccatagacaaagtagacaaagtctgatgtcggccttggtttggcttcctagtgatgagaggtttttaaaagtataatctgagattgtttgtcaaaatttccagcaaatcaaatttaaaaagaactgtgtggttattcttgctgtacttatatacaaataatcaggtgaagtttaatcgagacgaaacttattttcgcaaacaaattagtcttactctcgattatctttggtagaaatgggggtgattatagacagaaaaattatgttgcaaaagaaaaactatagtacaccctttagtagattgcagccctgttca

SEQ ID NO: 271140 - DNA, 478 bp, Homo Sapiens
  misc_feature (50)..(50): n is a, c, g, or t
tgggagaggaggctataaaaaaccttcctggaggacgtgggctcattccngattcacagaccaggtccagcccccttcacttccttactttggaacttactcccatctggaatcatagaaactccattagccagcttaaagtgagtcgtagaccctgttcctacagtttcaacaaaccctgatggtggcatttcagtttatcgtagaggtttcttttcccctacaagggtcattctctcttgcccaattttggctgagaagggaggaatatcatggccgttttggctgtatggtgttactgtataatgatatggggattggtgagtgaaaaataaaatgaaccctcacttgcttaggtaccagttttatgtaagaagaaactcacagcttttgcacattatttgagatttgcttcttctgtttaacatatttgtggtactttcctaaaaagttttgttatagacagctgtaaaaatta

SEQ ID NO: 271141 - DNA, 444 bp, Homo Sapiens
  misc_feature (135)..(135): n is a, c, g, or t
  misc_feature (188)..(188): n is a, c, g, or t
aagtagacgctgaggtgtgcagaggagctggtggattaaccagagaatgcccagggaagatgagtgctggggtcaagggttacttggatgaaacggtgccaggcccaggcgggcccttaataaaaccctctgccnaggtctgggagtcccaggccatctgctcaacggctctgtggtttgtcagaccntgcaagcaagccccctgctggggaagcctaggtgtccttgagctgaaccgcactgaagaactcttgtcctcactggctgatgcagcagaactcttgggaaatgtcttagtcctgcagaatcaggagtcaccagatgatgcagagttgagatcatcattgcaaagttctctgttcctgaggaactaaatttaaggaaaaaatgggattttgttttagagttggaaaaaaagcctgattaaagagtttctgcctgttc

SEQ ID NO: 271142 - DNA, 436 bp, Homo Sapiens
gatgttaatttaaaaatttccactacacttattatctattaaccaaagcttaaaattttgtattcttctgttagataagaccttttacccatttaatttgtctttaaggacagtcatttggcttctggaatgtttgaaacggattttaaaaaataagtagtgctatggttgtttctataattctaacctttgatagtaatcagaatgtattacatttcatttctgaatagcttttgaatttatgaaaaattattaacaatgaaaaattggtaattttattaagttatatgtgtttaaatattatattagcttatttctcttgcattaatagtactgctgtttttgttttgcttctttatatttatgtctagcttttatatgtaatttatcttagtgtttataaaatgtgatttgtaataaatgttgttaaaatgaa

SEQ ID NO: 271143 - DNA, 482 bp, Homo Sapiens
cacttagcatagtgcctggcttgtaataagaactcagtgaatgctattatacattattcttgctactgttttaataaaatcatgcaatcagatatataatgtatctcccagtccactcatagtgggagaccaaagatagttgcttaatattctatcacatgtctaaaaagtaactgtttctggaatatgtgtatgaagcattacagtttaggtctcaagtacaaaaacactgcttacaataaccttccatgatctaaaaaggactcgggttgttgacatcaaaggagtcagatgtaggacgcccagcaccagagcatgagtggatgtcagcatacggtatgcaaggtcagctagcttagtcacagacttcactttctggcagtcttctgcctattttttggctgcaaggcaagtgtttacttctccttctatgaacagatgatttccatagctctggggtttgaaaaggtcagcagtgatac

SEQ ID NO: 271144 - DNA, 508 bp, Homo Sapiens
gcctaaggcagagttataaactgcatgcctgagcatgtaaggcctgtggccctcacactcatacacagagcccctcagtaaagtataagaaactcatttggtacaggcatttaaggaattgtataaagtatggttctctgaccacaatggaatgaaattataaataacaaaaggaaatgttgggaattcacagataggtggaaattatacaatatacttctaaataaccaaagaatcaaagaagatacttcaaaggagagtagaaaatattttgagatgaatgaaaatgaaaacagcatatccaaacttatgagaggcagctatagcaatgcttacagggaaatttataactataaacatttatattatttaatagaaaataagaaatctcaaatcaataacctaaccttacattttaggaaagtagaaaaagaagagaaaactaaacctaaagcaagcagaataaaataaataacagagattggaggggaaataaatgagataatag

SEQ ID NO: 271145 - DNA, 405 bp, Homo Sapiens
  misc_feature (24)..(24): n is a, c, g, or t
  misc_feature (59)..(59): n is a, c, g, or t
  misc_feature (77)..(77): n is a, c, g, or t
  misc_feature (91)..(91): n is a, c, g, or t
  misc_feature (184)..(184): n is a, c, g, or t
gttaccccggtggcccctcacacnccataccccagagccccctcagtaaagtataaggnaacctcatttgggtaccnggcatttaaggganttggtataaagtatggttcctctgacccacaatgggaatgaaattataaataaccaaaagggaaatgttggggaattccacagatagggtggnaattatacaatatacatcctaaataacccaaagaatcaaagaagatacttcaaaggagagtagaaaatattttgagatgaatgaaaatgaaaacagcatatccaaacttatgagaggcagctatagcaatgcttacagggaaatttataactataaacatttatattatttaatagaaaataagaaatctcaaatcaataacctaaccttacattttagga

SEQ ID NO: 271146 - DNA, 540 bp, Homo Sapiens
ccgtctccttgagagaggcagacaggggaagtaagaataatggtttcagcagctctggcccttgaataaacagcaaggaagggttccatcgtcagggtccattatacataaagtgtgcacacctaacctactgtttatgtaaacaattgttataattcccaggaaaaaaagatggcctccagctcacttactctgtaacccgtatcttgatgattagttcctttgtctctactagaatttccaatccatcattaaccctcagtcaaaatgctgaaaatggtgacatcacttaatatcctaattctagtaaaacagggctagaaaataccttcataaaattaagtttaaataataaatctcaagtattagtgctcttaatatgccatctgtcttcttaaactgggagtacctttggatttccttaattcctcttgacccaccctttcgtaagtgagtacgaaatgggtgagaataaaactttggcatctatagcatctgattaaatctttactagtagttattggttggtgagatgcaggg

SEQ ID NO: 271147 - DNA, 313 bp, Homo Sapiens
aaactaaaactacagaatctatttttcttggtctcatactcagttttttatgtagtcacttagtaaataacctaatttgcttgttttctccacactaattttagggtgaattcctcatttcgcttttcagatcatggggtgagggggatggttgtgtgtgtgaggaactgaggaatcagatggaaaacaatgcctctgctcctttgagtataatcagtgatatttgaggttccagggttaaatgctgcatttttatttctgacgttcgtaccttaaaatatttgaagaaaataaactatttcattgttgtcaa

SEQ ID NO: 271148 - DNA, 901 bp, Homo Sapiens
  misc_feature (42)..(42): n is a, c, g, or t
  misc_feature (45)..(45): n is a, c, g, or t
gcagtacagcacctcctcccagagcaccttcgtggcgcacanagnggtcaccaggatgccccagatgtgcaaggccacgtcagctgccttacctcaaagccagagaagctcgacaccgtcaagtgaaattggagccacccccccaagcagcccccaccacatcctaacctggcagactgggagctacaatgatagctgtttcctggattcctccctctatccagaactagctgatgtccagtggtacgggcaggaaaaagccaagcccgggaccctcgtgtgagccagcccggcctaatctgaccgcctcaacgccattctgagatcacctcactgcctctcatttgccttacccagacgcaccgtcaccctgcaccagctttggccctcagcactttttttctcctgtctccgcattccctcccccttgaaaacctgactgaggagacattctggaaggttccggtcccactgtgtgtcccctggcgctcttgcccatagagagccagacaccaatcctcaatggcaccttggtggcttccctctgccatgacagcccctaggccaggaaccatcaggggggccagccggcatccaaattcctgcggataagtagcgttgggagagaacgggaaaggggacttgagttacagggtgacccagaaagacgattcagctgtgtccagcctgccacccatacgtaggccaaccaagcacttcatgaagaggaggcctcgtggcatattcagtttacacctgaaatattccttgatgggacagcttgtggggatggctatgggggaaggggaggttgagaaaggaagttctcgacaccagaaatgcatcggaggaccacaatcagttctatgctgccaaagattaaaaataaataaaaacataa

SEQ ID NO: 271149 - DNA, 757 bp, Homo Sapiens
  misc_feature (58)..(58): n is a, c, g, or t
  misc_feature (147)..(147): n is a, c, g, or t
  misc_feature (197)..(197): n is a, c, g, or t
  misc_feature (199)..(200): n is a, c, g, or t
  misc_feature (217)..(217): n is a, c, g, or t
cctgctgtggcgtgggtttggaaaggctcacaggaaagaacctgcaggatcaggggtnggaggggaggcccctgaggtgctctccagggaagaggggctggggtttaaatagcatgcttggaggaagattttccttcaatttttccnaagtccttgaattcaccagtagatgcttgtaaacaaaatgtaagtcgatntnntctctcaattatcctanggagtgacctttatatgtgtggaagattaatggtatatgctccttatgtcactgtttttgagtaaaatccatttcctttctctgtttcagcctatgacaaaattgatgtttacaggcctgctttttgcttataattgacaacatgtgcaaaaataccaaatttgtgtcctgtgcagtatgaagaattcagtgaatattcattaatgtattagcttgttttgctctctgttcatatatggctctattcttagaaatataatttgaatgtgatctttcaatagtctgaatattttacaaattatagctatgtcttgtgaaaataacctcaaaaagaaaaatacgactctgttgtcttacttgatatttcttgccctagtaatgtacttgacatttatgttcctaagcagtgtaagtaccagtagaatttctctgtcaaactcaatgatcatttagtacttttgtcttctcccatgtgcttgaaggaaaaataaagtgtcactaccgtatttcttgttttcatcaaaaaataaaaataattta

SEQ ID NO: 271150 - DNA, 481 bp, Homo Sapiens
  misc_feature (68)..(68): n is a, c, g, or t
  misc_feature (84)..(84): n is a, c, g, or t
gatggaccaaaatagggtataaattaaggtgccatcccataccaaggaggtcccctgtggctataccngaatggtaaaggagcntctttagttactccaaatggaatgatcactggaataaattaaagataaaagtcccacctcaaagcacataaagtattctaacaatttgtgtagaaaggtaggagaggggaggatgtacatacagatatttgtaaatacatacaatggaaagataaaacaagatactgactacaggaatgtctagttacttgaactcagaaatcaaaaattcagatagacatttcagaaatattttagctattggttgcttctgggggtgtgggaaactagggtcagggatggggagatagttttcagtatatacccttgtaagtctttggttaactttgaaaagctctttattgtggtgtcataaatacaccttttaaatttgaattattagatgtattactattaa

SEQ ID NO: 271151 - DNA, 485 bp, Homo Sapiens
  misc_feature (305)..(313): n is a, c, g, or t
tggtgtgaaggtgaaattggtacacccctatttaccaaaatttaacatatgcattagcctttgccccacagcctgtctcatttccgaggcatatacccctaaggaaaataagggattcataaggatactatttgccaccttttttaaaaataatgcttctagaaacaagtgtcccatcactaggacactagttaagaaaattatgattggtacatgcaatggaatactcttgacccattaaaaactgatggaaagttctttatttgcattaaagtatgtccaaaaaatatagtttcccctcaggnnnnnnnnngcagaatgtagtttagcaagtacagtgctgtcctaatgtgaatatatgtgtgtacatatgttaatataagtgtacaaaaatatctggaagaaggtcagtcaaaatacaagtgttttacattttgtcttttggactttctatctggttggtgttttttgtaatttattatttt

SEQ ID NO: 271152 - DNA, 514 bp, Homo Sapiens
ggcatgcacagctcaggaatacaggttattggggcttgaagctgagtcatctgcccctcacctgacttcacccacccctaactgccatgacaacgggagccggtcaccccagagtcacctggatacttcacaactttactggtggcccaggacttgcagggctggaagatagtgcaggcttattggaaacgtggggcagaggcggctgtgacctcacagggtacttctctgggccttcacactgtactccttcctgccaactttactctcggcacctactgtcccctgtgagatgctattaaagtaagaagactaattttccaaatacttatggaaacacaactcatgacatgtttttgatttttcatgaacatttcaaaaagtgaaaaaagcactagtaaaacaaaacccttttagttctgctcccccaagaaataaccactgttaacactgtggtatatttccttcaagtctttgtgtgtgtgtgtctaaaatacagagttgtaaatataaa

SEQ ID NO: 271153 - DNA, 654 bp, Homo Sapiens
  misc_feature (150)..(150): n is a, c, g, or t
ttaactgcaaaggaagaatgacgcttggagcaggcaggtgtgagggggcacagagaagctgcagaatatttgcatgttgtcttgctaaagtttctaggcattaaacaacccaagcaacagcacaaaggaatgaaattggacatctcatcngagcaatcgtgagttgtctcttggggttcagcatggggagatgacagggagttgcagaaaatgaggctgaagagtaaagttggaaacagattcagtaggcagttgggacttaccacaagttttttcagtaggaaagggacatcaccaagtcattctttaggaagagcactctggggcaacttcaagggtactcttgagaggaaatccgatagcagcccatgagaccaactagacagctacttgtcatggtccaggcaagcaagagagagtacggcctgaactagggcaacaaaaatagaagtgactacatgagagggtattctctagacatttcaaagccagaatcaacaggacttagcagccattgcttgtaggagacagaaaaataagtccaagttgacttgggtgtgtggaggatgtcacaatgatgttaacacaaggataatatcatgaggcttgttgcgttagaaacatcaatagaacatttctgaaatgtccatcagg

SEQ ID NO: 271154 - DNA, 435 bp, Homo Sapiens
  misc_feature (23)..(23): n is a, c, g, or t
  misc_feature (189)..(189): n is a, c, g, or t
  misc_feature (211)..(211): n is a, c, g, or t
  misc_feature (416)..(416): n is a, c, g, or t
aaaaaagcatatatatatataanataaaatttaggccatgggaactggcattttacttggtataggaatttaatgagaaccaaatcacaaaaataccagatctccttttgagatccgtgggacaatcaggcctttggacaatcaccgcttccagtgcccgctgtgcgtttgaaggttagagacctaccngtttacacgctagagccgagangaccgttcaagtttcctaaaagatgctggttgggcctttttcctaaggtaatggtttaagttttgtgaatttggatgaataattggaagttcagagtaaccccggggctcccaagggaaaaaacagcatcatggaaaggcaaaaaaggtattttggaaaccgtaatttgtttccaatttttccacggccccggttctcacatggncccccctttaggctttaat

SEQ ID NO: 271155 - DNA, 682 bp, Homo Sapiens
  misc_feature (98)..(98): n is a, c, g, or t
  misc_feature (224)..(233): n is a, c, g, or t
  misc_feature (287)..(320): n is a, c, g, or t
  misc_feature (465)..(480): n is a, c, g, or t
  misc_feature (482)..(624): n is a, c, g, or t
ttaagagacagagcctcgctatatcgcacaggctagtgacacgatcatagctaagtatcctcaaactcaagtatttctcctgcctcatactccggagnttcgcggaccaccggcacatcccactgtgcctggcttccatttctaagtgattactggtactatgggggagaaaaagccattgattctgatatactagtcttttgaccagccatatcacacctaannnnnnnnnnaattttagtggtatatgaggttttctaagaatacaatcatatcatctgcaaggnnnnnnnnnnnnnnnnnnnnnnnnnnnnnnnnnncatcttactctaatagccagaacctctaaaacaataacagaataatagagatgattgtggattattcttggcttgttgctgatgtcagtgttcatcattttatcagttaatggtaatgtccgctggatagttctttacttgaggnnnnnnnnnnnnnnnncnnnnnnnnnnnnnnnnnnnnnnnnnnnnnnnnnnnnnnnnnnnnnnnnnnnnnnnnnnnnnnnnnnnnnnnnnnnnnnnnnnnnnnnnnnnnnnnnnnnnnnnnnnnnnnnnnnnnnnnnnnnnnnnnnnnnnnnnnnnnnnncttatcttggatttccagactccataaccaagagaagtaaatttctgttgtttaagcc

SEQ ID NO: 271156 - DNA, 500 bp, Homo Sapiens
ggatgactgaaacacatggtgtaggtatgaaagtgacaccctccattctctgttttgctgtgcacactcatgtcttgaattgaactggaatggatttgagacgtttctgatggtgtaatgtaagagttttggcaaagtcacttaatttccacatgcagtcatgcctagagatgtgctcattgggcttatgagaattagtctttataagacatttcatttaatatcctgacatgagcttacgaggtatcttaacatgctgacaaatttttattttgcttgccttgctaatggtgagcactacaagaggaaaaccagtatgtggtcatcgtcatagtatatagacaggatgcattacagtaaattctcctccctaaggaattttgctaataagtagcagttatattcttgtgcatcatattctctaaaatgcttttgttgaattttttggttttattgttcattgtttatgggttttcaataaagactgatttacattgcaa

SEQ ID NO: 271157 - DNA, 413 bp, Homo Sapiens
  misc_feature (26)..(26): n is a, c, g, or t
  misc_feature (259)..(259): n is a, c, g, or t
  misc_feature (372)..(372): n is a, c, g, or t
atgggacacaacgtcaatcagggacntcctgaaggttcgtgttaaattggccttaagactctccctgtccccaagacccagggacgcatgtgtttcctttttcttcatttctattaaagatgggtctcattctgttggccaggcatgagagctggtgacaggatcagccctcactgaagcttcaatctcctgggttcaagggatcctcccacctcagcctccaaagttgctaggaccatagccaggtgccaccgcacgngcaaaaatttttgtgttcctagtagagatgggcttttcaccatgttgcccgagctggtcttgaattccaggggcttcaagcgattccagccgtatttggccttcccaaggtgntggggatttacagccttgagccaccttgaccaacgtgtttt

SEQ ID NO: 271158 - DNA, 516 bp, Homo Sapiens
  misc_feature (403)..(403): n is a, c, g, or t
gctgtcactaaaacactgatgtaggcatccagtctagttctatatttaatctgctttggtattttaactttcacaaatgtttacatagagaatacctgtttacataattatattgaacaaaacagcaaaaaatctagaggacagactgggatgattagacctcatacttaacccaaagtcagccatacttaacccaggtgtcacaataactctacaaagctctcttactaacttgaacagagtttagtatccagagcattattgaaatttgcattaaataggtgtctccattcaatcaggtagaaatgaaaaacaggaactttttttattgtacatttaccagctatgctcactactataaactattctgcaaggtgtatgtacaaggggctagctagacctngcccaccactctggctgggaaatggggggaagggtactgactgctcccattttagtatgaccatactgcaaacagcttttcatttatctcattcagtcttcacaaaaggggag

SEQ ID NO: 271159 - DNA, 510 bp, Homo Sapiens
caggcatattagctttaatgtaggtggcgatgagtttttaggccaaggaaggaataatgttttatgtaccaaagccttttgtccccattttccgtcatacgaatagtattccctgttgctaagccgatgatacattacccttttcccataggtgtgagtggcggtctgaatggagaagttcaatagttctgattgcagatcctatgcaggagagataataaggaaaataatctttgtctcctggattaagctgaggctggcaaagagtgaaatgtcccaagccctctaacaacaaacgacatactttgtgttgtcctggatgctggtctggttgccaaatatgtggaactggccccatatgcgtgtactgttgtccatttcatgagagtaggctcgaggacaccatgggcaaggatctgatggttgccagcctaagcgttttagacttttgacccagagatttattgttttgggtgtggaaaaaattttccagtgaagggtctcaagata

SEQ ID NO: 271160 - DNA, 391 bp, Homo Sapiens
gagccaatcttctggatttttccatggctcctataaatcctttttactggaaaatactatgtttatgaatggtattaaattttagtctctggaacatccaaaaccaagcaaagggatgtgactattttgaatgaatcagaatgtcaacttgtatgtacactatatctacacttactcattatttaaaaagaataatgaaaaatctagatcaattcttcaatttgattgaactgttcagccttttcaagatttctttatttacaaatgattacatttaaatgaatgtacattcttctcactgactttggtgattttgaaacctagaatgatgtgtttctatctgtaatatctttccatttgaaaaaaatctcaaaacacagattaaaaccga

SEQ ID NO: 271161 - DNA, 553 bp, Homo Sapiens
  misc_feature (28)..(28): n is a, c, g, or t
  misc_feature (47)..(47): n is a, c, g, or t
  misc_feature (59)..(59): n is a, c, g, or t
  misc_feature (68)..(68): n is a, c, g, or t
  misc_feature (75)..(75): n is a, c, g, or t
  misc_feature (90)..(90): n is a, c, g, or t
  misc_feature (102)..(102): n is a, c, g, or t
  misc_feature (127)..(127): n is a, c, g, or t
  misc_feature (134)..(134): n is a, c, g, or t
  misc_feature (211)..(211): n is a, c, g, or t
taccaggccccctaagtgggtccgaatnttcccccattaaaatttgngttcccttgggnctgggcatnggccttnataaggggcttaccnggactggctccnggtgggtatgtccggggcttcattnggttcangcttaggtataatgcctgtgccctcacggacccattttaaatttggcttaacaccccacccatacttaaggggcaantaaattatatttcgaaaagattttaaaataatctcaatataaaaaccaacagtgggaactgagtctggaataaatgtgtgcagaatccctaattcttttctgagctccactcagtgaggatatgcaccctctactgtccagcctgtggtttgcagtaagctcactcttctgttcagaatgaccacaggagggcctttacctaggaatagcaggaaaagctaagtaagtactcaaacttccctcccagtaagcatgaattgcttcagatgtaaagcttacatgtgatgagtaatactataatatcatacattaatatatcctaataaactttaattttcaaac

SEQ ID NO: 271162 - DNA, 493 bp, Homo Sapiens
  misc_feature (27)..(27): n is a, c, g, or t
  misc_feature (45)..(45): n is a, c, g, or t
  misc_feature (141)..(141): n is a, c, g, or t
aaaaattgcctgcaagaaaaatccccnaaaagattgctgtaagcncctcaacagggaaagtgggtaaaagatcaagcctaacccccgggttgggggtgctttcctgccccaagtggggccttggccataaagtagattaanccctgctcttttaagaaaaggcaaccttattcagggcaagtctgggaaagggggttcctcagaaaacctcagtttcctttaatcccttcttttcctccccaacctactgttacctggttatagaggtctttggacctctaaagacccaatgtttggccactaactggactaatatgtatctttctgtgatttcatcatagaggtctgttttgtgagggtttggggtgcagaaaactttgattaaatcttaatgggaggctgggtgacctggattatctacagtgagcagacttaaatggaacagaagtttatgtgtccaaatgatggaatcattaaacctgagtgacttgaa

SEQ ID NO: 271163 - DNA, 511 bp, Homo Sapiens
acttgagtaggtaaaggaggcagccaacgctaccacaggtgtgggaaaaaggtgtcattgaagcctatggactggacagttgggtaggaaccagaaggccaataggaaggaggacaaaagtgcccaactgaagggtaagcatggcagtgagtatggtatgcctagaataaagatggttgggattagaattgggtgacagtgattagtagtttaattcagaagtatctcttcccaactcaaaagtctcactttgggctgaaagtacagaggaagaaggtagacttttaagaagtctgaataagcccccaacttctggagtccctttctcaatccctgttggcgagtgggaaatattagaaattactctgggcattaaaaatagctcagtttaacctcgattgtggagttaaaaaaataacaaagattgcattggccaaatctcgacaatttgagcattcaaaagaataacaacaataagttacaacatatttaatataaagaagaatccacg

SEQ ID NO: 271164 - DNA, 497 bp, Homo Sapiens
aacatcgcatggcagatgggtgttggaataattactttctccacaatctatcattttaatagtttataatagtgcagttcatggaaacatgccaagtccaacaaaagcacaacagattagattacagtcagattgagaagactgggtgtgcgttggcagatagacgtgctggacatgctccacacgcgacctgcagacgggacatgactgggaaagaaaagccaacagtctctgttagcatgcaagcctcggtggggggcctgtgtctctgtgcacacccctggtctctagtgcatttaattttctaaatcaattgtgatcacagtgatttctagctttcaattggtagagatctttgccgtctcacaggttgaaagtttatactttacaagggcttaaaaataaatactatgacatagtataaactgaaggaaattaattacatttttagtgaaacgctaaagaaggtacattgaataaagcaattactgaagacg

SEQ ID NO: 271165 - DNA, 372 bp, Homo Sapiens
aagtctctcagcagagaaggttctttaaaagcaactttgggtccccatgagtccaaggatgatgcagctgccctgtgactacaaggaggaagagatggaattagtagaggcaatgaaccacatgtaaattattttattgtttcatgtctgcttctagatctaaaggacactagcattgccccagatctgggagcaagctaccaacaggggagactctttcctgtatggacagctgctgtggaaatactgcctgcttctcccacctcctcagagccacaggaaagaggaggtgacagagagagagcaaggaaagtgatgaggtggattgatactttctactttgcattaaaattattttctagcctgcaaaaa

SEQ ID NO: 271166 - DNA, 466 bp, Homo Sapiens
gttatgttgcagcaattacactgtaaaagtgctgcccaagattgattgctctgatctgtagttcaattgtaaattagaatacacatccccccagggacacacggcccctatttgtgattaagaaaaaagccccataatagactaatagctaaagttctctctcttttactttcaggcaattagcttgatgaaatggcctctttttgtgtaccctggaagtgtaaaccgatatcataatgaagtatatgatggtttattccattattttcaccttgctggatatgcaggaatgcataagtaatggctgctttgtctagtacgtttactgattcacaagtaaactatttcttaaagatgcagtgtacgctttctgaggcttgagttaagcaactcctaactgtggattaaccttcacgcaaatgtctactgcaggggaggaaaacgaatcccctaggttggggaagag

SEQ ID NO: 271167 - DNA, 326 bp, Homo Sapiens
agtcaccaaaaatacattaacttaaaaactaataattggatctagataagactaaaaactgtaaagcagggatttttctttcttcttcatttattgggtagaagtgtttttctaaatagtaagcaaattataccacttttaaagctatttatactaacatgttctttgttgagaattattagagaaatgagttgtctcacaaaattaagttctttcaggataaccaaaacttttttgtttaagccaaaacatttttaggcagaactctcaaaatattgtattatagtattagatattctttaccttaaatggaaggtacaataagg

SEQ ID NO: 271168 - DNA, 442 bp, Homo Sapiens
ctggtggccctggattctggtccccaaggcaattctgaaagcccagtgtggtaaactagagagagcagcaaaaacaccagtcttgcctgagtctttctccagcatttccagtacatctatcagaatcatcaagtcttggccgggaacacagacagggtgtctacccaagaagcctcacctatccccaacttagaatttgctacttattttaaagacttgttcagtgactgtaaactctatgaaaccagaaaccgaatctgcctcttgctgggatctctaaaagtgtctgataagcatcttaaagtcactcaattcctgaactaatcaatatatatgtttaacccattactcaaatacccaaatcccattccaagttttgtgacccaaaagagaaataaatgctcacaagtgctgtagaattaaacttcagaagttctaacct

SEQ ID NO: 271169 - DNA, 217 bp, Homo Sapiens
gctaaattatgaaatctggacagtttcctgggtggttgaagtcatctctgaataagtgattagcatctgactaattatattttttaaattataaactattttgccagatttagccaaaacaaaccaaaacacagtatgggcacttgaatttcgactatctgataaacaatgaggtttaaatatgcccaaatattgcatggagatacccatactaaag

SEQ ID NO: 271170 - DNA, 416 bp, Homo Sapiens
aggctggaggaaaccgatttctctgcaccctaatcttgccctggctcctcctgagtggggtgaggaatctggtcgctctccaaggctacagcgaccggagtccttcaggggagactgtgcagtcagcagtacaacctgttggagaaagatggctgaatcgaggtgtctttcccctgtcaactttcactcggtcaatccaatgttgagaaagggctttttttgtttgtttgttaattagtcgcctattctcacagtcatcagtttctgcttggtgactagtatttcgagcacacaaatcagaagcgaccctgtaatttgttaagcaaagagcagattttatgtgatttttctacagcaagaaacgataattaaaaaggtttggtaaaacaggaaaatacaatttaactgctgaagtc

SEQ ID NO: 271171 - DNA, 246 bp, Homo Sapiens
  misc_feature (233)..(233): n is a, c, g, or t
tcatgggggaataggtgctaccacttcactatttatggatgcctttgtaagaatattatctgtactagccttatgatattctaattactcatatgtatttaaagatttaccatcctattttctattctaagaattttcttacttcgaaatccatcaaattctattttatagtgatagaataaactgggaagagtcttttgtgccctcatgaacaggttttcatcaaccccagncctacaaaataag

SEQ ID NO: 271172 - DNA, 573 bp, Homo Sapiens
  misc_feature (48)..(48): n is a, c, g, or t
  misc_feature (93)..(93): n is a, c, g, or t
cttccccttccccgggtcccagagggcgatttggctgacagctgccangaaatgcttcactcaacggtcctcatgtgcccagagatgtttatngaactgttggaattgcagccatccccctgcccccttcccaggctgaagatctgttctttttaagttgattcgggagtggcattcttttatacccaaagactgtagtgcatcttgaagagctcaaagcacatgaccgcacaaatgcttacagggtttcctcccgagtaatccaatctcactccccttgtaagggaattctggggcagctatgggttgagtatgcagtttgcatccgtgtttctacctttagtaccttgccactcttttaaaacgctgctgtcatttcccatttcttagtactaatgattctttgattctccctctattatgtcttaattcactttccttcctaaatttgttatttgcatatcaaattctgtaaatgttttgtaaacatattacctcacttggtaatacaatactgatagtctttaaaagatttttttattgttatcaataataaatgtgaactatttaaag

SEQ ID NO: 271173 - DNA, 449 bp, Homo Sapiens
  misc_feature (260)..(260): n is a, c, g, or t
  misc_feature (273)..(273): n is a, c, g, or t
  misc_feature (281)..(281): n is a, c, g, or t
  misc_feature (289)..(289): n is a, c, g, or t
atgagccactacccccggctctgtggttggtttggtttaatagctgaaaccggtatcctggtgatgctactatgctgcttagttgtcctgacacattattttttcagtgttaatggtatgtcatatttttactgttaagtaccttaatgtatgaataaatgtaagaaaacaattgccctattgttagcatgtagattaagagtcaggaatgatgactcttgttgacatgggtggctgagatagtgacacctttgctttcngatgggtccgggntccccaanctttattncaggcacaaaattatcaaaaatacggtataaaattaccttaaggctatgtatataagggatgtgtgtatgtgtgtatacacacaaaaataaattttgtgtttccacttggatcccctccctaagataactcattgtgtacatgcaaatattagaaaatgc

SEQ ID NO: 271174 - DNA, 809 bp, Homo Sapiens
  misc_feature (497)..(525): n is a, c, g, or t
  misc_feature (620)..(638): n is a, c, g, or t
ctaagtgaaatgttccaacttctaaaacattgtgtgagccaaacaaaacatgcctccagggcgcacctgggccacaggtgccagtgcatgtgtgatctctgctctgtgctcccatttactactgcagctcagcctcgctgctttcaaggggaaaagggtctttatccttaaccctagaagctggcaggagtttggtgggatgattatgtgagagcgaggggttggtttcactgcagacctctgtaagggagctttgtggtgagtcctggaacatctggtttgagaggatgatttgtgtatttttcctcttgcctataagttaaagtctggcaaaaccccatttgctttagactggatacccccttggaacacacgcggtgaaacccagtgtccacagtgtctctccatggtcagggaccactttggattttatagcagcttagtgtggctttagtgctgagatgctgtaaaagagcatttccagttcttctaaaatnnnnnnnnnnnnnnnnnnnnnnnnnnnnnttttattgttctgcacaaacaccatcataatatttaacagaaatgagaaaaggattcagccacaaatgttactcatcagctaaaaagttcttacnnnnnnnnnnnnnnnnnnnggatttctctccaagtcgagtatgagctgaggactgttttacgtaatggcagttctaagcagatccatttgcagactgccttattttcctttgctttatatcatgtgtgtttttccacgtggccaaaaaaaatcctaacaatgccgagcacttcctaatatcttgttaaaa

SEQ ID NO: 271175 - DNA, 269 bp, Homo Sapiens
gtgaagatagcaagcgaggatatgagaacaaaagttacccatgacattcagtggaaagttgtgtattagtgcccaacaggtgccaggcaagcgttcttcaggcagcacagcgcgaccaaagtgctgacagtggcaacgacacaaaatgtagccttggcaagtcagtctaacaattactttgcatcattctgattatgagccacaagcatgcaatcaacagcatagagacagtcttaaatgatctccatcagcattttacttttagttat

SEQ ID NO: 271176 - DNA, 392 bp, Homo Sapiens
  misc_feature (23)..(23): n is a, c, g, or t
  misc_feature (82)..(82): n is a, c, g, or t
  misc_feature (90)..(90): n is a, c, g, or t
gttggatgaattctatttttaancctaatttaaattgggaagtaaccatgccattagtatattagctaaatctcatttattnccggtggnatcgaagttggacatattccttgaaaatattttgaaaattattttaatgattaagaatcaattaaaaagagattttactttatttgctaaagaatgactttcaatagtttagtctcaaaattgttacacatgattaccagtgtgaaatatatgagcaaagataaaaataatacctccctgccaaaaacagctcctgttagaaaatattttattaactaatcaaataatcttctggtaaatacagagagatgtttaaagattgcaatcgaattacaaggacacaataaaactaaaggaaatgc

SEQ ID NO: 271177 - DNA, 422 bp, Homo Sapiens
  misc_feature (146)..(146): n is a, c, g, or t
  misc_feature (293)..(293): n is a, c, g, or t
  misc_feature (383)..(383): n is a, c, g, or t
ctcgattataaaggtaatactcatgaactgtagaatatataatgaaattataagagaccaaaaaagtcacctgtgaattcaccagatactaataacaatttgatgtgtttcctatcttttcttccaacataatttaagagttgatngatactgtatcatgctattttcaaatgcaacagaacaccaagctaactagtgtatttttaaaaaaatgttacaactgtctgcctaattttgctgtttcaaaaacacaatcttttctcatcatttcgggctcagaaaatattactctntcttctagtagcttaacatagagaatacaatagggaaatttatccacatacctgccatacattgataaactttgtggtatggacttatgnttattcatggacttatgctatttaacgttaatagaaatc

SEQ ID NO: 271178 - DNA, 338 bp, Homo Sapiens
  misc_feature (44)..(44): n is a, c, g, or t
  misc_feature (58)..(58): n is a, c, g, or t
  misc_feature (107)..(107): n is a, c, g, or t
  misc_feature (209)..(209): n is a, c, g, or t
caagaccttgcagcactgaatgtgggctgtgggcaatgggtcanacgggtgccctcangtctcctacccccacccccacgggttgcactttatttattcggttcttnctttggtgactgggtgagcctggactgtggtcccaaggatgtgtgcagagcttcaccctacccttcttacacacctccccacccctgtcagtctgctccccnatcccccagcctggggccagaacagcctaccccaggacaggagtccctctagttgtctccctaccaccctatacacactgacagagacagcaataccccaccccccatattaaataaatgtcttcaccg

SEQ ID NO: 271179 - DNA, 378 bp, Homo Sapiens
gatgagattgggagaaccaatgcccagattgattcattttgtttttaattgtcgtaaagaccattgaggggtgaggagaatgttgtttgaatttgacattttgaactgggaaacagcttggaaatgtaggcacaattccaggtaaataaactaaatatacttatgtgtgtatgtatatgtaagtctaattgcttaaaggtatacctctaagattccaaattgattgatgctagaaggcagctgtttgaggaccagaggcatggcttatatgcaaaatgatatggaaaaaaaataattggatcacagaaagacagtattatttaatcagaatttgaaatctggcagctctcctaggagaataaaatactattggattgc

SEQ ID NO: 271180 - DNA, 607 bp, Homo Sapiens
  misc_feature (573)..(573): n is a, c, g, or t
ttaaaggcaatttaaataaatgaatgagataaattaaaaacaagcataagacaggcagaaactagtaagcagaaataatctcttcaaacacacacacctctagttttagtcttgacatacttagtgtctttccatagagccacctcagatttgcaaagccctcctgcacattctgcactgttctctctggccttcaggtacatttcatgttcatgcctgctcaggcagacttgtttgcacacagagcaatgttaaggcactgctgttttggaatttggctttcattaatgttctaaggcagatatctacttggagagaatgagagaagccagacaagtcagaggctaaatttcaagctggaagtcagagctttacctctctcaaaaagaagtcaattttactgtgatgcctcggcaaacccttaaataagaggagagctgaaccctctgtttgtaacacctacctctgaggaacaagcactactgtctgggatttcattcctctatatcaaccctaactcttggtgacttattaatccactagtgtttaaaggatactcctaggataccgttnctattggctcttggttaattctactttatccttc

SEQ ID NO: 271181 - DNA, 505 bp, Homo Sapiens
  misc_feature (56)..(56): n is a, c, g, or t
  misc_feature (436)..(436): n is a, c, g, or t
  misc_feature (452)..(452): n is a, c, g, or t
  misc_feature (483)..(483): n is a, c, g, or t
  misc_feature (491)..(491): n is a, c, g, or t
ccgcaggccttcggtgcctgggccagtttgttacccctgccagctgaatcttctcnttccagcgaggaaaccatgtccgacctccggtaaatggaaagcaaaggggaagacttggaatagaccagtattccattttgtagcatattttcataactctgcgtaattggttatttgggggtattgcctgtacagaattattacttagccatgaatataaacttgtcctctttcgttatctactataagtgttctaattatgtgctgctgtgatctttgttttgaattcctatttccttccatttttaggtcccaatattgaagcccatgggatcttatgggtaggaagcgagtccacgggcgaatttttgcaaatgctcacacatatcgatattaaattccattttcagtaaatagtgatcatggaaacatatctttnctggcaggatggaccnggaggaattaatttatggggcacttaggaantcacaggntaggaggcttttaa

SEQ ID NO: 271182 - DNA, 323 bp, Homo Sapiens
cggtagctcatgcctgtaatctttaaagagacaaaaatattcttcccaaaaatggttgtcgtaagtgttcttgtatataatccttcttccagtgatcaaatttgagctgaaaaaattgttggtaatatttaatttgctgaggcaaaacaaatcattcatggtttgtcaatttgtatttattttacaaagaacagtaaatgttccatctggcagtactaaaatgcttatttaccaggttactcaaaggttattctacctaaactgagagcaagctggccatataaataaatggtgaaaaatacaacaatgttacctagaaacct

SEQ ID NO: 271183 - DNA, 495 bp, Homo Sapiens
  misc_feature (24)..(24): n is a, c, g, or t
  misc_feature (72)..(72): n is a, c, g, or t
caaatcctcaaaacccaatggcancctggctgtccatggccttcagtaccttcagcaatcccacgatatggnatttaccggcttgcagcataatgaatttttgggacaaaacttctgccccaggactcaatgcaacaggaaacaatccttgtaactatgcaacatgtactggcgaagaatatttggtaaagcagggcatcgatctctcaccctggggcttgtggaagaatcacgtggccttggcttgtatgattgttattttcctcacaattgcctacctgaaattgttatttcttaaaaaatattcttaaatttccccttaattcagtatgatttatcctcacataaaaaagaagcactttgattgaagtattcaatcaagtttttttgttgttttctgttcccttgccatcacactgttgcacagcagcaattgttttaaagagatacatttttagaaatcacaacaaactgaattaaacatgaaagaacccg

SEQ ID NO: 271184 - DNA, 520 bp, Homo Sapiens
  misc_feature (69)..(121): n is a, c, g, or t
  misc_feature (125)..(125): n is a, c, g, or t
  misc_feature (243)..(243): n is a, c, g, or t
aacctgtcagcagaggagaacctatgaaagctgccccacccttctcccatacacagagaggagcctatnnnnnnnnnnnnnnnnnnnnnnnnnnnnnnnnnnnnnnnnnnnnnnnnnnnnncccncctgaggaggggcccctccctccctcctgacctgccctcccaaccgtaaaaatgtaaatataaatttggttgagatcctggagggggggagggagctattagagaaggatgaggcagncccatgtacagttaaaattataaaatggggtagggaatactggagatatttgtacagaagaaaaggatatttatatattttcttaaaacagcagatttgctgcttgtgccataaaagtttgtataaaaaaaatttgtactaaaagttttatttttgcaaactaaatacacaaagcatgccttaaacccagtgaagcaactgagtacaaaggaaacaggaataataaaggcatcactgaccaggaatatctgggctttattgataccaaaaataaaaa

SEQ ID NO: 271185 - DNA, 125 bp, Homo Sapiens
ataccacttattttttaatcgagtatacatcaaagcaaagacaatgcaaatggtgctcagagggacttgtagttgttttcactatcaatctctttggctccagaggtgttaaatactgtccagtt

SEQ ID NO: 271186 - DNA, 396 bp, Homo Sapiens
  misc_feature (124)..(156): n is a, c, g, or t
gaaaactgaactctttagagtaactagctcagtattggccagctggtaaatggcagtgttgggattaaaatccagttcttatctactctccctttattcagaagcatttattggatgttgatcnnnnnnnnnnnnnnnnnnnnnnnnnnnnnnnnntactgtgtatattttcctcagtctacccttctgctctagattgtctggactcaggagattgtggcagttactggatagttatttttaagataatgattgcttttctctgtttatataagtcatgtgtacttattgtagaaagtttgtaagatgcaaaaagtataaaaattaaagttatgcactactaacatttcaatatattttctcccagattttcaataaagactttcaggcagtgaa

SEQ ID NO: 271187 - DNA, 655 bp, Homo Sapiens
  misc_feature (26)..(27): n is a, c, g, or t
  misc_feature (170)..(170): n is a, c, g, or t
gcacacccgaggctcccacctgcggnngctcgggggacctcacgtcccagccaggatccccctggaagaaaaagggcgtccccacactctaggtgataggacttacgcatccccaccttttggggtaaggggagtgctgccctgccataatccccaagcccagcccgggnctgtctgggattccccacttgtgcctggggtccctctggatcttctttgtcatgtacagactccctgggatcctcatgttttgggtgacaggacctatggaccactatactcggggaggcagggtagcaagttcttccagaatcccaagagcttctctgggaattttcttgtgaaatctgattccccagtgaggcctgggacgtttttaaaatcgctgtgtgtctgtaaaccctgaatctcatctggggtgggggcccctgctggcaaccctgagccctgtccaaggttccctcttgtcagatctgagatttcctagttatgtctggggcctctgggagctgttatcatctcagatctcttcgcccatctatggctgtgttgtcacatctgtcccctcatttttgagatcccccaattctctggaactattctgctgcccctttttatgtgtctggagttccccaatcacatctagggctcctcc

SEQ ID NO: 271188 - DNA, 500 bp, Homo Sapiens
  misc_feature (133)..(203): n is a, c, g, or t
ctagcaactgctgtactgagcatccatgaataaagacaccgtcagcagctgtgactatgctagccaatctgacttaaaacatctgacagggaaccagcagcccccagtacaatgctgtcagtgccaccgcagnnnnnnnnnnnnnnnnnnnnnnnnnnnnnnnnnnnnnnnnnnnnnnnnnnnnnnnnnnnnnnnnnnnnnnntgggagatttaaaagcttgagagctagtgatttagggaaaaaagaaaaggcaactgtcaaaatgaggaactgccttgtatcactaaacaaaaactaacaactatgtatcatactgttgctaaactcaaccttaaagcatcgagaaaccttctacacttattgacagtttataaacaatagtttgtttacctatactacaaaggatccttaaaaaacaggtaaatattgtattgatccattttctatgcacacgccaatgtcaatcatttaatcaataacccaatccccaatattttc

SEQ ID NO: 271189 - DNA, 373 bp, Homo Sapiens
  misc_feature (253)..(253): n is a, c, g, or t
  misc_feature (322)..(322): n is a, c, g, or t
  misc_feature (356)..(356): n is a, c, g, or t
gacagaagtggtgtctactatgaaccatcctgtactcagaatgtgaatcatggtgtacttgtggttggctatggtgatcttaatgggaaagaatactggcttgtgaaaaacagctggggccacaactttggtgaagaaggatatattcggatggcaagaaataaaggaaatcattgtggggattgctagctttccctcttacccagaaatctagaggatctcccctttttataacaaatcaagaaatatgaangcactttctcttaacttaattttttcctggctggaatccaggaagaaataattgtggcatgattaatgntgtatttactgtaccaattagaaaatatagtttngaggccgggcacggtgg

SEQ ID NO: 271190 - DNA, 204 bp, Homo Sapiens
ccccccatttaaaaggatagtacctactccctctaaccacctcaccccattcttgaatgacgattttcatcttcggaaagaacaaggctgtgatgtagtgactattgtctgtgtctcctgtgtgtgtctgttcttgtcacaaatgtatttggggacgttggatgcattcattttctgtaataaagtttcttaatcactcttccc

SEQ ID NO: 271191 - DNA, 598 bp, Homo Sapiens
cgagacactgtgctgggtgccccagacacaagacagaaactcgggtcgctctgtgtgcctccacactggccttccctgctgcgtggacgaggctctgtctcctaggctttaagcccatgcatcaggtggaagacaatttccagcagcctctgcccgcttgtttttccccctctccttttcctgccgccttggtcctttttgtcttttgtgcagggcccgtctctcgcagcgcccgtctgtgctccgcagcgtctaggaaaggattagtgtgagcagagcatgcaggctttggtgaacagagccgagcttggtttcaacatctaattcaatttgttctgccgagattgaaatatgaaatggttgccagtcaaacgttcaaaggacggggaagggagagtgagcgcatgctgaaatttaaattttaatgaaaatgactttaaccctttggtacaccttgcaaaatgtaacccatcctcccatcctgtgaaagcggcctctcgggttagagcttttccacccacttctcttccactgagcttcactaataatatgtaatcatttttttcagccgtcttaataataaaagattatagaaaaa

SEQ ID NO: 271192 - DNA, 477 bp, Homo Sapiens
tttaggctcagtgctgtccgggctggtttgccctaccctgactaacggctttctgccccttctctcgccacccctgcccaaggtcgcccctctgccttcgcccctgtcccgggagtggggaagctttgaccccgccctgcccactcgcgtctccgcagccgtagccgcgcctgtcccaatatgaatagggtcaacgaccacttatttttataagagatattaagcccggactgaaaaacttaaatgtcgtctttattgtcctggagataggacgcgtgaccaaaaccaaagacggccatgaaagtgagatcgtgcaaaataagcagataaaaacgggcaagaatcactaatttccgtgtgggatgagatcggaaggtcttatacaagccaaggggataataatccggttgaccagagggtatgcatccatgtggaaaaggatttttgaaactttatactggagggggggtgaaactt

SEQ ID NO: 271193 - DNA, 479 bp, Homo Sapiens
  misc_feature (110)..(110): n is a, c, g, or t
  misc_feature (425)..(425): n is a, c, g, or t
cctgtgcccagccaaaggaacgattcttagatggaggacctaggaaccaacagatgggctgctgtattactcttacccctttcattttcctgtatgcttcttcccaaggncagcatccaaattttggaattaatttttgctgcttaataaggacttaaactggtacccaagtcagaaagactctgcctctaattttctggggcttggggatgaagataaaagtgttacaccccagtgtttgtcccaccacagtctgtggggcagagagacccttccctgggactgaattctcaatttgaagcactgttgttcaaagatctcccttctgggtctgacaagaagaaacataacccttatttattgcattcttctggcttacatacattgccctcactaatcaatggacatttcagcatttcattacntaattttgagagaaggccaccatggaatttaataaaaatattattgatagagaa

SEQ ID NO: 271194 - DNA, 466 bp, Homo Sapiens
  misc_feature (30)..(30): n is a, c, g, or t
gagatggctaatagctgtttaatggaaaantgctgggctggagggagttaggctgaatttcccgacttcctctgccagttattgacacagctctctttgtaagagaggaaagaaactaaacccacccaagggatgatttcagggggagaggtggagggcagatgtcctgggcaaaccgggcccctctgcccacacacctcacttgatccttttgccaaacttgtcaaactcaggggaactggcttcccagttgcccctttgccatattccaagtccccctcagacttcatgtctctgctcatcagcactgtcccaggatcctggagagggagaacccctggccccaggggaaagaggggggggtctcccgtttcctgtgcctgcaccagccctgcccccattgcgtctgcacacccctgcgtgtaactgcattccaaccactaataaagtgcctattgtacaggtc

SEQ ID NO: 271195 - DNA, 784 bp, Homo Sapiens
  misc_feature (311)..(311): n is a, c, g, or t
cttgtctattaaactctctgctccttaaaacgactccacatgtgtctgtgtcattttatctaaattgacacaagactaaggacgctggtgttcctccagtcatcggagccatatcattttgatccattggccaggaaactgaggtacagcctttgttggagcggtaagtatgggagcgagcttaaaatctgttgcatcattcacaaggtgctcttggcctctatattaaaataaaattagatagataaacccaaactactttctgtgtgatattctcagatgcagagccctactctgcctacacccaaaanagatatattcatcccaaaaagtcatgagcaagcatctgtaatttcttttaggaacgggcatgcatcaagcctagtacatacacagcgttggctgctgtactaaagactcagatgtgaaggcttgctgggtgagaacatggagaaccccccaatacccatgagtactgggaatgttggccatgttttgaactagtttcttttcatcgcttgaggctgggaaaagttctgaggtaactgagaatttctggccaggggacatactggcatgattcaaaggcctctggaccagacccagcctccaatagcctgttctgggtgtgtggcagagaaccctcaactataccgttgcaaaactcttcttccttctctatctgtggcgtcttactctttctctgattgaaatgtgcagggatttttacagcctaggaaagaaatcctgttaggcaagatcaggaaaatgcctctagaaacag

SEQ ID NO: 271196 - DNA, 288 bp, Homo Sapiens
gtagacacagagtgtgaccatgttgtccaggctcatctcgaacctctgggctcaaggggatcctcccaccacagtctctcaaagtgcagggattacacgaaataagccaccacatttggccaaaagttgtaaattttgcttattagtatgtgaatgctattttcaaactactcttaggcaccttttcaaagaaaccagaccatattttttttatctttcatatttttgatggggttataattcaatgagatatacaatttctacataaaaagataaacactattgggt

SEQ ID NO: 271197 - DNA, 367 bp, Homo Sapiens
  misc_feature (277)..(277): n is a, c, g, or t
  misc_feature (283)..(283): n is a, c, g, or t
  misc_feature (353)..(353): n is a, c, g, or t
gatagtcagtaggcaactaggacccaatttccttttctggcaaacatcctcatagctaccctcctgtctcctgttaaagtagctggggaagaggatgacagcaggtgtaaaccaaccccatagagtaacaaaccaaagatctttttctactgggaaaccctagcttctgagagaattctgactatgtcactgaggctaccatctgaaatatcgaccacaacttgggaacagatgaaagcaaagaggaaaaggggcctttaccagttgcgattagggntagccntacatgggaggggtagggcaggggcaggagccttgatagggtttgttgcgggccttgggggttattgttntgttaggggaacat

SEQ ID NO: 271198 - DNA, 607 bp, Homo Sapiens
tcgactctcaagggcctgactcccacaggcacactccctctggcgtcctctcaggaggcaagcagactatcgagacagccatcagagggttctcgcttcagcacaagatccggagttttgaagaagcgcgaggtctggaccgaattaatgagcgaatgccaccccgaaaggatagcatacacgctggtgggccaatgaaatctgtaacctcagcacactcaccatgctgcgcacaggagcgaccaagggaagaaagcccattcatgacttagagtcctgccgtggctcaggtggatctaaaactcaagaacaaattctatttatttattattggaaaatgaaaagcaactcaaaacaacttcaacctggaggtgcatttataattcagtctgcatttattctgtaaaaaggtgactgttttataaattcttttaatttatgttcaatatatataaaaagtgcatctgttttgtttttcccttttttctccataattttaagaaatgaatctgattgttgtcaacacatttgtgaagtcttgtgctataaaggggaacttcccctaataaaagggccttggaaacctcaaacctgggtttctgacttg

SEQ ID NO: 271199 - DNA, 428 bp, Homo Sapiens
tagctgagcacttaatgtaattaattccaggttatgactcttaaaaaacattggccattagagaaatagttctatttgcccatccaaatcacctgaatgactttttgaaagaataggggtccacatccccagatcccatcccagctgtgcacagtctgaagcaagcagagtgaaacaagttggcaacttgttccaagcgtgggcctttgcagtctgtgatccagtgttactccaggtcccagtctgtcccatacttgtcttttgctacagttagttagttactttgttatcatccccttgtaaactgccttcaatatctgggataaggaagacaaagcttaatgacaactaaaggttctagctgacatctttctttcatatttaaatttttggtgaagttttcatccggttttccggtttggtttaag

SEQ ID NO: 271200 - DNA, 493 bp, Homo Sapiens
  misc_feature (25)..(25): n is a, c, g, or t
  misc_feature (30)..(30): n is a, c, g, or t
  misc_feature (36)..(36): n is a, c, g, or t
  misc_feature (41)..(41): n is a, c, g, or t
  misc_feature (159)..(159): n is a, c, g, or t
  misc_feature (207)..(207): n is a, c, g, or t
ggaaatggcctgtaaaaccgggaanccaangcctangcccngggtaaatgggaaccattaaatggccccacccctaatttattttgcctaagagaaactgatgaacctaaaaggagaaacaacctattgccctacattttaggatatggggggaaaaancccctgagattacctaattatgtatcacccatccctcttaatgtaganccctgaaaatgatggtatcaatataatacatacagtggattcaccttttaaactggatctattacctttgatatttgtcttacactgaaaaattctgacatcttcaggaaaccaatatgatggataagctaaatgttgacttaaaatagttaaaccccttaataacatcctttagtttctattatttcactgcttaagttcagcatctgaataacaaaggtaacataagtagtacttaagatcccaaaggcccattacattctatcaataaagacaaaacaaaact

SEQ ID NO: 271201 - DNA, 483 bp, Homo Sapiens
  misc_feature (54)..(54): n is a, c, g, or t
  misc_feature (63)..(63): n is a, c, g, or t
cctcatctatctttcttaaacatgtggatatagctaatgttaaaaactgacacngcttcactntcctctttttctctgtaccgaaagctgccagaaataccagctttaattccaagacaatttggtttaagccttcaaaataaaaagagtgcatccacttccactgccctgactttccccacactgttgattgtgattcccctgtggccatgttgggtagatccaggctggccttaatataataatttgtacaaaacacctcctagccagggtaaggctttaggaactatccttaaaaagaaacttgtcaaaatactttttgatattttgtacaaatactaaatattataattttctcccagaacatccgtttaagcagcccaattaagtgactctgttaaaggtctgcttatggaaaaaataggtgaagtcatttcctgagccaaaagatacagataataaatgttaataatagcagcagac

SEQ ID NO: 271202 - DNA, 532 bp, Homo Sapiens
  misc_feature (451)..(451): n is a, c, g, or t
  misc_feature (514)..(514): n is a, c, g, or t
aaaattcatctgtaaatattcacagtctagtcactgaaaaatgggaaaacctctaccatgccttattattaccctttgctgtttgaggagccagaaatagaggtgcagttagaggacggtcactttttccaacaaaacccactccatagccatgtggatttttatccaaaggctcaacaaccagagggaatggtgagacctgataactaaaatactgttattggcaagggtttgaaatgtgtaagaacctacggagggaaaggaagattgagcaacataggaaaaggggaagagaggctgagtgtcaccaaggtccaaactccatttataaaaatacttgcaaaaccaggagttgatggtagaagtgcatatgatccatggcaggagtaaatctctccacctcctctaactctctgaaaactcctagaagttggagcaagtcttccatttngcttcttatccccttaaagaatggcctccacttcccaaaagccccatcaaggggccccaaganggcaccatggtcttatct

SEQ ID NO: 271203 - DNA, 467 bp, Homo Sapiens
  misc_feature (305)..(305): n is a, c, g, or t
  misc_feature (375)..(375): n is a, c, g, or t
  misc_feature (391)..(391): n is a, c, g, or t
  misc_feature (400)..(400): n is a, c, g, or t
  misc_feature (406)..(406): n is a, c, g, or t
  misc_feature (412)..(412): n is a, c, g, or t
  misc_feature (441)..(441): n is a, c, g, or t
gcaatcgaactttaatagggaaagatgtaaagaaaaatgtcagttctctccaaattaatctctgtattcagtgtacttccagtcataattacaaggaaatttttcatggatcttgaaaaactgattgtaaaattgatatagacaagtaaatactcaagaataatcaagagaaccctagaaaaatgtattgcatctgacagcaagatttactacaaaatcataataggacagtatgggtttgatgctaggatggacaattaggtcattggaagcgtaatgggaaagcccagaaacacattgagatncttgtgaaattttaatatataggaaagagacccctacaaatcaacatttatttaataatactgagtgagnctcctactggcattcnatgcactgnttttangtcccngggtggaccataaccaggttgggaatttnaaaaggcccaagggttaagggtttaa

SEQ ID NO: 271204 - DNA, 455 bp, Homo Sapiens
gaccaaattgagccgtttcattgagatcaacagcctccacatggtgacagagtacaaccctgtgactgtgattgggttattcaacagcgtaattcagattcatctcctcctgataatgaacaaggcctccccagagtatgaagagaacatgcacaaataccagaaggtcagacaagctcttccaggggaagattctctttattctggtggacagtggtatgaaagaaaatgggaaggtgatatcatttttcaaactaaaggagtctcaactgccagctttggaaatttaccagactctaggatgacgagtgggatacactgcccacagcagaagtttccgtagagcatgtgcaaaacttttgtgatggattcctaagtgggaaaattgttgaaagaaaatcgtgaatcaggaagggggaaaagggactcccaaaaaggggttgggggaaaaacct

SEQ ID NO: 271205 - DNA, 482 bp, Homo Sapiens
cggaaatggggctccctcacagaggttactctatcagtgcagggtcagatgctgatactgaaaatgaagcagtgatgtccccagagcatgccatgagactttggggcaggggggtcaaatcaggccgcagctcctgcctgtcaagtcggtccaactcagccctcaccctgacagatacggagcacgaaaacaagtccgacagtgagaatgagcaacctgcaagcaatcaaggccagtctaccctgcagcccttgccgccttcccataagcagcactctgcacagcatcatccatccatcacttctctcaacagaaactccctgaccaataaaaggaaccatgatgtcccgccccgccggctgctttgcccgccgagctgcaaaccacacccgagtccgtccagctgcaggacaactgggtccttggcagtaatgtaccactggaaagcaggcatttcctattcaaaacaggaacaggtacaa

SEQ ID NO: 271206 - DNA, 391 bp, Homo Sapiens
aagaccataaaatattaactttccccaagatgttatgggttccagttcttctgatcatttgattcctttaattactgtccctcaatttcttcatctttacaatagatatattaacatttacagatcgactatttcctttaacctcctagaagaaagtttttgtggggaaagatgattctgtattattcagtagcatagacattttgcatatcaaagatgttcatttggcactaatgttgattgaaatcaaatccatctgagatgcctagctcgtatttgcattctggaagcctccatcgcaggggagctcggcagggtatgtgagctttgttggaggtgcggtgtttcattctgcagctgttgtgaggacagagaggcatggcccacaggc

SEQ ID NO: 271207 - DNA, 390 bp, Homo Sapiens
  misc_feature (296)..(296): n is a, c, g, or t
  misc_feature (364)..(364): n is a, c, g, or t
gaatttgtcaagaactttctaataataaaatacagaaatagattaatagttgctacaaacataaagagagactccatggtagaacactttaggaagcacattttatcttttttgaaccaacatgtatttccaaacatgtaagtaataatatcaagcgtggtgggaagattggattggaggctgattctgatctgtgtgttgggatgaactgtggcattcacagcattgagcaaaatcatcttcaaggacagcgtttaattctgttgttgacaaagtcttttaagaaaaaagtactntagtttggggaatttttcacagatacaaataaggcttggaccccctaaaattttaaaatattattttnaaaaaattaaaatgtccaggttttat

SEQ ID NO: 271208 - DNA, 359 bp, Homo Sapiens
  misc_feature (250)..(250): n is a, c, g, or t
  misc_feature (255)..(255): n is a, c, g, or t
  misc_feature (291)..(291): n is a, c, g, or t
  misc_feature (328)..(328): n is a, c, g, or t
  misc_feature (340)..(340): n is a, c, g, or t
agctatttctccttaacccctaatacctttcttacctaaatttcagaatgatatctttttgatgtctaaaaagcaaagcattttataatatctcattagccaggctttttaggaacagagaagtttttccttgaaatttgattgtttgtttatttgtggcaggggggtgaaaaatgtacaaactacccctatttatacttatatctctctctatatgtacgcattatggaaatataggaagaggatatangcccnaaagatagatgggtaagtagacagtctgaaaatgtngctccatactaaagaacctttctggaaatttgcattncgctactttttnccacttgagaggggtctca

SEQ ID NO: 271209 - DNA, 573 bp, Homo Sapiens
  misc_feature (491)..(491): n is a, c, g, or t
  misc_feature (498)..(498): n is a, c, g, or t
gcatataatcatgatactggttaaattagccagtgatgctttattttcaaagaaatgttacaactacagttttcttctattatcatcatcgttttccttgaagcgcacttgctctgaaatttggggactgagtacaccaaatacgatagatcagtgggatacaacaggcctttacagcttctctgaacaaaccaggtctcttgatggtcgtctccaggtatcccatcgaaaaggattgccacatgttatatattgccgattattaggggcgctggcctgatcttcacagtcatcatgaactcaaggcaattgaaaactgcgaatatgcttttaatcttaaaaaggatgaagtatgtgtaaacccttaccactatcagagagttgagacaccagttttgcctccagtattagtgccccgacacaccgagatcctaacagaacttccgcctcttgatgactatactcactccattccagaaaacactaacttnccagcangaattgagccacagagtaattatattcccagtatttttgccttctgaatctcctaaaacttggatagatacaaat

SEQ ID NO: 271210 - DNA, 568 bp, Homo Sapiens
  misc_feature (163)..(163): n is a, c, g, or t
  misc_feature (165)..(165): n is a, c, g, or t
gggaatcacaaggctagaaatcaagattttcgccaggctgagttctcatctggagtctctgggaagaaatctacttccaacttcattcagattattgggaaaatccagttccttgtgactggatgactgaggtctccattttcttgctggctgtcagccaaantncactctaagcttctagaggccacccacatgccttctcatgttgcccctccatcttcaagccagcagtgatgcgctgagttcttctcatgctttgaatatctgacttcttctgcagccagctggaagaatatatacttttaaagggctcacttgattaggtcaggcccacccaggataacctttgttttgccatataatgtaacattcataggagtgatggcccatcacattcagttttcactcccactcaaggaaaggagattatacaaaggcatccatcatgtggggacaattagcttagaattctttataatgtagctctcacatgacaggttttctacttagtaccttttatggcatcaatgtaaatttaagctgtaaataaaaaacaaatatgtgaaaa

SEQ ID NO: 271211 - DNA, 452 bp, Homo Sapiens
  misc_feature (372)..(372): n is a, c, g, or t
accattttacattataattttctcttgtattttctccttcccaaatagaaattcacactctatgatgttgctcttcaagtcagccattctgtgcagtcgccacttgcatggttccaaaatcatcctcttcttcatgtgttctcttcaaactgcctgtggtaccagaatgaacagataatgacctttctatctggagtggtgacatcatctgtattgttaattttgctaggtagatggcttcatattcctgaagttgatggacaaatccagcattaggattaatacaaaatcttctttcttgaacataagcaaaagcatcttctggtacttcattccaaatgtttccataatgtatggcaataacaaaggctngcacttctgggagatccctggcatttccatggcacaagaactttttcctcccattttggaagctccccatccaataaatt

SEQ ID NO: 271212 - DNA, 438 bp, Homo Sapiens
agggccctcaggctggggtgttgaggaagtcctagatgacaatcgtataatatattcatataaagacagagcaatagcaacatgtcctcagccttacaaaaggaacttaaacgtgaaattttcttcccaaattatgtggtggcaaggtcagtaaattgctttatttttaagatgtaaaattaaaataaccatttcccgatctcctacttcctcccctccccaaaaaacaacctattttaggtaaaggaaataattcaacaaaaatatacagaaactatttaaacgtgcagagaaaagataagaactgctgctacgaaagagagcaagagatggagaggagaacgtgtgatagggctggctactgagaataggcaagaaaaagaataatttagatgagaatatgtatgaggatatataaatggcaaaatggatacagta

SEQ ID NO: 271213 - DNA, 420 bp, Homo Sapiens
  misc_feature (92)..(92): n is a, c, g, or t
  misc_feature (108)..(108): n is a, c, g, or t
  misc_feature (121)..(121): n is a, c, g, or t
  misc_feature (130)..(130): n is a, c, g, or t
  misc_feature (141)..(141): n is a, c, g, or t
gttattttactgaagaaaaaatgaaagccatgtgtcccataccaaaccactattatctggatgcctatagccatcttttattgggtaaaagntaaacgctaaaaaacnacctaaatgtccntcaaccagntgaacggattnaaaaattgggggtattacccaatcaatggggtaatactttggcaataaaaaggaatgaactattgatacacataacatgcatgaatcttagaacaattatgctgaatgaaagatgccaaaaagagtatatagtaaatgatttcatttatatgaaattctagaactgtgtggtgcaatgtagaaggtaccagtcacgtggctgctgactacttgataggtgggctagtgcaaaagaactttcaaattttacttaatttaaaattaaaaatgaaagcaaaa

SEQ ID NO: 271214 - DNA, 420 bp, Homo Sapiens
  misc_feature (367)..(367): n is a, c, g, or t
  misc_feature (390)..(390): n is a, c, g, or t
atattacatacacagacacacaacattccactttttattttacccccattcagaactcttttcttctccaccttattttagagatctgtacaaccactatacagaaattaaatatgaaaagaaaaaatattcactatacttcttaaaatctaattagggagtcaaagaaattagaataacaatcatccactatgttacaagaaattgataggaaggaggaagtgtaacttgcattttctgcttttcattttcagtgagtggtaaacaaatgataaaagtctgattcataatgagcaaggctattgacttttattaagaattcggtatcctttgaattactagtacagatataaagcaaaagatacgntctttcttgatttcttttgctcnttccaatgcctagaacagttcctgggagat

SEQ ID NO: 271215 - DNA, 656 bp, Homo Sapiens
  misc_feature (37)..(37): n is a, c, g, or t
  misc_feature (267)..(284): n is a, c, g, or t
  misc_feature (589)..(589): n is a, c, g, or t
  misc_feature (606)..(606): n is a, c, g, or t
tcttgttaggttgttaagggcggtctcaaattcctgngcctcaagcagttctcccacctcagcctcccaagtagctaggattacacgcagaggccaccctgcccagcttatgagacatatctcgcttggtcatccaagcgagtgagagtgcagtggcaagatcagaactcactgcaagctcaaccacttgggctcacgtgaacttcctaccccagcctcccaagtagctgggaccacaagtgtgctaccaccatgccctgctaaacnnnnnnnnnnnnnnnnnngtagagacagggtctccctatcgttgctcggtttggtctctaactcccgggctcatgcaatcctctctcctttggcccctcaaagtgctgggattacaggcatgagcaactgcacccagccctccgcttaactcttaataagcaacactaaatatctattattcttgttttattggtcatcccttcaccacatattatagtgtccaaaggaaaaaaattataagaaaatagtataactccttagcactgttgcctctacataatgttaacacaccattcccttggcatactgatttattctttcnacatccatataggggtntggactcctggaacaattcacatcaacatcacaccttaccaccagaaaag

SEQ ID NO: 271216 - DNA, 430 bp, Homo Sapiens
  misc_feature (44)..(44): n is a, c, g, or t
acttcaccatatctttttcagcgcttatacaaaccggcactatngaccctcccattttacagcaccatatgaagtggggaaaattaggtgaaaattttcctgaagcaaccttaacatgcgcagcccttgttggtttgtgacttgtggcctagctcatcagatgagccacgagaatcagacctggattttgatctggccctgttctgacatgcaatgaggcatttgtagcatttagtaatattgctagttcaaagaatactagaaatattagtaagaacctattcaaaagtattcatgagtattttctgcatatgaatcaggaattagaatattttgaaaatgatgttaataaaattttcctctggaaggcctttataatttttattcccaatcatttttcaaatttagaaagtttaatctgtcacaggag

SEQ ID NO: 271217 - DNA, 835 bp, Homo Sapiens
  misc_feature (11)..(11): n is a, c, g, or t
  misc_feature (38)..(38): n is a, c, g, or t
  misc_feature (51)..(51): n is a, c, g, or t
  misc_feature (58)..(58): n is a, c, g, or t
  misc_feature (145)..(189): n is a, c, g, or t
  misc_feature (202)..(227): n is a, c, g, or t
  misc_feature (288)..(305): n is a, c, g, or t
  misc_feature (679)..(679): n is a, c, g, or t
  misc_feature (748)..(748): n is a, c, g, or t
agaccccgggngttctcccccggggagaaatgtttccnacaggtgggtggntcgctcnttttttaaaaaactggcatgtttgattgttccagaactagtcactagtagtgtcatcttcttgctagagcatggcctttcagatttnnnnnnnnnnnnnnnnnnnnnnnnnnnnnnnnnnnnnnnnnnnnngattttcaaattnnnnnnnnnnnnnnnnnnnnnnnnnnccctttatatgtatgtcctggatcatgattgcaaaatggaattctgactggggttacagtnnnnnnnnnnnnnnnnnntcttgaaaaccactaccataaatacccaatgtctctttttatatattggccagtgttcaaatgcaagcatttgatgatgtttgtccacatgattgagataatgagatcattttcttcagttgagattcctgaatgagatgttcaaatagcaaataggaacgttaaaattgtctcaaatgcaaggcaataacaataagaattttaatttttttcttaattttagaaaaccatactctatcagataatttctcaaaatcccaaaaaccatacctttaatggaaacactcatcttaattcaagagaaaaacaacaaatgtaggctggccaaagggacattcattaacttggaaggggaataatacctttggaatccnaaagaaattcgccaggttatggggagacacaggatgttcccaaattggtagtgcgggttccgtaaatgntacaacttgcaactaatttttgggaatttaatcatttacattcttcacactcattagcttgcggatttaaaagtaattttcatttaa

SEQ ID NO: 271218 - DNA, 566 bp, Homo Sapiens
  misc_feature (35)..(35): n is a, c, g, or t
  misc_feature (133)..(133): n is a, c, g, or t
  misc_feature (405)..(405): n is a, c, g, or t
  misc_feature (420)..(420): n is a, c, g, or t
gacatattcacagaagtggccaactgctgtatccngcatcgcccttcctgccccttcgaggctcaggaactggtaagttccgcttgcttcctggcccttggatattaagtgtgtggcctggtattaaatccangaaatttatttatgaggaggtctgtaacttgaagagcctccttaggccaagtattaggacatttgctggctaattgattgtttgggtcaatttattaggtacttccagtagcttcttctggccttgccctgttgtaatccctgccagagacactgaggactcattcattctagtccttcacttcaaagagctcattttggtggggcagtaggctttacatatagttaatggtttacaaatcaagtgataattaagggttaaatggatgtatngtctcgtgtaacacnagtgcgaaatagacgtcatctgtgtattcctgccaagaaatgtttgacctgtatttaattatgaggaaacaattagataaatacaaattgtgagatgttctatataagacaactggcctagactcttcaaaaatattaatgttatg

SEQ ID NO: 271219 - DNA, 260 bp, Homo Sapiens
gtgtgggccaccaggcttgactaagatggtgttttttttagttgtaagttaacaggtgtttttcatgagctcttctaagttaacagcatttaaaaattatttagatttttttaatggcctactgaaaataaaacaaaaacattagttgatgttaaactcaattacctgttatattttggcagctaaagagaccaaacgataattcagtcaccactaacccatttgtggcaaagacagtaatatacaaatttgagcatttc

SEQ ID NO: 271220 - DNA, 199 bp, Homo Sapiens
ccttccaatcatttgcttcagagactcctttctggcctaacagcgcattcctttgattggtccttgagtgaccagagacttagtgcccttgtaagtctgtcttctgttgctacttgtttttttcagtgctctgaaatagagtaactaaatggttatttgtctgaatataataatgtaaaacttcttgtggtcatcttaa

SEQ ID NO: 271221 - DNA, 404 bp, Homo Sapiens; identical to SEQ ID NO: 236096

SEQ ID NO: 271222 - DNA, 388 bp, Homo Sapiens
  misc_feature (19)..(19): n is a, c, g, or t
  misc_feature (74)..(74): n is a, c, g, or t
  misc_feature (346)..(346): n is a, c, g, or t
ttcaggatgtcaaagtctncgagtcagcgtgactcatcgttcttccaacagttggacaccacaagcaggagaangggaccatttttctacagctggaaagtgagtcctatcctttgaggaaatttgaaaaaagacatggagtggtttgaaagctactcttcatttaagactgctctccccaaccaagacacatttgcctggaaattcagttcttagcttaaagactaaaatgcaagcaaaccctgcaattcctggacctgatagttatattcatgagtgaaattgtggggagtccagccatttgggaggcaatgactttctgctggcccatgtttcaggttgccangtaagcttctcacatttaataaagtgtactttttagaacatt

SEQ ID NO: 271223 - DNA, 462 bp, Homo Sapiens
  misc_feature (396)..(396): n is a, c, g, or t
cctctttaatctaaatgtaatacatggaaattttaggaactggtttgaaatctgccaaaagtagtttttccaaagagtagttcagaccaacccagacctcttgcttcttggaagagcaagtaagtaagctagttctgggttaatgttcacaccagggtgatcaggcctgatgggagtttgctgtggacgctgagctgggcccagggacttcacctcctacttcctccaaaggacaaggtcactatttgtgaatcctgcttttacagagcaggacagaggcccagaagagcaaaccctgcccaaagaccacacagctaagtatgtgggccgaactggggacttgaaagcccagatcttttggacacccaaattgaatgtggtggtccccctgtctcngcgggtttttcagatgggattcacacagggattggggatgaaataatgtggaaaatcgctgccaat

SEQ ID NO: 271224 - DNA, 421 bp, Homo Sapiens
  misc_feature (12)..(12): n is a, c, g, or t
ggatttgtagangaaccagcattatattccattttgggattccagagagggtatttgagaaatttgacccacctcaataaccttagtaaagggctatttatcaaaccctttggcaaacatagttaagggtgaatatttagcagccttacccattaatggtgggaacattctggggcagacccatgctcagtaattcagaaatgaggcataagaactggaaagaaagcaacgagactgattcaattgtctgtataaagaaaccagagaatgtacaacagattgttagacctaataagagttcaacaatttgaaagttgttcaaacaaaatcaacatactaagataattgtttttctatgccccagtgataaccagttgaagaatgcagtggtggaaaaaagattgatcctattcacaagagt

SEQ ID NO: 271225 - DNA, 293 bp, Homo Sapiens
gaagaataggatgcaaagagttacttcagtctttgatacgtttcagctctagtaattggaaatcatttttttgtgccccagagtgacactattagctaataaaatagtaccatctgtgtttttcaggacatcctctctggaagtagccttcaactgacatcctttctttatcttaattttacagttatagcaaaacatattctttcagaataatttggctgttttcctacttaaggttgtctttctgcttggatccccaaagggacttagaatcagttcaaaaattgaggcat

SEQ ID NO: 271226 - DNA, 282 bp, Homo Sapiens
gacttggtgtctcccactgtattctacacaaatagcgtatgagacaactgtttggcaaatgaaagaataagctctgaggagatggtcatttgggggaaccctaaaactgtaggccggagcaggaagtatccacaaatgagagactaatgcagctctcttcatgtttagtaagtgatctcacttctcagtgtctgaagttaagccagcttgagggtaagccagagagaggagagcatttaaaatattccctctgggccagatgctgtggatgatgctggtaat

SEQ ID NO: 271227 - DNA, 512 bp, Homo Sapiens
gaagactctcttatgatagagtgtcaagcaagagatattttagttaagggtgtggacgaatcaggagccagtagattcacagtgctgtttccatcagggactcctttgccagctcgaagacaacacacattgcaagcccctggaagcatatcttcagtgtgccttgaactctatgagtctgatgggaagaactctgccaaagaggaaaccaagtttgcacaggttgtactccaggatttagataaaaaagaaaatggattacgtgatatattagctgttcttactatgaaaagggatggatctttacatgtgacatgcacagatcaagaaactggaaaatgtgaagcaatctctattgagatagcatcttagtgttttagagaaatcaagaatttttaaaaacaagaatatcaacatttggttttgtgtataagtggtgtttgtattaaaatactttttcaatgaactgtataaactatgttttattaaactacaatatatcagtaaaaaaa

SEQ ID NO: 271228 - DNA, 674 bp, Homo Sapiens
  misc_feature (26)..(26): n is a, c, g, or t
  misc_feature (35)..(35): n is a, c, g, or t
  misc_feature (53)..(53): n is a, c, g, or t
  misc_feature (59)..(59): n is a, c, g, or t
  misc_feature (120)..(120): n is a, c, g, or t
  misc_feature (242)..(242): n is a, c, g, or t
  misc_feature (492)..(492): n is a, c, g, or t
atttgccctcgggcccaggatcggcnggggatccnggaaatctgccccccaanggtggngattggtggacttctggtcactgaagttgtgtagaccttccaaaagattatttactgaggncattgcaaggtacctcataagaaaacaccatgtttgaagaaaaggcccaagtggatcccccttagtgctctgaaatatttaccaaaaggatctttatataactgtggatcattcagacccangaagagacaaaagagtttcagctcctggcatcagctctattcaaatctggttcagattttacagctctgggcttttctgatgtggatcacacctatgctcaaagaactcagctctttgacaccttagtaaatttctttcctgacagcatgactcctcctaaaggcaacctggtagacctcatcacactgtaactgaagagtcactggacacagaaatggaaaacaggagtcgattttcccgtcctttggnattgcagctccactgactgacagtaaagctgcagtgattgaggactgcaccagagttctgaagggatcttaaccatcacaagtttttaccctcttccttcatgcctgacctcaaccccgctctcctcatcctattcctaaattaggctaataaagtgaaattggtatactttccagttaaat

SEQ ID NO: 271229 - DNA, 433 bp, Homo Sapiens
  misc_feature (59)..(68): n is a, c, g, or t
ccaaatgattaattcacaccacctgaagaggggaggcccaagtaattgggccagttttnnnnnnnnnntttagcagattatctgctaacttagtcctgaattcatatcccttgactcctaggctccttcttaccagcttctaataatggctgtctataaagcaataacctaaactttgtggattaaatatcccagaggtcattaatggctcccttgcattttataagaaatcagatctcgtaaaatcattcatgaaatataattcactatagatgaaatttctccactttggtacaaagtgtttttggtcctgacactacattttgaagatattaaaaccaaaactaaaagcatggtctacagcttgtattaattatccttgggtagtttatggaagcatttgagttcttaagaaatagttatctcatatgat

SEQ ID NO: 271230 - DNA, 467 bp, Homo Sapiens
tcttagtcaccccatagaaggtgaactggaacatgggatgccctcttactgctcctgcttgcctgcatcagatggacacagaaggagggggctgctgctgaaggagtcaggcttgggatggagagcaagaggccaaaggactcgtctgggagcatgatcggcccctcttactagcagctccatcagctgatcagaaatcagagacagaagggaactaggttactcgttaaatcctacctattttcagcctagaaatcacatgggcgtttccagtcaagtgggaaggaagctcatttttagggcctagacctagactagttttgcctgcctttttttcctccctgctttcttctacaagccacacaacattgcttataaaaggtacttttattactatttttagaatatatacaccccatatgtaaattaccctcacttttaaagtaataatagttccttcacggaaa

SEQ ID NO: 271231 - DNA, 258 bp, Homo Sapiens
taaaacaccagcaaacgtatttgtgaatctctcttatccttgaaacttcttatgctgttgataaactcaaggggctatgatgaaacatttttttcaatagattattttgtgaatagggacttggcttgttgtttctttttttggtgaatattggtttaaagcacatgttttagttatacctgttatgtagttggcatttataaactgaattctataatggtaactcatacggagcctgactttttgagaccatgaaca

SEQ ID NO: 271232 - DNA, 491 bp, Homo Sapiens
  misc_feature (18)..(18): n is a, c, g, or t
  misc_feature (324)..(324): n is a, c, g, or t
ttaactgacagaatcatnggccatttcgcagacaactgcctcaaaacatctacacacagtgttgctcctgcaggcaatctgagaccaagaaactctccacacccccatcagcaggaagtaaccagaaagaacacatcgcccctcatccttttataactataggggcctagaatgacagagcaggagcaccatcatctcagacaaacactgccactttcaagttccagctcccattctagcctcatgcatttcaaggaaatcacttctcttctaactacaagcagccagaaagagcagaccagtaaaacacagattaagacagcntaagggcacagagggaagttggggggaaagtccctttgttaacggccaatcttaaccccctttcgaaagaaactttcaggtttcccctttctttaattcttacaataccaattattttggatgaggttaatatagttaacatattcctttaagggtttttaaagaag

SEQ ID NO: 271233 - DNA, 478 bp, Homo Sapiens
  misc_feature (247)..(247): n is a, c, g, or t
  misc_feature (259)..(259): n is a, c, g, or t
  misc_feature (264)..(264): n is a, c, g, or t
  misc_feature (276)..(276): n is a, c, g, or t
  misc_feature (281)..(281): n is a, c, g, or t
  misc_feature (296)..(296): n is a, c, g, or t
  misc_feature (301)..(301): n is a, c, g, or t
  misc_feature (328)..(328): n is a, c, g, or t
  misc_feature (348)..(348): n is a, c, g, or t
ctgaaggctacagttggattactgacattgttccctaaatcgataatataagcagaccaaggaagtggctatagtccagagatttatgaatacataaaatttagtatcacagaatgacatttcttcactaatttatagaccaagtctctcttagacaaatgattcatggaaccattataatggaaatagaaagacttatagtcaatggaaactggagcactagtaaatgagggaaaacaggggtgtnaaacatgtgttnaaagnttgtgacactgnatttnggctttttttggttngtttncaaattttttaaatagagatgcgatcncactacgttggccaggttgncttggaactcctgggcctcaagtcatcctcccacctcagcctcccaaagtcctggggattacaggcatgagccaccattcctggccaatatttgactctgaatacacaccaggatgaaataacagagctg

SEQ ID NO: 271234 - DNA, 219 bp, Homo Sapiens
acattcactgaacattcccttgcctttcccataattaaaaagttaattattggaatcatattttttgtagatcccagttttcaaacaatgtgatttaaatgcttgttattaacattacaacactttgagtaacactgatcctaacactaaagtgatgctgttttgtacataattaaatttgttaccattctaaacagaattttaaatttaactctgtgg

SEQ ID NO: 271235 - DNA, 222 bp, Homo Sapiens
actccactgcactccagcctgggtgacagagtagactccatctccaataaattaaaaataaatgcttgtaaatagagttttcatatattttaaaatcctgaaatttttaaattaagtaataattgcttgttggatgtctgggcccatttctaattaagaaaaaattaagtaaagaaaaacggtgtttctaaaatcatggaggccgggcacaatggcttacac

SEQ ID NO: 271236 - DNA, 477 bp, Homo Sapiens
  misc_feature (30)..(30): n is a, c, g, or t
ccccccatcatcctaaatggaatatattgngcttatagatatttttctttaaaggaaaaaaaggaatatattggaagggactggccaggggtcactttcccctgctaaacttggtgttggtagattaaaattcttaatgttactgggatgactccagtctctatgttattaatctcatcagccttaactaaggcttttggaaagggtgtaagtttcaggtaacctctgggtttacctgggctttcttcagggctggggaagggcaggtaagtagcctgctgtagggaggatggagcaggacacatgtgttaaggatatattctgatgccacccagtctgtaaccttgaaacttacatcttggctttaggtcctctgaagtataaaactagtgatgttgctgttattaacaagtcagttttgccttcagtcttctaacttgttttctgtttccttcataattaaaatgctcacttgat

SEQ ID NO: 271237 - DNA, 358 bp, Homo Sapiens
  misc_feature (315)..(315): n is a, c, g, or t
  misc_feature (328)..(328): n is a, c, g, or t
  misc_feature (334)..(334): n is a, c, g, or t
  misc_feature (341)..(341): n is a, c, g, or t
ttccttgctcacacagtggtggtcggtctccccacaagcgttctcagcaaagacatagtaagagcatattggagaagacgcctcggattactaagacttcattagtcttataaaatgcacttgggggcataaccactgtacaataaaacattaacagaaatcattaaaatggaaccatgcctcatcaagataaataagaggactgtgttttatgtggcattgtctttatttctttaaattggtttgttcacttgctaatttgcaaaactgaacaatcagacgttctgtggtataaattaaagcagtgagattccnccattcacaaganatcccntctcganacccccggtttgtggac

SEQ ID NO: 271238 - DNA, 290 bp, Homo Sapiens
tgagaaacagagtcttaaataccaggctatgggtaggccaaaaaacctggttgccatcattcctctctttccctcatacctcacatccaatctctgatccattaagtcttactagctctgtcttgaaggcatattaccagatctctccaattccctgtctccattactaccactttagtctaatcctatatcacttcagtgttagtagccactaaagtctcccagcttccattccattcttgactggactagtatagtagaaaaaggagcaaaatacaggtacaggggtg

SEQ ID NO: 271239 - DNA, 149 bp, Homo Sapiens
tcaaatcaaggaagactttatcatctcacagaaaggatgacaatttcaggatattatgggaggctgtggaagaattatattagaaataactaaaggtttagaacttgaactttctcttcagaggagaaaaattaagaagaacttagatc

SEQ ID NO: 271240 - DNA, 184 bp, Homo Sapiens
tgtataatgcagggtttctcaactgcggcactgttgacattttgcgccagagagttcttggctgtagggtctagcccgtgcattctaagacacttagcagcacccctgacctctatgcacccaccagatgccagctgcagcgtttccagacatttgtcaaatgtccacggaggcataatcactc

SEQ ID NO: 271241 - DNA, 271 bp, Homo Sapiens
tgacaacccgcgcccagccgaataaataatatttttaaatgaacaaaaattaactttttctgtattttaacatcttggacttcatgtaattaggttttcagggtttttttaattacaaagccttctgaattccagatttaaaaggacttaagtagactctaaatacttttatctattaaacttttaggttttgaaattccaaattggatattcacttatggatacctttggaatagtcctagtcccttgcccataaaatataggatacaag

SEQ ID NO: 271242 - DNA, 462 bp, Homo Sapiens
ttatttagcagcatgagaagggactaatacaccatgtgaagataaaggcagaattggaattaagatgctgcaaggaaaacttggggatttaaaagctgaacaaatcatggaaatgtttctttcctagagcttatggtccctactgaccttggacttctagcctccagaattgtgagagaataaattcctgttgttttaagtccccctacccccactcctcaaaaacaataaatcaaggctttgactgacctggctggtgacctggtgctgtgctgtaggaagagacagaagattctcagctacaggagtagagccgaggtaggagtagggaggtagtatgaatagagaaatttagtggacgtgatttcaaagtcagtaggtaagaatgttttacttctatgtgactctcaggactataaagcaaattatttcagaatgtattactttaatgtgattctcaaa

SEQ ID NO: 271243 - DNA, 391 bp, Homo Sapiens
cttaagtcatactgcagggtttgaagtggtatctcattttggtttaaatttacattttcctaatgacgaaaaacattgaacatctttgcatgtgcttcttggccatttgtgtgtttcctttagagaaacctctactcacagctttttttccccattgttaaatgtggttgtcgtttattgctcagttatatgaattccttatatactctaggtactagagctgtgtcaaacatacaatttggaaatagttctcccattatgtggattatcttttcacttccttgacagtgtcctttgaagcatacaaagtttttaatttaaatgaagtccattaatctaattttccgttgtttgtgccacttaaaaaatgtctaatccaaatcacaaagat

SEQ ID NO: 271244 - DNA, 499 bp, Homo Sapiens
  misc_feature (58)..(58): n is a, c, g, or t
  misc_feature (466)..(466): n is a, c, g, or t
aatagccaatgatgtaatctatcatgtcgatgtaattaaagctcgatcaaaactcctngaaccacagagttgagaaaacatcttggctggtgaacacatcaaagtgctgggagagcagtgtgccaggagacagcatggaggcatcacacccagagcacttcaccctgtgtatctcctcctgggttgtatcctttataataaactgttaatagtaagtacgatgctttcctgagttctgggaaaccttctagcaagtcaccaaggggacccccaatttataagctggttggtcaaaactgcaggtgataacatgggatttaactggagattctactgcggggtaaactttgagacagtttttagcccgtggggtctgggctaaccccagacagtgtctgaactggaattgtagaacactcagttgggtgcccagagacttggatgattgggttgacattaaaaaaanatttaaaaactcatacatttggttgtcacaagt

SEQ ID NO: 271245 - DNA, 638 bp, Homo Sapiens
  misc_feature (249)..(249): n is a, c, g, or t
  misc_feature (328)..(328): n is a, c, g, or t
  misc_feature (385)..(385): n is a, c, g, or t
ttcctcaagaccagcccctgataattgaatagatagtttttggagaaaatgacttagagcctgtcagtacagtcagcaacctccttgtccctgcatatttgaactttccaaaaataacagaatgctccaaggtacttgtctgcagctcctgacaaatctccaggcagtcccagcagattttactctgcctgctgctttgtattcaccttcttcacagatccaaaggtaggaagggccctgtggaaggangcacatcccatgtcccttccctgattgctcccttggggaagacctggtggcttcgtgcttgggaaaaaataggggcttncctgcagctagggaccatagctagctgcttccttctccctcatggagaagagacagngtaaagatggcaatcccctggaaagtctcagtcccttaagaagaaaaagagtttctaatacattcacataaaacatttcaaacatgcaaagagaaaaatccaaaacaggagtgaggacagaatagagtgagttggaagagagcctaaatatcgtgctcaagtgagaaacatccacgcaagtgcctgcttcaatgccatgttttcaatgagcatattaacagggcttcctaaaaagggaagcgactacactgtt

SEQ ID NO: 271246 - DNA, 217 bp, Homo Sapiens
  misc_feature (25)..(25): n is a, c, g, or t
  misc_feature (41)..(41): n is a, c, g, or t
  misc_feature (105)..(105): n is a, c, g, or t
ggagcctcagggaagactccgcgtngcgtcctggctctgangtcaccggttgtatgaggtttgtgggcacagcacgtgggacacagcacggaggacagtgactgnatgcagagctggagaaatagagagattcacccctggggctatgcatggcaggaaaggggcagtgccaaaaagtgtgtaattatagagagggtaagactaccagacactttat

SEQ ID NO: 271247 - DNA, 504 bp, Homo Sapiens
  misc_feature (146)..(146): n is a, c, g, or t
acacttaccatgagtggagcctgtggaactggaagttgctctgggtgagtcagtggttgagtggtgtgtgtgtgtgagtaaaccagtgcatttggtacccgatcttggactatcagaacatgaagtttcctcattttgtggcagtnagccacatgctattttattcccagggtgtgctctagcctacttacccagctcctgttgataagacatttaggtggttcccagtgttttgctattaaagacaatgcagtagtggataattttgtgagtaatattccacatctatctaagtatatatgtaggttaaatttctagaaatgaagttgctagaacaaaggaaaaataatctgtgtgtttgattatatgagagaaatgaagctactttaaaaattttacattaataaaatttttatattggaaacttaacttatttaaatgcaaagattatttagctatttttagaatattagtggactttagtatatctggtaccttaaaaaa

SEQ ID NO: 271248 - DNA, 272 bp, Homo Sapiens
  misc_feature (239)..(239): n is a, c, g, or t
  misc_feature (246)..(246): n is a, c, g, or t
  misc_feature (256)..(256): n is a, c, g, or t
ctgaatgttgcttttcttaaacctgagcagcactgagatgttgaaactgttccatatttcttttccgtgaaacagtgtataagtcttaaaactttttgggatctgagtcctttacagggcattgtggcacacctgtagtcccagcttacttgaggaggttgaggcgggaggatccctttgaattcaggagtttggggcttgcagtgagctatgatggtgccttgtgaacagccacttgnattccanccttgggcangtgtgttgaggcccca

SEQ ID NO: 271249 - DNA, 283 bp, Homo Sapiens
gtcacctcttggcaaatccctcacccctcctctactttaccatctgttatgagtctctctcattcttcttttctctgtctcaggttttctactgctctatgtctgtctcctgatccctttggcccacagaattgtggtaaaggttaaaaagaaaaagaaacaagttttcttctgcttagcagctcacttcaaggaaagtttataagataacgctgtccaaaaaagctaaggctaaagtaatgggctctaagacactttttaaattccagaacaaagtgaaggg

SEQ ID NO: 271250 - DNA, 672 bp, Homo Sapiens
  misc_feature (13)..(13): n is a, c, g, or t
  misc_feature (47)..(47): n is a, c, g, or t
  misc_feature (61)..(61): n is a, c, g, or t
  misc_feature (116)..(116): n is a, c, g, or t
  misc_feature (649)..(649): n is a, c, g, or t
gtttgttaaaacnaggaatgaaacacgttggcagttattctgcagantcgcttttcaccantacagaaatgtggcaaaaataccaatttgatattaaccagatgaattcagagggnttggccaggaagaaaagagggtaaaagtgctaactttttacacagacccagatacatccaggtgttctcaaataatttcaggtaaaatgaccgcattctgtatcttctgggatacacactcatgatacgaaaagacttatgaccaattccaaagcatactttgggaattcacaaaatttgtatgcatagaaagtgtgtggaccatttcagacccatccctacaattgctataaatacaataccatacaatagaagaatgccaaatgcttaagagcaaaaactatccaaagcaggaacacaaggggcaggtgaaatttcattaaaaagcactgaggaggacagaggtatgtcaagataatactgcatttgtggtcagctttttcagggtgtcacagcaaaatgagggacaaggtacacagggtaataaccaatgcactgcattgagttctatttgctaaaaataacaacattctcgtgggtaaaataaaaatacattttacgatacaggtttcatttaacagaattgtcttctntttgtaagtggaaaatgtataac

SEQ ID NO: 271251 - DNA, 419 bp, Homo Sapiens
  misc_feature (157)..(157): n is a, c, g, or t
aagttactctggagtgggaaggcttggaccagtcttgggaaaacaaatgggaattagcctgggccagagaaaaggggaaggggttgttatggggctgaattgtgtcctcccgaaaattatattgaagccctaacagccgtaacctcagaatgtgacntgtatttggagacagggctttggggtgattaagttcagatgaagccgttagggtgggttctaatccagtctgacagttttccttataagaaggaaatttgagcacaaaaagagacacaggagttgcacacacaaaggaaagaccatgtgaggattcatcaagaagaccaaggagagaggcctcaggagaaaccaacctgccaacaccttgattttggacttccagactccagtattgtgaaaaaataaatttctgttgttga

SEQ ID NO: 271252 - DNA, 445 bp, Homo Sapiens
ataaattcgcattttaaaggtgtttacagattattttttatatctgtagctgaatttgttaaagtctaaaaagctcaaggactttatgaagatctcattatatgaggaaaatcataggttaccattttataactctattgccataagaaaatacactctaaaatcttgatttgaaacatattagaaaccttgattcagtgctcagtggtctcctagtaagaagtcaccgacggtagcgtcatatgagaagaaagaaatccccaccacctcaacctctgctgagattgtgtgctaggaacagccttccctccgtttcccctcagtcaaacttgagccagcctctggatcgatgtgatcttattgcatgtttccatggggtgtacctatactttaagccaatcctgctgcattcactgctaagttaaataaaaagccaagaagattt

SEQ ID NO: 271253 - DNA, 288 bp, Homo Sapiens
  misc_feature (11)..(11): n is a, c, g, or t
  misc_feature (24)..(24): n is a, c, g, or t
  misc_feature (75)..(75): n is a, c, g, or t
gcgaaatgtangtcctgagtaaangttttgcctcttttggggaaaatttattttgctgctagcatacaacaattngctatgtatataaacttaagtcaatgccagaaattttaaaaccagctcaaatttataatctgtaatgatcaaatcaaaacatactgtaaactcagagttggaaacgcctggtaatatggttaagtcatgtttaaatatgaatgcaatttaaatgacattgcaatgcctgagatttctttcattgtgaatgattaaaaggcagtccaatatatg

SEQ ID NO: 271254 - DNA, 386 bp, Homo Sapiens
  misc_feature (26)..(26): n is a, c, g, or t
  misc_feature (31)..(31): n is a, c, g, or t
  misc_feature (37)..(37): n is a, c, g, or t
  misc_feature (76)..(76): n is a, c, g, or t
caattgtggcccactgaccggaaatncctanccatantgaaaaggtgcattatatgtgaaagacgttcttctgtgnggtttgatttttgtaaagtggctgtttataagttgtcactttttgtaacaatttaaggttatcactgtcaatttgtgtaactagaaattttgacatttcaaatgtaggtgaaagtaacatgtctgttcaagatagaatatctttaaacttgataaatctgaaaataagagcatttcatttgggatgcatcttcacctataagtgctagatttcgtgaggataaatttgactgataaaattgttcaactaactgtgtggcaattctggaatatacaaattaaaatgtggatcttgtaaaaaccatttaaaa

SEQ ID NO: 271255 - DNA, 224 bp, Homo Sapiens
gaaagaaatttgggggtaaatttaattttaaatactgatttttgataacatttgatcttatgacagcatttgtatttttaattacagataggattacactaaaagtcatttctgacctgctcccttacccttatggctaaaataaactgctaggccctgaagcaaaggcgagccatgttctagagcaatgtctttcttgtattaaaatacggccccatgctcac

SEQ ID NO: 271256 - DNA, 758 bp, Homo Sapiens
  misc_feature (199)..(199): n is a, c, g, or t
  misc_feature (288)..(288): n is a, c, g, or t
  misc_feature (330)..(330): n is a, c, g, or t
  misc_feature (346)..(346): n is a, c, g, or t
  misc_feature (357)..(357): n is a, c, g, or t
  misc_feature (579)..(579): n is a, c, g, or t
  misc_feature (728)..(728): n is a, c, g, or t
ttttaaagtttaacagtatttattcaatttgttcattcttcctcactgaagtttcttgggccttacatttttaattgataaaatagtcttaaattaacattcaaataatagctcgttccctgaaataatctagagaagccctgttccctctctttttgagctacctataataacattctgctgagccaacatggagcanttctcctggcacatcctgcctggggaaaccgtggcagtgactgtcattaatgggagtcacagagcccctccagcctctagactatgctngtcaagtctgtatggtgaaggccctgagtcaccacaacactngaaattgtttgaggtngctctggaccncaggaaacactgcctggcccatggaacactctagcggaggagaggtgaggattacccctggccatggagcactctggtggaggggaggtgacggattatcccatggccatggagcactctagtggaggggaggtgacggattaccttcctggatcatggccatatgaaagagaaaggtgtggggctctagtaaaccactaagttaactgaaactgggaaacnagcccaggttggcagggaacagggacctaacccagtctgcaacccttttgtgtgaaaaaccacagccgttattcttgcaacttcagaagtgaaaaggcgtgtgggttacaagacagctaaaagcagcagggcgtttccctcaggcaccnagaagaggaaaggtctggcagttaaaatta

SEQ ID NO: 271257 - DNA, 260 bp, Homo Sapiens
  misc_feature (55)..(55): n is a, c, g, or t
  misc_feature (193)..(193): n is a, c, g, or t
  misc_feature (244)..(244): n is a, c, g, or t
cggtgtgaaccaccataccaagcccaaaattggttttgataatgactcatcaatngatacgtactgtgcttctttcatataggaaaacaaagtcattgccttctttaagcttcagattttatagcaataattttctctgaaaaccttacctatacttttgctttggggagctggctaggataggtattagggnatgcagtttttgccgtgggacacatacccattcatcatattttcccagggntaacacatataggggg

SEQ ID NO: 271258 - DNA, 372 bp, Homo Sapiens
ttgttcctagacatcatataaatggtatcataccaattatacccctacactacttaatgtttcattcaacattgttttgggggactatccatgttgatacatgaattctgttgtgttcattttttcctcttgtgaaatagtccatcatggaaattgtccctagtgtgtctatctgcactcctaattgacaggcatttaggctggttttccatttgcctaattacaagttatgctgagtgaacattcctgaacataggtgtgaggctgtctctggagcacatgccaaggaacagaattcttaggtcgtaaggaatgtgtaccccccagccttagtgcaatattggccaattggctggtcctattctggatttt

SEQ ID NO: 271259 - DNA, 440 bp, Homo Sapiens
gggcaataaactgggtgggtgaactggccccaaacttgcccctaggtctgctagccctgaatcagcaggcttcagagacgagggtgggtgttataaaagccagtctgtaaagggtaaattccaaatcttgtgccttgttataccaatccttcctgattcccgtttaaaccaactactctatttctgtgctgcctacattttcaatcctcccaagcattagcaaattcctgaaatttcctcatttggtaggccttccataggagtcagctatggacttccataggagttggcagctaaaaccagactgtgagcttctgtctccgttctgatttttgctgcacctcccaggggacagtccccacatgattacaaaagccaggtgccctcatcacccgttacccctgacctgtccacttgttttgaataaaccttcattctcc

SEQ ID NO: 271260 - DNA, 557 bp, Homo Sapiens
ggcccctcagtccttcgccttcccacccccacccagcggccccacctcgatgaaggtgtcaatattgtccatcagcgcctgggccccggtccatgatgaactggttcacgcagccgatggcgtgggaccggatcttgggactgcagtgcttgaagaactgcaggaacttggggatcatgatgttgaggggcctgttgagggcgtcactgtccagaagctctgatgagtcttcacagatcttctgcagggctccaaaggctccctcacaagtgttgtaatcctccgagttaagcaggttgcagagctggggcaagcagctcgggcccacatctgccagctcacccttggaagcgatggtggtgatgaagaatgcccaatggtggctcggatgagcgaggaggcatcgccaatgttgttgagacactcctgtttgatgaagtctgccacagggggtgggaagctctgatagtgtgccttcacgttgttcttgaggatgaggccactgagagagcgcgttggctcatcttctgacttgagtctggtcaggacgaaaatca

SEQ ID NO: 271261 - DNA, 508 bp, Homo Sapiens
  misc_feature (20)..(20): n is a, c, g, or t
  misc_feature (96)..(96): n is a, c, g, or t
  misc_feature (115)..(115): n is a, c, g, or t
  misc_feature (276)..(390): n is a, c, g, or t
gggccccaaccacatgggtnctgctcagcgtcaaccctgcatggagtctcctcccttcctttctcttaaacccaattaagcttgccccaaaaaccnttatttcctgaatttttantgtttcatttttcccagaggaataagatacattctgatcccataataatcgaatcacaaaagaaaccattgagggcatttgctttgctgaactgatgagatgaatgattaattgtctggaattcagcttcctggagaggcaaatggaggtataggaaggcnnnnnnnnnnnnnnnnnnnnnnnnnnnnnnnnnnnnnnnnnnnnnnnnnnnnnnnnnnnnnnnnnnnnnnnnnnnnnnnnnnnnnnnnnnnnnnnnnnnnnnnnnnnnnnnnnnntggaaagaatattcctttgggttgtatattgtcttctagggccacaatgacaaaataccacgactgggggatttaaacaacaccagttcatttttttcacagttctggagactggacc

SEQ ID NO: 271262 - DNA, 453 bp, Homo Sapiens
  misc_feature (324)..(324): n is a, c, g, or t
  misc_feature (409)..(409): n is a, c, g, or t
gaccctataaggtcatcaaaaacttagagttataaaacttgtatgtgattttgcagacttttccgtgtaagtctgaatcctgaaactgatttccattgcattgtaacctccctaacttagatttcaaggaatcttgtgctttaaatcagggtttctcaactcaatcactattgatatttttgtgctagataattcttcgttgtggatgctattctgtgtattataggatatttagtagcatccctggcctctaccagctagatgtccagtagcagtcctctcctagttgtgacaaccaaaaaatgtctctagccattactaaantgtccccctgcaggcagcacggtcacttatgactgggtaccactggtttaaacggtctcaagatgttatcaatggcttccctccnaacggtagggcaggataatgggcctctcaaagatattcacaccc

SEQ ID NO: 271263 - DNA, 872 bp, Homo Sapiens
  misc_feature (22)..(23): n is a, c, g, or t
  misc_feature (71)..(71): n is a, c, g, or t
  misc_feature (570)..(584): n is a, c, g, or t
gacatcatcaagcgttacatgnncggcatgaccgtgggtgtcgtgcgccaggtgcggcccatcgtggccantttcatgccgtcctgaagctggagatgaactatgtggtcgggggcgtggtctcccaccgaaatgttgtcaacgtccacatcttcgtctctgagtactggttctgagggctggtctgccgcacagccgcaggtgcacctccaggccaaatcattgctgccagtgactgtggtctgtacttgtttataccctcagacttttttaatgttaggtatttgtagcattaggccaacatgtattaagctgagccagatgaataagtccatctgatgtattttcggtgtttaaaaaatgagcccagttgctcaactgtttggttgaaaaccttggctcattttttaatgcgaaggctaaagtgtcaccccctttctctggcctctggcggggccttggctaaggggccaaggaaaagaaagacattttttaagggggcagccagtccaaatgccaaaagaagaccagttcttgccctgattgtatgaaatttgacattttggcacnnnnnnnnnnnnnnnggccaatcagattttctatgttctaaggacatggctgctgtagaatagcacagacgtggatgataaattatccccagaagcagcatgacagaatgcctcggggagcacttggaagggaaattgcagttctgttgaaatagaggaaaatcccttggtaaagacacagcctgttaggctcgtgtgggcctccagtatgttcaccaggggaatggctgggatttctcggcactctgcatcatccatcttttcttataggtgggaaaataaacaactttgtgatcctcctga

SEQ ID NO: 271264 - DNA, 548 bp, Homo Sapiens
  misc_feature (328)..(370): n is a, c, g, or t
gggtgggcaaatgctggctcactgccagctacaaatggttttacatttgtaaatggttggaaacaaatcaaaacgaaaaacaatcttttgtcattcatgaaaatacgaaattcaaatttcagtgttcgtaaagaacacgttactggaacacagccatgcctattgacttctggattgtctgtagctgctttcagactacgatggcagagcggaagcattgtgacagttgtgtggcccaaagagcctagaatattcaccatctggccttctatggaaaacgcttgttaaccccggctctaggtgattctgacacatgcaggtgagaacnnnnnnnnnnnnnnnnnnnnnnnnnnnnnnnnnnnnnnnnnnncacctgaaatgtggctggtacaaaatgagacaggttgtgagtgtaaaatacacattggaattgtggccttggtaagaaacacagactgtaaaatatctaataaccttttacattaaatatctattgaaataattgtattttggatgtatgaaattcaataaaatctattattgaaatt

SEQ ID NO: 271265 - DNA, 293 bp, Homo Sapiens
tgaaccactgcacccagccaaataattcaaacttaaagctgttggaacttaaattgttctgagtcttgaagaggaaatgtgactatgaagcctgagtcacatggcatgcagctgcaacttctgccttttttccacctataaataattgagactaagtggtgccagagataaaaccccctcagatcactgccccttctacagagtaataatgtcatcttccttgggatgcagcaatctgtaaccaatcaaatcactgtaacatatgcactgtcttgtatggaaaatgttataat

SEQ ID NO: 271266 - DNA, 482 bp, Homo Sapiens
  misc_feature (26)..(26): n is a, c, g, or t
  misc_feature (98)..(316): n is a, c, g, or t
  misc_feature (388)..(431): n is a, c, g, or t
aaaatgtggacagaccacagcatgtncctcagaactggaaagtggacaattggtacaagcctggacttaacttgggtttcaccaagcttgtcccaatnnnnnnnnnnnnnnnnnnnnnnnnnnnnnnnnnnnnnnnnnnnnnnnnnnnnnnnnnnnnnnnnnnnnnnnnnnnnnnnnnnnnnnnnnnnnnnnnnnnnnnnnnnnnnnnnnnnnnnnnnnnnnnnnnnnnnnnnnnnnnnnnnnnnnnnnnnnnnnnnnnnnnnnnnnnnnnnnnnnnnnnnnnnnnnnnnnnnnnnnnnnnnnnnnnnnnnnnnnnccaccaagaggaggcagcctgctcatgacgccatatcgaagataataagatgtcagcactgctcacaggctnnnnnnnnnnnnnnnnnnnnnnnnnnnnnnnnnnnnnnnnnnnngtcttttggctgagatgtcgccatgttccactttctgtgctccatttagat

SEQ ID NO: 271267 - DNA, 624 bp, Homo Sapiens
  misc_feature (516)..(516): n is a, c, g, or t
  misc_feature (603)..(603): n is a, c, g, or t
atcaaaatgttgccttgggctgtgaaggtcaggggtttcactactctacagcttcatgtgggtcataccgcctgccatctatgattgtagaagcgggactggcttggtatgagctcctttactgctacagtcccatagcacagcccagggtttgttgctttgccaatgcaggtagtaaggagtgctccatggccgagagtgctgaatggggcttgagtttcctcattaggtcttcggtgggtttaccttgttcagagaatgcatttccacccagcctccaccctgtttttcacctattggtggttacaggttatactagcaaccagtccaggggtatatgggagacagacagaaaacctaaggcttgtctgtttctggtcttgagcttcctagctagtctacctttttttcttccagctttcagagtcctgttgttgattgatggataatttccagggaagttagttgtatttagagggagaagcagggaaatgccatctcgttctgaagggtgangggttaagagaatatggatacattccttttaaattttcctcattaatagataaatgttcatatacatatatactgtgtatggatatntacacacatgcctaatggtgg

SEQ ID NO: 271268 - DNA, 484 bp, Homo Sapiens
  misc_feature (44)..(44): n is a, c, g, or t
  misc_feature (81)..(81): n is a, c, g, or t
  misc_feature (196)..(196): n is a, c, g, or t
aactacatttgccaggtcctgtctgccttaatgggaaatcttgnggttaggaagattgaaattgctccttttcccttttangccctgttatgaccaagctttgctttttttggacttctccaggcagttagttattgctgttcatgctcctctctgttcctgtctctagaaagcatttcccgcttattcatctttnaccccagtgcctgatatagtgcctggcaagtcgtaagcactcaactggtatttgttaaatgagaatgactgattgctgtcacccctggaactctccagcttttcatgaatttggtttatatttttataatatttatctccacgccctccatgttaggaataaaattgggatggaaagcctctaaattaagcaagaagctcagcaattgtaggggaggaaaaacttctttcctgtaccctcctaggttcagtggctggagccctgccaattaaactgtcaaaagagatt

SEQ ID NO: 271269 - DNA, 512 bp, Homo Sapiens
cccctaactggtaacatccacattataaatataaccttcctactcccagagctataatttcagttttgactgccactcctgctattcaactgtcatcttctttatatgatgaagaagagcatctttttcccaagtgagcctctgcaagagccattttagctttagccagttcctgtttaagagattcattctcttccatgagctgttccctagtgaagtcaaaggagaactcaggaaagttagctgactgagaaggccaaggaacccctgggcttgtctgagtggcttgcgtgacactgcgttgtttcttcagatcatactttccactggtcagcagcactgaatcgcttttgacattttctttcaaatcatttccagtgttaagcatgtgagaatctctgatatgaaaagagccatcgtcacttctctctaccacaagatgatcaatatgtacagttaaaggagctggttcaagggatactgtactactccggggaatcatcttttaaatt

SEQ ID NO: 271270 - DNA, 840 bp, Homo Sapiens
  misc_feature (40)..(40): n is a, c, g, or t
  misc_feature (47)..(47): n is a, c, g, or t
  misc_feature (93)..(93): n is a, c, g, or t
  misc_feature (337)..(337): n is a, c, g, or t
  misc_feature (571)..(571): n is a, c, g, or t
  misc_feature (611)..(611): n is a, c, g, or t
tctggtcaataaaatgggctaatgtcccttcctcaaaggntgtgtgngacaacaaaaaagtaccaaggagtctgttggtttccaaaaaaaganatatataccattagggctacgtgagtgcattaggtgattcatagatgaacacttaaaattgttttatatgttagaaaaaactgggactagtatatcaagcctataattttacccaatggcatcttcttgaagatgaggcttaagatgctattagatgtcaggtctgagtccttatttaaagaaaactatcaagtaaagaaaatagtatagatggtaagagagtgtggtaaaaacttctgaaatngaaactcaagagactgttctttgggaagaatatcaagtccttaaaactcatgctgccggtagtaggtgctctagaaaccgtacttcttacggtcaacagcccatcaaaccagggacccgggaaaagactcaaggacaacctaccataagggcaaagctggaaagagttaaaagaaaggggtctgtggttttccctggctcaagcccccctccctcttcagctaatctgtcaccntaatgaagaaggggcccgccataagtgagctagctgcaanttcacttacagcaaactgattaagaatgttcaaccaacagcagactgtagacctttccagagaaaataaatagagtgtagactgtatgcaaatgtgtttgtcactttgacagcacgtctcaattaaggcatctcgtggctgtgggtagggctctgcggctgcagctggaagggagagcccgctgcatggctgatactaggggcttgaccttaatccgcatgcatgcatt

SEQ ID NO: 271271 - DNA, 582 bp, Homo Sapiens
  misc_feature (214)..(222): n is a, c, g, or t
  misc_feature (360)..(369): n is a, c, g, or t
tggtagcgcccatgagggtggtccttccctcagcagacctctcccccctggccagcgctgtcctgctgggagtacctggcagcccagcagttgttcatgtgtatttactcatacgcatacgttgtagcacacaaactgcttcttaggagacgaacttggtgagcacaggcactgatacatctgatacatttatatcaccaataaatataatttnnnnnnnnngattaaaccataagaaaaatattcaaacttctatttactcataaaatagttaccataaatctgaatggaaaatatatcctttggttttttaaaaatccaagtctatataaaggcagattaactttagtggatattacnnnnnnnnnngttcccagtatgaaaagatgtctggcaaaaacagacctgtaaatacttcaaagaggaactatcatttgaaaatcaatctaggaagttccagatggatagtcatgctcttttttcatgatttagaaaaactacttaatttggctcaggaaagcagcagtgccaaaattctgtctatccttcgcccataacctttgtcctgataaaaagattatt

SEQ ID NO: 271272 - DNA, 718 bp, Homo Sapiens
  misc_feature (402)..(402): n is a, c, g, or t
  misc_feature (435)..(435): n is a, c, g, or t
  misc_feature (455)..(455): n is a, c, g, or t
  misc_feature (461)..(461): n is a, c, g, or t
  misc_feature (476)..(476): n is a, c, g, or t
  misc_feature (526)..(526): n is a, c, g, or t
  misc_feature (555)..(555): n is a, c, g, or t
  misc_feature (586)..(586): n is a, c, g, or t
  misc_feature (688)..(688): n is a, c, g, or t
  misc_feature (705)..(705): n is a, c, g, or t
aaaaactagagaactctcacctctctgaagtggttgtgtatgaaactgtttaaagccgaggatgcactcagtgacctcttcaggcaaccccagatttactcagtcagccatggcacacatgctagagaagtaaaaaaatgaattgagacttgttctgaaaactcttgagcaggggctcttaaaagttttttgtttaggaattatgtcagggttggggtctggagagcacgataagtgttttgtgtgagaaaagtaaaaacttagttattttcttcccgtattcagtaatccttgcatttttttcctcctcctttatacatacatttttgccagttactgacttctctcttgtacacatttccgggttcctaaattaaccaagagtcctcagccaacaaggantccaattgacaaagccacaaggtctggaaggtnttgaagtaaggggcatttcntccccnatgaaatcagggcancagggggaagcggtttggggttgggccggaacaggaggagcaaaaggacnagagggccagaggaagaaagattgcaggntaagaaaacgggatggccacccctgagaagnggacaagcaaatttggggcttagagtagaattgaggaaaaacccagggcagaggccaggaatgctgtaggactgactgggaccatgattgatgtaagttganatgggttggttgatccntggaaggccaagg

SEQ ID NO: 271273 - DNA, 856 bp, Homo Sapiens
  misc_feature (44)..(44): n is a, c, g, or t
tgggactgtccctgcaagtgggagttcaggacacacgctccttncagtagcaaaaacagcccctgccatcctggcgctcagagccctctgcacaccttcgaacgggctgtgtgtcccttctctgatggccagaaagacaacaccagcagaaagacggctgaacaactgcagatcctcctacccccgaagcctggtctgtctcacacatacaagttagagctgggtagacgggtgcttgcactttctggctttggtgggcgagaccttggcctgagaactttggttcacaggaagcttcccttgacaatacttgagtgcaaagcttcaatccaggtcccaccttggctgttgccaaggatgctcaagcgttctcttcaatcttccctgtgacttccaagaaacgacaagatctctagcccatccatcggtaaaccaagctgccaagtggcctggaaaattccatgaagaacacggctcttagaaacctcattccaaatctcaacacgccacgttcagcccaagttcagcttgtgcattgtgttttggaattgggacacgagtatctatagtcccttgctgggtgaggaactttgaccacacgcagtggagaaatgtggaaaataaactatttccaatgggaaggcagagaaatggagcctgtagccggccagaactaaaaattaaaatcctctgtttctctgatgatcttgtaaacctgatgagggcttgaattacctagattttccaagaagtgttcaattccttgaggttgctcattctggcattaacagcaaaaatttctcttccaattataaactgaagttcttgagaaaacgtatgaagaggcagcagagaa

SEQ ID NO: 271274 - DNA, 407 bp, Homo Sapiens
  misc_feature (23)..(23): n is a, c, g, or t
  misc_feature (38)..(38): n is a, c, g, or t
  misc_feature (51)..(51): n is a, c, g, or t
  misc_feature (298)..(358): n is a, c, g, or t
cttgcaagaacagttcttcaacntgccattcaatcacnatccaccagtatntgttagccttgagtaattttggaggttcaacttaactggaaatcacccagcatccccatatccccattaagcaaggagctcagcactgctccttggataaccaaacctattccccaaatcccatcgtgtgtgcgtctatcgtccctggtacccgttccgtagcatcaattctgtatttgcaggagtccaatcaggagacacaaaccactccaaagtttaaactagaatgagcaaggtggctcacacnnnnnnnnnnnnnnnnnnnnnnnnnnnnnnnnnnnnnnnnnnnnnnnnnnnnnnnnnnnnngttaccgtgaaaaatgattgcactccagcctgagcaacaaggcaggacc

SEQ ID NO: 271275 - DNA, 417 bp, Homo Sapiens
  misc_feature (195)..(195): n is a, c, g, or t
tgtaaacgaagggaagtcctcaccatatcagacttgggtttctaaaaggaaaaagacagccgtttaccctgaaactgcagggcagacatccaaaagcaggggacaaacattcttctaaagcaaaccaagctgctccccagagtgaaaggcggtttggtcctgccctttctcaaaggggtgcttcacacactacanagtttgcagcccacagcgtaagagatactgaaatattctgattcaaaggtcaaagtgcatgcagggtaattttagtagtatgtggtattttggaagtaagtttttgaaaaatattaatccatgtgggtaaaatattccagaaaatcctataaattttaaaatgtgccttttagcacgacttgtatatccttgtcttattaaatcaacattcatgcagaacaa

SEQ ID NO: 271276 - DNA, 307 bp, Homo Sapiens
gaaaagcaagaaaatgcagatagagaaaaagaagaaaataaaactggagtatttccacaacccaagtttagagttggcccccacctcccatgccatggactgagcagcaggggcccagcatcccttggatatggtggctgtgtcttcatgtgaaagaaactgaacttggtggtttttcctgccagttcagggagagattcttgggcatgttaatatattattcacttgctcaagtcaagcctccttaaaaccacagacctgttttcagcttgctactttcaggccaaattctttcagctttcatatt

SEQ ID NO: 271277 - DNA, 864 bp, Homo Sapiens
  misc_feature (60)..(60): n is a, c, g, or t
  misc_feature (133)..(133): n is a, c, g, or t
  misc_feature (612)..(612): n is a, c, g, or t
  misc_feature (621)..(621): n is a, c, g, or t
  misc_feature (625)..(625): n is a, c, g, or t
  misc_feature (628)..(628): n is a, c, g, or t
  misc_feature (630)..(631): n is a, c, g, or t
  misc_feature (633)..(633): n is a, c, g, or t
catctggcctcctaaaggaaaggaaaaaaaatttcaaaggtcttttcccaattgaaaggngcacttacaaactcttaaaatttggttcatcttagaatattgctgctaataaatctgcccaagtccgtgtccntcagtctcctgctctacaccacagcgtgcttctctcgggcttcttgggcaccatggggattccaatgctatgcctgtagaggccgcgaccagtattttctcttgccagtccttacatagtgcgctacttcagcactttctgcttctcattaccatggagacccaattatagacagagatgtgatctgtagaggctggcatgaccagtgctaagtccctgaagcttccaagtgtacatgaggtacagagaaaggaaagctagaaatgaaaagaaaaggaaatgcttcatgttcaggaaagctgcagggagaaacttagaaatggaagagagttcaaaaatggctaataaaaaaataggtaatgtggaaatttgtagcgaaggagagtgcctggtcgaagaaggttcttaatgtttgttaaaacgttttcacttacatgttttatctttacagaatgaaaatagaaagtatgagttggcanaaatactgnttcnaananncnccccttaggcattataaggagacatgagaatggttagattccaactttgcatggatgtgctctaataaaccaaaatgaaattttaatgatgttattaaaacagtcaactagttaagcctcaatagttttgtgccagtaagtcatttaatcagtgtagtggcattatcacttagcctctattcactcttaccaagaaagtaaattaagcaagaaaagtatttttggggggga

SEQ ID NO: 271278 - DNA, 354 bp, Homo Sapiens
  misc_feature (15)..(15): n is a, c, g, or t
  misc_feature (84)..(84): n is a, c, g, or t
aatgctaaagacaanaggaaggtttcagaggcaggatgattactccaggaaaaaagtaagtgtcctaacagcactcctaagttnattgatgcttcctaattcttcaaaatttcaaaatctctgacagtaaatatatggacaataataagaaaataggatttgctttcaagagacttaaattggaaccaagaaagtagaacctttgccacagtatgttacattttcatttttaaaacatttcatgaatcataccccatcatctccatgtacaaatgtgccacagaaaagaatatttgcaagtgtattttctaagtcctagctgctaagtacatgtagataaatttaaataattat

SEQ ID NO: 271279 - DNA, 412 bp, Homo Sapiens
gccacttaacctttaaaatttaacacttcggtgaaactggggtaaagactgtgggttttaataattaagcaagaccctggatttgaatcctgccatattgttagtcatctgcatttactgcctgcttgcctatggatcaagttatgaagggtcatgactccgaatttcatcatttataaagtagggataataatacgtccctcaatgaactcttatgagactctagtggaataatgtctttaaggatgctcagtctgtgcccatgcctggttggtggtcaacatatggtttgtttttaaccatcttatagtctctatctgaaaagtgaaccaaaagaaggcacaggaaggaataaggacccagacctgaacagtcagaacagaaaaggcttcctggagcagattcactttca

SEQ ID NO: 271280 - DNA, 456 bp, Homo Sapiens
accttgtgcctgcagggacccatggattcccatgtccatagtaatcttgactcatcctgcagagtttctggccattactgggtcgatttgcagtcgggataataattgcctctgttgagttccttgatttttttctacagaatctccttttgtttcctcttctttaatgggggaacttattctgggggtcctactttgtccctggaccacttctgctagcaattcttcttgagaagttcgagttctgggagcaactggaagtgtctgtttctgtggaactgtagagtagttagttgtttttgttacggattcttgagcttcagatatagccttcaaaatcagattcttgttagcttgtttagaaggtggaagagaaggtctcctttcaggctttgcaggcacagacacactgctggagatgcttcctgttcgagacccgtaatcatcatcttcttc

SEQ ID NO: 271281 - DNA, 334 bp, Homo Sapiens
gaaagcaagcttgcacgccgtctctcaagtctctcagcattctccccaaacaagaaatcaagtgccagagcttatacacttaatatttgagaccaaaaaagaaaactccaaacgagagatttactcaaatgtgcttgtctcccagttactttataagaagtaaatccatgtcagaagaaaagatgcccatgtcttgttctgcatgggaaataagtgccatgtactaaaagaagcctaaaaatggtggcacaagtttctttaaatggctaaaatccctcaaaatactgaacatctcatcagaccatcaagagttatgttttttgtcacacattat

SEQ ID NO: 271282 - DNA, 300 bp, Homo Sapiens
agacgggtggatagagatgtttaaagttcaacaaaaataaggatagtatacttttatccttataaatataataaacattataagaatgttgaaaccctttcaaaatcacttattttttaacttagaattttttgaagaaatattaccagtaatattttcaaatcctaagaattatggcttcacttaaataaaatgatattaaaattaaaaccctggtaatgtaaaacgtacatattaaagcacaatatgtgtgtggtgtttttttaagttaggacagtagagttgtcatttgaagaaaaa

SEQ ID NO: 271283 - DNA, 263 bp, Homo Sapiens
  misc_feature (55)..(55): n is a, c, g, or t
  misc_feature (120)..(120): n is a, c, g, or t
gggcaccgaggaaggtggcatgggctggggctgggcaccttacctgcagcttatnagtgctcagctgcctgctccttctggctcaactgggcttgcagttcattcagctgggcctggagncgctgggcctcatgcctggctctcgctccctgagcctggacagcctgagaagaaaggccactcaggaaagctggtctggccgctctacccaagtccgcttatctgcaccagccactggggctccacaggtgcttcagactcct

SEQ ID NO: 271284 - DNA, 263 bp, Homo Sapiens
  misc_feature (151)..(151): n is a, c, g, or t
tccttttgacaaggatgttcacattcttgacactcataagaaatatatggtccagattttgataaatctcaaaacaacattttaggaaagcacagtactataaaaagttcacaacagtcacactactaaatagtataccagtaaccaaacncacggctctagcccagatgagataggctatgggtatgtaaaattcctggctcagtggctacatccatctttctctcttccattcaagacacaaatgagggagacagtacaag

SEQ ID NO: 271285 - DNA, 580 bp, Homo Sapiens
  misc_feature (113)..(122): n is a, c, g, or t
  misc_feature (335)..(335): n is a, c, g, or t
  misc_feature (525)..(525): n is a, c, g, or t
aatgtatcttaaaggacataaaatttaaaaacttaaatattgtaatatgacagataacctaataattgtatctacattaaaatgacaaacatgatactgctgcttgtcaaatnnnnnnnnnntaaagaaatagaatgccttttttatgtggatggagtatcaggttgaccacaaaatatattgactcaaagcagctaatgcatctttagttgcgtttttatctgaatggtttaattcacttgtactcctatttaaatcctacatgaaaaatgtctagattattgttcttgactgcataggactgcattcagcataaagaatgcgctatatttatngggattagatatatgggatctaaacattttgaatcttgaagatgtaattccatcagcagtttctggtggtgtgctactccacagacatcgcagagtgtgagcaggatgcttgggtgacctcaagtctgggcacagagagagcttttcattcaaaagttgtccttcctcgggtgcataatccattaattcnagcatagactagtacccagctctggtggccttccccgagtcctagggaatcatgg

SEQ ID NO: 271286 - DNA, 602 bp, Homo Sapiens
  misc_feature (24)..(24): n is a, c, g, or t
  misc_feature (37)..(37): n is a, c, g, or t
  misc_feature (45)..(45): n is a, c, g, or t
  misc_feature (65)..(65): n is a, c, g, or t
  misc_feature (81)..(81): n is a, c, g, or t
  misc_feature (87)..(87): n is a, c, g, or t
  misc_feature (117)..(117): n is a, c, g, or t
  misc_feature (123)..(123): n is a, c, g, or t
  misc_feature (136)..(136): n is a, c, g, or t
cacaccggtgccataccgctaatntcccaactgtgcntcaagaantaggctgcatgggcacaccngatccatgccggcacngccatncccatgatgggattcccactttgttgtggnatgggntgaccagtggggnagacgtgcttctgtggcatctgtcccaaataccagtgaaggtttccaaggcccacaccttcctgccttccactgttgtttgggggccccaatggttgagccatgggtagctggggaggatgggtggcctagaaagaacactttttggaaagccccttttgcacagttaattttcctggttaaaataaatactttctatagaagtatctgaacaggaaaatatcactatttacacagtgaaataaattcccacagtggtgtgtataaatattatatatatgtatttgaaaccagttactaacacagtctccgagaactatttagaatgcagaaaccacactagtgaaatcaataaccttaagctatagtgactctaaaaataatccctacctgtggtataaatataaaaaattatgcaaatcttgttggtatagtctctttcccaaaaattagctccccctcgtgcc

SEQ ID NO: 271287 - DNA, 660 bp, Homo Sapiens
  misc_feature (154)..(154): n is a, c, g, or t
gctgtaggtctttgctcacagaaagatccatttagggcagataatttccagtggagcctgaccacgttgcagccactgctgattctcctgccatgcgtcaccccccagatgacatgtgtcctgcctttgttgccagtgcctggtagccataagnctgctgatctgggcaaaacacggaggtcaggagcaagggcagaggctgcaagtcccgaggctcagacatttgtcctttcttcttctgtgcccacaagcacctgtgtgttgcatgttgagtttcagtggaagtcatatacttctgggcttcatagtttatggctgcactgtgggacatacaccagctacaaggaaggtgaaaggataggacccgatgaagctgaaatcacatttattctaactacttatagcagcatagcactttgttcatgaaggctgagataagtcgccgaggcagtgaaggaacttttgaagacgaacaagggatgtgggtgtcaagagagctgctgccaggtgggaaagaccaatttggccacataacccctgtcatctgccatccagatactaaaaggcaaagcaaagtgtaaattgaattttctatgtgacattttaaatagtatttctgttgcagcctgtgattcagttaacttacctcagctaagcctc

SEQ ID NO: 271288 - DNA, 575 bp, Homo Sapiens
  misc_feature (70)..(70): n is a, c, g, or t
  misc_feature (232)..(240): n is a, c, g, or t
  misc_feature (484)..(485): n is a, c, g, or t
gttattgaaagcttttgggaaaaaatgtggcataaatcaactgtagtaataggtaaactaatactaaacngaagtccttacatagtccataaaatgactcaaatggaaataacaacaaaaatattaacagatcatcttgcggtggtaggcttatgcaacacttatttactctcttacacagttttgtatacactccatttttctataatgaacacctatcactttcagaatnnnnnnnnnggcagacatattttcttcttttgctgatttgtctcagttggctaacttttcctcctgtgtgatagatctattttctgcaagtgatgaagaaaaggagttaccagtatagtatgggtttcagagccagacaggctggactcagatacgcggactctgcggactcaatggctgggactctgaactaggttcctacactctgccccacaccagggttagagggcacatgcaatgtgcatacagacanngccaggcacagagcatacttggtaattgtttggtattattactgttgtttgaagacttttttacaaacagaaatctgctagtggagtctc

SEQ ID NO: 271289 - DNA, 409 bp, Homo Sapiens
  misc_feature (249)..(249): n is a, c, g, or t
agaattcagcaggccataagccatccagcaacagagagtcatctaagcagagtgctgcaaaagaaaaggatttgttgccttctcccgctgggcctgttccttcaaaagatccaaaaacagagcatggctctcggaagaggactattagtcagtcttcttccttaaagtcaagcagtaacagcaacaaggagacgagtggcagcagcaaaaacagttcctccacatcaaagcagaagaagaccgaagganaggacttccagtagctccaaggaggttaaggtaaagtgttgggggcctggggttttgaaaatcattcaacttggccatgtggacttttccagggtgacactgtggctttggaaattatttgttaacatcttcagttaaatatattaggcctatgtctttt

SEQ ID NO: 271290 - DNA, 490 bp, Homo Sapiens
  misc_feature (15)..(15): n is a, c, g, or t
  misc_feature (26)..(26): n is a, c, g, or t
  misc_feature (31)..(31): n is a, c, g, or t
  misc_feature (69)..(69): n is a, c, g, or t
  misc_feature (87)..(87): n is a, c, g, or t
ccctcgggggggccnacgggttcaangctgnctggaacccccccctgcctcacccggcccagccagccnggtgccaaccccccgggnagtgccgtgaaatgccgtccccacccccacaggaggagcgcctcccctcatgcctcctgaacagttcctgccgacaagcacccagtttccaaatcaaaccctagtataacaagtactcccataaaacggtgtgcctaaggcaaagaaataagcacatttggataatacaaatatccagaaacaatggaaaagaaaggcttctattagagaacagaaggcttagcatatatgagtgcgcaatgatcctgatagctacggatactgtttttatttacagtggcaaaaactttattactacagaaggtcactgacagacaatctactggctggttaattgtttcaaatttgattctttatcaagcaaaaatatcacacaacctgatcaacacacacacaaacgctt

SEQ ID NO: 271291 - DNA, 525 bp, Homo Sapiens
  misc_feature (36)..(36): n is a, c, g, or t
  misc_feature (45)..(45): n is a, c, g, or t
  misc_feature (98)..(98): n is a, c, g, or t
  misc_feature (131)..(131): n is a, c, g, or t
ccgtctcaaaccaaccaaccaccaaacccaaaaaangaaatttcnatgcctagacatgtgtaacatctgctgatgactgtaatgtttgtaatagttcntagtgaaaatatgggacttgtacaaaaaccatnacctattatgaaactatcctctatgaccaacatccagatttgttttatgctttctacctgaaagcacaagaacaaaacgtttctagtccatataagtactgtatacatgctaagtgtgatgagtttttctaccttttgttaacatacatttaaaaactcaatcttcctcaatgagaaattttcctgattaatttgccgtctgtccctttttcccaataataaagatcttgtgtaatggttaaaaatataaatttaaaaacaggatttccttaatgttaaagatgtaggcaaaaatattggatactggggttcttttaggattaaacctctaatctgtctaattggagaaaattatcaatgtggtaatggtctggattgttttacttcagaacaa

SEQ ID NO: 271292 - DNA, 608 bp, Homo Sapiens
  misc_feature (32)..(32): n is a, c, g, or t
atagccattgagccaaaaggtaaattattggnattatgtaagaagtaagcctcaggtatggctagatccaaggactcaagtaattttagggaattgtgtctccatcctcggctcccacccttcctaggttggctttgcttctcatgcccagctttgccaggtggtgacttagagatggccccaacaccttccagcccctataccccttactttgctttagccttcccccgccagaattctgtaaaagtctcccagttgagttttcattgaccctagattgggtcaaaccgtcccatcctttgaaccaaacacttgcagtctgggaatgaaatgcttgtgattggccaggcctaggttatgtgtctgcaccaggggtcgaaggtggactgagaatgaaaataagaaagccagggatctacatggcacccttggggctgatagaaggtccatggggctggagaaggggtctgatcatgacacccctctaagccacgtgaagaaattgcatactgaagacagtgggaagctttgaaagtatagtgaaggcgggggtgacatgccaccatatggggacaggcagggtttgaagctcatggtgctagctctcc

SEQ ID NO: 271293 - DNA, 359 bp, Homo Sapiens
  misc_feature (50)..(50): n is a, c, g, or t
  misc_feature (73)..(73): n is a, c, g, or t
  misc_feature (91)..(91): n is a, c, g, or t
tggtttcggcacaacgcatggggagccccaaagtaggctgtcagcaaatnccagccttatccatgaatagtcntctcatacggacggtganaaccataaataaatggcgcaaaaacctctttgcacggaaaatacgcccgttttctgcagcctttccccttctgtaccctgctgggccacatctaggctaactcgatcttaaatcctggcttcttccaaagagagagcactaacacaagccgggatgatccacaccagaaggtaaacaccattcaggtaactgaagattaaacgtagtgagctctgaatagccaaagcttaaacgtgaaagtactacagcccaatattagtaaatgact

SEQ ID NO: 271294 - DNA, 187 bp, Homo Sapiens
accaactcagccaccataggatagaacaccaagtggggtcttggggtccataaatccaagcctgggctcttggatggcagtttgggacctgctctgggccagagggaagcccatttccctgaaaggtaattctcaggcctggaagcagcattcacacaagctgactgaagaacacttagacctttgc

SEQ ID NO: 271295 - DNA, 552 bp, Homo Sapiens
  misc_feature (18)..(18): n is a, c, g, or t
  misc_feature (28)..(28): n is a, c, g, or t
  misc_feature (37)..(37): n is a, c, g, or t
  misc_feature (53)..(53): n is a, c, g, or t
  misc_feature (76)..(76): n is a, c, g, or t
tttcccccagacactggnacataatctnttgggcatntacccgaaattttccngtgaaatatggagaaggaaagtnttggactgaccaccggcccggtgatccctgttggtctatgatttttggcgacgccaagaaaaacagcatcttattactcaccctatggccagcgggaattcactgcgggatttgttcagttcagggtatttaataacgagagagcagccaacgccttgtgtgctggaatgagggtcaccggatgtaacactgagcatcactgcattggtggaggaggatactttccagaggccagtccccagcagtgtggagatttttctggttttgattggagtggatatggaactcatgttggttacagcagcagccgtgagataactgaggcagctgtgcttctattctatcgttgagagttttgtgggagggaacccagacctctcctcccaaccatgagatcccaaggatggagaacaacttacccagtagctagaatgttaatggcagaagagaaaacaataaatcatattgactcaaga

SEQ ID NO: 271296 - DNA, 441 bp, Homo Sapiens
  misc_feature (24)..(24): n is a, c, g, or t
aaagacctattttcctggcccccnaaagatgaaggctgaaagtcccccaaatgcaagacgatttttgcccctgaagcctaaacaagcaattaaatgggatgaagcaaaggacttgtttaagtcctttggctgttgtcccacagggtcatggtgctagctcaggcaaaaatggatgagcaaggacttgtttagtcctttggctgttgtccacagggggtgatagcgctcagtgttatgtgacgtcagaaggccatcatgttaaaatatagcacgatagggacaactgatcactctcttgaagtccggagctcttagaacagatggtctgtttttctgtagtaatgctcacaccatgtcttcccactcatagctcccactcactgccccttaccccaccccagcctccagtcgtcaaaatttaaagctgtaaagggaagacgt

SEQ ID NO: 271297 - DNA, 677 bp, Homo Sapiens
tttaaaattgcacttctgaatttactccacaatatcaaagtttaatcagtacagtccaaaagatctatacagaggtatgattcttaaaaaattataattgagttgtacagagccagtgctcagggaatgccactgacaggaattcccgacagctccagtcattgtgtgtgcttcttgggcatgggttcaggtctgtgcgtactcggtgttgttataaaggtagtccaagagtggaggattgggaaaaggggaaggaatattcagaattggagacatcttgctttacacattccacataaattacctgaggcacacatccaaaatatcctgagaattagatacagccatttccagtttggaagaaggacagaataatagagaaccttctggaacttattcagaaaatcaaaggagttcataaagcaagattagtgacagaggcaagagctgaactgaagtaccttgacttattccagcactaggatttaaagcagcagctaaaatcccatctgtctgatccaggagacttgaacgcttgggcactgtggctgggaataggggaaaaagtctccatcccattgcccacacactgtgcaatcctgaaatctttgttttctacagctccctctagctagtatcagtttccacaatcggggtgggtttagaagcaaaataac

SEQ ID NO: 271298 - DNA, 210 bp, Homo Sapiens
  misc_feature (163)..(163): n is a, c, g, or t
atgagccgtcactcccggaccaattttattttctgtaaaccttttgtatagagctgctgacaaaaggagtaactaagaaataagaagatatggggtccaggaaacataacattgaatacataagaatggggaaaaaggatgactgtgagaggaagttctaagncaaaaaaattaatacttaaagtgatgggttgacatatggaaagatct

SEQ ID NO: 271299 - DNA, 342 bp, Homo Sapiens
ccccaaagtacattttttacacctgattggattttgttctagttggcctatccactatgtggtatgagtatacttcctgggtaatgagaatggcaaacacttgtgattacctagttgtcaagatgattactaattctaacctagcattctaatctagagttcgtttctagattagaattagtaatcaagtcacgagtgaaagaaaaaaagagtttctgggaaggcaaaaggaaaaattggtaaattcacttttactgtttacatattgacttgtttttcttaatgttaactgaagaatttgtttcgtcatccaaggtgcaaataaaagtcctgagagtttaa

SEQ ID NO: 271300 - DNA, 601 bp, Homo Sapiens
taaatttgttgaagttggataatggtttatgctatctacacatatatatggcacctaagaatttccatggatgtgccctgaggtgctccatgtcttggtaagcagtgtggtgcagtggaaagagtaccactctcggtgggacccaagtttgaatccagatgtatggctagggaccagtttttgtaacttctttgaacctcactctttctcactggtagaagggtattgtagtgagaattagaggggtaaagtctgtaatatacctagcacagaacctggcactagtaggtgttcagaaatcatttcattttcatcatgggaaatgagtggaatgtagagaagttaatatggcagagtgatagggcagaccaccttgctcctatttcgggtccctgctgaatctctgcacatgtcaaggatgagttctcatgtatggtcaaatgaggagtttctagaaaagagctcgtctacctagcaaaacaattgtatttttcagtcctaggatatttagctttggtgggaggaagcagatctaaggagattgttaaaggcctcaggtaatgaatggtgagatgcttgtatttgaatgtgttgctaaaaa

SEQ ID NO: 271301 - DNA, 566 bp, Homo Sapiens
  misc_feature (21)..(21): n is a, c, g, or t
  misc_feature (47)..(47): n is a, c, g, or t
  misc_feature (386)..(386): n is a, c, g, or t
  misc_feature (499)..(499): n is a, c, g, or t
  misc_feature (504)..(504): n is a, c, g, or t
  misc_feature (545)..(545): n is a, c, g, or t
aagggtaccctgtaaccctgncccaaatttacccgcaatgtggaaanaaacattccagacagacagactgaaattttgcggaaaaaaccccggtttagaacccgtgcctgaaaccactcccctcctaccctttaagcgcccacctgctggttaattctggaacagccaatgggctctgcaggaattcccggggcgaatggtgacagagcaagcttgatgcctggtagactgtagtttctggaaaaaatatctctggaaagaaaggggaacttccagcaaagcaatgatggcattgcagaggcatgctgtgtgcatataagaaacaggggtatatttccgattgagtgattctacctcctccaagacatgattatatacagacatcnattcttctttcatattcactatcagcatgggctgttccagtagatccatattcctggaaacttgctgattctggatccaaaatcagggcttctattgcatgagatatcagtanaacantctgctgctgtagttcaacattcctcaaagttctgagtcanatcaaaagatgcctggtaaag

SEQ ID NO: 271302 - DNA, 534 bp, Homo Sapiens
  misc_feature (200)..(200): n is a, c, g, or t
atcccttgcttgatgggctgtgctcccagggctcctcagctacagcaaatccctgaagctttcagttttgcctctgtgctcaaagaaggccctccataaacgtttgcagaatgaatgatgaaaacaagattgcaaaagcgtgtcaggcagcctcacagataattacagtattttagcacaccacaaatactccccacatnccgttcccactggtccagcatattattacttactttcagttcagcttgctttcaggacgagaaaatacaaaacggatgggaaatggtctaagatgactggagctaacggtttgagtttccacattatctaagggattaccaaggcaagatgtagggctgtcttaaggaatgatacggcctcagtgcaatggatgtttacaagaaatcaagaataaaactttaaaaagcaaacaaacattacagatacaacattactgttggtgattattttgtgcctaccaggagatgactgctctaatcaggcccatctagatgtcaacgagaaacccgagcg

SEQ ID NO: 271303 - DNA, 468 bp, Homo Sapiens
  misc_feature (356)..(356): n is a, c, g, or t
gcgctttgctgctgctgagagttacctgaggcacttgttaaaaattcagcctcccaggtccctcccctcggagagcatggattcactgggtctgggaaggagcctggggattttaatttttcacaagtgccccagatgattctcatcaccaagcaaattttggaaatgctgttcaacagcgcccttaaattggaaacatctttgcagctcgttttattgaaattcataatcaggggtgtcctctagctcccacggtctccagagcaagcaaggccggctatggagctgccgtcgtgtgaccacagtgtgatgtctcagaagggctctgggtgggctgagcatctgggctgtgcctnggctctgcttttcaccctggacaaagtcgctgtggacttcaatttcttcacctctaaaatgggggacttggaccaggtagattgctgagctcactaccaggttcaaagttcg

SEQ ID NO: 271304 - DNA, 319 bp, Homo Sapiens
  misc_feature (126)..(151): n is a, c, g, or t
aaacttgtgcatcagcttagcggtcacgtgtgaaaatctctaaaagctagtcacagctaagccaaatgcacaaccttctaagactactgttacctgatgtatcaatgtgtgtgtcgggaggtagtnnnnnnnnnnnnnnnnnnnnnnnnnncgcgcgcgtgcttgtatacaaagagtaaacatagggaggcattatgaattgacactgtaattcaagaggttaccataaaaaacaaaaatggcttcaagaaactaattagaatatgaatgtcaatgctctgtaagatcttagagaacatctaatcacattatagatagt

SEQ ID NO: 271305 - DNA, 709 bp, Homo Sapiens
  misc_feature (581)..(581): n is a, c, g, or t
  misc_feature (601)..(601): n is a, c, g, or t
  misc_feature (622)..(622): n is a, c, g, or t
  misc_feature (634)..(634): n is a, c, g, or t
  misc_feature (643)..(643): n is a, c, g, or t
  misc_feature (666)..(666): n is a, c, g, or t
ttctaacaaccaaataaaattctagcaataaattgaattatactgctatatttgtatatactgtaccataaatagtatgtctgtacctggaaggtatttttttgagaactgatttatatgaaatatacttgagggtaatgtagcttgtcctttttagtttcaaattcttattcataggcagatactttgaagacaccttaactctttgttgtgtgtattttcccttgcatcagataactatacatggagaaatccattttgttttttggtttaacttcccggtcccttccaacctggggctggtctgactagtactcacccctgagccagtatacagtaccatcctctccccctaccaagtttgggcagaggtgtttatactggcattctcagatctatgaatatttttgtcatcctggcctggagaaagtacatcttccagggcaaaagtagggtatcttgaactcctttcttctgagttgaggcagactcactgggcttaagcatcccattaaggcctattatttagtgtggaatttgggggactttttatttgtatgttgtcttaacttactgagccngtggacttgttttttaggcngtaggttcaaggcctcaaccngccatatctcancttgggganggagggaccgggtagtgaggttngggtttgggtttggggttttaaacccctttttaccttttcagt

SEQ ID NO: 271306 - DNA, 597 bp, Homo Sapiens
  misc_feature (83)..(199): n is a, c, g, or t
  misc_feature (517)..(517): n is a, c, g, or t
gcaacctctgcctacccaattcaagtgatttttgtgccttagcctcccaagtagctgggaccacaggcacgtgccaccacacnnnnnnnnnnnnnnnnnnnnnnnnnnnnnnnnnnnnnnnnnnnnnnnnnnnnnnnnnnnnnnnnnnnnnnnnnnnnnnnnnnnnnnnnnnnnnnnnnnnnnnnnnnnnnnnnnnnnnatgagccattgtgccttgttaactttgataactggattaaagtgatgttctgcactgtaaagtgactgttgttctgctttttaattttacttgatagaacctagaaatgagtcaccaagtcatatcccatattctgggggaagggaattaagctcccaacccctgaagggagggagtatcaaagaatttgtgggcatgttaaaattcctaaagtaattagttaatattttgggggaagataactctgaggttatacagaatctgatttctccttaaaaatttcctctacttattttagcattcattagtgaatcctcntgcggcagcggttgattatattattctgttggttttctatttttctaattctttctacttttatgatttggaatcctttt

SEQ ID NO: 271307 - DNA, 346 bp, Homo Sapiens
acaagacaccacgccagacccaaaatttttttctatagcaacctgaactgacttaaccaggagatttcaagaaaacaaatgaaaacacaatgaatgtgggagagaaagagaatgagttcaactcaggccaaatttaaaatggctgatgtatgtccaagcagaataatcagtaggtagttggatacgtgaggctgaagcattgagaagagtctgggccaaaaataaagacacagtgaccattcatagttacattagatagaactctcggaagggtgtgaaagaggacaaaacatagaaaactgactggggttttcagatccttgttattatgtacacattgctgtgc

SEQ ID NO: 271308 - DNA, 595 bp, Homo Sapiens
  misc_feature (155)..(288): n is a, c, g, or t
atttatttatttattattgagacagggtcccactcagtcatccaggctgcagtgcagtcggcacaatcacggctcactgcagcctggacctcctgagctcaatcgcccgcccacctcagcctccccagtagctgggactacaggcatgcaccacnnnnnnnnnnnnnnnnnnnnnnnnnnnnnnnnnnnnnnnnnnnnnnnnnnnnnnnnnnnnnnnnnnnnnnnnnnnnnnnnnnnnnnnnnnnnnnnnnnnnnnnnnnnnnnnnnnnnnnnnnnnnnnnnnnnnnnatgcgcctggccaactaagctaattttttagcaacctttaaggttcctgagattgtctctgcccagaaacttacgggacggggatgtatgctgggggaaaaggttgggggagaaaaaatattttacaaacctggaactgctctgttattgaatgaatataattaaaagtataccctccaagcaacaggaaaaaataattcatgtgtctaagctgagataccctggaaacttgcaggaggacaatcactaataaaacactcctggtccccactgctatgtgtctaattccatgaagaaatgactgtag

SEQ ID NO: 271309 - DNA, 402 bp, Homo Sapiens
  misc_feature (61)..(61): n is a, c, g, or t
  misc_feature (310)..(310): n is a, c, g, or t
  misc_feature (333)..(333): n is a, c, g, or t
  misc_feature (345)..(345): n is a, c, g, or t
  misc_feature (350)..(350): n is a, c, g, or t
  misc_feature (367)..(367): n is a, c, g, or t
aaagatggatgaccccaaagacgaggaaaagattattggctccattttttagatgcggcancacgctaaggtctagacaggggaagggacttgccccaaatcacagttagagcaaatcagtctgaatcaggaataactccattccctatccccgcatcctgccctttcactacgccacagctgcctgggctgcctgggagggaacaaaggagggccgggcaaggaacgccattaccaactggcaaatccacagggcaaatgcaaggagggacaggaaaacatggggttttcaccatgtttgggccagggnccgtttttttgaacttccttgancttcagggtggnttttnccttgccttcgggcttncccaagggtgcttagggccacccacgggcccggcc

SEQ ID NO: 271310 - DNA, 350 bp, Homo Sapiens
  misc_feature (91)..(91): n is a, c, g, or t
  misc_feature (116)..(116): n is a, c, g, or t
gtgggcaagtccatccccaaggctgtaaggaaggagcagctcctccataaggccaagcagaagcattagggaaatcatcctcagttttagnctgcgtgttcttcaggagagaagtncctgagtgaggaggcccagctgttctcccagatccaactcctcgggggtttcccacagagagctggtatcaaggcagctgtcaggggcggcgtgcctggtgatgcggcatcttacattcatccccatctcagaatgggcagccagtctcagattcaaggaggaggaatcctgaggtgtggcgttcaagtcctgcaggtagacctgaggtcccctggaaattgtgttgatgctga

SEQ ID NO: 271311 - DNA, 603 bp, Homo Sapiens
  misc_feature (189)..(189): n is a, c, g, or t
  misc_feature (523)..(523): n is a, c, g, or t
agacttgcgcacctgaaaagcttgtctactgaagaattactccagttgtaagattgagccctctcctactctcccccaactcttatgcacagaacacaggcagtctccactattgataccagttaaaaatttcttgttattgttgctgttgttgtttgtataaaggaattgaacaggctgcttgcagangagataagagttggtgctccagaaaaaaatttctcttctagtggaaataagtgcccctacccccagccggtcagctaattctccactgacagctgagacctcctactcaagtgcctgttgccttcaggtatagaagaggtttcctgaagaaacagacctaactgtacaacagcagaggaaacccatgccaactgttatacaagttaacagttatgttgattcttaaatggggaatgggtgagttaggaaatttcggcaggacatggggcgatgggggaggggaaggagggattaaggaaaagttcacggaggttaggatttagggggcctttgnaaattatggaccaaacttcttggagggggaaaccaaaggaccattttggggaaagattaactttattttttatttccctt

SEQ ID NO: 271312 - DNA, 406 bp, Homo Sapiens
  misc_feature (19)..(19): n is a, c, g, or t
  misc_feature (46)..(46): n is a, c, g, or t
  misc_feature (54)..(54): n is a, c, g, or t
ttggccacaacccctttgntcctacggaaatccccaaaaggctccnaccccccnaaattccggtcgcccccccactggcctaggaacgaacagctgtgatttttaaagttggttttaattgcgaagggggtgccatggaataggggaaaggtggaaagagggctgcaccctcagggggcctctctgggagctggggaggggtgtccctggcctgggtgttcaagctccccgctcagccacgacagatggttttctctccagaacagctcgccctgtgacactggggtgtgaacgcagccggggtgctgtcacccagccccaggggagaggggggatcctgagacatttggagggggctgacaggcttaagggggggtgggaagggaagggaaccaaaaccatcccg

SEQ ID NO: 271313 - DNA, 473 bp, Homo Sapiens
  misc_feature (332)..(332): n is a, c, g, or t
tgggacaaactgggggcctgtcagaacagccacttgtgccgggaaaggccagccccggcctgctccgatgaacgtccaggacggtggctgcaagcagggaaccagggctggccttggatctgtccagtagggtcactgactgggcagggcttgctgcatagaggatggctgcattttgtgcctcaaagttggttgaaatggcctacgaagtgtggagaataacccactgaatccccaaaaagttcactgcgccttgatctgatcccaagtaacagtgactgcagttagggtcgaagaattctccgaagcagcggtcatgcaggcttttgtgntgctgacgcttccctttttcacaacagtaaaaagctatcaatgggaaattgtggacttttcccaccagggactcaatggggactcaatgtgcaatattcagtcaacataaaactctttaagaactcctcttgactggtgac

SEQ ID NO: 271314 - DNA, 462 bp, Homo Sapiens
  misc_feature (95)..(95): n is a, c, g, or t
tgacaccagtatctaaagttaggccttcccacagaccatccaagcatacatgctgggtgcacgcctgtcggggagggtagactccacagcgtgtncctttgggtaagagcgcccctttctacctgggctaccctctgccttttctggggcagacccttatttccatatccttgaaaatgtccaccagtagaataatttatgcttaattgggtgtcttacaagacatcttgattattttttaacatgtggcaatgcagcacttttcctttggaaggggaaaacaattttttctctgttattgtccaatatttcagaccattttaaaaaaccaagttttgcagtaagaacgaacccccacccttccaccacccacccttaaggcatgttcctaaaaaaagacttaaattcataagtaatctggtggaggagatgactcacagctttcccttggagcttgatggc

SEQ ID NO: 271315 - DNA, 508 bp, Homo Sapiens
  misc_feature (485)..(485): n is a, c, g, or t
tcaactgcaggggaggtttgaaagacagcagctttgcggacgggactctctattctcagcatggactaagttactggaaggaattgagtttaaggggtctaatttgggaccccttaaactagatagcttctagttttgctagctcttgatagtgtggtttgggcatttggtcaaaattattttcctagcataagataaatccactttgaaacaaataacaaaggtcatacaaaagctgcatgtttgtgattattttttaaaaagttatcctacattttaaattttagtagataatgttccctgatgttagtgtgtataactgagagttaggtattgcaaaaggaaaaaattttaattctaaggacctcgtgcctatttgtcaggaaaataaaaattgtcgtttcaaggaactttaaaagttaatttacatggtgtttcttgaggtgtttttacaaactggcacaactctattgggggggtggggntttccggttccatctttatttta

SEQ ID NO: 271316 - DNA, 700 bp, Homo Sapiens
  misc_feature (384)..(384): n is a, c, g, or t
  misc_feature (448)..(448): n is a, c, g, or t
  misc_feature (560)..(560): n is a, c, g, or t
  misc_feature (591)..(591): n is a, c, g, or t
  misc_feature (596)..(596): n is a, c, g, or t
  misc_feature (675)..(675): n is a, c, g, or t
  misc_feature (687)..(687): n is a, c, g, or t
ggcacgagactggaagaattttcttccccaaaacagaattataaaagcttactttaaacaggaggcagaataattcttttaggaaaccatttcattctgtttctactaacctataccatctgagaattctaggaagaataataaaatctcgtgtattccacagcaaacttacataccataaagacagaattcctaaacatcttggagccgtctgtctctcccatatgatggctgtctgtatatttttacttggggtgctgctttattggctttgaaaacactgtcagataagctcagtaatatgttaccatgggataaaaatatgtatccctgcctaagaataacttgtggcatttgttatggggaaatttaattcatatgggngttttacagtactacttttgtaacttccagactttctaaaacattctgcttaaaaaccatatanaatataattccaaagtctctgctgtcaagatacgatgcgagagaaagcacgtggccatgtatgctttaaccttaaactgcatacacatgtagtgatacctaggcttgcattntagatcaccgtgtgctcaggccaggtgtgantcctngaggtccatggaggtgcagagatgagatttactcctattcacggttggaagtgatttggctttgttaacaaaaaattgncagctaattggnctagcttgtcatt

SEQ ID NO: 271317 - DNA, 449 bp, Homo Sapiens
gttagcttcgatggcaaccatatgggaatctaaattgcgttttgaattacagggagatggtaggaagaaagctaaatatggttatgaaagtgtcatatgggaaaagtgtaagaaaggtataaagtggggaaagtaattgaatataggcttgcttagtgtggccactccctctgtagggcagtatgaaggcgcagaagcattctcacttgatatactccgcagattgaaatgaagccaagtggggagaagttggaaaaccaaatcatgtttcaaccaccataaacttgccaaaatgttgcactcatttagatgggtcactttgttttaagtgtccacaggtaataaggtagtccctgggcaaaatggtgaaagcaatctgcatttttaacagaacttttcactaaatgatgtttttcttgttaagcaccccaaagagtcttcccaagaat

SEQ ID NO: 271318 - DNA, 401 bp, Homo Sapiens
  misc_feature (16)..(16): n is a, c, g, or t
  misc_feature (22)..(22): n is a, c, g, or t
ggccatcaaaaaacancccccnggccatttgaattggtaatgggcctaaaatgtcctttggtttttggtaacaaaaaaaagtaaaaagtactgtttggggtccttggggcatttatagagcttagcctaggatgagatatcacagtataagcaacaaaacgtcaggacacgtaagcttcatctcctcactctgctgcgggacatacccaccatatgaactttcagggcccctctcacccttctggtcttccccattgaaggctcataggtttgttaatgcaatcctcacacaacttgtgatctccttaagtacccccatcttatcataatacaaagaaggcacaattgaatggacaaaaatcactcacaagcctatgacgcattcaggaaaaaagaaaaac

SEQ ID NO: 271319 - DNA, 761 bp, Homo Sapiens
tccccaccgcagacaggaccagggatttccatgatgttttccatgagtcccctgtttgtttctgaaagggacgctacccgggaaggggctgggacatcggaaaggggaagttgtaggcataaagtcaggggttcccttttttggctgctgaaggctcgagcatgcctggatggggctgcaccggctggcctggccctcagggtccctggtggcagctcacctctcccttggattgtccccgacccttgccgtctacctgaggggcctcttatgggctgggttctacccaggtcgctaggaacactccttcacagatgggtgcttggaggaaggaaacccagctctggtccatagagagcaagacgctgtgctgccctgcccacctggcctctgcactcccctgctgggtgtggcgcaataatttcaggaagctcagggcctggctcaggtggggtcactctggcagctcagagagggtgggagtgggcccaatgcactttgttctggctcttccaggctgggagagccttccaggggtgggacaccctgtgatggggccctgcctcctttgtgaggaagccgctggggccagttggtccccctaccatggactttgttagtttctccaagcaggacatggacaaggatgatctaggaagactttggaaagagtaggaagactttggaaagacttttccaaccctcatcaccaacgtctgtgccattttgtattttactaataaaatttaaaagtcttgtga

SEQ ID NO: 271320 - DNA, 391 bp, Homo Sapiens
ccagaaaaaggagccctgatgagaagccatcccagaaagactgaagaaaatgtgggaggggagtaaagctgccaaagacccaggaaaagtgggaattttaaggagaaggaaatgatcaacagtatcaaatgctatcagctgattcaagtcagttgagaggatggccagggctgattggcaccactgtgtttaacaatgaagaggtcactggtggtcctactgagcgtgatttctgcagagcagtatatgtggaaggataacagaaaagcaaatgatgtgataaataaaaggcaagtttataccattagtggtagccgtagaggaatggaaggttgagggaaggtttcatttaaagatggtaaagaacacactggcctggtgcgtggctcat

SEQ ID NO: 271321 - DNA, 542 bp, Homo Sapiens
  misc_feature (22)..(22): n is a, c, g, or t
  misc_feature (29)..(29): n is a, c, g, or t
  misc_feature (60)..(60): n is a, c, g, or t
  misc_feature (256)..(256): n is a, c, g, or t
  misc_feature (284)..(284): n is a, c, g, or t
  misc_feature (429)..(429): n is a, c, g, or t
cccccttaaaggaattgttagnatatganggaaaaacccttccccaaggagaggccaagnaaagacaggatacgagaaaaacccaagtgagccataatgtccctaggatgccaaaataaacaaagtacttgaaggaaaagaaggtgattaaccatattaaatgctgctgataagccccagtaaaatgaagactggaaaaatgatgcttggattttaaaaagacgaggtaatttgcaaccttgatcactgcagtttnccttggagtaatggggggcaaaaagccntttcttagagcaggttcaagtcataataggagtcaacaaactggggacaatctgtataataccaagcactttacaagccaaagaagccaaagatagagactattttccttacaaactagagattccagtttctctggaatcaccnaggaatttcctatctttgtgacatactctgttattatatttatgtttcaggttatttgtgagggataggtataactctaaggacaaaatatctgtaagcattttataaccagg

SEQ ID NO: 271322 - DNA, 524 bp, Homo Sapiens
  misc_feature (452)..(452): n is a, c, g, or t
ttcagtggatgggttcatgcgctatctgagtggagaagaaaacggagtcgtttcacctgagaaactggatttgaatgaagacatgtctcagcccctttctcactatttcattaattcctcgcacaacacctacctcacaggtatgaattttctagttctttgttactttagccagtctcaccaaatttcaccaacctctactttctgttgttcggaagctgaagtgtggttttcttccatttcctgcgaagtgcctctgagaactctgggttccaccactaaacctcccgcctcccataagcagtcatgtccacatgtgtatgaagcaatagcatcatttctccacagcctaagtttttaagtcttctaaaatgcaaccggctgacattttcagatcaatgggatttttgtgtaactgaactcattcttcagtgtacttgaagccatgtccnagtcctacccggttctctgggctgtgttcatctacatgacagctccgaagttcttaagtggtggctcatgct

SEQ ID NO: 271323 - DNA, 486 bp, Homo Sapiens
  misc_feature (55)..(158): n is a, c, g, or t
gaatagccactgcaatcccagcctgggccaaccatagtgggaccacgtctctgtnnnnnnnnnnnnnnnnnnnnnnnnnnnnnnnnnnnnnnnnnnnnnnnnnnnnnnnnnnnnnnnnnnnnnnnnnnnnnnnnnnnnnnnnnnnnnnnnnnnnnnnnttcctaagatacttattggaagccacatgaggaatgaggcataactttttcttttcttaaaagtcttacttccctcttatatatgccattgagtcaggtttctcagaaaatccatcaagattcacagacttcctgacatctgaattcttagctctgttactgtgagggctagaaaactcgtgaatgtctctataatttgggtccaaaagataattacaaacctctgttagcatgtgacagcaatacaaaaatgcccatgctttccctgtcacccgcccacctagacttgccagggacccagaaccctacacgttctaactgggtatac

SEQ ID NO: 271324 - DNA, 686 bp, Homo Sapiens
  misc_feature (85)..(187): n is a, c, g, or t
  misc_feature (208)..(208): n is a, c, g, or t
  misc_feature (431)..(497): n is a, c, g, or t
  misc_feature (516)..(516): n is a, c, g, or t
  misc_feature (519)..(519): n is a, c, g, or t
ccagggactgagagagggaaccaggaaaattggcaacgtgttggcacttccggagcttctcagaagacagagggttttcttttgnnnnnnnnnnnnnnnnnnnnnnnnnnnnnnnnnnnnnnnnnnnnnnnnnnnnnnnnnnnnnnnnnnnnnnnnnnnnnnnnnnnnnnnnnnnnnnnnnnnnnnntattgtttgggttttaatacnagacaaatcaactcaatcaaagaaaccaactcaaagaaagatgggtctacatacaacaaaactgaacaaaatctgcaagaagagtgattcatacatgggctattgaggcaacatgagatggacattaatcgacctaagtaaaaaacagatttcttgaagaattaataaagaacttttgttttggaagttctctattgtttaaaattagccagatgtggtggcnnnnnnnnnnnnnnnnnnnnnnnnnnnnnnnnnnnnnnnnnnnnnnnnnnnnnnnnnnnnnnnnnnngttgcagtgagctgagacntgngccgctgcactacagacagcctcctgcatgacagagccagaccctgtctcaaaatttgggggggagtaaagttctctattgtttgaaataataacgaaacattaaaggctctaaagtcagctaacgaatagtcctaaaaatagaatggctcaaaaagattgtccaat

SEQ ID NO: 271325 - DNA, 209 bp, Homo Sapiens
gggctttaggtctcagttttccttttctggaacaggaaaagggagatctgcctgtcaccctcctttccagcctgctttcagtattctcaagctgaagcatttgagcaggaagaacatggaccactgcagcgctgcctccatggggcattgctaccctgacctgcttcatgcacttccccaaaatagctccaaatcatgcttgcttcctg

SEQ ID NO: 271326 - DNA, 504 bp, Homo Sapiens
  misc_feature (23)..(23): n is a, c, g, or t
  misc_feature (29)..(29): n is a, c, g, or t
  misc_feature (235)..(235): n is a, c, g, or t
  misc_feature (317)..(317): n is a, c, g, or t
  misc_feature (323)..(323): n is a, c, g, or t
  misc_feature (347)..(347): n is a, c, g, or t
  misc_feature (387)..(387): n is a, c, g, or t
  misc_feature (394)..(394): n is a, c, g, or t
  misc_feature (407)..(407): n is a, c, g, or t
  misc_feature (420)..(420): n is a, c, g, or t
  misc_feature (446)..(446): n is a, c, g, or t
  misc_feature (456)..(456): n is a, c, g, or t
  misc_feature (463)..(463): n is a, c, g, or t
  misc_feature (483)..(483): n is a, c, g, or t
  misc_feature (489)..(489): n is a, c, g, or t
atgctggagccctgagcctgagntcaagnattcaagcccagcctgagcctccaaaccctctctgcctcctcaccttaagtagactctgaacagattttaaaagccattcattcaacacattttttaaatggaataaactttttttctgtggtagttttcagtttacaggaaacattggtggggaaagtacagaggaattcccagatcccgtccccaccatctcccctggtcattncacacggttggcctccgtgtgggtgtgggtctgtttgttccgatcggagggaacggactctggatacatggattaactaggnggcctngggtttcacatgcattagggggtncactcttttgtgggggcggcacatcctgtggggggtcttnggacaantgtgttcatgganaacgtgttctggnacattggctggaagttcacctttttnctttaaaaanttaaacnttttggggggtatttctggnaaccanggtttggggccccgc

SEQ ID NO: 271327 - DNA, 340 bp, Homo Sapiens
  misc_feature (277)..(277): n is a, c, g, or t
acttaatgagatttcattctagaaaaaattaccctgacaaacagatattttgttagatgtcggttaaaaagattggttacacaggcagtattcaccctttcttgccttgttttcagttttcagttctttccaagctccctctgaatcagactgagttacatttctttttcttgtccatttgatgattttctctagcgaaagaaattgttccttagtagactactgtaccaaaggttagggagtattagagcgatctgtcttgtgctgcagtttccangggggttgtaaagtcttccaaaatgggccgtgatcaaagtgtgtcagagttcttgtttttgag

SEQ ID NO: 271328 - DNA, 660 bp, Homo Sapiens
  misc_feature (452)..(452): n is a, c, g, or t
  misc_feature (511)..(511): n is a, c, g, or t
  misc_feature (573)..(573): n is a, c, g, or t
  misc_feature (582)..(582): n is a, c, g, or t
  misc_feature (595)..(595): n is a, c, g, or t
  misc_feature (600)..(600): n is a, c, g, or t
gaaaaaagcgtgttgtactcttcagtcctcgagatgcccagtatttatatttaaaaggtactaaatcagaagtactgaatatagataacccagacttggctaaatatccacttttttccaaggctagaagatatgaatgttcccttgaagctggtgatgtattattcattcctgctttatggttccataatgtaatttctgaagagtttggagtgggagtgaatatcttttggaagcaccttccatctgaatgctatgataaaacagatacctatggaaacaaagatcctacagcagcatcaagagctgcacaaattctggacagagccttgaaaacactggcccgagttaccagaggaatatagggacttctatgcacgacgaatggtcctacacattcaagacaaagcctacagcaagaactctgagtaaataatgaagtgaattcaatnacattacactttgtaaggtatacgatataaattaagattttgttaaataggaagatcanagatttcagattatgtagtcgaggggtgttgtgtgatctcttgatcagatgtatataagatntgctggccnccttacatcagtntgccntaaagcacttaatctaacatagaattatgaccacctgacttgcagagctcggttgccatg

SEQ ID NO: 271329 - DNA, 416 bp, Homo Sapiens
  misc_feature (373)..(373): n is a, c, g, or t
  misc_feature (386)..(386): n is a, c, g, or t
tggaggggggccggttgccctagaggagacccacgttctcctctcttgctcccacctccctctcttccccccacagtgcactccctccctctgcccttctctgtccaccccctcctaagctagacaaatcaacctcgtgcctaatggaggaagtgtggaaactttgtaaaatgtgtacataggacttggagaccttgtgtccgccctgctctttcttccgatcccacaggaagtgcccctgcactgtcatcactctcacgaggacgtcacctgtgctaacctgggggaaggtggggtcctttcttctttccttttgagaagcactgaaactcccaagtgtgttcttatcccatggataggaaaccagtgaatncgtggctggcacncacgagctgtcacgcggcagggtataaaca

SEQ ID NO: 271330 - DNA, 506 bp, Homo Sapiens
  misc_feature (34)..(34): n is a, c, g, or t
  misc_feature (254)..(254): n is a, c, g, or t
ggctttttctctcatgcattccctggcctggagngtcagggaccccacatcctccctgctcctcagactcacagcccctccatgttacctcccgcacctcctccctggggcagctgctccctgggcctctgaggatgtcagctcctggctccctgcctctctcccactccactcctggctcagtcttagagatttctatgccctcatggattctacccctgccttcctgggcctctttgattcttggcttgctncttcctccaattccaaacttagtgaaatggccttaagcattttaaactgtatgtatacattagcgcattcatgcctttctaaacgcatttcaaatgtcaaccaaggaaggcacaccactgtattaagttttatactgcccgctgtaaaaatttaccacaaaacttaagtgacttaacacaaatttaattgcaaatttctggtagggctgggaaagtcttgactaatggggtcctcaactgggaactaagaaa

SEQ ID NO: 271331 - DNA, 785 bp, Homo Sapiens
  misc_feature (453)..(453): n is a, c, g, or t
  misc_feature (463)..(491): n is a, c, g, or t
  misc_feature (502)..(502): n is a, c, g, or t
  misc_feature (504)..(504): n is a, c, g, or t
  misc_feature (508)..(508): n is a, c, g, or t
  misc_feature (585)..(585): n is a, c, g, or t
  misc_feature (651)..(651): n is a, c, g, or t
  misc_feature (711)..(711): n is a, c, g, or t
  misc_feature (724)..(724): n is a, c, g, or t
  misc_feature (764)..(764): n is a, c, g, or t
acctagccattgacgcaggaaacaggtgcaaagatgcatgactcaagcctgtacctcctcattatgggatatttccaaccaaagggctgtctgtactcaggcctctatacccccatacccctaccccatacccaggctgttcccttcttcgtccccctttagcctcttgtcttccctatttctttcaatgcccttgacttcccagcctactcacaatcatgggcactgaattgcagagtctaaaaaccaatggctttgggaggggaacattatacgtgatgttgaaaaatacattcgtttgcattcctaagtgggccccagagtggcttaatccttaaacctcccagaagcatgcattctggaattgatgcttcttgacccaggcagaaggaaagctagccagatgagtcatgtgggcataggggtgttcccaacctccaaagccctggtttntgcccccccnnnnnnnnnnnnnnnnnnnnnnnnnnnnnccccccctttntntttntagggcttgcaccacttccccaccccagctgtgttggctgcacggacactgaggcagtaacacgtgttaggctttantccatcagcttgacagtagtgcccaaaatcttgttgaagatccatggaccgattctttgcctcggnaactcattctcctgtgtcttggccacctcctgtaacaggagctggtagaaactgaccggnctgcttgccaagncgtaggtccaggaaatctaggggaagagagagccccgagnttcctcagatatgcctgtcct

SEQ ID NO: 271332 - DNA, 516 bp, Homo Sapiens
  misc_feature (440)..(440): n is a, c, g, or t
  misc_feature (481)..(481): n is a, c, g, or t
ccaacttctcagactttaaaaaaatctttacattatttttcttgagtctgtaagtttgagaatgtcacatactaatttattttctataagttctctaaagagatgaactttccaaagagtagataatactcactttgcagcattccatgacattgtagatcttattgatgtctcccagattatgtctcatgttttaggccatagacattctctgagtgggtccttccagtaattccagaatagacttggcaacaggacactcaaaaggcagtgtttgggaatggggatccttggagactttcaagccaaaaggatattgcccaaacaaatctcagtttaaatgttgtgatgaggttgattccttttttcccaatttataatttctgggacgtagttgtccaagagaaataccttccctgtatagttactgaaagcataanatttggtgtatctggtaaggtcccattttgaggtattctgncctgatttccccataaaacattgtagtagcccagg

SEQ ID NO: 271333 - DNA, 614 bp, Homo Sapiens
  misc_feature (435)..(435): n is a, c, g, or t
  misc_feature (438)..(438): n is a, c, g, or t
  misc_feature (566)..(566): n is a, c, g, or t
tgcatgatctaaggtagtggaaatggttgtggacaaactataaatgactaaactggatgattatctctcttggtctagtcattactgtggtgctagggttactttttacaatcttgttctaattttttttaacttcttgcatttcatcccagatcctggttcctatcctagttattaaggtaaaatagagaaccagaatagtttatcaggtatctgcattccttcaatatgaattataatggtacagatatggggataaaaggaatctttttctgctattaagtttatcagaaaagccccaatagttaaatatttgttttcagtagagggtataataagggaaaattatataacattatatgccaaataggaaactgatcttggttggaaataaagttgtaggaagaaaagctagccaattaagtggctgagtanganggggactgcctgtccggtggggcttcatatcatcaacaagaagtgtgctagccttcttggctcctcatttcttttcttcctggaatccccagtactgcttttagccttctgtaaccactgccttcttnggaggacctgcctcaggctatgaatagcttgttacggtgacttagagc

SEQ ID NO: 271334 - DNA, 376 bp, Homo Sapiens
  misc_feature (121)..(121): n is a, c, g, or t
  misc_feature (131)..(131): n is a, c, g, or t
ccgcccccacatcagcatgccagccttgggcccggtggtgtggaatcttctcgtgccggtgcaggttggagcgcccggctgaagctcttgccacacaacgggcaggcgtagggccgcacgnccacggtggngatgctggtgcgcggtgaggtgcgagctgtggctgaagctcttgccgcagtcgaggcagtggttaggcttctcgcctgtgtgtgtgcggttgtgcgcgatgaggttggaacgctggctgaagcacttgccgcactcggggcacggatagggcttgaccccagtgtgggtgcgctggtgggtgactagcgccgagctctgcgtgaagcacttggcgcagatggggcactttcatgcgcttggcgcc

SEQ ID NO: 271335 - DNA, 483 bp, Homo Sapiens
  misc_feature (264)..(264): n is a, c, g, or t
  misc_feature (274)..(274): n is a, c, g, or t
  misc_feature (279)..(279): n is a, c, g, or t
  misc_feature (285)..(285): n is a, c, g, or t
  misc_feature (288)..(288): n is a, c, g, or t
  misc_feature (300)..(300): n is a, c, g, or t
  misc_feature (316)..(316): n is a, c, g, or t
  misc_feature (331)..(331): n is a, c, g, or t
  misc_feature (333)..(333): n is a, c, g, or t
  misc_feature (340)..(340): n is a, c, g, or t
  misc_feature (345)..(345): n is a, c, g, or t
  misc_feature (354)..(354): n is a, c, g, or t
  misc_feature (380)..(380): n is a, c, g, or t
  misc_feature (384)..(384): n is a, c, g, or t
  misc_feature (396)..(396): n is a, c, g, or t
  misc_feature (404)..(404): n is a, c, g, or t
  misc_feature (419)..(419): n is a, c, g, or t
  misc_feature (421)..(421): n is a, c, g, or t
  misc_feature (455)..(455): n is a, c, g, or t
ttcaagtccaaggcctttaattcgcagagtgcctgcccttttctcgccctcgccctcccccatcgccatgcctcaccccatgccctcaccgccccagctcccttcccgagcccctctctcctccctcggagccttgactccagtggggctgttccagtggccctgggcgccccgttccccctttcctggcctcctaggtgggagcgggtgggggtttggccagagccccgccgccgccgcccccagcatcagcatggccagggnttggcgcttngggtntggatnttntcgtgccggtgnaggttggagcgccggntgaagtttttgccananaacgggnaggcntagggccgnacgccacggtgggtgcgttggtgcgngttnaaggttgcgagntttggctnaaagttttttgccgnantcgaggcagtggtagggtttctcgcctgtgtgtntgcggttttgcgcgatgaggttggaacg

SEQ ID NO: 271336 - DNA, 139 bp, Homo Sapiens
  misc_feature (90)..(90): n is a, c, g, or t
tgagatggagtcttcagggcatgtcagaggtcttcatcacatccccccgacattcacaggcctggaggtttaagaggaaaaagtggtttntgtggctgggcccagaatccccttgctggttgcagcctgggaacttggt

SEQ ID NO: 271337 - DNA, 377 bp, Homo Sapiens
  misc_feature (14)..(14): n is a, c, g, or t
  misc_feature (25)..(25): n is a, c, g, or t
  misc_feature (38)..(38): n is a, c, g, or t
  misc_feature (66)..(66): n is a, c, g, or t
  misc_feature (76)..(76): n is a, c, g, or t
  misc_feature (82)..(82): n is a, c, g, or t
  misc_feature (130)..(130): n is a, c, g, or t
  misc_feature (173)..(173): n is a, c, g, or t
aaggcttttttccnaccttggtccnggtcagccggcancccaaatggatccatactgggtcctccnggcaaccccngggggnaggtcaaacaagtgcctaaaagtgtgataccctcccctccccgcaacntactgtcctagtttcctgcccatttttcaaaaaccttataatncttccaaaaaataaagcatatttagcctcacaatctgaacagaattattcaaaagaaacctaaccacaatttttgaatacactcaggatagatttaaattttaaaggtcaagaaaattcataaggtatcaattaaaaagcttcaacaagataaacagcagcacccgatttatacaaaatcttaggaagataatttcacaatgca

SEQ ID NO: 271338 - DNA, 371 bp, Homo Sapiens
  misc_feature (165)..(165): n is a, c, g, or t
  misc_feature (170)..(170): n is a, c, g, or t
  misc_feature (312)..(312): n is a, c, g, or t
gaacactaggtgggcagggtttgagcccacaggacctgcacacaaacttccccacctcttggacttggggacaggatctgtgcctcaacccagaccagctttgtagggatatgttccaaaaacagagaagaagtctaatggggaagggggaaggaagggaaggantgaantatttacctctgaccaataatagaggtgccctggtccccaaagaaattgactcccgaattccctccaagccttacccatatagcttttgtttgtttgtttgttttcagacaaggtcaagctctgtccagtgccgtggcgttnaccacagctcattgacaacttttgattttcccggcccaaggcgagccttttcatttcag

SEQ ID NO: 271339 - DNA, 558 bp, Homo Sapiens
  misc_feature (11)..(11): n is a, c, g, or t
  misc_feature (51)..(51): n is a, c, g, or t
  misc_feature (92)..(92): n is a, c, g, or t
  misc_feature (208)..(208): n is a, c, g, or t
  misc_feature (289)..(289): n is a, c, g, or t
atcctaaaccntcgaaaaagcaggaagaaggtttcccccaatggagccccngtttaaatttcaatcccccttaaaaattccccacagattancaccgtttcaagtctgtcccatatcccttccgtagatatcccaggcccgtcttgtttcctcccatttttcagtcacgtcaggggtaaattggttcccccagcactcacacagtgcntttaagctttttaaacttatagctggttatatcattctgtacaagcattcgggtagtacagttggtgctgaacagaagacntgtgatggggtacttggagagtgtttgcaagatagaagtcggctcaaaacggggtaaatggtgtgtgaatacacatgctccctggatccacggagaaaaaacactactccatgcagactttgcccagcccgtatctgaggtattccacatcacatctgagggtgtcaaatctagccagaaccttccatttacagataatcctaaaccaaaactgctgtgggtgtgtgcagtcattttcggatatccacttgttccactggtaaagaata

SEQ ID NO: 271340 - DNA, 535 bp, Homo Sapiens
  misc_feature (174)..(174): n is a, c, g, or t
  misc_feature (421)..(421): n is a, c, g, or t
  misc_feature (426)..(426): n is a, c, g, or t
  misc_feature (435)..(435): n is a, c, g, or t
  misc_feature (440)..(451): n is a, c, g, or t
  misc_feature (453)..(453): n is a, c, g, or t
  misc_feature (458)..(458): n is a, c, g, or t
  misc_feature (463)..(463): n is a, c, g, or t
  misc_feature (494)..(494): n is a, c, g, or t
  misc_feature (502)..(502): n is a, c, g, or t
ggcacgaggtgagctggtggtggggggagagcccaggtgctgggcagaagggcgctgcttctctttgatgactctttcctgcatgctgcgttccatgaaggttcagcagaggatggcccacgggtggttttcatggtggatttgtggcatccaaacgtcgcagcggccgaacgnagggctcttgatttcatctttgctccgggacgatgagagtatttcccatgctgggagtcggcgagaagggccgaggcggggctggggcaagactgtggtccggtccagtccctaaccggtgttgttttccatggctcagaaacctggccttcagcgggaaagttctttatttcggggattttattattcatgttcggggttccctcttttcccttggttaattgttaaatgggaaactttttcgggnttgtnattttcctnagaannnnnnnnnnnngnccttncaatnaatttgctttcagagatttcctttctgggcntaaacagnggaattcccttgaattggggccctgaagtgatt

SEQ ID NO: 271341 - DNA, 605 bp, Homo Sapiens
  misc_feature (112)..(121): n is a, c, g, or t
  misc_feature (206)..(206): n is a, c, g, or t
  misc_feature (383)..(383): n is a, c, g, or t
  misc_feature (463)..(463): n is a, c, g, or t
  misc_feature (483)..(483): n is a, c, g, or t
  misc_feature (525)..(525): n is a, c, g, or t
  misc_feature (535)..(535): n is a, c, g, or t
  misc_feature (560)..(560): n is a, c, g, or t
ggttgagccactgtgcttggcttagaggtaataaattttaatattctattcagaataagaaaatatagcatataagcatttgtatctttagtaaagttactgccagtttgannnnnnnnnngcaagttacttagcagaacatgtaattcacagtaaagatgattctgtgttgtaccatattttaatattcctgttttgaaacgaantagtagagagaaaaatggggtgggcctgctcaggtgattgcttttccgtagtcttgggtgaatggttacaggagatttgaatttataggataaaaagcacagtcatccataagtttcccacagtaccattggaagcacatttaagcttgcaagcctaaaaatctgatcatggctgangtttcctttaaagaaaagttaatttttaggaacctccaaccttagaacccagttttgaaccctcaagtttgacccgttgncctgaggtttttaaaaatcnccttccccatttttccaaagattttttccaaatgggatgtanggaagaaggnccaaggaggtaggctatagctggtngaacaacacagtcctattttcagaaacgaacagacacacgttttg

SEQ ID NO: 271342 - DNA, 762 bp, Homo Sapiens
  misc_feature (11)..(11): n is a, c, g, or t
  misc_feature (55)..(55): n is a, c, g, or t
  misc_feature (73)..(73): n is a, c, g, or t
  misc_feature (87)..(87): n is a, c, g, or t
  misc_feature (96)..(96): n is a, c, g, or t
  misc_feature (108)..(108): n is a, c, g, or t
  misc_feature (131)..(131): n is a, c, g, or t
acatatgtggncctacattagcataaaaggaggggccattcaacctatatgaagnctttatatagcttttggnactataaacatctnatcactgtnattagaatgggnaatgtactatattttacaaaagnaacaatcatggggacttaaattaacttttccaatatagtgttcactaaaagcattaaaaaccacaaactcaggttttccaaaggctaaacttgggtcttcctctatactactcccactgtgaacaccaggtagatagaaacttaactacttgctattactatgtttctcaaaacacgccctgcaaagaatgatcactaagcatgtaagtttagaaaaagcagagttaaacaagaaagtttgtttagtatattaatgactcataggactcctgtatttatgtctaaggttgcaattttttgagggtgaaaaatcagaccttggcgatgaccttgagcagtaggatataaagaactcccagatgcttagcgttccattaatggaacactaggcataaataagttaatgtacattctggatttccaagagcacaggcccaaaatgcagaagttctcaaattatttaactgtcaaaaagtcacagaacgccaattcctttaactgaacaatgcagtgcacaatttaggaagtgttatgccatgcttataaaacagctgacacttgttaactggctagtaattcgctctctttgttcaaaactgctttcttctgatacaatgtctatctcaattcg

SEQ ID NO: 271343 - DNA, 484 bp, Homo Sapiens
  misc_feature (309)..(309): n is a, c, g, or t
  misc_feature (336)..(336): n is a, c, g, or t
  misc_feature (362)..(362): n is a, c, g, or t
  misc_feature (378)..(378): n is a, c, g, or t
ggggagggagacggcagcggcatggcggccggggtgtaagacgcccagaccctcctcttccctgtcttcgccgccgccgctgctggagtcactgggaccctctagtctgcgtgtgttagttgtaatcccgccgccctcctgtcagccctccgctccgccggccctccttccttcctgccgccgcagccagcccgagggtcggccggctgtgtaacactctcccaccccacccaccagcccgctggccagcaccatggatggactgtgaagctggaagttcccttcccttccacagtgcaagggaagacngccgaaggagtggacctaccctatgangacgagagatgcagggaaattttaanctgggattgttcttanggcccatattcatctgctatggaaaaagcaagctacctgtactacagaaacatggaataaccatataatatgcatacgacaaaatattgaagaaatttattaaaca

SEQ ID NO: 271344 - DNA, 560 bp, Homo Sapiens
tagaggggagatgctgaggtcagggcacttatgtccatcaagtgatggagacagagtaaagagaatttatggatatatatgcatatcttgctaataagtttggtttatcatcacatcaagataaattgcctttagcatagaacttgagataagtagacgttcactagcaagtgctaacatttggatcagggcaaaggcgtttccaggagtgtttttataccagacccctgcttagtccatggggctgaggcatgtcacataactcagagcaagagccttctatttgtgtaagacccaaccctgggaaggatgcccgagacaatagctatgcctctgccccagcctgatgccatgtgatctagagcctgggcagcaacaaccctgtggtcaaagacatggaagaaacactctgcaaatcccacagtctgttcgacggcttggaaaggaagcaagtggcattgggacaattgctctacatgcctacagcttacctgtcaactacagggggctgccaaggtgtgcaagacgacctgggggcagagccatgctcagggcacaga

SEQ ID NO: 271345 - DNA, 514 bp, Homo Sapiens
  misc_feature (471)..(471): n is a, c, g, or t
gagagacgcccggcccgtgaacatcgggccagcttgacctcgccccacgccccagcagcagcagcaaccaggtactgggctttggagtcttgggaggtggaggtggtgggtgccgaattttactgttgaattttacacttaatcgcgatctcgcgatcagtgttttgtgttcacctgtctgtcccatctgtctttcgtgtctgtcagtggcatctccataaacccatcagcccctcttaggagtcccagcagttggcttaagagactaatttcaagcccttgggagttggaagtcctgcaggtcccttgtggggagcagttgctgagaccgaagatgagtggacctgtgtgtcagcctaacccttccccattttgaataaaattattctttggagaaatggttcccactgctttcatgcaaaaataaaaattaaacgaaaagacagcttaagcctgtgaagaaggaaatantgagctagccgagcaaaagagagaaagaagaggaggggagagg

SEQ ID NO: 271346 - DNA, 595 bp, Homo Sapiens
  misc_feature (280)..(280): n is a, c, g, or t
  misc_feature (365)..(365): n is a, c, g, or t
  misc_feature (499)..(499): n is a, c, g, or t
  misc_feature (570)..(570): n is a, c, g, or t
aaaacagaactccaaaaaatagaagagctgaaaggagaagaaagcagactgaattcttgtgcttatcaaaggaagaacaaaagaataaggagttgtcctggatctgagaccattagtggggttacctgagatgacctgtgatgtgtgtggcactgtgttttttttatgtgaactagagcaagaaattagatatggcccctcctgtaaagaaactcactcatttgtggggaaaatatataaggaaacaactcttcataacccaaggtttaataactattangtgttataatagtgaaggagacagatcttagctaattctgatgggaagtttacattttagttgagtttgggaggataaataaaantttcattgggaagaaaacgaattttccaagttgagaagtcatttatttataccttttcctaccttctcccagtccattaccaaatcatgttaattttggcctccaaagtatatctcgagtcttcctatcttcantggcactagggtagttcactcggtagtttttttacatgagcaagttgatgggccttgccttctaatcagcnggtttcataatggcccctcctccaa

SEQ ID NO: 271347 - DNA, 603 bp, Homo Sapiens
  misc_feature (248)..(260): n is a, c, g, or t
  misc_feature (267)..(505): n is a, c, g, or t
  misc_feature (533)..(533): n is a, c, g, or t
tcacatgcatgagtcactgcacctggccttgggttaggtttcacttcctccattagacatttgacattttattgtagcagctttctgggttaatatctctttgtgattgatagaagtggttggaagaggaagagtagggaaaagtgtgacattacagattaaacagtgaaaatcagtaccataatgactcctttacacccatgagatacgtaccatgaggaccagggctcggtgaaagaaagatttcnnnnnnnnnnnnngagatannnnnnnnnnnnnnnnnnnnnnnnnnnnnnnnnnnnnnnnnnnnnnnnnnnnnnnnnnnnnnnnnnnnnnnnnnnnnnnnnnnnnnnnnnnnnnnnnnnnnnnnnnnnnnnnnnnnnnnnnnnnnnnnnnnnnnnnnnnnnnnnnnnnnnnnnnnnnnnnnnnnnnnnnnnnnnnnnnnnnnnnnnnnnnnnnnnnnnnnnnnnnnnnnnnnnnnnnnnnnnnnnnnnnnnnnnnnnnnaaaagtgctgagattacagggcgtgacnactggtgcccaagccaaaaagaaccgatttccttagatggaggacctagggaacaacagaatggggctgc

SEQ ID NO: 271348 - DNA, 321 bp, Homo Sapiens
  misc_feature (75)..(139): n is a, c, g, or t
  misc_feature (294)..(294): n is a, c, g, or t
  misc_feature (301)..(301): n is a, c, g, or t
aattagctagatctggcagcacgtgcctgtactcccagctactctgggggctgaggttggaggatcccttgagcnnnnnnnnnnnnnnnnnnnnnnnnnnnnnnnnnnnnnnnnnnnnnnnnnnnnnnnnnnnnnnnnnctatctcaaaaaataatgatgatggatgataattcaaaagctctctttatttgatgaggaaagtgttaatatcataataggcaggctttttttccccttaaagttacccttaaaaaggggtgtcttaaaatgggggtaacatcccctcgtgcccnatttttnggcctcgaggggcccaaatt

SEQ ID NO: 271349 - DNA, 667 bp, Homo Sapiens
  misc_feature (331)..(331): n is a, c, g, or t
caggtggatgctaagaccttaggaaattaggtagtctgcgtcaaagctgaagggtaaactaggagacctggttaccatctttagatctcagtgctaaattgtgaaatctcctgtttgcctgacaagaagaagcagcattagccactgccggggacaagacagcatacttgatagaccaattgcttgattccgctatggcaaatcctgtgtaattaccccaggattcagttactttcaaggaagaaacaagaaccagaaggttcaggaaagtcccacaattataactgaggaacaaccaaaagcctacgttacaaaagcaacagctaaaatngaccaggtaggctcacaacactggtaacagactgaactgctcaaattccctgagagttcacatgaagaccaaagcaagaatttgcagatcacaaaagatgagacagcctctgcagagtggagcgaagctggttagccagcagagcccagagtttcctcagccatccacagtgtccctgccctacatcaccaagaatttaaaattgcctggcagggttgatcgaaatagcctaagaataaggttttgaacttacctgggccatactgcgtgcatgaacacacggacatctgaaaactgctgtcagcctctattcccaccacctatcctaaccctctt

SEQ ID NO: 271350 - DNA, 568 bp, Homo Sapiens
  misc_feature (352)..(451): n is a, c, g, or t
  misc_feature (542)..(542): n is a, c, g, or t
gggcacgagctgagaaatagtgtcttgtggaagaaaaaagtgtatttctctagtaattggttttgaattttatgtaatacctagattttactgtttataaacaatcaagacctctgatagagctactgttgggctttgcgtttatcctaataaaagttaaatgtgatgaactggttcttcatatctttgagactataaataattggcaaattttctgcagcccagcagagattatgtaaactggcctgtaattaatatgaaatatgtattttgtgtattttgccaaatttagtgattgtcaagaatcatttgcccatttgaaggatcacatttatattagaagttattggannnnnnnnnnnnnnnnnnnnnnnnnnnnnnnnnnnnnnnnnnnnnnnnnnnnnnnnnnnnnnnnnnnnnnnnnnnnnnnnnnnnnnnnnnnnnnnnnnnnggcatggtggcacgtctctggtagtcccagccacttgagagactgagttgggaggatcacttgagcccagaggtccaggctgtagtgagcnatgatgggtgtcactgcactccagcc

SEQ ID NO: 271351 - DNA, 562 bp, Homo Sapiens
  misc_feature (22)..(22): n is a, c, g, or t
  misc_feature (31)..(31): n is a, c, g, or t
  misc_feature (80)..(80): n is a, c, g, or t
  misc_feature (118)..(118): n is a, c, g, or t
  misc_feature (157)..(157): n is a, c, g, or t
  misc_feature (212)..(268): n is a, c, g, or t
  misc_feature (292)..(301): n is a, c, g, or t
ttttaccagaccagggccaggntgataaatnttgataaattcccactggacttgaacttgcagctgaacttattggaggntgggagagcccagccattaccatggagaccaagaaggntttcccaccctggaatcaagatgtcagactggctggctnccagtgacgtgcacctgtactccaggaggctgaggggaggatcactggagcccannnnnnnnnnnnnnnnnnnnnnnnnnnnnnnnnnnnnnnnnnnnnnnnnnnnnnnnngagtgagaccctgtctcttaaagnnnnnnnnnngtcagactgctgggactggccaggtttctgcccacattggacccacatgaggacatgatggagcgcacctgccccctggtggacagtcctgggagaacctcaggcttccttggcatcacaaggcagagccgggaagcgatgaatttggagactctgtggggccttggttcccttgtgtgtgtgtgttgatcccaagacaatgaaagtttgcactgtatgctggacggcattcctgcttatcaataaacctgtttgttttaa

SEQ ID NO: 271352 - DNA, 570 bp, Homo Sapiens
  misc_feature (28)..(28): n is a, c, g, or t
  misc_feature (44)..(44): n is a, c, g, or t
  misc_feature (56)..(56): n is a, c, g, or t
  misc_feature (119)..(119): n is a, c, g, or t
  misc_feature (273)..(273): n is a, c, g, or t
  misc_feature (310)..(310): n is a, c, g, or t
aatgccggactgttattccgattgcatncaaaccgattgtattncaaactgtattncaaaatatgtaaaggttatattcaaggagatgatgcatgagactcttcgcataactgatgaangtaaccctttaatattttaattcgggaagcataaaaaatgcccaagcagaaaataaatctacactagatatattacagtaagcctctgactaccgaagacaataacaactttaaaagagccatagtgaaagttcagataatttacaaaagatcntaaaattagactccaaagaattttcaaacaaaacacntaatttccaaaggaagtacaattgattcatgttgtccaaggtagtcatggtctaattaagttgctgagaatacccaaattagcaaatactgaaccattacttctaggggaaatacaggaataggtggttacattttcatcaactgatcaatatataaccttatcccaagacggccaaatagtaacagctccagtctgcagctcccagagtgattgatgcagaagacaggtgatttctgcatttccaactgaggtacgctg

SEQ ID NO: 271353 - DNA, 587 bp, Homo Sapiens
  misc_feature (46)..(46): n is a, c, g, or t
  misc_feature (62)..(62): n is a, c, g, or t
  misc_feature (105)..(105): n is a, c, g, or t
  misc_feature (145)..(145): n is a, c, g, or t
  misc_feature (190)..(190): n is a, c, g, or t
  misc_feature (277)..(277): n is a, c, g, or t
gccgggtccaaaaggtaatggtaagtttttggccttatttttaatngaacctgcttctgtgncctcaagatctccatcgttcatctcctgataagtccctgaaantttcctggcccccttggagccccttccgggagtagaatgntcacaggagctgccatgtattgcttattctggcctattttccttnggcacattagcccatctaaccgtttccatggcccaccagaggtgggaggagccatgaagaaaaatgcaaggaaataagctcatctcnaaggtatctctggctcccaaagaacataggacattaccaacgttgaagttagcttctaggaaactaagacccagctgcttttcaaatcctcaaaatattagtatgaattatagatatagttatagccttcagaactttctgcacagcccaaaactgttggctgtaaaaccatgtttcctaaattcaatcatgtttctcattgatttccattttgaaattggaagtctttgccctcaagatataataaaaaccataccaaagaaaatggaaaacttttcccccttaatatttaaaggagaatgatttttat

SEQ ID NO: 271354 - DNA, 619 bp, Homo Sapiens
  misc_feature (27)..(27): n is a, c, g, or t
tctgtcttacatacccagtgttatggntgtgtcccttgaatgatcctaaaagtactttatctgtaagtaaatatggggtaggctttttcccaataaaaatttgattttctacaatagagcttgacagactttgagagaattccaatatagcttgacaaactttgagagaatttgcaatatttaggaccttttctctatatatgtttgagggaacttaaaggaccaatactgagctacagatcacctcttgctactcaaagtgtgtttcatggaccagcagcacccagccacatctgggagcttattagaaatgcagaatctcaaaccccaccatcgaactactgaatcaaaatccaaacttgcaggagatatggtgatttgtgtgcacaacctcacttaagcagcatggattacatctttgacaggcatcaggcaatacaagatctagggtacagttctcagaatggactatctcaggatgtacaagacagcagagatagacaaaaagccagaagcatggtgattgactgtagtctgatgaatggcattaaaatagcagaagttcttatgattacaggttggcctccctcttgatatttctcctgagagaagctcacga

SEQ ID NO: 271355 - DNA, 493 bp, Homo Sapiens
  misc_feature (33)..(33): n is a, c, g, or t
  misc_feature (45)..(69): n is a, c, g, or t
  misc_feature (101)..(166): n is a, c, g, or t
  misc_feature (174)..(174): n is a, c, g, or t
tgcttaaggtattaaaggttgggaacccctccnagtctggaatannnnnnnnnnnnnnnnnnnnnnnnnaggggacaggagccctcgaactcctcggctcnnnnnnnnnnnnnnnnnnnnnnnnnnnnnnnnnnnnnnnnnnnnnnnnnnnnnnnnnnnnnnnnnncagcttcnattataaccttttaaaggtagcagttaagtttcttgagggtcaagtcattctccctccccccatctcgttgtccaaatattcaagaaatatttactcagtgatttagtaatctacatttagtaaacttacatttagtaagttaccaaatattatttattactaaatatagattaccattaataaatagttccttggtttagtatgttctcttaaagttttcagaagctattaaatactataaacaaagtattaaaatactataaactgtgtataatgagcacagtttttagacaacttttcagtgatcaaaacagatga

SEQ ID NO: 271356 - DNA, 597 bp, Homo Sapiens
  misc_feature (527)..(527): n is a, c, g, or t
  misc_feature (548)..(548): n is a, c, g, or t
  misc_feature (571)..(571): n is a, c, g, or t
cactgtttagccacaccaccatccatctccagaactgttttatcttccccagctaaaagtctaccaataaacaataacttcattctcccctcccgccactgttgggaaaaagctgagtgtagggagggaaactgaggcagggcttgcatagtgtcctttggaatgttgtctagacttgctggctgcttgcttctagccctcctaggctcctgttcccattatctcaagtagcaggacatgttccatataaatcgctaaaccatcacagctgtaaatcatgtgcttaatggaacatgtggaggtgttgacctccacaagtctcaacacctgtttctttgttgggattaccaataaataccgtgggctctcagagctcggggccttcgcagcctccatacatagtgatggccccctggtgtcccaccttgttctctcactgtctttttctcaatcctttgactctgctgggactttggtaacccccacgaactggtgttgggtctgatcaccccaaaaattccaacccntggcagtcgacattctgctgnctctatgaatttggactaagtanctcatataagtgggaatcgtccaata

SEQ ID NO: 271357 - DNA, 525 bp, Homo Sapiens
  misc_feature (24)..(24): n is a, c, g, or t
  misc_feature (97)..(97): n is a, c, g, or t
  misc_feature (399)..(399): n is a, c, g, or t
  misc_feature (445)..(445): n is a, c, g, or t
  misc_feature (458)..(458): n is a, c, g, or t
  misc_feature (511)..(511): n is a, c, g, or t
ggattgagaaatagtttgaaaganaaaggtgggacacagggggccatcgccattgtggaggctgtgaaggccctgagctctgggagcccatgctatntattggcagtccaacaaagaaacatgtggtgagaatgtggaggtcaaaaggacatgttgcattaagcacatgatttacagctgtgatggtttagcgtttatatggaacatgttttgctacttgagataatgggagtaggagcctaggaaggctagaagcaaggagccagcaaggctagacacattccaagaggacattatgtcagatatgcaagccctgcctcagtttctcccaacactcagctttttcctaacatgccccccttcttcttttttgtaaaatgagaaaggtattattactanctatcattagcaaggtgattggcaggcttgtgcaaccctttaattnccggttggtgatncagcttcatttttcttagcccttatttcaaaccggagtcactctggggttgangtggcttcccacat

SEQ ID NO: 271358 - DNA, 626 bp, Homo Sapiens
  misc_feature (376)..(376): n is a, c, g, or t
  misc_feature (452)..(452): n is a, c, g, or t
  misc_feature (548)..(548): n is a, c, g, or t
agacgagagagagcatggccgttaatgaggtgaagtagaaatcatgaagatctggctctgctctcttaaattccattctgacatgaaaccttgagtaagttactcttctgggaatcttagtgtcctgtagaaaatgagaatgataacatctacctggtagaaattaagatgaatgatatctacctggtagaaatgaaggatgcagagaaaacactctgtgctgggtttgttaacttgatgggtagttcaaatgttaattctctgtcttgttcatgtcaggtttccttctttgcactccccccaaagctggctcttgggacccacacagaacagaagctcagtcaacattttgttgaattaaacacagttgcgtcanaaacggtttgctgcatcctcagaactgcagcaggcactttgagaagcttcagagaagtactggttccttttctggncttcataaagcttaccatgtcatcagaagggtgttttcaactagaaatagtagccaaagacccaagagtgagagtgtaagatctagagggagtttncccgaggaagaaaccacactggtatcagcttactcagccagtagtgatgagagccagtgtgtaagatagaaagtcctt

SEQ ID NO: 271359 - DNA, 406 bp, Homo Sapiens
agacgagctagcaccatgagcttcaataccctgtatgtttgcctgtatgtttaagtcattcttctcaactcacagactttccccccaaaaagtaagcctatatagtatatagttctatattcattttgctgttgttgttaatataggctaaataattccccttatcattattctactacaataggagaagccaatacctgacaaactgctatgggtccttctccttctccatggcaaaatccctcactcaccacagcactcttccctgctgagccaagatggctggcctcagaatccttctcaacacagtgttccaagaagagactatgaatcaatcacaggctgggtgtggccgattaagcttatctacaatccctgttctaagtcatagattaatggccacaca

SEQ ID NO: 271360 - DNA, 397 bp, Homo Sapiens
aaactgatttctagttgactttggctattactaaattgtgacatgcatgcacttctttttaatttaacagttgttttctgctgttttctcagtttgaaagtagtaattatgaataagaattcctagaaatattcttcttccataatgatatgtcacagatgtttgagtgctacacacacactcctctccatttttaagtcaatttagtggagataaaatgtagataatagctgtgtgttgtaatgactctgggcccactccccagaggctctgtatttccataagttatggggacccctctgatctttctgaaatgggccaccatcagatcattgagacttgacatgcagtttaaaaatgtgtgtttctgggggtttcctattatatggatttgggg

SEQ ID NO: 271361 - DNA, 476 bp, Homo Sapiens
  misc_feature (18)..(18): n is a, c, g, or t
  misc_feature (39)..(39): n is a, c, g, or t
  misc_feature (47)..(47): n is a, c, g, or t
taaagggttatcaggagncagagaggccttgatggggancttaaggnatttggccctggcgtcaagtagcacagctgagtcctggccccaactgctgcctagctgcaggtcctgggggcacagcgactgctcacctctatgcctcagctgccatgtcagtaaatggagataatcccgggattactctgaagagtaaatgttcccatgagaggtgctcagtatcatgcatggatagagcaagtgactcttctgttcctttagcatctgattgtttctgttggaagtaggcataatactttcatctatttgcatagcaccttacagtgtatagctctgtgagaaaaggtagatggttttatcccattgttcagaagggttaactgagacagagggaccctgggtcatatgacagacaactgatggctccagaagtgagctccaggtcttttcatgcccattctcgctccctatggacg

SEQ ID NO: 271362 - DNA, 404 bp, Homo Sapiens
  misc_feature (58)..(58): n is a, c, g, or t
tgtaatatcacatcttgaatatttacaagatgagtgtccatcacttgcaacagcaacnagcagcagcagaggctgatgaaatcagaaagcatgcctgtgcaattgaacaaagggctaagttctaaaaacatcagttcatctccaagcgttgagagtttgcctgggaggaagagaattcactgggctctccaccttcatctgctactaaaaaagattccttttttaggcaacatcttcacgttctcgctcacacagcaaaactatgggcacgaaaagaatctgaagaagaattagaagcccaaatttccttccttcaagggcaagttgaatgacctcggattccatgtgcaaatactgttcaaaggtgatggacactcatcttgtaaatattcaaggatggtgat

SEQ ID NO: 271363 - DNA, 371 bp, Homo Sapiens
  misc_feature (348)..(348): n is a, c, g, or t
gaaagctgcactctgttgagctccagggcgcagtggagggagggagtgaaggagctctctgtacccaaggaaagtgcagctgagactcagacaagattacaatgaaccaactcagcttcctgctgtttctcatagcgaccaccagaggatggagtacagatgaggctaatacttacttcaaggaatggacctgttcttcgtctccatctctgcccagaagctgcaaggaaatcaaagacgaatgtcctagtgcatttgatggcctgtattttctccgcactgagaatggtgttatctaccagaccttctgtgacatgacctctgggggtggcggctggaccctgggtnggccagcgttgcattgaggaatt

SEQ ID NO: 271364 - DNA, 514 bp, Homo Sapiens
ctcatatgttgaagaaaacgcagcgggaggtggggtcctgacacaagaatgtggcacaggtcaggagagagaggcagaatctctgaggggcagagggagtggactgcgtggtcctgcgctgtctgggcactcaggggagacctgcacatgtgtggaaggggtggtggggacacagggaaaaatgtctcttaacttacaccccaaaggttgtgctttagaaaaagaaatcacacatgaaatcccaggaaacggaagaaacaaaatgaagaaacggaaaagaaaaatctagcaaaaatcagtcagctcagttaagaggaagggagttttacctactagttcagcaatttggtagacttagacaaataaaagtcacctctgtttcccaccctgatgcctaatttccctcacacaaagttataaggattgaaaatgaagatttttttatgttctgggcaagataaaagtgttaaaattactctaaaatgtttctgtttttaaaaacttgtattaatga

SEQ ID NO: 271365 - DNA, 436 bp, Homo Sapiens
ccatcacaagtgaactttgcttgttcctggaggaattgtgaagttacgtttggcttatcttcaaaattcttccttcttcactacttcaaagtgtctgtgttctcactttccgagtcattttcagtatcttgagacccctccgacatttcctcttcagactggactccaagacatttaaaatcgcccacattggtaagtttttaatataatccagttggtatccagagggtgaagcccaaaggacagggaaaagctaagcgcctcccaagaataagtccagggtcttcgtccccaatcagattcttacaggaaagttctgaaaagaagcaatcgggtggaagaggtagctggtgtaccagtcccacagacttgataaccattctaagttattggcattgacttcatcattgttgttgttgcgccttctcttcttctc

SEQ ID NO: 271366 - DNA, 794 bp, Homo Sapiens
  misc_feature (73)..(73): n is a, c, g, or t
  misc_feature (178)..(178): n is a, c, g, or t
  misc_feature (267)..(267): n is a, c, g, or t
  misc_feature (273)..(273): n is a, c, g, or t
ccttgtaacactgtgaacatgaacatgaaaatgcctgttgttgcccccgggtgcctgcctggggtgcccaacngcacctcctcaactgaaatacgaatatccactgtgtgccagagaaaaacgggccaatcagggggataaacataacctctcccggctggagaaccatttcttgcgnactttggctgctgaattcactcattaaactgctcaaaggaaaagctctaccctgatttctgagagtctacagcaatatatgtaacacanattatnatatgaagactattgactaacaggacaatagcacatgaacctttccttcagagaattcaaccaagagaagagagtgggtggcataagctgggggccaaaaggaaggctctcaggaatattctctaccatccaaaatcaacagcaaagccagaaaaggggcatgagctctaattcattgaagagaacaccacaaaacagttaacaaagggatctctttccaacacatgctcctctccatgaggctcaaccgtcagtgcagggcttgcctgatgtggacaatgtggatacctcagccctgagttgaacattgcatgccacctttgattccccatgctgcaaaaagaattggaacgctgtcaggtcctggcaccgtggtaatggctatatcctatttcactcacacacgtccttttaaagtctcccttcctcaagctattaaatagaaccctctagggatcctgtatgcagtgagggtctgaactgatgatccatatgtcaatcagtagttggaggaggatgac

SEQ ID NO: 271367 - DNA, 640 bp, Homo Sapiens
gcaaaaagaaattaaaattgaggatttaagatatccacaggtcctccttgtgaacaccaaatgacagtaaaaaagcaatttatctgctgccaggattgatgtattattttcattaaattatctttattatggtaagaatttctaaattgctagatcacttatgtgagatttgaaccaaatttaataccaaagagttattgaatgcctactgtgtgccaattctattgctaagcatagaaagacatgagtgaagagacctgctgctaacattcaaggattccttcagtgtccagcttgaaaaatgaaccgtaatgaatgtctgggagagcattacctcactgctcctccttcctgtggatgattttagtttcaaaccacaaacatatatgaaaaggaatgaccagaattttcgctgtcaaaaaaacctgctgctgttgaaaactgtcagtgaggtcttgtgaccggtgtcatttggtcagggacgacagggtattggaatctcaggaccatttatcagaagagacacctcgtggcagccatggtgcttcgataggtgtccatagccccaagccctccattctagagccattccaggtctctttggatttataaacaatgagagaatgagagtctaactggc

SEQ ID NO: 271368 - DNA, 445 bp, Homo Sapiens
  misc_feature (149)..(149): n is a, c, g, or t
  misc_feature (188)..(188): n is a, c, g, or t
gaggctttgacaggtgcctgttcactgaggcttgcccctctcttgcttactctctggaaccccggacactactgtgtgaagaagtgtgaaggacgagagccaagtggaatacagatgaacctgcttccagctgagcccccagatcaacntaacctgccaactgccagacatgagagtgaggttatccntagaaccactgaggctcagcaaatgcggccaagactaaaacaatcacccaaaatccttgacccgcagaactctgagcaaattaaatgattaacactttgttaagctattaagttgtgggaaagtttgttacacagcaaaacctaactgacacaatttcattgcataacatgaagatgtaaacctcaatactgacaccaacaccacactgtctgcaggctttaaatcaggctgtgttagtcctgcaactttgttttcc

SEQ ID NO: 271369 - DNA, 554 bp, Homo Sapiens
gagagtgatgatccaaataggaaggcaccctagcagagggacagggggaagaaacggtaactcgtgttgggttttaaggagagggtggcggttccatcctgtactgctcccagctcccccagaagaactggagacataccagcaaagggctgtgtagacaactcacatttgctcttggattgtttgctggggacaactcgatttctaatgacagcttccgtgaatcaacatttcttccttaaagctacacactctcgggttgttgggtttccgaagtttaagtttctcaggctcctacttgtaagtttcagatattatggttctgcaaaaaagggtcacctcctctccctcttcctggtgttggaaggtgacatcctccctttagtttgtggccaacacttgtttctgaaactttttacagtaaacagagtatctgtatgaggttatgttgagggtcgcttgttaaaagctgctgcctgacagctgttaattctggggctagtgagacacataattatggtgtttatactctaaaatttttgccaaaagaatct

SEQ ID NO: 271370 - DNA, 439 bp, Homo Sapiens
aaaaggttgccgaattggtttttgaataaatccccaggttttttaaaaaagtcctacctgccactgaagccaaggtcctgaagtcaggtgaaataaatataagtacttagaatgggagtttaaagggaagtgcccagacaggtcaaataatgacaatgtgagaactgtgggacatgggagccttaaccctgatctgctccctccaatggctgctaggctgcctggttttcaccctgatttgagcagctgttggcttttaagattatcatggagctgagaagagggagatgggtatatggcaagttaaaatgccacaaagcttgctattcttaccaagattcagctgtttttcttgattaaacactccttggattgttacaagcctttagttaatttccccatccaaagaagttgattgtgacaacttttgtcagtattt

SEQ ID NO: 271371 - DNA, 408 bp, Homo Sapiens
tccaagatgaaaccaatgagtcacaacattcacataatacactgtacaaccctgatctcttgactgtcatcaaatgtttcttacctctaaaccaaagtttcattttataatttaatttttctcattttttccattctcttagcttaagaaaagaacattacaaactttttgtaagtttttcatatatgcttgcaaagggttgtaaaactttattgtgattattcttgctttaagctgaaacttccctaatctttctttagagattgtggcatagcatgttagtttcttttccatatccaattgttttctgttatgaatacagaaatacaggcacttgtcttgtaactttaaatagacatcatctcaagtctacaagaattatccaaaatggtatttaatgacattcta

SEQ ID NO: 271372 - DNA, 429 bp, Homo Sapiens
  misc_feature (15)..(15): n is a, c, g, or t
  misc_feature (48)..(48): n is a, c, g, or t
  misc_feature (62)..(62): n is a, c, g, or t
  misc_feature (88)..(88): n is a, c, g, or t
  misc_feature (106)..(106): n is a, c, g, or t
  misc_feature (173)..(173): n is a, c, g, or t
ttttttaagaaaatngcctatttttaaacctggagacacattaccccngtttttaatatccngctcctaacaaaataaaacaatgtantccagacccataaaacanttccccagacttgttaaatagtgtatggctcacccttgccttggatcaatatccataattccctacncacaacgtgaagcaaataggaaaaatagagggaaccttgtttgtgccttaatctccctaatatttgaatttagaggaagggagaggcaaaatattcattgtttgcctctccttctttttgttctttcctcaaattttgagtccttctttcttttatttgctagagatctctcatcctttttgtgccacataatgtggtacatcacctgtgggctcactaccttacctcaggtatggtctgttccaaaattacttgt

SEQ ID NO: 271373 - DNA, 424 bp, Homo Sapiens
  misc_feature (35)..(35): n is a, c, g, or t
tgaagctccttggtcaagagcagtttagaggccangattgcatcactaacaaattccttggatggtttgtgcttacattacttaacttccttagtttataaacgtatatacacttactgaccttatccttttgttgagaaaaatgatgcgagaaaaagtaatatccacaacatcaaaataatggttgtgtaatggttttaaagagcacatcacagagagtgttcttttcaaatcactgtgaaattctctaaagcatatccaagcaaagttttgactgtcaacattctctttccttaagagtcatgattcccaaactgctccaatagaacaccagaccaaggtgccggatctacagaatcaaagagtggtagtattttccaaattttacacaaaacttctctcatgatcaggcacagtggctcat

SEQ ID NO: 271374 - DNA, 483 bp, Homo Sapiens
aaaatctgggtctttctaaaaactgctttgcacagtgacacaagctgacctcaagagctccacgttttggcttcgagcaagttttggtgctactgtttttgcagttttgggctttgctatgtacaaagcattattgaaacagcgatgatataaaaagaaatactgtccctaccaaaaacaaatacttttatgtacattctgaatgctttaagttctgctagaattattgagatatttatacatgcagagttactttattaatatttgtaattcatgcataagagtattttaatgatagttataactgcagtattggctagcatatggaaagaaaacagctaacagccaaactaaaatggctaaattccagaggccaaaagggaatattttgtaaatatatgtacatattcaggcaagatatggtctcccaagctgagttctagaaatgatgtttctagacatttctaagtgggtattgttagt

SEQ ID NO: 271375 - DNA, 396 bp, Homo Sapiens
  misc_feature (281)..(281): n is a, c, g, or t
ctgcattgggccgactgccattcccatgactgctgcacctgcgtttttagagaatgcctcataacccactgattctcattcacagagaatgggagaacggaatgaagaaagattccagcagcttatagaaggatagcaatattttgggacagggaaaatcctgtcatacctcatctcttcctcaggaggagttctgagctggtcctgcttttcatagttgtttcttttcttccacttaagaactcatagatttttcttactgtcccaaaggaagtccttanccctgaggggatctcctcaatgaatactgttttcaaggctgaaatagttcattatgttaataaccttctttatgttctcaggggaaatgcttaggggggggtcacaaaatgtgcc

SEQ ID NO: 271376 - DNA, 457 bp, Homo Sapiens
catgacataatttattctcattttgctttcccctcaaagatgctagggttttgtatgtggaaaaacctccttttgaggttagtggacactctgaaatagcctaaatgcctaccagttctgaagcaaggcttctgctgtatcagaggtgaagcagtggtaattttacttggtaacgaagactcatgaggccggatggagagggaaggagtgtggggaggctggccaagggctttggcacaaggaggcaatgtgtgcatcgcttcaagcttcgagaggctcctggcagccttctcggaaggcacgaggctgctctttgccagcccctcatcacagtggccacggtagaaaacactaagaaaattaggataacagtgattcaacactttacgggcacagcctgggcatgccaaaaggaggcagagtgagagagctggataactcagcgtatctatatttc

SEQ ID NO: 271377 - DNA, 587 bp, Homo Sapiens
tagcagcggctggatgtgatatgtctagtttaaccagtccccttgatctttctatataataaataacacaggagtgaacatcctgaatcagatcttagcagagatgctcacattcggggtaactgtccatggtgtgtggaggggtcctcggaaccccctcttaggatcatctccacatactctcccagttctgagattcgttaccaatagcaggtttccgtcacactgcgatatcaagagcagtgcaaggaactctccgctccaaggggttttttcctcctaggggaacactctgctaagtaatgggcagagaacaaaggggctcctaattcaaggcaggcctaagggagggtcagaaagaactttagctggaggtatttacagatgtgacctcaaatccttggggattcttggaaaatgggcaaggtgccaaaagggagaactggccaggccttcaaaactaaaataccagagaattacagacagcgaacttgcccctaaggccctcgttgaggggtgtgtttgaggcatttaggaggggactccagtgctcctcagcgacagacttcatccaaaaaagttcattc

SEQ ID NO: 271378 - DNA, 405 bp, Homo Sapiens
  misc_feature (26)..(26): n is a, c, g, or t
actgggtgagaaacttcaggagagancccccagcaatcctgcattttaataagcccccccaggtgattctgaggcacaaatttgagaactcctgaattagataggctcaatctgatccaaggagaggatttttatctcatggatgtgagaaaggtttcgtctgttcctattgatttgaatcaggaactaaattatccccactgctgctggcagcctttctgacagcatcagagattttggcctgttgattgcaaaagtcaaaatgtttgtcgtcttcacctcaaattaacagattgataccaaatccccaatgtgttggtatttggaggtggggcctttgggaagtgattgggtcacaagggtggagccctgttccgcaggtggtaagtgccacaataaagcaaa

SEQ ID NO: 271379 - DNA, 950 bp, Homo Sapiens
  misc_feature (667)..(667): n is a, c, g, or t
caggaacatgattgtaaagaaaatgtctagttcctagagagagccagtaaaagaacatcattccacaagttactgcctccaatttaaaaacatcaaaacaggataaagagtgtctcctactgagcgggaaagtagagaccagaaggtttgttgaaaccccagagtgaaaaccacttagagaatcggaatcgtcaagtataaggttgtgagatggattcagagaccagactgaaatatgtctctgccaatctgtgcagtgaaagtggatgacaagggagatgggagacaggagtcaagaggtggcagaacaggcattggcctcccctgagagatgtccagggcgtgagagtgaatttgtgagtaggtgacagaggcatgtcacaaaaagcaggcacagagagcaatacagaatgagaggtcattttacggtagcccaacaagttagtatggtccacggataccagagccctataaaataatatcatggatttatgaaatatgagaattctattgtgtgctgtgtgtgtagataaaaaaagtaagtgcctacaaattagatgtgcagcaaaatagaatctcttaagtattctataattgatgtgtttactgttgaatcccccgccgagccctatgcagtctcaaaagcacagagaccgtcgtaataagngctcgagctattcatgagtcgaggtatttggctgcatggcgacgtttaacagcgtggctggaagctggcggtccactaatgcctcgagatcccgttgcagtgcgatgcgaagccgacgttctttctagattcctaaagcagtgtgccggggcgggtgtcgcggggtggtggcccattcccgggtatttctcttggggggccaacaaagctgttgtgttctccgataatgcgttcctgaactttgcctatgtaacacctcttccgggacacaatcgcgcctacc

SEQ ID NO: 271380 - DNA, 490 bp, Homo Sapiens
  misc_feature (30)..(30): n is a, c, g, or t
ttgagatgggatctcactgtattgccaggntggtcttaaactcctatcctcaagcaatcctccagccttggattcccaaagcgctggcattataggcatgaaccactgtgcccagcaactttctttaacctttctgacaatttgccaaagtattagcctcattttccagagaagaaaaccaggcttagaaaggcagagacttgccctagggacaacagctcttaatggcagagctgagaatctttctgaggctaatacccaagcttttcctaccaccaggcaaaatcccacaacagaatgtcttgccaaatgtttaggagacagtttctgatcagaggaaccagagagagcttccagggagaacggggcatcaaagctgagctttaaagaagctcagttattttccattcggtatccactctcatctgctggggattccgaccagcctctgatggcctgactgttcaaaaaggcttccgtgtccctttgt

SEQ ID NO: 271381 - DNA, 552 bp, Homo Sapiens
  misc_feature (48)..(48): n is a, c, g, or t
  misc_feature (370)..(370): n is a, c, g, or t
gactgaagaggagggaaagtggggtcaagaagattcccccggccaccnaagtgccagcattgccccacaaacccttttagggaatggggacaggtaccttcccacttgttgtatttattagtgtagcttctcctttgtctcccatccactctgacacctaagccccactcttttcccattagatatatgtaagtagttgtagtagagataataattgacatttctcgtagactacccagaaacttttttaatacctgtgccattctcaataagaatttatgaggatccaggcgcatagcccttcaaactctctgtctcatctctcctcctttctcattagccccttttaatttgtttttccttttgaacntctgtcccattaggagcaggaatggcagtaataaaagtctgcactttggtcatttcttttcctcagaggaagcctgagtgctcacttaaacactatcccctcagactccctgtgtgaacctgcagaggccctgaatgcacaaatgggaaaccaaggcacagagaggatctcctctcctctcc

SEQ ID NO: 271382 - DNA, 695 bp, Homo Sapiens
  misc_feature (402)..(402): n is a, c, g, or t
ccgtgtgtttgggattctctgggggtttaaaacatgtagcttggctgtttcctcctggtttggtgttctcttgtttgtttttttctctttggacccccccaaggaaggttttttggtgaattctatgccattgaaaatgcatctggcagagtaaccagcaaaaactgtgttctgttcagacagaaagtcatttattctctgaagcatggctgggtgtgctctgtatgtgaaattctagatgaggagtacagggtctattagaaagagcctccactctgggaagtgggattaggaactcaggataccctggattccagggaacatgggtctctctgcctctgggacagaggacagcctgccataatcttagggcaagacttaacctcttgaaaacgtttcccngacagttgggaaaatcagggataacagcagcccctccttgttgatgtcactgtggtgaggttgaagttgtccgttggacactttaggacagccctttgcttagtatgtcctgctctcattgctgtttggcatctctccctgctgaccatccataggagcttccttagttgaggcacagagtgggcacacagtgatctgcagtggtgctgggcacttgggaggcctgggctgtgttgaattatgttagctggggggcaggaccagtgcctgatgtctgatgcctggagaaactt

SEQ ID NO: 271383 - DNA, 447 bp, Homo Sapiens
  misc_feature (53)..(53): n is a, c, g, or t
  misc_feature (165)..(165): n is a, c, g, or t
cggcatgccagtgaaatgagcagtgagcagccccttttagcaaaatcgccccnccagtccttcccggagatgccttcagccagcatccccagactcccacagttatttatgaacgatgtcgtgattctccctccacctgacagtttgtaagagtgaaagagcatnctaacctgatgctcttggagagagataacctgtctgtcataacttaaaggatgagaaaatgtggtgtagctattaaagattcatgcagtcccaaaaggcactgtcctgggatgatgagagattataaggtgatttcataaaaggaatccaaccctgtgcccggccattgatgtgttgtcattgaacccaggaggatttctagggcactgaagttttgttgtttcttttgctgactttggttacagtcagaaaaaataaactagatgtttgtgtctaaaaaaa

SEQ ID NO: 271384 - DNA, 380 bp, Homo Sapiens
aaattggctgcttggcaaactaattttcaaagaattagcatgttcttggttggaaaagaaaaagaataagcaaagtcagaaagtaacaaaaaagatctctaaagctgggtgttgcccaaaagcagccgatggagccaaccagaggctggaacattacagacccgctttccccaccacccaagctggtgtatgccatgctcccacagcagaagctaaaaaagtacacttactatttctattaacgaatagactatctccttctaaactgtataacattatatgaaattggaagctaaaatgtttgtagtaattgtttctactatgttcttcttctgccttcattgttaagttttatgtttcattaatacctttttagagtc

SEQ ID NO: 271385 - DNA, 528 bp, Homo Sapiens
aagaccaactgattgcagattccaaacttaccaagcaatctgattgattaaaactggtttgctccccttaaagaccttccaaagagaaaatacatattcaccaactaataactttttggtctgcatggcagaaatgtttgtttcttctagtgaactggtctcaatactggattcttgtgagctggttagcaacaatcagttcctcttcagtcacatcaattttgggtgtaaaattcaacttctacgtctctctccataactaaagccaggccttagtcatagatgtcctggggaggcaggtcctcctcccaccgcccccacatcccaggtaacttcaatagttacaatatatctaagtgtccatagaggaagccttttcatatgaactcatttattatacttcatttaagttagttagacgttgattctagatgaggcagagcagaacaaatctggtattttagtaacttcctagattttttattacttagggacagaatatggtttaaaaactatcactttaagtcc

SEQ ID NO: 271386 - DNA, 558 bp, Homo Sapiens
  misc_feature (22)..(22): n is a, c, g, or t
  misc_feature (356)..(356): n is a, c, g, or t
  misc_feature (397)..(397): n is a, c, g, or t
  misc_feature (450)..(450): n is a, c, g, or t
  misc_feature (457)..(457): n is a, c, g, or t
  misc_feature (488)..(488): n is a, c, g, or t
  misc_feature (517)..(517): n is a, c, g, or t
  misc_feature (530)..(530): n is a, c, g, or t
  misc_feature (537)..(537): n is a, c, g, or t
cccaggttggagtgcagtgganttctttggctcactgcaagatccaggctgaggaatttctcaaaataagacaagaatgtctgccacatcaactggcttttcctttcacagatttctctgtagcatgtgatgctgtttgacagcattttatccacagaacttctttcaaaattgagtcaatcctctcaaaccctgacgctgctatcaactaaggttatgtaatattctaaatcctttgttgccatttcaacaatgttcacagcatgttaaccagggagtaggattccatctcaacaaaccacattctttggatcttccataaggaaggcaacttctcattcattcaaggtttggancatgaggattggcaggcaattcaggtcaggatcgtcagggntccctcttcttaattcttggttctcttggctggtttccacccacatctacagnggacttncctccactggaggttcggaatccctcaaggncatcatgaggggttgggaatgaacttctnccaactggttttnaatggtnaatatttttaacctcctcccc

SEQ ID NO: 271387 - DNA, 460 bp, Homo Sapiens
  misc_feature (54)..(54): n is a, c, g, or t
  misc_feature (182)..(182): n is a, c, g, or t
  misc_feature (188)..(188): n is a, c, g, or t
  misc_feature (209)..(209): n is a, c, g, or t
  misc_feature (217)..(217): n is a, c, g, or t
  misc_feature (224)..(224): n is a, c, g, or t
  misc_feature (229)..(229): n is a, c, g, or t
cccctaagtaattacccaaccaaaagggtacccagggattaagccggcaatccnccaccttccgatgagggaaatcccccagtaagctttcctgattccaaggaccaatgcctggcccatttttaaaaggggcccacaacctatagaattaccccactgtgggaatttgggtacaaaatatngttttngtcctattgaaaacatacacnggtaaatnggtgttngttanggtaggttcctgtcccagttccttagggactttttttcacattatagcatttttaccctaaacatgatgttgagattattatatactgtattttcttctaaattaaccctaatgtttaaaaactcactttccccctttaattgaaggcattgttttgttagatgcagtaatgatgtttaccagagattattgtttcctatgcaaaataaattttcatattttgaattctaa

SEQ ID NO: 271388 - DNA, 504 bp, Homo Sapiens
ggaccaccaggaatgtgggttgccagtcctcctggcctgtatttgttgttgttttccctctgggagtaggagccagagaagatgaagtgaacgatgggttaaagtccagatttgttggggatggtgggcccattggtgctgcaatggagggataagggggtccgtgggattgatagtatggcccaagacatgggtgtagttgaaggcaaaagctcatgggtctgagctacatgaagtcacccagggggtggtgtctgaggactggccaagatcaggtccctgcaaacaaggcagctgtatctttaagatgggaagagagtaataaaacctcttcttagggttgttgagagaatcaaaggctttaatacacagaaagcacttaaaatagtgccttactatgcttgtagtaagtgcccaagaagcgctagctattattatcattaggcttttatagctgcaagtaattgaaactaactcatacccatacccgcttaccaaaaaaaa

SEQ ID NO: 271389 - DNA, 484 bp, Homo Sapiens
tggaagacaggtggaaggaatggaggattggaaagcaggacagcccaacttcaagaaggccccgggagggacatctttaatggagacccctgaaaagacatccgtggaagtattaacaaacgacaagtaacgttcccccaggaagaagcttagcccccaggaaaaacaaagacccagttggaccccagagatgccctgagttggagatgaactttggccaactttcctcatcacccatacttaaaatcctgtccaaggaggagcttattcaccattttctatacatgtgacatatgtagcagcataaccgacaactgggactcgctgccttgactccacctctacatacaatgactcagctaaccagactaataaaagccatgtttgcaccattgctcagggaggcattgctttggggaattattcccagtgtcctccttacttatcgcaagtaataaaaatcccctgggaaatcctcatataa

SEQ ID NO: 271390 - DNA, 416 bp, Homo Sapiens
  misc_feature (239)..(239): n is a, c, g, or t
  misc_feature (299)..(299): n is a, c, g, or t
  misc_feature (354)..(354): n is a, c, g, or t
  misc_feature (372)..(372): n is a, c, g, or t
  misc_feature (390)..(390): n is a, c, g, or t
gagtttggctatttattgatgccacacagagggaggttatgattacagtctggttttaagtactgaaatatccaccaaggtaccccttgaggaggctgggtagaaggggaaatggcaaagagcacagagatgcagggagggcaatgggctgggcgtgtatgtcatacaattattttggaggacaatgatgggtaggattgtgctttacccaccatgttttttagtaacataacttagantactacttgaataagcagtacagacaacaggagtagcatcaaatatgttagctagggttntaacaccagggcagttcatgtcatgtggcctcttccttcaaaagtggaatcactntgggacccaagcaccagnaacatcgtccccaaaggnttccatctttgaagtccggaaagggg

SEQ ID NO: 271391 - DNA, 441 bp, Homo Sapiens
agagaatattccagcaattgtgtacccctgggccagtctctttgaaccctgagggtggccaggatctggagctgcatctctaaggggccaggctttggggaccattgccaaaggtggactcaggaggaaagacacttaaagacacttttacatgtctagtaattcttgatgttcatcttcagcaccagtggaaacacatgaacttcgatgcaggtccagagaccatggacactcccacgaggctcagctctcaggcaccccctacacttcagttgagggaaaagctcaagtgccttaggcccgtggaccacagtcttggctgagatcaaagggatgagcaacagggacttctgccacagtgacaatggaattgtgttgtgccttacttcagaggtggtctcttctttcttgtaataaaagcaatatttatgcggaaaaaaa

SEQ ID NO: 271392 - DNA, 227 bp, Homo Sapiens
ttatattcattccttcccttaggttatagttctgcaggtataaagcataagtataaaggtggaggtggtgtagggggttggggaggggtgctggcgctggtgtggggcgaggagttctccaggatacaacattccagatgatttctaagttcccttccaaagccacatttctattacttgctggtttctctggtgggcatttgtcccagacaggagctcctatgcag

SEQ ID NO: 271393 - DNA, 457 bp, Homo Sapiens
aatcgggaaaactggcaggagggccattcccctagatttggctttcataccccctaaacagggtagctgaagagacttttaactccctaaaaagggaagcagaaagcaacagcgtttattcacagccccctttcttcccttatctccctctttctcatccacacctactgcatgatcaatgttgggaggcaagataagtcagcaatgatccctgacttgcaggtgctaccatctagtgaaggagatggaatggtctccttaccaccaggtggcaagtgctcagatacggcaagaagcaatggggtttgcaaagtgcacacattctttaaaaggtccgttaggtataaaaactgcatttaattagcagatactactaaggagctttcattggcaagttttaaaatagatcaattcagctagaaaagtttagtcccattaagaaaatgtgttttcaggc

SEQ ID NO: 271394 - DNA, 394 bp, Homo Sapiens
  misc_feature (66)..(66): n is a, c, g, or t
  misc_feature (80)..(80): n is a, c, g, or t
  misc_feature (90)..(90): n is a, c, g, or t
  misc_feature (100)..(100): n is a, c, g, or t
  misc_feature (214)..(214): n is a, c, g, or t
  misc_feature (302)..(302): n is a, c, g, or t
  misc_feature (312)..(324): n is a, c, g, or t
  misc_feature (341)..(341): n is a, c, g, or t
  misc_feature (349)..(349): n is a, c, g, or t
  misc_feature (355)..(355): n is a, c, g, or t
  misc_feature (362)..(362): n is a, c, g, or t
  misc_feature (379)..(379): n is a, c, g, or t
tgattaacacggccccatccagctctgtgtggctttccttaaaatccatcaggtgtgtatccagcnggatgactggcagnaaaccaaagnaaacatctcntgtatcctatgggatttttaaaaaagcaccccctaaaaaaaatagcctcaaatttataaacctaaagaaaaacaagtgagttcccctttttgtttacatagtttgttcatttcncccatatattactgccattaaaaataaataaacatctatatttttttaattagcaactatagcaaaatacccaaagtgttacagactncctaacaggnnnnnnnnnnnnngctcacattatttttgncatttgtnccatanctgatancttgaacatttggttcnttttaatatatttta

SEQ ID NO: 271395 - DNA, 403 bp, Homo Sapiens
  misc_feature (80)..(80): n is a, c, g, or t
  misc_feature (192)..(192): n is a, c, g, or t
ttgcgaaagggtctcactctgtcacccggactggaggtgcaggtagcatgttcacagcttcactgcagcctcgaccgccntcagggtcaggtgatcctcccacctcagccttccacaggcacgcaccaccatgactggctaacttttgtattttttgtagagatgggttttaccatgttgccgaggctggtnttgaactcctggggctcaagtgatctgccagccttggcctgccaaagtgtgtttttaatgtctcaaaatgagaattctcacgttagcaggtcacttggggtgaacaagatgctttcattctacatcacggtgtctgggtgtcccagggacagctgcgctgaggaaccgcagcagtggggaaaggaaagggattgaaaggggtcctatatct

SEQ ID NO: 271396 - DNA, 417 bp, Homo Sapiens
  misc_feature (91)..(91): n is a, c, g, or t
  misc_feature (179)..(179): n is a, c, g, or t
gccaaggcgggcccttgaaaccccccggggctcaagtggatcctggccagccttggcctgcccaaagtgtgttttaaatgtcctcaaaaangagaaatcctcacgttagccaggtcacttggggtgaaacaagatgcctttcattcctacatcacggtgtctggtgtccccagggaaantgcgctgagaaccgcagcagtgggaaagaaaggattgaagggtcctatatctgtccccagtcgctttctacatctccatcaggacttttcacatttctgttagtaattctaagaatttattctgagttgtaattccggttgttctattctacagtatacctttgaattttgattacacaaaaaaccttgttatccctctgctgagccatatagtcttacggtttcccaaacaaacccc

SEQ ID NO: 271397 - DNA, 512 bp, Homo Sapiens
  misc_feature (103)..(103): n is a, c, g, or t
  misc_feature (126)..(126): n is a, c, g, or t
  misc_feature (243)..(243): n is a, c, g, or t
ccccctgcaccctagctgagagtcaggagcttttcttcagagtgtggagaaaaaatactaaaaattgaatccccaaattcccattatcgattatggagtaatnaattatccaagctgtgacccatnacgcccaagctcagaagtaagcccacgtaacccgcactgccctccctggaatccatcagggcagccctgtaaggaaggcactgtcatttcccattttataaaagtggaaacggggancgagaggttagtaaatgctgaagtcacaggtaacaaatagagctgggatacagatgcaggtctcattgactcagaagtccatactcatactctttaatttctccatctctgccagcctgagggacactgtagactatgtaaactggaataaagctgaactcaggctgggtgcagtggtggttcatgcctgtaatcccaatgctttgggaggcccagagttcgagatcaccctgggcaaaacagtgagacccccatctctacaaaaaaca

SEQ ID NO: 271398 - DNA, 763 bp, Homo Sapiens
  misc_feature (461)..(461): n is a, c, g, or t
  misc_feature (514)..(514): n is a, c, g, or t
  misc_feature (565)..(565): n is a, c, g, or t
  misc_feature (598)..(598): n is a, c, g, or t
  misc_feature (605)..(605): n is a, c, g, or t
  misc_feature (630)..(630): n is a, c, g, or t
  misc_feature (669)..(669): n is a, c, g, or t
  misc_feature (731)..(731): n is a, c, g, or t
  misc_feature (749)..(749): n is a, c, g, or t
aataagtttcagcgcataggccgtcatgtgcaattttggtgaagaattctctccaaggtcgtcttacatgaatgctaaatggtagagcaaggacaacggaggtgacatgaatagttctggcatctgagggcctagcctgttgccccagcagagaggggagcaaggacaactgtcctctgtggaggttctatgagagcccatgttccaggacagtcacaaacttgtttccaaccagaattcgcaagcagtgtcagtcctgagagagcaggaagcttgatcccctctttggtaggtgctggacttagtaagtcagcttcagcaggccctttggattccccccggccagtaatcttttatccctgtacaagagcccatcttggatgtagcaaactgcagttcactcttttgcagggtaagggctcagctggctcagtgggacacaggctttagatgttcatgancccctaaatcgtgtcctcaccgtacatgagctttctctctttcccactcagancccagggtacatgactatgtgaatgtaagatatgcctctggtatgaagganaccttggcacaaacgtgtggtccatcttgtggntctaganagtgtttcccaaacttcagtcattntcatgcccccattatatgattgtttccatgtccacaaantgtgcctgtcagcatttatttacttacttattttatttttttgaaatgtagtctcactccancctgggcgacagaagtgnggtccgtctcaaaa

SEQ ID NO: 271399 - DNA, 475 bp, Homo Sapiens
  misc_feature (280)..(280): n is a, c, g, or t
  misc_feature (445)..(445): n is a, c, g, or t
tatgttggtgagattcgtgtgacttttaatttattatgttactaatgtcttacagtaagtgtgaggagtaaagacagggatggggtaaaggtaaggaaaagtatttttcaagttccttgaactattgaagcatgtgctaggataagaaagttcagtaaaagcatcatgtccttatcaccagagctcttaaaggagacatggaacagagacggggcaactcttcagctctggccgaagtgactgctggacagagaacaaatcctgcatcagccttggcacnacatgaaagactgggcaatgcagatgctacacagttgggcagatgaagagcttgactgtccagaatctacttctagccaagccgagtagggcgcatgcacaccccttctctggtctgagtgtctcttcctctctcgcaggaccccaccaactgtacagccatggngtaagtgttagggagtcttttagaaaagag

SEQ ID NO: 271400 - DNA, 378 bp, Homo Sapiens
  misc_feature (30)..(30): n is a, c, g, or t
tataggggaaattttggcccttcgaggccnaaaaatttcggcacgagagaaagcagcccaggacactgttgaataaaacacacaatagtctctgtggtcttctccaccccaccccacaccaggcaccctcagcttgattctcctttttaattgcctgtaagcagggaagcataatgttttcacattctttgtaaggcctttgttctactaaaatctaacctcagagcacaattttaaactagatgaaagaagttgctgcgcctgaagcactgcaaacacctcctcaccacacatgtgcactcaccctggacaccctcactcaccctgacaccctcactcctcaccctgggactcatcatcaataaacactgttacagc

SEQ ID NO: 271401 - DNA, 472 bp, Homo Sapiens
  misc_feature (331)..(331): n is a, c, g, or t
  misc_feature (363)..(363): n is a, c, g, or t
  misc_feature (421)..(421): n is a, c, g, or t
  misc_feature (440)..(440): n is a, c, g, or t
  misc_feature (446)..(446): n is a, c, g, or t
  misc_feature (460)..(460): n is a, c, g, or t
aaggaagctcttctgttgtctcgttgagagtaagaggctgggtggactcgggcaagactctgaacacatctttgtcaattttaatatggagagtatgatagtgagtgacctccaagggtgagtatgaacattcaatgtgttaatacacacaaaacccttgaaagaatgccagacacataataagtgttgtaaggtgttgactactatgattaccagagatgtctgtggatttgagaaaaggaagggaagtaggaataggagaggcaacaaaattgaggactgaagagaagggtcagattctgagagggcctttaagccaacatggagccangaagcttgtttggggaaagtaggcagaaattnaggaacatactccaccccaccccggggcacccaaacctgggtccagccctgatgtttnggtttccatgtttcccctnggcctncctgtgctcccctnctggtttgagac

SEQ ID NO: 271402 - DNA, 599 bp, Homo Sapiens
  misc_feature (527)..(527): n is a, c, g, or t
  misc_feature (588)..(588): n is a, c, g, or t
ttgtacaggaaagaggtttaattggctcacagtttggcatggctggggacgcctcaagaaacttacattcatggcagaaggggaagcaaatatgttcttcttcacagggcagcaggaaggagaatgagagccgactgaagggggaagccccttctaaaaccatcagatctcgtgagaacttactatcacaagaatagcatgagggaaactgcccccttgattcagttacctcccgctgggtccttcccaccacacgtggggaattgtggggaactacaattcaagatgagacttgggattggggacacagccaaaccatatcaccaactgtctactttctcattgtatcctcacatgggcaggaaggaggaactaggctagggtctctgggcccctttttgtaaggggcactaatcccattggataaaggggtccactctcatggacctaattacctccccaaagtttccatcttccatataccatcacatcagggttaggtgttttcaacatgtatatttttaggngggggccacaaacacacagtccctttgcaccatcaagtgagggagttgtggggctcagatnggttttggggg

SEQ ID NO: 271403 - DNA, 396 bp, Homo Sapiens
  misc_feature (295)..(295): n is a, c, g, or t
  misc_feature (372)..(372): n is a, c, g, or t
  misc_feature (383)..(383): n is a, c, g, or t
aaaatcccaagcagaaaattcagtcattcaagagaaaagtcattaaagaaaaaggaaaaaatagagaacagaaaagcagacatttagtttttccttaggcgtgacaaagcttaacaaacagtcagttctgcagaaatgctcccagttttcctgggtgtcccaagccctcgctctgtttgggagactaccacagcctctgtactttctcagctttgtggggtctggggagggcactttttgctttcgggaattgggggttgaagggttttctagggtccctggatttaaccaggantctggaacttgctccccacctgttctttcccctggcagttccttcccaccccaggcaggccaggggggggatttggntttttaaaaanttcccaaggcagg

SEQ ID NO: 271404 - DNA, 404 bp, Homo Sapiens
  misc_feature (11)..(11): n is a, c, g, or t
  misc_feature (44)..(44): n is a, c, g, or t
agaggggcaancgtggccccctcccctcccccttttccctgccnccgtccccatgccctcagcttgcctgcttgtgcccagttgccctgtttcgccttcaagtgtttgattcctagcacttacatgtgtcctcccccacccaagccctctatctccttctaatccttcaaccccctggccccctccccgtaacagtgacttttcccagggaggaagaggcagcaggagctgttggccttggtttgcacagagcgggtagggctgtagggaaagcgggtgagctgttgtgctgctgggcctccctttggccctcgcttcccaccctacgatgtatgaaatgtatgtacagaccagagatgtttatacagccgataaagatggagtttccgtatttatcagtaaaa

SEQ ID NO: 271405 - DNA, 489 bp, Homo Sapiens
  misc_feature (24)..(24): n is a, c, g, or t
  misc_feature (34)..(34): n is a, c, g, or t
  misc_feature (43)..(43): n is a, c, g, or t
  misc_feature (54)..(54): n is a, c, g, or t
  misc_feature (75)..(75): n is a, c, g, or t
  misc_feature (87)..(87): n is a, c, g, or t
  misc_feature (100)..(100): n is a, c, g, or t
cgttgggcccaaacccgcctgggnaaatggctgnctgcccaanctgcctggggnaaaaggccctgtcccccgggnaataagaaacangtccatcaaaaanggctctcccacctcaactgtccatcgaatggaacttggggcgccttggtggtgcctggtggaaaggaggggaggtgatggaccgcccgccccagggtcacctggttgatgttgtagtagctgggactctccaggtccgccagggagaagttgggccctgatgctgttgcaacaggagtctgtgatactctcaccagctccgtcacattccagaccccggaagtcacaaaacagtcctggaaacttaaaagccgttgggcagtggtttgatgtccgcatctccttgctggtttgaactatctgattgtccggattctggcaggctctttggggagtcttgccttgaggtctacacctgctctggacaggtgacaggagctgcctcgtgcc

SEQ ID NO: 271406 - DNA, 353 bp, Homo Sapiens
  misc_feature (275)..(275): n is a, c, g, or t
  misc_feature (290)..(290): n is a, c, g, or t
aagtgatgagttctggaggtaaatacacccactctggattttctggttacaatcactaccttttctctcaacctcagctagaaatccagactcatgaggcctcaatccctgacctttcattccttgcaaatgccaaagccaactatgtaggaaactttttcagagaagaaaactctgtcctcccagaagataaattttccactttgctctatgaggcagagagcaacctcaaaccacaaacaggttgggacttgaacaggcctgaactcaagtantctttcctgggaaantcatccatcttgttggataaaagcagcagttttaatcagtgtgttttcatccatttacttact

SEQ ID NO: 271407 - DNA, 613 bp, Homo Sapiens
  misc_feature (21)..(21): n is a, c, g, or t
  misc_feature (109)..(109): n is a, c, g, or t
  misc_feature (121)..(121): n is a, c, g, or t
  misc_feature (307)..(307): n is a, c, g, or t
  misc_feature (352)..(352): n is a, c, g, or t
tggctagggctctggtgtgtnaaaactgaccattgctgtccactgtctaggggccacaggacctacctctggtctggaggcccacattcccacctcgcagtgagacctncagccaaggccnacccctctctgggcctcagggatgggttgtgcttagcatgtccctgcattagcttattaaatccagtagcatcccaacagtcctgtgaggggagatagtatcattatctccatttacaatggggcgactgaggctgagaaaaattaagccacatgcccagctagtacgcaagtgggagcacgtccnacagcaaactctgcaatcacgacgtgaaccacagtctcaaattgncttgggcctatttgacctgctctgtgtttgtgggatcacaaaagatttcgtgtctttggtctatacctaggtggccctatttggaaagaagaggtggcctggagaggtgataaatccatccaaggtaggggctggacagaatttctgaataaatcagccaacaaatattcaccgaagcctactgagcacctggccccgagtgcaccacgccccagctaaggactctgcacacatttcttcctgagttggaggggagtgtta

SEQ ID NO: 271408 - DNA, 509 bp, Homo Sapiens
  misc_feature (43)..(43): n is a, c, g, or t
  misc_feature (70)..(70): n is a, c, g, or t
  misc_feature (80)..(80): n is a, c, g, or t
  misc_feature (176)..(176): n is a, c, g, or t
  misc_feature (243)..(243): n is a, c, g, or t
  misc_feature (433)..(433): n is a, c, g, or t
aggctgctgcaattgaacggcccccttgaacactttctcccanggtccccctggcaacaggaaagacaantcccgagaanagaacgctggcaagcacctggctgaccctggccgacttcgcgctggcccatgaaggatacgctcaccaacatcaacaaccagtccttcaataactntcattgcgcataggtgagcacaccccagctgggctgccccgcagcaggctcccttcccatgcaaggncctggcccaccaccaggagagacatgaggctcaggacaactgaggcaattcgggtggggaggttcacgcactcacagggcaaggagacctgaaagacctttagtccagacgactctagatgactaaaccaaaaacccagctgatgtgatgatccgactatactgtgcctactgttacaatagaagcttgnctgcctggctgagaagtgagtttgtgatccatttccagaggggttgctgtgcctgctgaggacatggcttcccaga

SEQ ID NO: 271409 - DNA, 528 bp, Homo Sapiens
cctgcgcaggggagggctgcccatctccccaacccagtcacagagagataggaaacggcatttgagcgggtgtccagggccccgtagagagacatttaagatggtgtatgacagagcattggccttgaccaaatgttaaatcctctgtgtgtatttcataagttattacaggtataaaagtgatgacctatcatgaggaaatgaaagtggctgatttgctggtaggattttgtacagtttagagaagcgattatttattgtgaaactgttctccactccaactcctttatgtggatctgttcaaagtagtcactgtatatacgtatagagaggtagataggtaggtagattttaaattgcattctgaatacaaactcatactccttagagcttgaattacatttttaaaatgcatatgtgctgtttggcaccgtggcaagatggtatcagagagaaacccatcaattgctcaaatactcagaaagtactgtcaaaagcctaataaaaaacctaaagtttgctctgaaa

SEQ ID NO: 271410 - DNA, 465 bp, Homo Sapiens
  misc_feature (18)..(18): n is a, c, g, or t
  misc_feature (22)..(22): n is a, c, g, or t
  misc_feature (36)..(36): n is a, c, g, or t
  misc_feature (369)..(369): n is a, c, g, or t
cctcacttaacaataccncccnccacggcaagaatncccaaatccgaatgaccccagttttcctaatgagtaaaatgatcccagatgtgccccagagcatgacgcctgcagctccggtttcatgcaggaaattggttttggagagttttggcaagttggaaagccacttactggcttttgacatgaccttcctcttggagaataagtggactcccaagctaactctttgcaaatgtaaacacatgtcccatcttgtaataaatgcaaaatgcccgtgcagcagaagcatgcgactttcatatccttgcctagaataggctgcatggtgtatgtcagtgagggccacgaggcgtcggctttagacacagntcatagctctacaggagtttatgaatttgaagcttatgggattttggcagagaaattttcagctgtgcttgatacccaccaaaagaatgtatctcg

SEQ ID NO: 271411 - DNA, 427 bp, Homo Sapiens
  misc_feature (23)..(23): n is a, c, g, or t
  misc_feature (30)..(30): n is a, c, g, or t
  misc_feature (49)..(49): n is a, c, g, or t
  misc_feature (80)..(80): n is a, c, g, or t
cccccaggctgcctcctgaaaanctccccngggtttcaagcccatccanccctgcccttaagccctccttaaaggagccngggattaacaggtggcatgccccccaggccccagttccatatgattttcctgaaaatacaaaagaaagagggagatacaaaatacttttttaatcatgttcttataattatcttaataaaaatcaatttgctctgaatgccatgacctgctgagtgtcccaacctaagggttgtcagaccattttctcatatatgcatgtatagaagtagggaactaatatatttttgtctaaaatgtttaagatgaagatgagaatgaattccacaatatataattttgcctgaactatataagacagttaaaattatagagacattgcaggagagactctggattagttagaaaa

SEQ ID NO: 271412 - DNA, 475 bp, Homo Sapiens
  misc_feature (27)..(27): n is a, c, g, or t
  misc_feature (35)..(35): n is a, c, g, or t
  misc_feature (40)..(40): n is a, c, g, or t
  misc_feature (56)..(56): n is a, c, g, or t
  misc_feature (98)..(98): n is a, c, g, or t
ggcaacatggcccggacccgtcccaancccattanaaaancaaaccgtatgtaaantccacatagctggctccctgaggatctgcccattcccataantttagttcctcctgcctagttcctatggcacccaaaattggtcacaagactgactagcccaggtgcaggaggtactcacttttcagatcagcaagtaaccacaaataccatttatttggtccttaacaagattgagacgaagtggctacaagtgaagcaaaatggaggcgataaatactctaacaactggttatagatatcacattttcttatgtttatagttacatttgaataatccttacctctttttaaaaactccatagacattgagaattgataaaaatctatctttctccagaaaaatacagctatacataagtcagtacacaactttagtaaattcacaaatcttaacaatctaatccatgtgtcctaac

SEQ ID NO: 271413 - DNA, 351 bp, Homo Sapiens
gtgtgccgtgtgtgtttggtaataaaggctcttttgaagatgaactggtgcttgtttaaattcccagctcaaatcggagcaggaatatggacaaaactgctgctactgaaccctgcactgagccgaggtatttccatctggttaactaaacgctagctacccaggaaatgacgcagaagtcacgttcttcttcccactgccatcttgcctttgcattctcagttctacgtgccctttgaactttaatggtaaaacatttcacactttggatggtttgcttgtctctagtttttagaaagctcttatcactccttcctaagaaaaaagaagggcaggtaaatttttttaacc

SEQ ID NO: 271414 - DNA, 519 bp, Homo Sapiens
cgttcaaaacccttgccctttaggaaccgtcagtcagtgttctcagctgcagaatgtaaattaggagtcctaggtattcagaaatgctatagtgaatacacagaaggtctccaaacatggaaatgtacttttggtggttgaaagacatattgtatactagttagagccagagctctggagtcagattgtctggatttgaatcctggcttcacaaatcaccttagcctatgagacccttgggcaagtcacatattgtctgtaagccttaggtttcttaaaaatcctagaaatgatgacaataacagtatttaccttccagagttgttgtgaggattaatacattaaaaatgatactcataaagctcttggcacaagagcttggcacatagtaggtactcagtaaatgttattgattaaaactagctatttttgaaagccttttgaatttctcctcaatcttggtgatgacataatgacccttactggatagagtctttcataaatacacacaaacctaag

SEQ ID NO: 271415 - DNA, 557 bp, Homo Sapiens
gacagaggctaagctgtaaggttagcatggttctgcctgggctttgcttttgtgcttctgtgcaggctgagctgtaaggttagcatggttctgcctgggctttgcttctgcgcttctgtgcaggctgagctgtaaggttagcatggttctgcctgggctttgcttctgcgcttctgtgcaggctgagctgtaaggttagcatggttctgcctgggctttgcttctgcgcttctgtgctagcaggtgcccacaaaatgtctttttgaatttcttaatttttgggttctggatgcaattcgtgcacgccaagaaactacttgcttgtcagtattttaattctgtagtacatgtgtgtgaatatcagccagtacttacagtaggaggatgaacagaaaaactgagaagacctgtctttcaaaagatgggtttatccactttttaagggaaaaagtgacagtttggcatgggatttgaaaagtggaaattgtggaaaaattgagctgttgaagtcccacatataaccagatttaataaagcttcacatgtgaattagcaaa

SEQ ID NO: 271416 - DNA, 895 bp, Homo Sapiens
cgattacttgggctagtgagtctgggtgacaatggtgatgcaaaactaaacaaaactggccaacattccctaccccaatatcatttaattgctttggttataaagtactggatacttatttcttcacatcccccaatcctaatacacataaaaaccacgctgaccagtgacatgggcctggagaagtcttgagagaattttctttatttcccatccccttctgtgggtttctttcatttatgtgtttacctgttggctttttgaggggagggggagaagtggagggtttgagccaaaatagtgacttcattaaacatctgctgggtcttcgaagtctcagtaaatattgaataagctccctggactctgctgttgctgcctaagacgggtagccagccccgacttgcatgagcagtcttgtttggatatctgcacatgtttgctttctattggttcagactcaccttggaacagagctgggtctgttaagtctgagaccttgcttctggtactatacacatagggcattaggaagtggcccaatgttttgctcatcctaaagtcactcaatgacttgcagcagccttcagccttccttcagttgcgagaagtttgttttcaaatcttcccagattggtagaccaagccctcagggccttgttcttcccagttagcaactttctagctctcccatcctagatcctctcttttcttagagagcctcaggacatgaccaagattgtgcccattgcaaagcagagattggtacttaagccccattctggaagcatatatgaagagtgggtttggattctatttttagagtgaaggaggaagttggaatctaactatatatattttaactctgacttttggccataccatttagggaaaa

SEQ ID NO: 271417 - DNA, 458 bp, Homo Sapiens
  misc_feature (48)..(48): n is a, c, g, or t
caattaaatgatattgggtagggaatgttggccagttttgtttagttntgcatcacattgtcaccagactcactagcccaagtaatcgggcgcccgaagagggagaccagagatgtgccagagttgacccagtgtgcggatgataacctactgacgaaagagtcatcgacctcagttagtggttggatgtagtcacattagtttgcctctccccatctttgtctccctggcaaggagaatatgcgggacatgatgctaagagtcctgggtaaatgtggtgagaatgcacgcgtgcatatgctacacatatgtgcttctcagttgcagaaaatgaactgctttgggagattatcagtagaaagagtgttatcatattggtgctgagtgctatgtgtgcttatacaatttgttcttgtattttaataaactttgaataaaagaataaagctacaaaaaaa

SEQ ID NO: 271418 - DNA, 278 bp, Homo Sapiens
gggctaatttttcaaaacagcttttgtaggctgggattacaggcatgagccactgcgcctggcacatttctgtattaagctaggattgtctatgttattgtaccaaatcagaattagagaaatgttgaggggaaaagttcatacttatatctttcttacactcttcttgaacttcagtaaattaaaggatattttcctgaatacattattaaggtactgatttttaatttattttaattagggaataattgggaacttaggtatgttttcattacacc

SEQ ID NO: 271419 - DNA, 436 bp, Homo Sapiens
ccccccttctgaatttaaattgaaacctggacagaaaacaaactatcctgtagtttccactgctcaggaggaaaaaaagaaatctatattatctaatgcatctttgccatctttattttctagaattctattagacttttcaattataggctattaggaaagaatataactctaagaattcccctaaatataattatcaactcatttgattaatatgcatatttttccccgtaagatttacaatacacgtgtgtttaagtgaattaccaatggcttggagagaatgaaattggaataactaactgaaaaccctagatgtttgtagcattgagacccaatatctttttggaggccctctccatgttagcttattgtcaaattctggtgtgtaaacaaactccttgacccatgttaagttcagcatcctgcattttgg

SEQ ID NO: 271420 - DNA, 425 bp, Homo Sapiens
  misc_feature (44)..(44): n is a, c, g, or t
  misc_feature (378)..(378): n is a, c, g, or t
tttcttagcaaatcattgttttattttaacatcacgtgtttacntgttcttcctaactggcagttactccttggtagatagtacaaatcacaatgtaattcccatcattatgtgtataatatgtgttccttcttgttctaccttaacagcaagtgacaaatacatcatttttattgaatattaattttcaatttatttcagcagcaagcaccaaaatcaaaacccaacaatcaatataataagtatatgtaacaaataatctgaaattcagccccattaagacatgtggggtgcaatatttttatattcccaaaggtctgcatatttcggggggcattaaacaacaggggaacctaaaatttaacacaaaatcagggngcccatttaatactgtttaaccatttgaaaattatttatttaataat

SEQ ID NO: 271421 - DNA, 587 bp, Homo Sapiens
  misc_feature (495)..(512): n is a, c, g, or t
  misc_feature (559)..(559): n is a, c, g, or t
  misc_feature (570)..(570): n is a, c, g, or t
ccttggggaccccagggccaaagcagttctccatctagtcacaccaaaggcaaaaagcctggctacctcccccctagcacgtgagtccctactcccctcccctctgtttctgcccagctttgcttattttggggatttcaaggcagcagagggtagtgaggggagagcaggagaagcctctgtcctgtataggcaactgctgactatgcggtgactgctgtaaccaagatcaggtccccagcccttttgtccattaacaccccttcttgatctttcaaaggcagctaattgctagcaaatccccccgattccgggccttttccctctatttctttgttaggaagttttctgtggagctgaaacccagcctctgtttgactgggtttcatttagcttagttgggttcttagagccccctgtttgttgttttgtgttgtttccaatgaaaagcaagtttaccctcagagttatgcttttccaaagaggctgatgtcnnnnnnnnnnnnnnnnnnaaatgtttccagggttctaaggtgaaagtgaagtcggggaagggggnttggggaattnttaggtaatccaagggt

SEQ ID NO: 271422 - DNA, 442 bp, Homo Sapiens
  misc_feature (365)..(365): n is a, c, g, or t
  misc_feature (391)..(391): n is a, c, g, or t
tttgcatatattaattcagtttaatcatatcaattcttaaacaaaaaacttcctccaagagacaatagttcacagtaactgcaaagcttactcacaatttttaaaaatatcgctcatgcttagcattcaaagaagatattatagaataactgtaaaaacttttaccagggacatcagcttctgacttgaaaaattacaaatactgaagcattttgggatcagacacagtagttttgacattgtctgttcatttgatgagtttctgggaagtttgggaaaattgtacctctataattgggataatgcgcttattctaaactaaacattttcaaatgtagggaaaaccaaactaggcaagcctacancatacaaaggaaaagccctctaaggnccaggctttccccatgttgaatgcccggcctgtgcaccgtgatccggggga

SEQ ID NO: 271423 - DNA, 456 bp, Homo Sapiens
  misc_feature (41)..(41): n is a, c, g, or t
cttacacccccaggcttcaacgatgggagttttgccattcnaccctacacatttaatgaacaaactctgggttaagtaataagagaagcccagccaaattccattttggtcccaagttccatgatgaagagtttatccagtgggggtcagttcccacaggctgtctggtgaactctttgtcgaagttggaggtgtctctcttgtctctctgccaaatggaaagtaaacacattaacacagcgtaagaagaaagacacaggaccaagatacgccagtcattgggtggctgataccatctcatgagcagagtcagaaagagccctgtgctgaaaatttttagcagctgcactccacgcactggctttcatttcacattgtatgttggcttggggatagaaatgtggtggaaattttctaagaaaagaagtaagtcattgaatgtcagttaagaattgc

SEQ ID NO: 271424 - DNA, 285 bp, Homo Sapiens
aattttagacctttctgagaagattattatatatgacatatctatagctatgtgtatggccatagatgtatttctgtgtgtacatatgtatagtcatgtattcctgcatatgtacatacaaatacagagatatataaagtacatagaaattccttacttgtaaatagccaaaaagtactgacatgagtgaattttcacatttaaatagtcatcaatatgaagccatgattaatgcttgtataatgtgatgcaataaaatttaaaataaatttctgcacatggaaa

SEQ ID NO: 271425 - DNA, 366 bp, Homo Sapiens
  misc_feature (91)..(91): n is a, c, g, or t
  misc_feature (144)..(144): n is a, c, g, or t
  misc_feature (166)..(166): n is a, c, g, or t
  misc_feature (302)..(302): n is a, c, g, or t
cgctggggaagaagcagagcctccagagtaagccccgcggtccctggtggagagacgcggccccgtgaggagggcgttccgtctcagtccnagccactccactctgcagccgtagcacaaagcagaccacagataagacatggnacagacaggcatgggctgcatnccataaaagtttattctcagataatgaaatgtgaatttcatgattttcatgtcatgaaatatatttttaatttgttttcaaccacttttaaaatgtaaaaaagccattcacaggccatctatcacgccgtgggcanggatgcagcgcaagggcctgtctgccagaccctattttaggtgaagatgccagcaagaccaacc

SEQ ID NO: 271426 - DNA, 331 bp, Homo Sapiens
aagacatgtttcttgtccacggggattttatgtttcagtatgggagacaatacaggcaaatatacaactgacaagtagcccaagtcagtacagataaaagtgcaatgggacaccagaggagaggcttttagagaagatttcatagctggatggatagaatggctctacaaaaaagagaaaagaattttcagggcagagagaacaagggacacaaaggggaaaaagcaagtggcatgtttgtacagtagcaaattttctttggctggaggatattaaaggggaacaagcaggtatgaggctggaaaaatatgttaaagcaagaccctgtctc

SEQ ID NO: 271427 - DNA, 623 bp, Homo Sapiens
  misc_feature (538)..(538): n is a, c, g, or t
  misc_feature (590)..(590): n is a, c, g, or t
  misc_feature (595)..(595): n is a, c, g, or t
  misc_feature (612)..(612): n is a, c, g, or t
agtggtcaacacagtaccctggctccggtcaaagtagtcacagggctgtggattccacttcatgcaagtgaggaggcctgaccagttcactttgcttttggtacattctggaaaaataccccagagtgaacctggatgtgtgtgtgggagtgggggcacagatgattctcactctcaaataggcatctcaggagaattagagaatctgttattttgacctattcctgagctactattaaatagttacacaagctctctgcattaattttcttttccaaatgaccatctgtgaagtgtagcagtttctggggctcttccccaagtctgaatttcagctgcttaaatagtagacattccactgcaagtctatttctgtaagggttgaaaatacactattatggaaaatgtccaactgtggctttgtaccttccattccgtaatgtgctttcatttattcggcatatttattaggtattgactgtgtgcctagtactgtgctaggtgctaagaaatactaagatgagtaagacatggttcntggtccacgggggaatttatgttcagtatgggagacaataccggccaatttncactnaccagtagccccagtcngtacagataaa

SEQ ID NO: 271428 - DNA, 431 bp, Homo Sapiens
ggtggaaacaagccaaccacaccagctaccgtgcgggtagggaatgatccctcagtgccttttatcccttgcaagccccaagatgcctactggcctgctagcccggagattttataatacctgaagaactcctgagtgctcaagcagagggagggaataaaaggtgagggcagaattcgatttaccagctccacaggccatttccctcaccggttctcaaggattaggatgctgagaacagtcagcaactgggggacttctacccttccctcccctttgttcactgggatgggaaggacaataaagcggcaggctggagagactgaggggctggttagagatttctcaggctgctttttgaaacacttgaaggagccggtccatgctattgttgtagtaaaatagaaagcggaactattctccttttgcaa

SEQ ID NO: 271429 - DNA, 530 bp, Homo Sapiens
  misc_feature (63)..(63): n is a, c, g, or t
acagataaggaaactgaggcatgattaacttgctcaaggtcacacaaccggaaaatggcagancttggatttgaactgcagaccacctgtcaatcccaatttctctctctcaagcccacattcttacctaccacctgctatcccacacttaccagagggtgagatttctagttctagttccctccacagcctggcccagcctgtatcctctgtagtgctcaacacgaggctggactggcagaattgttctgcaaaatgggaaggatcactgatgctgagtcagaggcagcagcctcccgcaatttgaaggggcgggggacctagttcaaggcctggcatgcaggaggtctcaataaacatgtgtggcctgaatgaactaatgaataagcatgattcagtggagacagcccactagaaatgtgggtgaatgttctttctgccacttcctttgtccatgaaagaggaaataaatgcattacctccatgaaggttgagattaaatattgtatgaccgcttaagttcctttcca

SEQ ID NO: 271430 - DNA, 729 bp, Homo Sapiens
  misc_feature (99)..(169): n is a, c, g, or t
cagaaccttttatatgtgacttcttttagtgcaatatttgctttattgtggtggtatggaaaagaaccccatgctgggccaggtgcagcggctcacacnnnnnnnnnnnnnnnnnnnnnnnnnnnnnnnnnnnnnnnnnnnnnnnnnnnnnnnnnnnnnnnnnnnnnnngttcctaaaacaaaaccaaaccataatgtctccaaggtatggctgtacttgattttggtttctccatctaaaaaaatctaattcatccaaggaaggagttgtaagatacacattttaaaacaagaattttgcattctcagagtagttgacagcactttaaagcaccaatgcactctaatttgttaaaatttggataataatatatacgaatacatataattaacgagatgtagttcttaaaagttcaaagacacttttaaaaatacgtaactaaaatttgccaacttcctgaagacctctctggaagttagttttgtggaaggtaatatgaaattctggcccacaggatgtctaaggtttcttccagctctaagtttgaggggaaaaaaaagaacaatggagacacccccacactaatctttataccggaaagaaagaggcagagagcttatttgaagaaataatggccaaaactccccaactttgagggaagacatggatatataaaaaggtcaacaaactccacgtaggataaactcaaaagagtcctatgctgagtt

SEQ ID NO: 271431 - DNA, 357 bp, Homo Sapiens
  misc_feature (94)..(94): n is a, c, g, or t
atggcccctgcactgtgctgctcagcgccagcccgtgcttttgtcttttccttcttcttggaggtcagggagatgaggttgaatttgccggtgnagtcgatgggggtgttggagacacagttttcggccaggtccttgagatactctggcgggtcctggtggccatggtgtggaacttgtcggacttgtgcgagacgttctcagcgttaatcaccttggccagcaagaagtctctgaagacgtcgaatttgcggaatgtggttccactggggatgggggggccgaaaggaggagcgtctttggatcgggtcacagccatactgtggagggagagattatttagatggtggaagaaag

SEQ ID NO: 271432 - DNA, 477 bp, Homo Sapiens
  misc_feature (232)..(245): n is a, c, g, or t
aattggatcgctctgggatttcttccatggtggacttttgtttctgatcttgttttccctgtggatattggaggacagcgaggttctttctgatactaaaaacctttctttcaggcagcaaatgaacttgaaaggttgcctggactcgctggagcaaaggaaagcgattttgtttgtataattaaatgatctgttcttctacttcactcttcctgttgaaaaactgtgtgannnnnnnnnnnnnnaagtaaagtttgtagctcctcccatgcccaggaaagcacagaactcaagtgtggtggccgtctgagctgtcctttcgctggccccgctgtccgcaggggcttcctacctgtgtgagaggtcgtagcgggagacagcaacagagagtaggcggctgggccacgtccttcacagggcgtcatgtgcctttctattttcatcttagaaaatttcctcagcaaaccgatgagagat

SEQ ID NO: 271433 - DNA, 445 bp, Homo Sapiens
gagagctagcaccataccctgctcaagcatagcccactctggcctcggcggtccccactgtctcagcctgcgtgaccgggatcccatttcatcaaaggtccaggacagacaagcaggttttgaaggaaaagttcaatcagcccacttgcacctctgcctaatgcagatgttgtgtgtgccgcacaccagcggctggggaggaagccggtgtaggtgagtcggactccaagcgtcccctgcatttaagtttgccgtaaaagccaacccaaggaacactggggcattttcaccgcagccgctcagctgaggggacaactcccctccaagcttctttcgcccagcgtggaccaatgacaaccatctggaaacaggcgtcccagcctttcctcggttcaaaaaccccagcctgcaaaggagggtaaatagtttttgcctttttcccttg

SEQ ID NO: 271434 - DNA, 399 bp, Homo Sapiens
  misc_feature (49)..(49): n is a, c, g, or t
  misc_feature (57)..(57): n is a, c, g, or t
  misc_feature (177)..(177): n is a, c, g, or t
ccccagagggaagcagaaacagtgccaggggaactgaagaaaaccttanaaaagatncccagccccctgggagacatgaggggaagggtatttccatcaaaagatgagaataagtccctataaaatgaaatattcaaaagaagaaatagcttttgggaacttagaaacaggatagcnggaaaaaattttacttctttacctttgtttcctcacactctctgccctgaccagtggcaggcacactctgcccctgctatttacagttgctgttccttctgtctggaatgctctgtctctagatatccacatgctttattcacctctttcatgtctttgctcaaatacgtcttctgagtaaagttgttcctaactaacctatttgaaatatttttaaaaaaa

SEQ ID NO: 271435 - DNA, 452 bp, Homo Sapiens
aatctctgatacgtaaatttaggtgaaaatttaaaatattcatgataatactctaaataggttaaaaaaatgtccacatcacaagaactagcaggtgacatgcacaaatgaaaacacaattttattttgggataaaaattatgcatcacatttgtgctggatttcaataattcaaaatttttagaataaaagccctactccccatgtgtagatcttagcagtcaatattattcttttctatctctttttctaagcagtaacatctaaaattactgaacgacaggcaaacactttagcagacctacctacctaccagggttccctcccatccagtcctatgatgcatggatgaccctaagagacaatttcctagtgactgtggcccatttctagcacaattacttaccaggaatgaaaagaaacccaagaagaaagccagcaagccattgaga

SEQ ID NO: 271436 - DNA, 596 bp, Homo Sapiens
  misc_feature (27)..(27): n is a, c, g, or t
  misc_feature (43)..(43): n is a, c, g, or t
  misc_feature (48)..(48): n is a, c, g, or t
  misc_feature (56)..(56): n is a, c, g, or t
  misc_feature (63)..(63): n is a, c, g, or t
  misc_feature (68)..(68): n is a, c, g, or t
  misc_feature (76)..(76): n is a, c, g, or t
  misc_feature (90)..(90): n is a, c, g, or t
  misc_feature (95)..(95): n is a, c, g, or t
  misc_feature (160)..(160): n is a, c, g, or t
  misc_feature (264)..(264): n is a, c, g, or t
aacccaaaaaccctgtgccctgacccnaagccttggtcccccnctccnctgtcctnaaccctnaaagnaacttccnaggacctgccctcntcctnacccaagatgaaactcaactggtttcctgggcaagctactgccttttccctctgtggcccacccnactttggggaagcccattaagaaaaaggtggccctctgtgggggaaattccaagaccccacaggtatgtaatccctctggggaaaggagtgggagggagcaaantgggttgttgcaaaatgagctttccccgtattttcccatctagtcgactggtgtgagtttaacattgcatttggtggaaatctaagactggcacacatgcaactcattgagggggtcctgttaaccctgcaagtgatggatgccttgcctctgtgatggcctcagtccgcccacctaggttccagggcttattaacccttgagctctttcatggtttcctcacactgtgttctctgctctacgtcagcaacctctctgtgccgatgttgagaagaaacttcatatgcaaccttgctttatcggtgacctcagattccctgtggagaatttgg

SEQ ID NO: 271437 - DNA, 504 bp, Homo Sapiens
  misc_feature (83)..(83): n is a, c, g, or t
  misc_feature (94)..(94): n is a, c, g, or t
  misc_feature (158)..(158): n is a, c, g, or t
  misc_feature (162)..(162): n is a, c, g, or t
  misc_feature (428)..(428): n is a, c, g, or t
  misc_feature (430)..(430): n is a, c, g, or t
  misc_feature (434)..(434): n is a, c, g, or t
  misc_feature (436)..(436): n is a, c, g, or t
  misc_feature (454)..(455): n is a, c, g, or t
  misc_feature (457)..(457): n is a, c, g, or t
ggggagccattagaaaaggtggcctctgtggggaattctagacccacaggccagcagctagaatccctgggcctcctggcccnggggagcaganctgccgtgcaccgagaggaagccagctgctactgccaggctgagcgtcgggggacctcgctgtnccgncccccgagagctccgggagcccccagcagccgggcctgtccgccccccacagccgccaagatccccgcaccccagggcgcggtgctggtgcagcgggagaaggacctgccgaactacaactggaactccttcggcctgcgcttcggcaagcgggaggcggcaccagggaaccacggcagaagcgctgggcggggctgagggcgcaggtgcggggcagtgaacttcagaccccaaaggagtcagagcatgcggggcgggggcggggngngggnangtagggctaagggagggnnanctggagcttccaacccgaggcaataaaagaaatgttgcgtaactcaa

SEQ ID NO: 271438 - DNA, 519 bp, Homo Sapiens
  misc_feature (67)..(67): n is a, c, g, or t
  misc_feature (83)..(83): n is a, c, g, or t
  misc_feature (89)..(89): n is a, c, g, or t
  misc_feature (354)..(354): n is a, c, g, or t
ccggaaagtaaccattttccccccccttacatttccgaatatttgggtggccccaaaattgaatagncctatttttccataanggaagnaatattttaaaaaaccccggttgtcctcctccagtttaggcccacccgagtaagcatggcccgcaggttccagtgaacaggttgcatgggcccagaatggacacaagttgcatgggccgcaatgtccaggattaagctgtccgtcatagacaaactaggttaatgtcttaatgactaagagaaaagagaaaatgagagggcaccatggaagtctcaaagggccgtgtgccactcttcaggggtaaccttggcagaaagcaaaagncctggaataaaaacagtttgtagaaaataacaacaacaaaaaaaatattattaccaacatcttggtcatctttaaatgaagtaaaatgaaaagtaaattaattattaggctaaaagaaggaaataaacaagaaacaattgaaaagatgctgtgatgcacagttaa

SEQ ID NO: 271439 - DNA, 548 bp, Homo Sapiens
  misc_feature (63)..(63): n is a, c, g, or t
  misc_feature (119)..(119): n is a, c, g, or t
  misc_feature (131)..(131): n is a, c, g, or t
cggtgtgtccatccagtgggcctccttggatagccccagtccggcctcctttaccacaatacncccgagaaacccccaataatagtatattataccattacagataatagtatattatncctaacagatantcctcatttgatgcccaacacactgaagaaatgttatcctctggtttcccaaataacaaaaccctggggctcaggaacttttaagtgacatgcttggaatcatatggctagaagctgacacaagctggggctagaaacctgatctcaatcagattattaactcttcgagagcagggagtgcatcttcatcactgatttagccaagcacttgactgacacacatcttggcacatagttgaagcccagagaggtattcagcagacgttgagcccctcctccatatcgtgcagctgtccttgactctgagctattgtgagattgctttggcagaagattctggactcttgcagtgaaactgagcctctcctcttaagacccaggggcatcagctactttaatgggtgagaaaattctctc

SEQ ID NO: 271440 - DNA, 511 bp, Homo Sapiens
  misc_feature (37)..(37): n is a, c, g, or t
  misc_feature (96)..(96): n is a, c, g, or t
  misc_feature (268)..(268): n is a, c, g, or t
ccccccagcccctcgtcccgtggaaagaaatgtcctnccccacgaaactggtccccctagtgccccaaaaaaggttgggggaaacacctgaagttnaggggagtggatggggaaacacctcccccaaactcccccaggtttcctatatgcccagcccaagaggtgactttgtaaagcaggactttcctaagggtagtagtcctatgaccctgctgtgttaactcctttcctgcacatccgtggtacccccagggaagtttgttttccntcctacctctttatatggaatatgaagcatttgcactaaatcatctctcttgaggaaatttagtaacaaccagaacgttttgagaatgacttgaacagtgtaactgggtttaataagtgagtttattcacttagacatattttctcaaaaataatactgccttgacagtattattcacagcctgtgctggttgttgtaatgataaaaatgattcctttcacagtaaaattttcttccacccca

SEQ ID NO: 271441 - DNA, 565 bp, Homo Sapiens
caaatcagttaaactatgtctacacaaagcttagaagcactttatttgggagcaatcagtatttttgtcaaaacttttggacaggtctttatttttgttttggaaggttcaacacgaattgtgcaaaatctctggatatattagtttagcgatatggttgttgaagaaaataatatgttttaagcattcacaacgtgacctccccctagagcttttgttgatgatatgaatgatctggattcagtgagttcagtggtcatttaatccagtcctacctctcatacagcagacagatagatagatgaacagacagacagataactagatgtcaaataaactcctgctccctaaaagtacttttgcaatttcagtgaagacatggctaaaactgagtggcacctttatgagactggtgctttttaaatcaaagaagatagaaatgtacctttaatctacggcactgcaccagagcagaacataagctattccttcccccatgacagaggcatgaagctggggaggacacaggcattcaccttgacacagaatgggtcctgggatgtct

SEQ ID NO: 271442 - DNA, 546 bp, Homo Sapiens
taatactcttcactgcatgctctgtctatatgcatgcgtttgaataataaatattaaatatgggggacgcacagaaccataaaattaaaaatgaaaccaaactgaacattaaacaatagtacatggtagctggagaaatgaataagggcaaaaaataaatttgaggtaacaatagtggcccaacaccactgatctgaaatatctgtaaaaattcaactaagtgtttggagattcaagtaacaaaccatctgctccaacttggtcagacttcccagagtccctgctgagtttcagtccatgagccggcactcacatagctccttggtaaatcctcttccgcactcggggcatgtcttcttgtggaaaactgggaaggctgctctaagggcgaggcacttgcagtactggggcacaaaggctccacagtcactgtcgtttttctgttgtgggagttacacttcgtaacagcagtctgcccaaccctgaaggaaattcagggctatttttttctctggcttcagtcagcaaatactttcttatattctc

SEQ ID NO: 271443 - DNA, 452 bp, Homo Sapiens
  misc_feature (82)..(82): n is a, c, g, or t
gttaccatggtgaaaaatatcctatatccccaagggctgggatgggaccccaacccctcacagcatttcctcagtgactttngtggggcattaagacaagtggagcccacaagagtcaatttgtttttgctattttgatttaagatacatcgaagcaaattggaatgtggttataatggagcaagttaatactataatgataaaatataatcttcttgaggaaaaggacaaagataaatgaaaagatcattggatgagtcatcagaaaaccaggatcctaggcctgaactgtcatagatctgtgattttatgacactggttgcttgggtactctttcttagcctgactttcctcatttatgaaatgaaaagctgaagtagattacttttctttaaatctcttttaacacaaatattcaacgatttcatgggaaccaacatactcttcactaa

SEQ ID NO: 271444 - DNA, 505 bp, Homo Sapiens
  misc_feature (33)..(33): n is a, c, g, or t
  misc_feature (41)..(41): n is a, c, g, or t
  misc_feature (58)..(58): n is a, c, g, or t
  misc_feature (81)..(81): n is a, c, g, or t
  misc_feature (141)..(151): n is a, c, g, or t
ggggaattaaaaaccccctagatgaagggggtngaatgggntgccaagcaaaaccccnccctgggccacatgtaatacccntttgtaaacaaaaccctgcatgttcctgccacatgtatcccccagaacttaaaaattagnnnnnnnnnnngaaatcctggaaaggtaaacctaatgccatccccagaggagccacacaggtagaagaggttcctgaatcactagtccctttgcctaagtagcatccctcattcccagcttaacacatgaagtgttcttgactaaccaagacatgttcttgactaattacggtaatacctaaggctggtgttggaatggtaaggtggaaaagaagcagtttgcccaaggtttctttctgcaaatttggaaataacagaagattcctcagagccgagttcatgaatgcagggacagagggttggcctcttctgtaacctgtactctagctccactctggctaatgcatcgtagtgggtgctgaagt

SEQ ID NO: 271445 - DNA, 402 bp, Homo Sapiens
  misc_feature (32)..(32): n is a, c, g, or t
aggggctgctcgtttaggcaaccccagcaaanagagcacctgttaagccggagcctccccatgaaacctttcggcaaatgttcctttgtccaagggcgttgccttttccctctgaccggtccccagtcccaaccaaacccagcccaacaggaagcaaccctggattgtgctatcattcagtcagtcgacaaacgctgagtctatactgcacactctgcacctgattccctactggaaaccaagcttcttccagggaacggggtgggacaggaactgaggggtcatgtgccctgggctgggccggggaacagggtcaggacagccctccactgccaggcctggagtgtaccctgcacctaagcccgtggtgatgcacctgtcaccacaaaacattctacagct

SEQ ID NO: 271446 - DNA, 392 bp, Homo Sapiens
  misc_feature (350)..(350): n is a, c, g, or t
  misc_feature (365)..(365): n is a, c, g, or t
ttccgaattcctaagttacaattctggcgtgaccttaaggcaggggtattaaaaagggctgattctcaatgtaatgcagacatgattgagagactcctctactgatggttcattaattcttttattgtttagagttgatttcatgcaagactgggtgtcaggataccaataatgttatgtgaatcatttattataattatcagtctctcatgggtgaaatatttaacactaatctgagatttcttaattccaaggtaagggaagttttctagtaggaaaatactgggctgtgtttatggatggaaatgagtaaaataacttgggtgctgttgtacacagcactttgaccntgtgttaaaagatcntaactaggacatacatatggatattgt

SEQ ID NO: 271447 - DNA, 363 bp, Homo Sapiens
  misc_feature (345)..(345): n is a, c, g, or t
ctgattggtggggtttccagaaagactcacccagaaggtgctcctctttgggagttttggttcttcctcccttatgctgcctagaacacagatggaatggctgtattacagcagccatgttgtgacactgagatgactttgagaatggaagccaaggactaaaaatggtggtaaaagaaagaagcagcctggggtgcctgacaatttgaaactactaagttatccctgtacctcccagctccagattcattttataagaaaaaaaccaacttctatcttaagtaagtgacttgtgatttgaggactgaaggatatttgtggaggaaaggacttctttcaaggccnttttcccaaattttgttc

SEQ ID NO: 271448 - DNA, 457 bp, Homo Sapiens
  misc_feature (15)..(15): n is a, c, g, or t
  misc_feature (89)..(89): n is a, c, g, or t
  misc_feature (145)..(145): n is a, c, g, or t
  misc_feature (169)..(169): n is a, c, g, or t
  misc_feature (260)..(260): n is a, c, g, or t
cctacccgtgggaanggaaaaaagttggccaccatactttccaactgtttccccgtgaacttgccagggaacagccaatacctaccccntccagccccagacaaaactgcccacccagggagggggaacagtgggggttcccacntccatatccaatccacccatgccnccctgcatcctttcaaaagccttatgcataggcaaatgggcgtttttgctgtttagcctcatttgagaatgtgccgaacatcaaaaaaagncaataatggaacccatattcactggacatcatgcacgcagagagtgtgaggttatcacagctcaaggcccaggtgatggattgggaatttcataggaactagcaagccttggactttatcaactattttgttgggatcatctccgggtttattttgaataagaagatttttagtaggaaaaatctgcataccactgg

SEQ ID NO: 271449 - DNA, 372 bp, Homo Sapiens
  misc_feature (236)..(266): n is a, c, g, or t
  misc_feature (305)..(305): n is a, c, g, or t
  misc_feature (353)..(353): n is a, c, g, or t
aaaaaacaccaacagggagttgagtaaaatgaattttcatccatccatccattggagagcaacaaaatcatttagaagaactaagtctggatccaagtaaagactcattagcctgagacaaagttaaaggtactcggtgccgacctgactgtaaatacttcagtaggaagtcttgcagtagtgtttgggttataaaattatcacccagggtgatccagagtgttcttactatttgnnnnnnnnnnnnnnnnnnnnnnnnnnnnnnntggaattctctttttggggacccttaaagtacacaaccngtggaccccggatttgaggaattttttcttttaggctagggcaggggntttaagtgtttgcttgggg

SEQ ID NO: 271450 - DNA, 363 bp, Homo Sapiens
  misc_feature (85)..(85): n is a, c, g, or t
  misc_feature (127)..(127): n is a, c, g, or t
  misc_feature (192)..(261): n is a, c, g, or t
  misc_feature (285)..(320): n is a, c, g, or t
accctaacaatccccaaatactcctgggaaggcctgaaggccaggaaggaactgccttgaaccccccaggagtttggggacccanccctgggcaaagaaggtgaaaaccctgtcctcctaaaaattnagcccaggccatggtggctcacacctgtagtctcagctcttagggaggttgaggtgggaggactnnnnnnnnnnnnnnnnnnnnnnnnnnnnnnnnnnnnnnnnnnnnnnnnnnnnnnnnnnnnnnnnnnnnnnggcaagactctgtctcgaccaagnnnnnnnnnnnnnnnnnnnnnnnnnnnnnnnnnnnnggctttcttatcaaaaatacactttaagaacaaatttataata

SEQ ID NO: 271451 - DNA, 445 bp, Homo Sapiens
  misc_feature (412)..(412): n is a, c, g, or t
  misc_feature (422)..(422): n is a, c, g, or t
attcggcacagaagaagtatggcagtttggttccactcagtgaaaaagaagtccttggaagattaaaagatgtctttaatgaagacttttctaatagaaaaccatttatcaatagggaaataacaaactatcgggccagacatcaaaaatgtaacttccgtatcttctataataaacacatgctgggatatgggacgacctgggcgactctgggatgggtcagaactgggctgaatgaccagggtcatttaatatgtatgggtgagctgataatgggatgcagtcccaggacaaagtttcacttctttcaacagctttttttcattaggacagctgggtaacccaaagggtattaatgggagttaaaaggtggggacttaaaaggtggggttttgtttttaaaaaggagtcnttcctgtttngattccccatttcaccggggggg

SEQ ID NO: 271452 - DNA, 396 bp, Homo Sapiens
  misc_feature (58)..(58): n is a, c, g, or t
aaattaattgggccccaggcaggcaccccactgacaacaagggacacaaaaagggttnctgcactgcaagctgtgggtgggaattacaaaaggttaagagactaaatataaaaatgctttgaatataaaatcaatgtgccttgttacctaaaatccgggtgcctgtaatttaacccaaaatagggtttagaatatcctggcaataagtcccatgtccttggaaatcatccttttccttcctcaacgaaatgcaaatccttatttgaaagttaaaaacaactaaacaactgaaatatttcatatcaacaaaataataaaatactgtgatgtgcaattatgtatcactgacattaggcctccagaaagagaaaggatttgccctcttctgtgccgaat

SEQ ID NO: 271453 - DNA, 277 bp, Homo Sapiens
agcaacaaaaacaaactttaaggcaaaagtgtggtgggagtgaggaaaggcatatggttgattaaaacaactttcctttttttccaccaaaacatttaattggctttagagtcaaggaaggttcatagtcaaagatgccagtaagttcctttgtatcccacttttcatctctgctttgctcctattttgtgtcaaggtttatgtaagtgctaaagggtttagaccaatgatcctcaatttgaggtgattttgtacccccaccccagggagacttctg

SEQ ID NO: 271454 - DNA, 477 bp, Homo Sapiens
  misc_feature (372)..(372): n is a, c, g, or t
  misc_feature (380)..(380): n is a, c, g, or t
  misc_feature (430)..(430): n is a, c, g, or t
  misc_feature (435)..(435): n is a, c, g, or t
  misc_feature (442)..(442): n is a, c, g, or t
  misc_feature (451)..(451): n is a, c, g, or t
  misc_feature (462)..(462): n is a, c, g, or t
agcgcatctctgactcccagtcctgaggcctttccagttcaccagaccacctcagccattagaagggtgtcacctggatttgtgtgcccaacgaggtgtgttgcttttatgtaaaagagaagcacataagggaagaaatcatgagtgttcagggatccctttccagtcccttaaagaggctgcttttgcagtagcgacatactacccagtgagctcagccatgcagtttttcctgcagggttagagtggatcacttccttcagttgatcaccatttgaagtaggcaggggtttgagttcaggagggccatgtacggaaaatggatttttaaaaatacctgggaggccttcattttaggcacatggcaaggantggagganttcaggccaagggggggttattctaggaggaagggacgggaacccccctnccctnttgttantattttaantctggagtttncataaaaaaatttag

SEQ ID NO: 271455 - DNA, 491 bp, Homo Sapiens
  misc_feature (23)..(23): n is a, c, g, or t
  misc_feature (29)..(29): n is a, c, g, or t
  misc_feature (133)..(133): n is a, c, g, or t
cccagtgtagtaaagatcctctnccatgnctaatttggaagctgggaaggggagggcaggcaagagaaacctagacatgcccctgtatccctagtggtttgcaatctggttggaagaacaatgggtgcaaatncgtgataaattatattttaaaaaaactcatctccatcccacctctgtgcactgattagacccagctccagaaaattcctctctgagcagcaggaaggactaagggataaggaaggtggtgctacctggctggacccccaaaaatgctcttgggagaggcagaggcacttgccagggtgggggacagccatgcagatggaaagggacaaaggcagaaatggagtcggggaggggttagattttctgccttatgggttatctgtttagtttgtatttagacgttgtgagtgtacccatatcaataattttcctgttttctctacgaaaatctgcactttggctaacaaaatggtgcattt

SEQ ID NO: 271456 - DNA, 482 bp, Homo Sapiens
  misc_feature (78)..(78): n is a, c, g, or t
  misc_feature (105)..(105): n is a, c, g, or t
  misc_feature (200)..(200): n is a, c, g, or t
tatttttaaaaggggccttcccccccgaatccaagtttagaaaaccctagaagaggggtgggtgcatgccctaatgcngggaagcggcaactttggggtgaaccnaccttgaatggattaaaaattgcattgtgttacagagctagaaaattttatgtatgaaaaacgataatagccttacactgagtacaaataatacntttaagagcatgtgaagatgtgatcatttgtgatgttacttgtaaaaaaaagtatatatacatatcctttgaagtgttaaaaggaaactagtactttatattctttatcatatcactttttgtaagtgttgaatatattcctgtttatttttctatgttctgttttgtagccttaagaagtgtttcaaacatatctgaatgtataaaataagagtaaatgccctacatggtgtgatgctgcattatatataaaactgtgtgcatatattaaattttgtctct

SEQ ID NO: 271457 - DNA, 496 bp, Homo Sapiens
  misc_feature (389)..(389): n is a, c, g, or t
cactgctgaaatcatgtccctggatgagggctatgagctgcttgctgagccctgcagagacccagcagaggcccctgaccccagctgccctccttgccagacaggcagcagaagccgtcccacccctccctgagaaagcccccacggcctcctcccaagggtcgttgtcctcccaggactgccttgaacaagggctctgaggcttcgtaatcaacctgagggcaagtcgagaaggtcagtctctttcccccgggactctgaatccagccagaagacagaaggcgctgagggcactgaggcgaggcgcgggccagccctgccgtaggaccactgcctgcacgccttggtcaaaacaaagccacacaccagagcctctgtggggccttcanacctctagtgatgcgtgctacacatagtgctggccagagagtcaactgccaacccttccccagtcgagatcgggggttctttgtgataagcactttcctgtcttgaa

SEQ ID NO: 271458 - DNA, 413 bp, Homo Sapiens
  misc_feature (22)..(22): n is a, c, g, or t
ttatcaatcctggcagtgcaantgcatcgctttccatggggttggatgagtaagcaggtgagctcatggaggggctggagaggccgagccagggccttctcctccctggctgtcttgccctggatgccctgtgtgcactatatccagcagggcatggccaatgtggtttcggactcacctcctggatccccagtgccgtagcaggacgcagcacttattaacgtggcatctgcaggaggagcctccccatcaggccagccgcccaggaaccccccttcactgatcactccagtggccctttgtgaactactgggccagatgaagtgggaacacaagtggcagataagaatgtgaccagctgctcaagctcagaagagcgcatgtccccttatgctatttacacaccaatttca

SEQ ID NO: 271459 - DNA, 492 bp, Homo Sapiens
  misc_feature (435)..(435): n is a, c, g, or t
aaatctttgaattttcaactctgatacatgatattttcattgacgaaacatgattagcgatttctggaagcatgtgggatgctgcattgataaggatatgaacctccttgagtaataatgtatatttttactccgaatactgtttcacattttgggtgttacatccttacttcagacttctgccttatcagtggccatcccaccctatgttcttatctcctcagtctaaaaagaaaaatggggacccatcagaatttggatagaagaccctccagggaatttctgccactgcttattcatggggttgggcacagacactgattcagtggggcacacaggagttcaggaatgattcaggaggcccaggatatgtggccctaaggtcacatctccaggcgtccgggggagggacttgttaaggtgcttcgtttatcnggggaaaaatggaaaccaggggctcaggctactcctggaggtcatttaaaactcctt

SEQ ID NO: 271460 - DNA, 480 bp, Homo Sapiens
  misc_feature (20)..(20): n is a, c, g, or t
  misc_feature (55)..(55): n is a, c, g, or t
ccgaagaaaatccccttggntcccctttaaccacagatgcctttgggttccatgntccctctgtcccctcaagctgttaaccagatgtcataggaaaggataaagtcattttgggaacccgattaccccctttcccactaggtgagctggaaccctgggaaactaatagagtcccatggaagaatttgatgaagaaacaaagaataaactcaaagccggcaatgccctggcatttttgggtcttgagagaaaacaatttgaatgactgaatttactacaaaggcaaactttcaaaaggatatctcatttttgtttctaaatatgtatcaacaggtatcaacaaaatcctattttgaactattttactcagaaatgaatgtcccaaatatcctaaattattcataataaaaatgatttgtaagtgttttcattctgaaaagcagtacattatttcatgtgcaaataaaaaatgattttccc

SEQ ID NO: 271461 - DNA, 425 bp, Homo Sapiens
  misc_feature (61)..(61): n is a, c, g, or t
  misc_feature (96)..(96): n is a, c, g, or t
  misc_feature (102)..(102): n is a, c, g, or t
  misc_feature (122)..(122): n is a, c, g, or t
  misc_feature (169)..(169): n is a, c, g, or t
ggggtttccacccatgttgggcccaggctgggaactcaaaactccctgaacctccaggtgnatcccacctgccctcggattccccaaagtgcctgnagattnacaggtgtgaaccacccaanaccctggcctcagccaacttgatccttttagattagcattaaccatncaggagactggcatgggaaaaacgttgagattcagcaaacacatggatcctcaactgaagaggctgtattcctcaaacttcatataaaagtcagttacaacagaataaccagcgttggtaaagggcattctccaacaatgttgatgggagagtcagcgatacactgactagaaaaatatataccaacactgaaattccatgtgcacctgtagtcccagctactcaggtagctgaggagaggatcacctgagctctg

SEQ ID NO: 271462 - DNA, 468 bp, Homo Sapiens
  misc_feature (19)..(19): n is a, c, g, or t
  misc_feature (70)..(70): n is a, c, g, or t
  misc_feature (86)..(86): n is a, c, g, or t
  misc_feature (93)..(93): n is a, c, g, or t
ctgttccaaggcccatcangtggggccttgaaacagggaatcaaatcctggtcccaaggaaaaaacaccnacgtcaatccttcctnaaacctnaactccaggaacgtaattgaacacacatggatgcaactggggctgacaggttgcgagggttgtagatgaaccgtcccctgggtctcccagccacacgtagcccccatgctttgcgagcatccggtactggccacttactacctgacccttggtgcacaagttctggtgactcttggtcatgttctcggagtctagcgcatggtagaattcataggctgagcggccaagcagctcctcagggtggtaaccaatcagttctgtgattctgtcatcacagtaggtgaacttcatgtccatgctgtgacggctcaggaaggtcttgctatccagggggatgtccatgtgggatgggtgctggattggttcacacatgat

SEQ ID NO: 271463 - DNA, 388 bp, Homo Sapiens
  misc_feature (105)..(105): n is a, c, g, or t
  misc_feature (256)..(256): n is a, c, g, or t
  misc_feature (342)..(342): n is a, c, g, or t
  misc_feature (351)..(351): n is a, c, g, or t
  misc_feature (369)..(369): n is a, c, g, or t
gggaaacggccagacctcgatctaagaccgggatttggagactggcgggcctcagaacagcagagtagcggacttccggtctggccctccgcttacggccgaggnaaggcgggttaggtcacttgctgaggaaagagctcaatatgtcacgtgttcctctcccaatgacgtggacctcagttccctctccagtgaagtggggcacagtgttgcccgaaaaagggtgctcttggggcttgctgagacgggacgcgtnggaaatgccctgccgaatatgaatggggcgatggccttcgcggggacggagcagcccagggaaagctgaccctgggctgggttgtnggagcggancccagggccttcggcttnactttagcggccagttcgt

SEQ ID NO: 271464 - DNA, 413 bp, Homo Sapiens
  misc_feature (318)..(318): n is a, c, g, or t
  misc_feature (325)..(325): n is a, c, g, or t
ccaaaccatgtcagacatgatatgatcagatttgtgttttgaaaaattaacactgcaatgtggagaattgattggagggaatcagaagagtccagtaagtaggaaaaagtaataacttacactagggtggtagcagtaagaatggaaagaagtagatgcatttgaatgatactcaaaaggtgaaaataactgttcttagtgatgagatagatgtagggataagctgaagcacttaatgtaaagggacggatggtgttgtctttcattaagataggggaagagtagggagattaggatttccaggaggggaagatcatngaggttngaatttaaggacgtctttggagttttaaatgcctcttgcccttcttaaggtggggaggatgttccaagttaaggccatttggggttat

SEQ ID NO: 271465 - DNA, 422 bp, Homo Sapiens
  misc_feature (383)..(383): n is a, c, g, or t
  misc_feature (401)..(401): n is a, c, g, or t
aaaagtttgaatgattatcctaccatgtagtcattaactttgctgcatttctttgggatttcagagggaaatggtgggaatggggaggctgtttgataatctaaaataaattcatgaccatttgagtagaaatgttttttcaggtgtaatggctgtacataaactcagtagagtgccagcagcatttgagatgcaaccatatttttgagagcttttaagacagaatgctgaatattaggggagcattttatgtactgattgtgggaattaacaatgtggggcttattccagtgtctgtcattagaatataagctgaaggaagaaagatcttggtgttgatagttttttggttaaaaagattaaaacaccacactggtgattancgcttttccttagttttngggagatttttaaaaccaata

SEQ ID NO: 271466 - DNA, 402 bp, Homo Sapiens
taccttcatctctgagttacctgactccatctgagtttccttcttgtaaaactggcatccactgaaagtggcctacctcgaaggccgtgaagatgaaatgaggtggaaagtaggtagcccccgaatgagggaagcattgagtgagagctggccctctgacccttctaaaagaacacagccaactttttaaactgtctttccagaaagagatggaaaacttcgaagcccctttccactgccttgccaagcagttccaccagctgtaccgggagaaggtggaggttttccgggccctggcatgacgagctggagcagatcgtgctgcacaaccggagaagacagaattacctctgctcttttaatatataatgatggctttaaataaaattaggagaaaatatt

SEQ ID NO: 271467 - DNA, 339 bp, Homo Sapiens
  misc_feature (63)..(63): n is a, c, g, or t
  misc_feature (70)..(70): n is a, c, g, or t
  misc_feature (78)..(78): n is a, c, g, or t
  misc_feature (89)..(89): n is a, c, g, or t
  misc_feature (138)..(138): n is a, c, g, or t
ccccccaggagtggaccgaaaggtgtccatggcccctaccattagtatgaaataccatgttancctgaantttggaanttcctgtccantttgggtaggttatgaaatggtatttggttgccagttttagtttgccantttcctgatcaccctatgaggttgcatatcttttcacatgttttgaggcttccttaattgtgaaactcctgagtatttcttttgtcagtttttttcctgaggttgtagtggggattttaaaaaaaattatccatagcctttgaagtgtttaaattggatagggacttcgtcaggtaaacattgtaagtaactagttgcagt

SEQ ID NO: 271468 - DNA, 708 bp, Homo Sapiens
cggcggagatcctcgttggggctgggaaactcctgcaaaactcgagaccaggaagccagcccgcaccccaacccccaccaaagccacctactcttcttctgtgggaggccagtccacatccgctctcacccgagagagatattcagctggatccaaagtgactgatgaagggaaggaaatcatgtcaagcgaagcttgaaaaagctgccctgagacggtgtcccgccgaaagaatgttggctcaattaagaaacatcagggagataaattcaacccagtgtgtctaaaaatgactacaaaacgaagtttgtttgtgcggttggtaccatgtcgctgtctacgaggggaagaggagactgtcactactcttgattattctcattgcagcttagaacaagttccgaaagagatttttacttttgaaaaaaccttggaggaactctatttagatgctaatcagattgaagagcttccaaagcaactttttaactgtcagtctttacacaaactgagtttgccagacaatgatttaacaacgttaccagcatccattgcaaaccttattaatctcagggaactggatgtcagcaagaatggaatacaggagtttccagaaaatataaaaaatggtaaagttttgacaattggggaggccagtgtaaaccctatttccaagctccctgatggattttctcagctgttaaacct

SEQ ID NO: 271469 - DNA, 502 bp, Homo Sapiens
cgaaaacagaaaaattcagggaattcaatatcccagcaaaagcctttatgagatgtatgccacgtattataattcctaaaaccacgattgaaatctgtcattgttactggcctccaaggttgctttttctcacaccttactcctcccaaagcagccactgtgcttacaagtgtgcctccagaaacagaagacaccagtcagtttacgaccacttccatctcacccttcaaaaggaatgggactgcactctctaagactcacttgggagaggggaagttgggtgaaagttgccgctgggtaaaggtaaaacagggactgggatttggtcaaaaaccacccccaggcttacccttaatgccccaggggaacacttactattctcagagttatgttgtatcaaaaacatcttgcatttttaggttctgtgagtaaatttgaaacctgtattcagttcacgtctaactaagtttcaaaagctgcaccaaatctactaagctttttt

SEQ ID NO: 271470 - DNA, 268 bp, Homo Sapiens
  misc_feature (180)..(180): n is a, c, g, or t
  misc_feature (222)..(222): n is a, c, g, or t
  misc_feature (239)..(239): n is a, c, g, or t
ttaccttgtactttacaaactttattaaataatggacgttactaactttcattatcttatatacagtatttaaactatgtttttctagatgcattttttccccacaaagaatagagcaggtgaaaagtaaacttatataagagaaattgaaccttcagtacaggaaactagtaagaactngacatactttaaagtacatataacttttcctcgttatatacntccccaccccacctctnaaacaactgttttaaacaaaagacaattg

SEQ ID NO: 271471 - DNA, 489 bp, Homo Sapiens
  misc_feature (127)..(127): n is a, c, g, or t
  misc_feature (381)..(381): n is a, c, g, or t
  misc_feature (388)..(388): n is a, c, g, or t
  misc_feature (408)..(408): n is a, c, g, or t
  misc_feature (433)..(433): n is a, c, g, or t
  misc_feature (440)..(440): n is a, c, g, or t
  misc_feature (451)..(451): n is a, c, g, or t
  misc_feature (462)..(462): n is a, c, g, or t
  misc_feature (469)..(469): n is a, c, g, or t
gtgtgagccatcatgcccagccagtcttttaatttggtcctccaatcagctcaactctgatctaccaattttcactcctattaattttgtcaaaagcttgttttgaaatgtgaactcctatatgaangccattcctcaccaaagaatatatgactttatatctaattccaaataaccaacaccagttcactcaaaacgtgttgacctaaagaggtacagaccaggatccttgaagtcaggagtcacgtataagactacacaaccattaagcattacagtgaaggcaagggaaaaacatactaataattttattgctagtttgagctcttactagtttttggaacttccaaatcacttaacctcaacttcctttagccctgntccttcnaataaatggaaaacaacccntgcccaggattttatatatggaaanacccggnaattgggatcnaatcggatggnactggtnggactaaataaacttcatct

SEQ ID NO: 271472 - DNA, 470 bp, Homo Sapiens
  misc_feature (458)..(458): n is a, c, g, or t
tcaggaaactgaagcatttactagtgatttctgccagcttcacactcacggggaaaggaaaggtcagaagacctcttggggtaggagctgatgaccagacttggtccatcctgtgtctatgcaagtgagacttctggctaaagccacgcccacactccctgcagacatacggcttctccccagaatgggaccgctgatgtcggatgagggcagacttaaagccaaagccgcgcccacattcatcgcaaatgcagggcttctctcctgagtgtgtcctttggtcagagataaggtgtgacttctggccaagtccttgtccacacaccctgtctacgtaaagctcctcctctgagtgtgtcctctggtgtcgggtgaggagcgacttaaagccaaatgcacgcccacacttggggcacagataaggcttctcccctgtgtgtgtcctctggtgtctgatngagggtgacctt

SEQ ID NO: 271473 - DNA, 580 bp, Homo Sapiens
atgaaaatatactcttccagaggaactttaaaataattagatcaagtggcaaaacaatgaaacaaagcaaactgtgatgagattttgattgagatagctttgagctgctacattcattagggagagctggcatctttgcagcactgagtcttcctattcaagaacaaggaacatccacttgcttatttatgtctctcaactgatgaggcttctgcagtgtgaactccacctccctttctcacagagctgcaagcctgcagctttggagtaagggcattgagcctgagggaatgactcaaagagggcactctgggctaaaattcccagtgacagtggcaggaggcagccaaatgcctaggcagatgaaggtgggtccatggtgaaaccctacctccaaggtacatacttaattactagaagacaaggcaaagacagttgaaagcccgaaatccaagctacaagtaaaatacacggacgagattgagaagctattttctcgtttggcttgctttcttgtgattaagccccacccttcacctattttacatttacctatcctttcctaattgtttttcataac

SEQ ID NO: 271474 - DNA, 202 bp, Homo Sapiens
ggggagggagtggtagggacagacagactcctatccctctgcataacttctcaaagttagggttctttagcacttagaacctggctcttttcattagccaggtgtggtggtccatgcttgctacttgggaggctgacatgggaggatcgcctgagcctaaggaggtcgaggctgcagtgagcagtgatcacaccacagcctt

SEQ ID NO: 271475 - DNA, 431 bp, Homo Sapiens
  misc_feature (14)..(14): n is a, c, g, or t
  misc_feature (39)..(39): n is a, c, g, or t
  misc_feature (247)..(247): n is a, c, g, or t
gccctggctcctgnacctgcctgtctgcatgttcccccntcccaaaggggatttgaaacgtgaagaagccttgcaaatgagcaaaaccccgtcaaaagtcctgtgaggaagtcagggaactctcctctgttagcccaagtggcgccatcaagtaaacccctgccattttgtacaccctgatcagggaggaaacttccataggggctcaggccatgaaaagcattttgccaagcagatcccaggccanactgcctgactgcaggaaatggctcccttattacatcctgccaggcagctagccacactgccccacctcccctgtccagacctataattgccccagtctgtacgcaggacgggggctcagcactcgctggtgttccccttccacaggtttctctgtccaataaacctatgttgctgtatttaaa

SEQ ID NO: 271476 - DNA, 495 bp, Homo Sapiens
  misc_feature (290)..(290): n is a, c, g, or t
  misc_feature (296)..(296): n is a, c, g, or t
  misc_feature (340)..(340): n is a, c, g, or t
  misc_feature (351)..(351): n is a, c, g, or t
  misc_feature (384)..(384): n is a, c, g, or t
  misc_feature (394)..(394): n is a, c, g, or t
  misc_feature (428)..(428): n is a, c, g, or t
  misc_feature (435)..(435): n is a, c, g, or t
  misc_feature (448)..(448): n is a, c, g, or t
  misc_feature (463)..(463): n is a, c, g, or t
  misc_feature (477)..(477): n is a, c, g, or t
aaagtagagagctactgttgattctcaagagaactagaacatgaagacaatagtatttagagattattctggcaattaagccagctagcatagcattttggaagagaacatactgcactctagttcctcttatggcatatacgtatatgcttccaaaatgctacttccttcaacatgaaaaactaaaagtggtagagacagctcactcttgcaagtacaaaagtataagatgatggggatcttgtccaaaggcagctgtacatttaaggaagacttttgccggccgggtnggggtngctggatgcctgttaatcccagcccttttgggagggccaaggtngggtgggtccntgagggtcagggagtttcaaggaccaggcctgnactttgaacntgggtggaaagcctgttcttttacttaaaaattnttaaaantttggctggggtnttggttggcctgccncctgttaatccccngctacttcggggaggctt

SEQ ID NO: 271477 - DNA, 419 bp, Homo Sapiens
  misc_feature (114)..(114): n is a, c, g, or t
  misc_feature (356)..(356): n is a, c, g, or t
actctcattcatttactcaagatgaactgaaagacaagcataacatagtgtggccaaggtctttaatttaagaactcctatatcccagtgctatgtccttgcattgcagtttgnagaaacaatacatgaaaagttatcacttcccagagatcacctggtacagatacattgccatcataagcagagacagataaaaggattggtactgattcatttttataagccacccagatgatctccaataggtatatatcaatttatttttagatcaaaatggaaattcaaaaatgtaataatttctgactgtactccgagggtctgtgaagtctcgctctattgcccaggggtgaggggcnggtctcagctcactgcaacttctgcctcctggggttcaagcgattctcctgcctcagcctccc

SEQ ID NO: 271478 - DNA, 634 bp, Homo Sapiens
  misc_feature (117)..(117): n is a, c, g, or t
ctatggttctaagggtatgaggtggtagatgttagaactagtcctgactcagtgtttacagtgcacttagaacaatagttgagaagtttccatgatgtgaactctaagagctgggtnctaatagttgtaatcttgggtgctcaaccataaaggaccgagcttagcaccggaagatccctccctgatgcactgtggtggcctgcacaaacatctgagtcaacagtgaacctatagctcctgttgaacagtttaagactggttttcaacattctaccatggggcagggaagtacggtggcagtggtggactgaacagactcctagtgtgtctccctcacatacatatatacagatgcatgggatacacgacccacacccatcttgggatatggaggccactgatttaacccagtcagtgtaagtcactaaaagttctgggaagaattcagagaaaagcagaaattccaagagaaagatggtgtactttctgctaataaggcaagtggatatttgagtgattaatttttaaaaatactaattgtgacatttgaatcctaagttcatggagcagtttgcaccagttaaatatggcttttctttttacaaattcaaggcttgttaagtgtaaatcattc

SEQ ID NO: 271479 - DNA, 400 bp, Homo Sapiens
  misc_feature (54)..(54): n is a, c, g, or t
ccaaccaccagaggccaggctgaaagacaagctccgggtgtccaggggctgacngggccaaccatgtggcaggtcccaggccccacccactgcgccatccgcctctgagctccacagtggtcccactaatgggaacctcctctagggagagtgatactgcaccttcacccgtaggactcatatttataacaatgtgtaatggctgtagcaaaaagcccttgtttctagatgtaaatggtcaaagaaacaagcgctctattgttttgaataaaatagttcaaatgagtcctgtatcattgtatctcctattctggattagtgccttttggacagtagactgttctgtaattaaaatgtagtatactgcttttttgtacagttttgttttaataaaactttt

SEQ ID NO: 271480 - DNA, 402 bp, Homo Sapiens
tggtctcgaactcctggactcatgcaatcctaatgccttggcattccagtgctgggattacaggcgtgcacatgcacccagcttgaagatggcagttttcttgtatgctcacacagcacaaagtgatctcgctctagttccttccttttcttataaggactcgatctcatcggcgagccccaccctcacgatctcacctaagcctagtcacctcccaaaggccccacctcctaataccaccctcctgggggttcagggtttcaacatataaactttggggggggacacaaacatgcagtccttaacaccatcgtcatggagatggaggccacagacctaccaacacccataacctcaagggcactggtgggggacagaggggtcttacccaggcacttccat

SEQ ID NO: 271481 - DNA, 358 bp, Homo Sapiens
aaaggaaatgggaagcttttgctttgaggccttgtgggggtgggggtggaaaaaaaagtgtaggagaagcctgagcccaaaagcttgcctccctccctctacagggaaagggagttgagcggagtgtaagagggtggatggcatgcgcttctgacctaccaaagcatctggaaatttcagactgctctttgtctctgagactgtgttgggcacagcattgaataaagtgtggatcaataagtatgtgaagtgctggatatgttaattcactggatttaatcattcctcagtgtatacatgtatcataacatgtacaatgtaccctgtaaatatatacaactattgtaatttgcccatt

SEQ ID NO: 271482 - DNA, 374 bp, Homo Sapiens
  misc_feature (70)..(214): n is a, c, g, or t
gttcaagtgatcctactgattcagcctccgaagtagcttggactacaggcgtgcgtcaccgtgcccgttnnnnnnnnnnnnnnnnnnnnnnnnnnnnnnnnnnnnnnnnnnnnnnnnnnnnnnnnnnnnnnnnnnnnnnnnnnnnnnnnnnnnnnnnnnnnnnnnnnnnnnnnnnnnnnnnnnnnnnnnnnnnnnnnnnnnnnnnnnnnnnnnntgatcttactacttatatttaaaacattcaaattcagttaggagctaataatggggaagaatctctagtttcatttaaagttactttttttccaatctagacatgtattttctgttataatgtgtaagtgtagcttttcagattcattctttaaaggata

SEQ ID NO: 271483 - DNA, 508 bp, Homo Sapiens
ccactgtgcaaagcaatcctgatgagtgcccacagagagcagagttgccttgtaagggtgagggaggtaggctaacccagccctggccctgagaaccctctggcaaccccccattggtcaggtgcccaagtgtccataacagattgtgggaagtccccagccccagtgagaattcccttagggtaagggagaaccctgtcccccagcagggcacactacagtacccagctatcccaagaagtaacacccagcgtgttctgcagaactcaagactctttaggggagaaaacagcagaagagtttactagtttgggagcactgcatattataagatgcttttacagatcacaatcagtgctagcatactagaggctctcagaaatacctcattttttaaaaaatcaatcaacagaacaaaataaaaacccgtgtaactctgcatttccatttgaccctggaatttatacctcctgttttttcctgaatatttgtctaaaaacctgttaca

SEQ ID NO: 271484 - DNA, 376 bp, Homo Sapiens
  misc_feature (120)..(120): n is a, c, g, or t
  misc_feature (295)..(295): n is a, c, g, or t
  misc_feature (302)..(302): n is a, c, g, or t
  misc_feature (340)..(340): n is a, c, g, or t
  misc_feature (347)..(347): n is a, c, g, or t
  misc_feature (358)..(358): n is a, c, g, or t
aggaaatttgagcacaaatgtttgctcattagaacactggaagggtcagtaatcagaactgtgtgcatatacaaatcacaggtctgggaagatcccataggtcgaaaatgtgtccttggncaaatggctcctctaataggctatctacgggggtgtggagcattaagagcaggtttactggagagacaaagataacaatagggtttgggaaaggcagaccctttaaaaaaggctgattttttgataagcaggggaaaaagttatttaattttagtaatagtaggtgaccctattntaaaggntcctttattaccgggttaatgggagggctgtttttttnatttctnttttgccgggnaaggaggccttagctgcc

SEQ ID NO: 271485 - DNA, 500 bp, Homo Sapiens
  misc_feature (36)..(36): n is a, c, g, or t
  misc_feature (45)..(45): n is a, c, g, or t
  misc_feature (57)..(57): n is a, c, g, or t
  misc_feature (65)..(65): n is a, c, g, or t
  misc_feature (81)..(81): n is a, c, g, or t
  misc_feature (116)..(116): n is a, c, g, or t
  misc_feature (153)..(153): n is a, c, g, or t
aaaactttgcctcatgaaaagtcgcccccgttgggnccccaaccnacccatgctgtnaaaaattnagggtcatgtggaaanggtcacatggaggttttctgagtctagagcaacanactgagctcccccagaaacaacccagcatcaaatggnctggcccatgtgaaccccagctggcatggacattcccagacccagtctgtcccttctgtcacccttagctacagggaaggccccatgacccccagaagtgcccgtcattatgctgaattctcatgcctcagtggcccaccgaggtgtgcaagcatgtctcacaagggtcagatggagttctggcctggattgatgtgtagatgctggagagagaagctgggtttcttttggctgggtgctctgctggtatgtggtgggccttgggtttccaggtggtcattttccttatttgcagaaggaatgaggcccatatagagaatagagcaaattaaagggagagaaagagc

SEQ ID NO: 271486 - DNA, 422 bp, Homo Sapiens
ccttcagccagcagccccaactcggcctctctccgtcttctacacatcctggaagcgccctcccttcacgcgagccaccccttggcctcacagccaacctaggacctctgagccccctggaaggcaggtggcccccgggggtctgggcagcccagtcctccccacacccacgcggagccactgctgtgggagctacgcgtgtcggggcagcaaggctggcaggcggggtgggctggagcacaggtggctcctcagaaagctcagtggggaaagctctgggaagcggaagtgatgagcttcaacttaaatgcagtggtccggggtggattcatctgccacgtgggagtttctgttcatgccgtcctgagagccaggccatgtgaacccagagtgacacgcggccccagccaagatttcgttcc

SEQ ID NO: 271487 - DNA, 393 bp, Homo Sapiens
  misc_feature (22)..(22): n is a, c, g, or t
taaaaattttccctaacaaccnaaggagagccatccaatcccccaacacccacagataaatcaaaacgttgtcctgccataatgtttcccaattattactagctgtcagattctgccccggagatggtgatcagcagacattaactgaacatacgcccatggaaaacagcaaagtagaaaggctggctgggtttggttcctaggcaaacttttgtttgcattttccctcgccacctcctagctatgaagaagttatttaaagtatatgacaccttaaaaatctgtaaaatggaatgatagctgttcatagaagatcaattatagagagtaaatagaggactgaacatagtacttggtacacagaagtatccagaaaagattaatttcctttcc

SEQ ID NO: 271488 - DNA, 326 bp, Homo Sapiens
  misc_feature (56)..(100): n is a, c, g, or t
  misc_feature (250)..(250): n is a, c, g, or t
  misc_feature (262)..(262): n is a, c, g, or t
  misc_feature (273)..(273): n is a, c, g, or t
  misc_feature (278)..(278): n is a, c, g, or t
  misc_feature (286)..(286): n is a, c, g, or t
  misc_feature (303)..(303): n is a, c, g, or t
  misc_feature (311)..(311): n is a, c, g, or t
gcatgagcaccgtactcggcctgcccaggctggtcttaaactcctgggcctcaggnnnnnnnnnnnnnnnnnnnnnnnnnnnnnnnnnnnnnnnnnnnnnagcccccgttcccagcttctagcatttcttaaggacaaaattggtgtgtaagtaacagggaaatttcacattatggctgtaattcattctctaattattcacaggccatgtttaggaacaaattggggtttttcaaaacaaggcgttaantggaacagagtnttttttatgtnttgtnttttaaantatattaggaattcctnaatgggtncctgtggacttaggg

SEQ ID NO: 271489 - DNA, 374 bp, Homo Sapiens
  misc_feature (195)..(195): n is a, c, g, or t
  misc_feature (275)..(275): n is a, c, g, or t
  misc_feature (299)..(299): n is a, c, g, or t
  misc_feature (315)..(315): n is a, c, g, or t
ggcaatctctgcctctgtcactactctcaccttcaggtctgtggctcacagagacctgcagccctcctcagaggtggcttgaacaattggctgggagcaaaaggagctcctggggcaccctgcacagacaacggagtcgttaagctgggacacgtgtgtagccccagcttaaaagagaatataggcccgtggagnatacagaggttttctgcccttttggcctgcatgcccaacctttgggaaaccccaagttcctggaaagcttttctgtgttntccaaatgggacacatcctgtgtnctttccaggtccatgnttcatcttcattcaccatggggcgggcccttcaaaacccgggggaagggagggaggagt

SEQ ID NO: 271490 - DNA, 429 bp, Homo Sapiens
  misc_feature (19)..(19): n is a, c, g, or t
  misc_feature (35)..(35): n is a, c, g, or t
  misc_feature (46)..(46): n is a, c, g, or t
  misc_feature (110)..(110): n is a, c, g, or t
  misc_feature (296)..(296): n is a, c, g, or t
ggccatgaaacacccttgnccttgcctggggcagnaaaagtggaanccttttaacatttgtttactcgcctttcaaaccccagtaaagtaggaatcagcccaaacagatnccgcaagaccctcaaaccttggctcgttctgttcaagaagacagaaacccacaaaggcaaggagagctggagttggctccataacaaagtgacccttgagcgtggaaaagcagaccagcaaccagcctcgcccataaaccagtctgaaaggcgagtgggtgacctgggaaaacgcacttgtggccnagttgacaattgaagggttaaatgaccttaataagccgaagtagctgtgaatcagtgagaaactgtgactgcctcaaggggaaaaggtgcaaagaacaaaagagaaatacagtgaaaaactgtcagcttctca

SEQ ID NO: 271491 - DNA, 388 bp, Homo Sapiens
taatatgggatttcctacaaatcaataaacaaaaagaatagaccccattgaaaagtaggcaaacaccttgaatggtcaaatcacagatggggaaacaggaagggcccaagcaacatatgaaaaagatgctcatgcctcactagtaagcaacttaaaaacccctcctgagatttcacttcccagctgaaatagatggataaaacatgaggtctcacaatcccaaatgttggtgaggatgtacaacaagaattctcatagactcctgctgggagcataagctgccatgcccacttcagaacacaagttggcataacttatataagttgaggctatgcatgcctgtgaaccagctactacacacctaagtatatatcttttttctcgtgcc

SEQ ID NO: 271492 - DNA, 404 bp, Homo Sapiens
ccgaaaggaaactgccacagtgtccccaggaggcccatggttaggatatctcccaactatgagatacaggagacagaaagtatccaaccccaggacaatgtgacccaaactaaagtgagaaaaatgtaggctttggggcagtgtaagtgggtatatcttcgtgtgaatagcaatttggcaaaatccattacatttcagagcaagcacattctttgacctgaaattccatgcccaggagtttatataagagagacagtgatgagcaaagatttatttgctgaagtgttacttaccatagcagaagattgaaaatgacccaaatgcacgtcctttggggataaataaggttagagcatatctaaacaagaaaatattacgtaaaataaattggaggctccacaaaa

SEQ ID NO: 271493 - DNA, 503 bp, Homo Sapiens
  misc_feature (26)..(26): n is a, c, g, or t
  misc_feature (47)..(47): n is a, c, g, or t
  misc_feature (101)..(101): n is a, c, g, or t
  misc_feature (436)..(436): n is a, c, g, or t
  misc_feature (452)..(452): n is a, c, g, or t
  misc_feature (460)..(460): n is a, c, g, or t
  misc_feature (463)..(463): n is a, c, g, or t
  misc_feature (471)..(471): n is a, c, g, or t
cctagaaaacctgcattgaacctttnctcagatggcccgttcagggnccttcagcaatttaaagtctcccccttctgcaggctcccctcatattgaaaganggacaatccttagacgggtttcctaatcataagaagtataaaattaaaactatcccaggatttggtgagtttaaaagaatcagatcgtcacactctactgcacttccttgaagattaaaaatatgaagaggttatggctgtccttgggagttttccatatgtgaccatggatataaaatcacaggtgttagatgatgaagatagcaacaacatcacagtaggatccttagttacagtgttggttaagttgacaaggcaaacaatggctgaagtatttgaaaaggagcagtccatctgtgctgcagaggaacagccagcagaagatgggcagggtnaactaacaagaacagncaaaaggnggntggaacanaagagaaaggcccaagaaaactgctaaatcaa

SEQ ID NO: 271494 - DNA, 393 bp, Homo Sapiens
  misc_feature (14)..(14): n is a, c, g, or t
  misc_feature (123)..(123): n is a, c, g, or t
  misc_feature (165)..(165): n is a, c, g, or t
  misc_feature (250)..(250): n is a, c, g, or t
aggtacatgcgggncccccaatcctagatcctcaagggaacggccttcagatcccatttttgacaagttccttttgtgagtcctatgatcatgcaagtttgagaactgagaagggaggggaanacctacctccttgttactcagaccaccagcaacagcagcatntcacctgggaaccctgttacacatgcagaatcctcaagcccccaccccagacattgaatgagaatctgcattttaacaagttccnccatgagatttgtgtaaacttaaagtgagagaagctcacatggactatgtctttttcctttacgtgaatatcgagtacaaagaattgagccagtcagtcctcttggttaatggcacattatgattaatgcatgcatgaactca

SEQ ID NO: 271495 - DNA, 425 bp, Homo Sapiens
  misc_feature (403)..(403): n is a, c, g, or t
aagagggagggttgccaacctgaagtcttaagtagattgtttgggtagcatatttccttctttgaacattgtctgaaattttctataaatcaagacttcttgtacaaagaatgatgggacatatgtaataattcaggcaatcacctgagtaatttaggcagtccaaattctttaccctgaaatacccacattttaaaaaaattgcagataattgcttcagttatttactttggggacagagatatagtgtaaagtgggagaaactgagtccttttttggtggtggtaataataagatgttataaaaatataacattttaaaaaagaaaggtccagaccttaagcgcagagctagaacaatattttttaaataatggggggaaaagggggcactttggtaattntagaaatcaggtagtatacttt

SEQ ID NO: 271496 - DNA, 158 bp, Homo Sapiens
gattttgtgaggggtgcttgaggtcatggatacccatttaccctgatgtgtttatacacatttcatacctgtattaaaatatctcatgtaccccataaacatatacacctactttgtacccacaaaaatttaaaaataaagttaatttcaatgttaaa

SEQ ID NO: 271497 - DNA, 443 bp, Homo Sapiens
  misc_feature (16)..(16): n is a, c, g, or t
  misc_feature (23)..(23): n is a, c, g, or t
aatggaagaacccgcnggagggncccctcccctaataagatttccctaaaccctatagttaagtgtgatccatgaccttgtccaaaggcaagtctcccaccccataacccgttcctcttgtaatccctgttgcttgagctacattaagtagaatgtgcatgttgtagtcctatgatgatgtaaacttggtactacataatgacttgctccacacatgcagtaaactacataatgatgtactggtaaactagaaacaaagaatgcagcaggatctgtctagcttattaaagatgaaactgaattggaaaaatagctccattttttggtgcttgggaagcacagtgaccaaaaaagttgtatggctgcttattcattagtctttcctactgatgtcaaatccatggtacctagagttaaataaaattccaatgctcttactcttt

SEQ ID NO: 271498 - DNA, 504 bp, Homo Sapiens
  misc_feature (134)..(135): n is a, c, g, or t
cgcctgcgaacagatccgagctgctctctacctggaatgttccgccaagtttcgggagaatgtggaggacgtcttccgggaggccgccaaggtggctctcagcgctctgaagaaggcgcaacggcagaagaagnncgccgctctgcctgctgctctgaccccagggcagaaaagacctcacgacagcaactgaaacagcccgggggccccaggtgccgattgcacccagggaggctgccccatcccgaccctccagctcatggtgtctgggacctgcggctagactcttggaacattctggaactctctcctttcctggctggggctctgaccacaaactcccctccaggctgcccctgggacatggtggtgatgtgggtgcaggagccagtgtctgttgtcgggactcgcaagtgccctcatcacagccacccccaccacgagtgtctccccagtgcagactcaagttatgcttgaaatgaaaaagtctatctggtagtgggt

SEQ ID NO: 271499 - DNA, 385 bp, Homo Sapiens
acagccatcacgatgacatcttggactcctctttggagtccactctgtgacaggggcccggagcccagcgccctcctcttctcctaaccgcattccacctgcatcccccacatcaccctgaagatgacttcctgagccagcccccagccaaagccttagagctgcgggaaaaccgagaccccccgtccttcagcctcgacctgggtgcaggcatcccgggccagctgcctgcggaccgcttccttccacagcgagaactgcactaccttctgttgtactttaattattgttttgccttgttgctgtgacctccctaagacactgaagatacttctcgggaaaggatcatcgccgttgaaatgaaaagagagacagagagagaaaa

SEQ ID NO: 271500 - DNA, 409 bp, Homo Sapiens
  misc_feature (238)..(238): n is a, c, g, or t
  misc_feature (254)..(254): n is a, c, g, or t
  misc_feature (257)..(257): n is a, c, g, or t
  misc_feature (262)..(263): n is a, c, g, or t
  misc_feature (269)..(269): n is a, c, g, or t
  misc_feature (299)..(299): n is a, c, g, or t
  misc_feature (305)..(305): n is a, c, g, or t
  misc_feature (314)..(314): n is a, c, g, or t
  misc_feature (325)..(325): n is a, c, g, or t
  misc_feature (328)..(328): n is a, c, g, or t
  misc_feature (332)..(332): n is a, c, g, or t
  misc_feature (340)..(341): n is a, c, g, or t
  misc_feature (350)..(350): n is a, c, g, or t
  misc_feature (359)..(359): n is a, c, g, or t
  misc_feature (378)..(378): n is a, c, g, or t
  misc_feature (389)..(389): n is a, c, g, or t
  misc_feature (394)..(394): n is a, c, g, or t
aaggctgaataaatcccgtgaccacttctcatcctcacccttgtcacccagttgaggagccgactgccccctgcctggctgggcctgaagatgggaggaactggccctgcctcttggacttggctgggagatgtgtggacccccagctccaggagagggactgatgagaccagggtcctggggggtgcacgggatgtggggatgggacgatcacaaggaggaagatagagccaggctngagacaccaggacttnggncaggnncaggcntttctgtctgtgggaacacagcagagggangcaggncagagagtntccagcgcccncgncctnagccagcnncttaccttnaaccttttnaggtaaggaaaggaatttntttccacagtnaaggnttttcaaacaaacgg

SEQ ID NO: 271501 - DNA, 415 bp, Homo Sapiens
  misc_feature (19)..(19): n is a, c, g, or t
  misc_feature (24)..(24): n is a, c, g, or t
  misc_feature (35)..(35): n is a, c, g, or t
  misc_feature (83)..(83): n is a, c, g, or t
  misc_feature (97)..(97): n is a, c, g, or t
  misc_feature (101)..(101): n is a, c, g, or t
  misc_feature (145)..(145): n is a, c, g, or t
actggggaactggtgggangaaanagctgccccanccaaagcaggggggtgatgcagggaataagtacactaaacctctctcncctttgccatctanatancctgctgggctgatcactggccaaatccagctgttggcaaaganggcagggctgccccagctaatgctatctgtagaagctgggcttctggggcacagagcaagtcagagacaggcagaacagggatgtgggtttggaccaaacactgaataaaccagatcaaggattcttctatcaagacaagtttatatacttgcagcttgatcccattgtttcccttagataactgtgcacttgtttttgtctgccctctttcctgtgtctacactcttcctgtcttattctatttacacatagctcagtcttttccaatt

SEQ ID NO: 271502 - DNA, 423 bp, Homo Sapiens
  misc_feature (68)..(146): n is a, c, g, or t
  misc_feature (164)..(174): n is a, c, g, or t
ttcagagatagggtctagctctgtcacttaggctggagtgcagtagatgattatagctcactgcaacnnnnnnnnnnnnnnnnnnnnnnnnnnnnnnnnnnnnnnnnnnnnnnnnnnnnnnnnnnnnnnnnnnnnnnnnnnnnnnnatgccagctaatttaaannnnnnnnnnngtagaggaaggagtcatgctacattccccaggctggtcttaagctcctggcctcaagtcggcctgggctatccaaattctgggattatgggttttacctggccagagaagatatatttgaatcaaacttagggggacaaggatttctgtacatcagtgttgtccttgaggaaactgaaatgcagctttgggaaagatgtttcagagcagagagaaggaacgttgagaggtaagatgctgaggggctcgt

SEQ ID NO: 271503 - DNA, 137 bp, Homo Sapiens
cctttttaaaaattttactactttgcttttggagcagatatgaagtctgttatagctcttgaaaaagtatgcagtaatggtgttttaatagtgagaattacatttcttcctttcttcctaggatcgcttgagtccaa

SEQ ID NO: 271504 - DNA, 426 bp, Homo Sapiens
attggattccagttacctgagacattgtattcacccagtctattccttacccagcccgagaacctaactcccctctcttttccctaagcaaatagcatgggaatccagagtagaacaaacagtattatatcatcctcagatacctttaggtgacaatgcaaaagaaaatgaaaggaaaacttcagatgaggtttatgatgaggatccctttgcatattcagagccactatagacctgcccatattcttcacgtgctcttaacttgctgcttacaaatcatctcctgagatgctaactttgaacaaagaaaataagaatggaagcatgccatttttctgcccattgcttagtggttcatgaaggccacactgttttgggtgagacaaaagtctaatgccactggatcttgtgtgataaataaagaaa

SEQ ID NO: 271505 - DNA, 525 bp, Homo Sapiens
  misc_feature (345)..(345): n is a, c, g, or t
  misc_feature (479)..(479): n is a, c, g, or t
  misc_feature (505)..(505): n is a, c, g, or t
tggaatgtctagactacacagcagatgaggatggggtctggtattctgtggcccctatgaatgtccgacgaggtcttgctggagccaccaccctgggagatatgatctatgtctctggaggctttgatggaagcaggcgtcacaccagtatggagcgctatgatccaaacattgaccagtggagcatgctgggagatatgcagacagcccgggaaggtgccggactcgtagtggccagtggagtgatctactgtctaggaggatatgacggcttgaatatcttaaattcagttgagaaatacgaccctcatacaggacattggacttaatgtttacaccaatggnccaccaagcgttctggtgcaggagtagccctgctggaatgaccatatttatgtggtggggggatttgatggtacagcccacctttcttccgttggaagcatacaacatttcgcactgattcctggggacaactnttcaccagtattggaccattccacgnttgttttgttagggggccac

SEQ ID NO: 271506 - DNA, 328 bp, Homo Sapiens
  misc_feature (53)..(53): n is a, c, g, or t
  misc_feature (240)..(240): n is a, c, g, or t
  misc_feature (301)..(301): n is a, c, g, or t
ggagtttgaccagagatgcaaggggtgaaggagcgcttcctaccgttaggaanctctggggacagagcgccccggccgcctgatggccgaggcagggtgcgacccaggacccaggacggcgtcgggaaccataccatggcccggatccccaagaccctaaagttcgtcgtcgtcatcgtcgcggtcctgcttgccagtcctagcttaatctgccaacactgcccggcaggagggaagttnccccagcagacagtggccccacagcaacagaggcacagcttcaagggggaggagtttccancaggatcttcatagatcagaacatact

SEQ ID NO: 271507 - DNA, 408 bp, Homo Sapiens
  misc_feature (13)..(13): n is a, c, g, or t
  misc_feature (27)..(27): n is a, c, g, or t
  misc_feature (45)..(45): n is a, c, g, or t
  misc_feature (51)..(51): n is a, c, g, or t
gggggtgggggcngaagccccacccgngtttaatccaaaaaaccnccgggnggatccccaatgtgccagctagggtaaagaccccatggctgtaataacaattttaagggtgtgaaacaatccaaatccaaagaaggggaagaaaagacactgaagtaccttactctgttgggaatgtttaccgtattttcctcattttaatccctcttatttgtgaggaaaatgttaataacccccattttaaacaaatcctaagtctaaagaatttgccatagaccaaataaatggcagagctgagattccaaagctcgtattttttataatacctaagctgcctagtataaatggagtattttttatatggaaagcactgtgaaagggctatgtgaagaaacagctaataatctt

SEQ ID NO: 271508 - DNA, 434 bp, Homo Sapiens
  misc_feature (368)..(368): n is a, c, g, or t
aaaggtggaacaaccgctcctcaatagctaacaattaaaataactcaattgtgaactggttgtccccgctttccctcaagttttccttcccaccatctgtgaacagcttcttgaatctttccccaaataaggtggctgtgttcgaacgggtgttgctcgtgaacagttggggtcctcctcagcatcagtcttgacatggctgcaactggggggtcctcaggattctcccagaatctcttccacagcatctggctcatgataaggttttaggtgtcttgatggtatctaaatcagctgctggttctggcctgaggcggtgggttgtagggtccctggcttgtggagagaggttggcgctgttcctttgnccgacttcccaaaaggcaaagcgccaggaagtcgggctcccggcggtctccaggcctgtgccgaac

SEQ ID NO: 271509 - DNA, 426 bp, Homo Sapiens
  misc_feature (300)..(300): n is a, c, g, or t
  misc_feature (346)..(346): n is a, c, g, or t
  misc_feature (356)..(356): n is a, c, g, or t
agatacatgagaagcaatgataaagaaaacagaatttagcaatgtgtgcagtatattttacttaatcctgcaagcaatgctaaaaggccttctacaattatcatgtcctggaattgcttcagatgctggtgacaggaggagtaagttctcagctggaacaacatttagataaggataaagtctatggtgtggcagatagctgcacgtcgctcttgtctgggaagaaaccggtgtaagctggggcttctgtccttacacggaaaccattttatcagacgttaatccaaggaaacacctttnggacaactgtttctgtgggctcattaggatctttttggggattccngtgttgtttnggctttattacccgattaatttgatggaggaggggagcttcaacccccgggaaaaccaaagggttttgtt

SEQ ID NO: 271510 - DNA, 544 bp, Homo Sapiens
  misc_feature (33)..(33): n is a, c, g, or t
  misc_feature (43)..(43): n is a, c, g, or t
  misc_feature (56)..(56): n is a, c, g, or t
  misc_feature (73)..(73): n is a, c, g, or t
  misc_feature (84)..(84): n is a, c, g, or t
  misc_feature (138)..(138): n is a, c, g, or t
  misc_feature (168)..(181): n is a, c, g, or t
cttgaattcccaaacatggaccttgaaaggttnctggaaactnctagaaacacttnacgctgactcaggattntaataattcangaagtggcttcttttatccagtggaaagtttattttatttccccatttgccctntagtatgggataggtgaaatcattaccacnnnnnnnnnnnnnncgtctatgaaattaaagctcctgatttgaagaaaggggatcagagactccctcattccctagatctcttaaatatgagtaattgtgtgctatcttccataggtgaggaggtgttacttatcccaggaaaaactagatggtataaagactcgttacgcagacatcacagttactagctccaaggccctcagaactttagagcaagcccggcagctggccaccaagttccagtctacttatgaggaactgaccgggtggctgagggaggtggaggaggagctggcaaccagtggaggacagtcctccacaggggaacagataccccagtttcagcagagacagaaggtgagctgttactttacca

SEQ ID NO: 271511 - DNA, 496 bp, Homo Sapiens
  misc_feature (380)..(380): n is a, c, g, or t
acctccagctgacgcgagtgccgcaggcgcctctgtagccgtgagatgtcctggatgagctcttccagatccatgtcctctgggctacccagcgggtcaaggaattggcctccacgagacttgcgcagtggcaccatcacaatgaaatagctctggacaggccacggggctctggccgtcagaaagatacaccatgaatgaagccgtcagcatcaggcttgggggcgaagctgggcttgccgttgaagcaggttgaaggcagtcccaggcggtgaccgtctgctggaggccgccccaggcgtctgccccgattggtcagcacaaggttgtagaaaggtgtgggggcttgaggtgcgtgatgagcttctttgggtggtacnggccatccacatcccagtgtgagcccattgtactggatcttgtagggtgtgggtgagttgtagttgtcagggaactcccagctgagcagaactgatgtcttcatgatcattttcac

SEQ ID NO: 271512 - DNA, 515 bp, Homo Sapiens
  misc_feature (29)..(29): n is a, c, g, or t
  misc_feature (40)..(40): n is a, c, g, or t
  misc_feature (459)..(459): n is a, c, g, or t
ccccatttaggaaatccccattggattgnttcccccatgncctgtccctcaatataataaatattccccttggtggtatgggatacatgcacctaatacccttttggatttaacctacatgataaacacagtcctagatccgtttgggtgggtagttcctcctagaatggagtatttaaaaaatggagactataataaaaatcctaaattttaggagtattacaaaataatgcttaacagtttgggaggctgaggcaggaggataatttgaggcccaggagtttaagactggcctgggcaacatagcaagacactgtctctacaaaatagcaacaacaaccaaaacaaaaattagctggctgtggtggtgcacacctgtagtcgtagctacttgggtggtgcacacctgtagtcgtagctacttgggaggctcatagggaggattgattgagcctaggngatagaggctttgtaactctgaataatcgcgttgcactccaagtctggatgacagc

SEQ ID NO: 271513 - DNA, 520 bp, Homo Sapiens
  misc_feature (23)..(23): n is a, c, g, or t
  misc_feature (75)..(75): n is a, c, g, or t
gttcaagtttgtcaattcagganaaactgtactggtcagtcacatcttacggcgaaggaagagggcccttagggnagcagagaaagacaggcaaagttgtggactgttttgatcttgtattaccccacaggaatgagggcagctaaaccccatagaaggagttggaccaaggcgaattacgtagtccctggtccccagcagtatgtgtgctgaccttctgggtgccccagaaatagacctctcctgtagagtggtgatatacagaatgagtttcagtttgcattgcagctgggattgaaagtaatcagtcgtgagcaggcaggcaggaggtcctgttagccctgccttccaggaaggttggggtgggagttttgagtgggaaagaggatgacatgtgtgagagagttctgagcctgtttgctagggagagtgagtgagtgctcttgggcactgctcaggccgtttctgctgacttgcctggcttacaataaatgcccaataaatatttgttgaccataaa

SEQ ID NO: 271514 - DNA, 423 bp, Homo Sapiens
ccggcaaagcctcccccctacatccaaatccccaaaggtttcccaaggtggaaggcctgcaccctccttggggcctacacaatgggaataaaatccattgggaaagaacaagaagtggtattgatatcttgttctgtataacaaagattaatgtttccctaattagaggaatggaaatggtgatgtgactacatattgcagcggcaaaatagtagggtgaaggaagagggttgggtattgaaataaagaccacacacttgtgaattttaatttcatttccaggctaacctactttttatttaatgcaaattacagtaccagttaactatttccaaaccaagtcacatagaacaaaatgtatttacaagggaatggggaaagggaaaaaaaacattgagcatacttttcacaaaaaagtttata

SEQ ID NO: 271515 - DNA, 433 bp, Homo Sapiens
  misc_feature (213)..(213): n is a, c, g, or t
  misc_feature (236)..(236): n is a, c, g, or t
  misc_feature (243)..(243): n is a, c, g, or t
  misc_feature (252)..(253): n is a, c, g, or t
  misc_feature (275)..(275): n is a, c, g, or t
  misc_feature (299)..(299): n is a, c, g, or t
  misc_feature (312)..(312): n is a, c, g, or t
  misc_feature (330)..(330): n is a, c, g, or t
  misc_feature (346)..(346): n is a, c, g, or t
  misc_feature (353)..(353): n is a, c, g, or t
  misc_feature (386)..(386): n is a, c, g, or t
  misc_feature (397)..(397): n is a, c, g, or t
  misc_feature (404)..(404): n is a, c, g, or t
  misc_feature (421)..(421): n is a, c, g, or t
aaaaaaggagaaagcagtttaaccacaaacagtgaaacagagctggcagacgcctgaaactcccatggaaccatgcagctgtaccctagggctcctcccaaggaaaagagagatgtcaacgtgggcccaaggtgtcctgaaggcactggggattgggattaactcgaggcgatggcctttcccaggccctccgtgctggcaggagccttttgntcggttagggctggcctttcatnttcactnttgtgttgnntgtggccttgtggcacctgttntttgttcaataaactggcatatantttgttgttttgncgtttgcctgttctttgnctggggattaacctgncatatanttgttgttttcagttgttgttattttgtttttngcttttcagtnctattantacagtttgggggtttnccaacctttgga

SEQ ID NO: 271516 - DNA, 431 bp, Homo Sapiens
ttattgacatttagctatcccttggctgctagaacaggtgcatggcattgtaggtaagcatttattaaacattagctgttattcatacttcacagcatagtaggtaccattattatgcacgtgttacaaatgaagaaactgagactcaaaggaattaagtgacttggccaaaattatgcaactggggaagtgtcatagcctggggtttgggtgccagtactatctggctcaaaagctgggtgctccttgtacggatgctatactgcttatttcaggctccttcttccaggactgatctaggcctcaaattgtcaggttcccaacaagggattcctctgggcgtcggagcagggggagaaggaaaccagaaatgtggggtattgtctgatctggccacaccccaagtggcctggccctggggacctgggtag

SEQ ID NO: 271517 - DNA, 445 bp, Homo Sapiens
  misc_feature (73)..(73): n is a, c, g, or t
  misc_feature (383)..(383): n is a, c, g, or t
  misc_feature (413)..(413): n is a, c, g, or t
  misc_feature (422)..(422): n is a, c, g, or t
gcatagggctcgggggatttcgctggttctcataacccagcatctatttgggggtatcagtggggcctggagnaggtgggagaaaacaaacttcacagggcagatgctgctgggaccaggaaaaaggcttcatgcctaaggtcctcactgtcgtacagcccagtgcaaagtatcattcattcatgacagatgcatgacgacatgaaagtcaatatacacagttaacccattttgacacattcattcctcagcattttttcaatacaattcatctggaaattatactaagacataaaacagacctgcttttgtacatccattactgatatgtctcccaggggtcaggcaggaagggaaccaggaatggactgttcacacaactngcttaatttgtcgaggacctgaggacgggncttcacccntggggtgctcctgcatgccgggg

SEQ ID NO: 271518 - DNA, 767 bp, Homo Sapiens
cgctgcatatagagaaggcctaagtgtagcaaccatctgctcacagctgctattaaccctataatgactgaaatgacccctccactctatttttgtgttgttttgcacagactccggaaaagtgaaggctgccaatctgagtagtactcaaatgtgaggaactgctggtcttggattttttttccattaaattcagctgatcatattgatcagtagataaacgtaaatagcttcaaattttaaaagtggaattgcagtgttttttcactgtatcaaacaatgtcagtgctttatttaataattctcttctgtatcatggcatttgtctacttgcttattacattgtcaattatgcatttgtaattttacatgtaatatgcattatttgccagttttattatataggctatggacctcatgtgcatatagaaagacagaaatctagctctaccacaagttgcacaaatgttatctaagcattaagtaattgtagaacataggactgctaatctcagttcgctctgtgatgtcaagtgcagaatgtacaattaactggtgatttcctcatacttttgatactacttgtacctgtatgtcttttagaaagacattggtggagtctgtatcccttttgtatttttaatacaataattgtacatattggttatatttttgttgaagatggtagaaatgtactatgtttatgcttctacatccagtttgtacaagctggaaaataaataaatataacataaagccttgcctat

SEQ ID NO: 271519 - DNA, 243 bp, Homo Sapiens
  misc_feature (150)..(150): n is a, c, g, or t
  misc_feature (197)..(197): n is a, c, g, or t
gccaaagatgtcctttttaaaaaacttgtcattaatagaggacttctctagggtaggcattggattaataaattttatttgggccaacttcacactcatgggcatttgtaggcaatgggaatttaattgaaggttaatttggggtaggantattgtggaaactctattgggaaaatactgccttattctgggagggntgacttgtcatccatagattatttcagcatacaatctgtgccgaat

SEQ ID NO: 271520 - DNA, 364 bp, Homo Sapiens
  misc_feature (23)..(23): n is a, c, g, or t
  misc_feature (37)..(37): n is a, c, g, or t
  misc_feature (50)..(50): n is a, c, g, or t
tggaagcggaaggcgcgtgagantgtaagagccgaantagggggatggantgtggagaatacaggacacttcatcttggatgctcagcctgccaaagtgactcctgatgaaagccagctcccagaaatgtgcctacagttactactttcaccctaaaccctgcccttagtcaaatccttctcttcttctaagcaatcaacttcaattccttgtataacccacagtataaaagggcttttataccattctatcctattgcatgtaagccttgggtctgggaggtaacagtgtgggattccaccatctcatctccctgccacccaaacatgcctgctcttctttaagcaatattaaatgtttgtac

SEQ ID NO: 271521 - DNA, 403 bp, Homo Sapiens
  misc_feature (17)..(17): n is a, c, g, or t
ccatttccacctcctancacacctcctaaaagacctaatttgttggggtccttctgaaaagcccatcaacccaaagagtagtaaggacagtgaaatttagggaggatgagagagccccttgactagtccctggagcttaagtaatatgatgtcaccctgtttactacacaaatttacattggtattttggccaaaagcccaaattaataataaagtaatacttctaatttcctacttgccattgttctacttatataaatctccttcagaggccaggcgtggtgggtcatacctgtagtaacagcactttgggagaatcacttggaccctcaagatcgaggctgcaatgagccgtgatcatgcaccactgcactctagaacctgggcaacagagcaagacctt

SEQ ID NO: 271522 - DNA, 381 bp, Homo Sapiens
  misc_feature (264)..(264): n is a, c, g, or t
  misc_feature (291)..(291): n is a, c, g, or t
  misc_feature (303)..(303): n is a, c, g, or t
  misc_feature (331)..(331): n is a, c, g, or t
  misc_feature (364)..(364): n is a, c, g, or t
ataaataaaaataacattcaaacttctatcatagcttggaaggtcctaagcgatctgacgtcccacaacttagggtactaattcctactatttcccttgacttacatcaggcccactgaacttcctgtcagtccactaacaggcctcaagtccttcacgtttgttttgtcaaggctaaaactcccattattttgaggacagttgtatggatttatcttactctttttctttgaaggtaaaaaataggctatggggaattgcccnggggaggttccatatacacccaagggngggggacctctngggctcacttgcttataatcccctaatnggggttttttaatggcaaataattttggggggnaatttgagggttgtaac

SEQ ID NO: 271523 - DNA, 402 bp, Homo Sapiens
  misc_feature (25)..(25): n is a, c, g, or t
aagggccagggtttaaggtgaaaantagtaaactgtaggccacaattccgggagctggctttccatcaagaagtccaatttggccaggtgagcatcccaagatgaaagtgtccttattctcccacactcccatccccctaattcggctcttacaatctcacgcgccttccctcttcccaagatggtccctgagcctttaggcagggaggttggggtgaacatgctgcatcaatgtgttttctacttttttaagcagaggccacagcaacactacagcaggctttgtagaaatcatcagcagcctttgtagaaacagcaggctttgtagaatcatcttcagaatactgtgattttggttaattcagaagtactacaatgaaagatctataacattaataattt

SEQ ID NO: 271524 - DNA, 396 bp, Homo Sapiens
  misc_feature (16)..(16): n is a, c, g, or t
  misc_feature (23)..(23): n is a, c, g, or t
  misc_feature (71)..(71): n is a, c, g, or t
aggcccctgtgttaanaacctgnctcctgaagtcctcaattaaaaaccccttaagaattagggagccagcnaccccctgggctttggcaagaggccagaagaaagtccactgccagatccccccattgtcagcgatcacttcaaaaagccacgggggcagacactgaacatgcatgaaggcattgtctttgcccttgagaaacttcacctcaccatgcaccagctttaaatactgcctgtcaatgctgaatggagtggccagtttttgtcctggacagtctttatatagactgtacttcttacataagactgtgctcttgaagtactatttgccagtaaaagaaacccaactttcttggtaaaatggctgattccagtcggaaaagcgctcgtgcc

SEQ ID NO: 271525 - DNA, 398 bp, Homo Sapiens
caggagacaatgccaaacacctgtgtgtacttagtgctttgtaaagagtgaataacagtgacaccacataggccatagttttgtagttccagagacaatgccaaacacctatgtgtacttagtgctttgtaaagagtggtaataacagtgacaccacataggccgtaattttgtttttgcttttgttagggtgttcagcatcttgactccttaaataaggttttcagtcagatttataaaggcaggcattgaaggaagttgtattatatttgagtacagttgggaatccatgggcagttttatgggagggcccaaatattatccaggatggaatagggcttaattttccctggagttggctgggccttatttaggtcccctaacttctgttggccccc

SEQ ID NO: 271526 - DNA, 407 bp, Homo Sapiens
  misc_feature (19)..(19): n is a, c, g, or t
  misc_feature (41)..(41): n is a, c, g, or t
  misc_feature (116)..(116): n is a, c, g, or t
  misc_feature (119)..(119): n is a, c, g, or t
  misc_feature (216)..(216): n is a, c, g, or t
  misc_feature (367)..(367): n is a, c, g, or t
aatcccctccctccctganatgcccccttcctttccttccnacacccagctggaaagcagaagcccatggagccctcccttggaaggcacatgttgaggaaagcagaggtgctccnacnagacccaggcccttgacgacttaccggtacagagcctgccctaacccacacgggtggttacaaaagtgaaatgaacatcctgccgctctttgagccnactgtgtcagcggtttgttacagaagcttagcctcccaccattactgaaatatcctcctagtttttgtaatttgcaaatctgatgagcaaacacactatattttggtattttttatcactgataaaatattaatcagaacagcagggaccnaagaatgctacaaaaagataaatgttactctttcaatttc

SEQ ID NO: 271527 - DNA, 612 bp, Homo Sapiens
  misc_feature (398)..(449): n is a, c, g, or t
  misc_feature (534)..(534): n is a, c, g, or t
tttgaaatggtaaggaagactttattcaagactattacaagaggggagagagattgcacttactccaaattcagcaaagatagctatagatgtattgccaaagagaagaatgaaaaggtcagtggatagagaattaacaaaaggagatatcaagggtagggggattcttgctaaaattgtctaataggattcttggtagagggaagccaaggacttagacatcaagggtggggaataagaaacttgatcagatatcaaaggtaattagatataaaaggtgcggagattctctctaaaataacttagcaggattccttgcctaaatggcagaccaaggtcatgcccctggttaagcagaatgctcagatgagcccaattaaagtttggtcaaggaagtnnnnnnnnnnnnnnnnnnnnnnnnnnnnnnnnnnnnnnnnnnnnnnnnnnnntgcagatgccgctgacacacagagacctctgccaccagccacagtcaaactcaccatgttcttcaacatcgccacccatggtganccttgggctgcatcttctaactgtttgtagacaaagttccaaagacagcagaaaattttcatgctctgagcactggag

SEQ ID NO: 271528 - DNA, 466 bp, Homo Sapiens
ggtatcaagtgctaagaatagcaccacttggaaatatgacaggactgcagccagtgtggataattatcattttcaactacagatctctctcagccttgtctgcttatcacactggcttgatcgcgcccatgaagatccgcacagaggcccctgggaaccttcgtttatacagtgggagccccactcgcagcgagaaagagcaggtctccatcagctccttctactacaaggagcgggtaagtgccagagccgcagcctttgattcttaccccttctcctgggattcttgttcctcatctcctgcctgggcgcagagctaggatttagtaatcaccctgttagcctttcactttcgtaatcagtttgttcaagaaagtcattaatttgttcctttcagttggttttacccgctataaaatgtgtgtgtatgggtcggggggcagttcttatggtccgtaatctttac

SEQ ID NO: 271529 - DNA, 426 bp, Homo Sapiens
ttcaccagaagcactcgcgtcaattcagaaccatgtccgaaagcgagaagcgcctgctccagaagcagaaagcaagcaaactgaaaaggatccaggcgtgcaggaattggaagcattaatagacacaattcagaagcaactgaaagatcactcatgcaaagacaacattcgtgaggcatttcaaatttatgacaaggaagcttcaggatatgtggacagagacatgttctttaaaatctgtgaatcgcttaacgtcccagtggatgactccttggttaaggagttaatcaggatgtgctctcatggagaaggcaaaattaactactataactttgttcgtgctttctcaaactgacctgctgatgagaaaatgcaagacaatttttgatactggaactatgctttgaaatacaccttacactcttc

SEQ ID NO: 271530 - DNA, 523 bp, Homo Sapiens
  misc_feature (35)..(35): n is a, c, g, or t
  misc_feature (42)..(42): n is a, c, g, or t
  misc_feature (49)..(49): n is a, c, g, or t
  misc_feature (89)..(89): n is a, c, g, or t
  misc_feature (102)..(102): n is a, c, g, or t
  misc_feature (108)..(108): n is a, c, g, or t
  misc_feature (118)..(118): n is a, c, g, or t
  misc_feature (149)..(149): n is a, c, g, or t
  misc_feature (154)..(154): n is a, c, g, or t
  misc_feature (160)..(160): n is a, c, g, or t
  misc_feature (167)..(167): n is a, c, g, or t
  misc_feature (178)..(178): n is a, c, g, or t
  misc_feature (208)..(208): n is a, c, g, or t
  misc_feature (213)..(213): n is a, c, g, or t
  misc_feature (226)..(226): n is a, c, g, or t
  misc_feature (235)..(235): n is a, c, g, or t
  misc_feature (237)..(237): n is a, c, g, or t
  misc_feature (270)..(270): n is a, c, g, or t
  misc_feature (307)..(307): n is a, c, g, or t
  misc_feature (315)..(315): n is a, c, g, or t
  misc_feature (354)..(354): n is a, c, g, or t
  misc_feature (369)..(369): n is a, c, g, or t
aagtttactccaactttttaaaaaaacgaaaacanccttaanaccgtgncctccaatagttgctaacctgccttcttctctcagctganctgtctgaaaaangctaanatgcttaaanaaaacttgctgtccctgccttctgctctcanctganctctcnggaaaangctttttaaanaaaacttgctgtcctgccttcttctctcanctganctctctggaaaantctttttananaaaacttgccatctgcatgtcccatgttgccantccttggttcccaaaggccctccgtcattgagttcanattttcantctcgtggtctctgtgctccctgtgcctccatagcagantctgggatagcagantctgggggcaaaaatctcaatttcgttggtgctggaggagtgcctcagggcatctgctgtcacctctgctggggccccagtccagcccgtgccctcacttgtccccgggtgccgcctgccttcccagcctctaccccctctagagccaaaaaat

SEQ ID NO: 271531 - DNA, 621 bp, Homo Sapiens
  misc_feature (37)..(37): n is a, c, g, or t
  misc_feature (165)..(165): n is a, c, g, or t
ggggtgagatatctgccagcagcttcaggcttacatncctcaagctcagcaactccccgtggacagagattctcctgccccattaattccgtcatcagctccatggtcaagtcttgctgacttggcttggggtggggttatatgcccagctatcagtcaaacatngtaattggggaaaatagtattctgatggaccagatttgggtcatgggcacatatctgcagctgatcatatgttctgcttagctttgcaaccccagtagaatgaagacaggctctttcccagagagctcccagcagatgtccaaaggatgactctcctcagcctaccttaggactcatggcccttttccaaatcaatctagtgtcctattaataggcctggatgtggagttgccagatttagcacataaaaatacaggacatttgaatttcagatacacaatgaataaatttttttggattagtattcccaagtatgcatcctgtgttttatctggtaaccctacctgggtcatatgtcaactcagtgtgggggatgaaatcagctataccaaaaccacttagtttgagtgtgagaagaggtatcattccagaaggaaaaatgaagctggtgttttc

SEQ ID NO: 271532 - DNA, 841 bp, Homo Sapiens
  misc_feature (73)..(73): n is a, c, g, or t
  misc_feature (147)..(147): n is a, c, g, or t
attgggactcgtaatagctggaggcatctgcatcttctggaaacgtcaaagggaaaagaacaaagcatcactngaagaagagagggagtgaagagaaaaggagcagaggcggcccaccagcagcgacaaggctgagccattggcgtnggtgagcagggagccccgacaaggcacatcctgcccccccaccccaaacccaggaccctaacacgaagccctgagctgaggcttcgtccatgtgtcctcagacacagtaggaatggggtggccagtggggatcctccctctggcattgcctgattatgatctacccagtgagaccatctgtctcctagcaatccctcaattaagtcttcactggctgatttcaggcaggctggttgggctctgtcttgaaaacagacagatctgagtttgaaccccaagtctgatgggtgtgggctgagggacctggtgtgagccctgagccactctgtctgctgggagtgctgataccatcctgaaagaccaacagagtagcattcagagcaaggccgcgtcagggagggtttacagttgcaatcactgtgattattctcaatattgactgtgtccttcattcattcacttcactcacttcctcctctgtcatttcaggagctgaggacttgttcctagacttcagagccctattttgagagtagagattgtgctcagctggttataaagactgcattatgacagagttgcttgtggtggcttgcagctgtcatccagcattttgggaggctgaggcgggaaaattgcttgaggccaggagtttgaggacaccctgggcaatatagcaagaccccatctctac

SEQ ID NO: 271533 - DNA, 328 bp, Homo Sapiens
  misc_feature (52)..(52): n is a, c, g, or t
  misc_feature (60)..(60): n is a, c, g, or t
cccgccaaagtaacccccagggtgtgtatgtgtggggcggtcacattccttnggtggganaagaaagtagaaataatcctgggcaatgtccctattttatcagccgtatgtatgtcagaccacttggaatggtctgtataagaccaagagagttcaatataccaagataaaaatgtgcaagtatacttaacaaagagaacttgagttcagcattaaaaaaagacattaatctattttttcattgtgatcatcagtttatgcaggtaggaagaagtgttaacattatcactgatgtattttaagacagtatatgattctaaaaaatacc

SEQ ID NO: 271534 - DNA, 390 bp, Homo Sapiens
  misc_feature (51)..(51): n is a, c, g, or t
  misc_feature (61)..(61): n is a, c, g, or t
  misc_feature (68)..(68): n is a, c, g, or t
  misc_feature (78)..(78): n is a, c, g, or t
  misc_feature (126)..(126): n is a, c, g, or t
attaaaatgagtaatttgggaaataccttcagatgaataaataacatctcngcaacttccnttttccnccggatcagncctgtgagtgacccttgataacttttccttaaaagcaatatgagtcanccaaagaataagattaatttttgaggatttgtgataaccagaagaaagcactgtaggctgtgacaacctgtgagggccgagagaaatacaggggagccaactggtgatccatattggctttcatagagtggtagtatttttgtgtcagcttgttacatgcctgaacctctggattgcagcagtgttgtcattgtaccagcagttgctcagactctaatcagagtctgatttaccctcaataaagttctgtacgcatcagattgg

SEQ ID NO: 271535 - DNA, 756 bp, Homo Sapiens
  misc_feature (21)..(21): n is a, c, g, or t
  misc_feature (29)..(29): n is a, c, g, or t
  misc_feature (44)..(44): n is a, c, g, or t
  misc_feature (53)..(53): n is a, c, g, or t
  misc_feature (91)..(91): n is a, c, g, or t
  misc_feature (99)..(99): n is a, c, g, or t
  misc_feature (124)..(124): n is a, c, g, or t
  misc_feature (135)..(201): n is a, c, g, or t
  misc_feature (209)..(254): n is a, c, g, or t
agggtcaggaagtttgaaacnaccctggncaacattgcggaaanaccgtctcnacttaaaaagtacaaaaattggccagcgtgggtggcangcgcctgnaatcccagctactcagggaggattncgtgaacccannnnnnnnnnnnnnnnnnnnnnnnnnnnnnnnnnnnnnnnnnnnnnnnnnnnnnnnnnnnnnnnnnntccatctnnnnnnnnnnnnnnnnnnnnnnnnnnnnnnnnnnnnnnnnnnnnnntcaatcaggaatgtcacatatttacaaaaaggaacagaaatactcacatttagcaaaaacttatttgtccattaatactataatcaaacatgcagattttctcgtattttctgtgcggatggcaagttacaaaaatgctattatcacaactgtagaatgtcaatcctagtttagaaacagtaataaaacagcacttcaacaagagtggaccgagaaagtgcacgacttagaaaattataaaaaatgcttcctacaaaaatgattccctttaagacatttgttcactgtacacattttaaggtcccctctcccaccccccaacaaaaatagaggcagaacctctaagcactttctaacaaagtgtcccctggtttgttcctctgacaaaccctgactgaaagctcatgatgtgcaggcactggggtctcaagaggagaagacttgtcctgcccacggatgcctcgtcttccaagcaggaggagacagtcacaacgctacgatg

SEQ ID NO: 271536 - DNA, 642 bp, Homo Sapiens
  misc_feature (363)..(363): n is a, c, g, or t
  misc_feature (386)..(506): n is a, c, g, or t
  misc_feature (623)..(623): n is a, c, g, or t
actgataaaatgtacaataggcctgaagggtgttaagaacttcttgggggtaaataacaaaaatctctatataaatccacctcttttaacatttgtcttcactggccacagcctatttcatctaccttttctagacagatggggttattggaaaggtactgtttacttaatttccagatcataattgtaaaatagatgaatttagagaacagataattaaagggacgttttcaatatgctttgtaacacagctaattcaagtctattcaaaaaggtaaacaaattcattttaactgccactgatatttatagacttcctccaaaatatttaaaaggctcttaaactggggcagattaagaaantacataaatggccaggtgtggtnnnnnnnnnnnnnnnnnnnnnnnnnnnnnnnnnnnnnnnnnnnnnnnnnnnnnnnnnnnnnnnnnnnnnnnnnnnnnnnnnnnnnnnnnnnnnnnnnnnnnnnnnnnnnnnnnnnnnnnnntagtggtgcacatgcctgtacttccagctactcaggaggctaaggctggagaattacttgaatccaggaggcagaggttgcagtgaaccaagatttccactgcactccatcctaagnaacacagcgagactccatc

SEQ ID NO: 271537 - DNA, 392 bp, Homo Sapiens
  misc_feature (17)..(17): n is a, c, g, or t
  misc_feature (205)..(325): n is a, c, g, or t
cataattgtaaaatagntgaatttagagaacagataataaagggacgttttccaatatgctttgtaaccacagctaattcaagtctattcaaaaaggtaaacaaattccattttaactgccactgatatttatagacttcctccaaaatattaaaagctcttaaactgggcagattaagaaatacataaatggccaggtgtggtnnnnnnnnnnnnnnnnnnnnnnnnnnnnnnnnnnnnnnnnnnnnnnnnnnnnnnnnnnnnnnnnnnnnnnnnnnnnnnnnnnnnnnnnnnnnnnnnnnnnnnnnnnnnnnnnnnnnnnnnntagtggtggcacatgcctgtacttccagctactcaggaggctaaggctggagaattacttgaatcca

SEQ ID NO: 271538 - DNA, 403 bp, Homo Sapiens
  misc_feature (356)..(356): n is a, c, g, or t
tcggcacagcactgataaaatgtacaataggcctgaagggtgttaagaacttcttgggggtaaataacaaaaatctctatataaatccacctcttttaacatttgtcttcactggccacagcctatttcatctaccttttctagacagatggggttattggaaaggtactgtttacttaatttccagatcataattgtaaaataggatgaatttaggaggaacaggataataaaggggacgttttcaatatggctttgttaacacaggcttaatttcaagtctaatttcaaaaagggtaaacaaatttcatttttaacctgcccactggatattttataggacttccctcccaaantatttaaaggctctttaaactggggggcaggtttaggggaatacata

SEQ ID NO: 271539 - DNA, 464 bp, Homo Sapiens
  misc_feature (423)..(423): n is a, c, g, or t
  misc_feature (435)..(435): n is a, c, g, or t
ttcctttttgtggagaacggggtctcgctatattgcccaggcagctctcgaactcctgggctcaagctgtcctcccacctcttgcctccctgagagctgggattacaggtgtgagccaccgcacccagcccagtcatgtacctttaaagcaaaatcaatcacgttattttcagctccgttcgaaacaggaaaaggaaaagaatgcacatgccaaacaagaagaaatttgggtaaggaaaagattcaagatatggcctttatacactaattattcttaataatttcataaggtccttctgtctttacctaatttcatttgtttaacaggtaggactatatatacattcatacaaggaatcaactatggctaggcgggatagggaccgaaggacttctttcaggggctcctggacccaaaaagtnttgggcatccgncccaaatttccaggggatttcctggggtt

SEQ ID NO: 271540 - DNA, 475 bp, Homo Sapiens
  misc_feature (60)..(60): n is a, c, g, or t
  misc_feature (119)..(119): n is a, c, g, or t
  misc_feature (352)..(352): n is a, c, g, or t
aacccccggagctgcctaaacctgaaaagcaagacacaagaaaatcatgacgttacatgncctatacaagatttaagaaaagctcccagacgaagacctagtaagagctgtccaactgncccctcggcaggtgtgtaagccctgtcctgtgccttcctttccccttatcaagtaaaaacggggacaaaattgtacctcaccctcatgaactccttactgaggtctgatgagatagtgcatataaagtgctcatgccaacaccccaggacgttgtacgcactcaacacatattcacagccattactgttgtcatcattgtggccatgagtactgtgcccgttgccataggaancgcattggttgaagttcctgtaggagtttagaagtgagcacttctggagttgggcgtggtggctcatgtctgtaatcccagcatattgggagacctgaaggtgggggatcacgtgaactcaag

SEQ ID NO: 271541 - DNA, 528 bp, Homo Sapiens
  misc_feature (378)..(378): n is a, c, g, or t
  misc_feature (495)..(495): n is a, c, g, or t
  misc_feature (510)..(510): n is a, c, g, or t
ttaactctaaagcactcagcaaggctttggactctttctctgtcttgcttaacttatcattaagttgttcaatgtgatgttctcttttcttcaaaaggtcttgagaacaatctcgctgcttttccagatcagccacagcaagcttcagtttttctaaagtcaaggagttttcttgctgatttatttttttcttgaagatctcttaacatggtttcctgagaggtattcttcgctttcatttcttctgcaaaattctggctctgatttaaacactgtttgatgttcttgaggttctgcccccaggggggcagacttctctgggcccttttgctcaggaggggacctcttaagggagggttggttttcccttccttcaanttccctcccatggcttctccctcaggctcattctccctggatctggactcgccggggggaccggcctggttcaggctctgcacaacttttggcttaaactcttccaaatggtctcgngccgaatctggggcncgagggcaaaaatcccaa

SEQ ID NO: 271542 - DNA, 578 bp, Homo Sapiens
  misc_feature (27)..(27): n is a, c, g, or t
  misc_feature (46)..(46): n is a, c, g, or t
  misc_feature (64)..(64): n is a, c, g, or t
tgcatcaagatgaaggccagactcacncaggagttacagcaagccnagaatatgcacaacgtcntgcaggctgaactggataaactcacatcagtaaagcaacagctagaaaacaatttggaagagtttaagcaaaagttgtgcagagctgaacaggcgttccaggcgagtcagatcaaggagaatgagctgaggagaagcatggaggaaatgaagaaggaaaacaacctccttaagagtcactctgagcaaaaggccagagaagtctgccacctggaggcagaactcaagaacatcaaacagtgtttaaatcagagccagaattttgcagaagaaatgaaagcgaagaatacctctcaggaaaccatgttaagagatcttcaagaaaaaaataaatcagcaagaaaactccttgactttagaaaaactgaagcttgctgtggctgatctggaaaagcagcgagattgttctcaagaccttttgaagaaaagagaacatcacattgaacaacttaatgataagttaagcaagacagagaaagagtccaaagccttgctgagtgctttagagttaaaaa

SEQ ID NO: 271543 - DNA, 255 bp, Homo Sapiens
  misc_feature (237)..(237): n is a, c, g, or t
gtgtgagccaccacacttggctgtttccacatctttatgagcatttgtgactcttttattttagtcatcctgttggggtacggaagtggggtattttcaatgtgggttttgaatttgcatttccccagtgggctaatggatggttgagcaccttttcatgtgctttttgggccatttgtatatcttctttgaaataaattgtatttcttctttgaaaaaaactcgtgccgaattctnggccccagggcaaaattt

SEQ ID NO: 271544 - DNA, 556 bp, Homo Sapiens
  misc_feature (498)..(513): n is a, c, g, or t
aaatgtagaaacagtaaccaaacaggcaatcttaaatgggagtatcgttaaggagagcactgaagctcatggcactattcagacagagaaagtggatgaagttattaaagaatgggaaggttctttctttaaagataacccctcgattgaggaaaaagtctgtttctcttcgatttgatcttcatttagcagccactgatgaagggtgtttagagactaagcaggataatctaccagatatagaagtcaggcttatcatgagaagatcatgcagtattccctctatcaaacctccatcaacagctaattaatccaaagatagtatttgacttgattggaaaatgttaggatggaccaaggtgggccataccaactccctctgtcccaaaatgtaagttattacgtatgtatggaaaatgttatgatcaatatgtggttctcttcagaagaaaaaaacaataaaggacatttctctgaatctaattatggagatagacnnnnnnnnnnnnnnnngaatgagagggagtagcttaaaaataaaatcacaaatccagta

SEQ ID NO: 271545 - DNA, 420 bp, Homo Sapiens
ataaaaatcacctccgagcaaggtttcagttcttgatgcagaagactgctgctggctaggcagtaactacagtgtattgaccggaggcagcagagccctccagtggcgactggctaatgcacgcgctgccctcctcatgcagctgttgagctcccacttcggtcgacaaagtgaaggactaagctggctctaaccacacacacacactgcgctgcaatgctcacaccttgggggaaaggacttctcattattaaaaaccaaggactcactggcggacgggcaggccttgtgttttgggaatggctgatggcgccctggcccttccgtagcgaagatgcagctcgtaggcccaggcctcgaggttgcctcccagctttctgagtattgagagtttgggtttcacagatcaattatttctga

SEQ ID NO: 271546 - DNA, 620 bp, Homo Sapiens
cattacaggagctctctctgttgttctgacattgtgttatgggttactttgggcatgcctgtgttttaagacttgttcacatgattatagaaggtctaatcataaaccccagaggaaattggcattgtggtcatggttattaacaagtgaggtcaggcttgccctgtgaatttgctgcaccaggcatgtggagctaacatctgcagagtggccaccgcctttttggcatcggttctgctgaaaagtcacaggcctcttggatttgacaatgttatggctctgctcggattgtctgggatagaaacaaatactcatagatcctcctgcttcccacgggacttaacgaaccttcgtttatgggctggtatgctttcccctagacaaatagcacctcattctatttgagtgtaaactagtcggaaaacgtttagggtggagatattgcgtcttttatgggatccacccatgcactgtttgaattccctgattcccaccactcagcgtaaacagctccttttttcatgaactgaggttcaaaaagcagttggcaagtcgtcttttcctatgctgagaaaagggactgttgtgtttaaaaaatagaagtgaacaaagcaaaaaca

SEQ ID NO: 271547 - DNA, 235 bp, Homo Sapiens
agtacaaactatatgtggcaagatctttggatttgctaataattatttttcagtttcccctcccaccgggggctacactgtcctctgcagcttcttctggacattttgggcctttcttaccgttcctaaggcaagaatgaacactatgtctggaagatatttttaacttagttttgtctcttgttttgtttcttttcctgggtgtgagcaaaaagtatccttatctgcttttcaa

SEQ ID NO: 271548 - DNA, 674 bp, Homo Sapiens
ccatatcaaccaaattatggaatgggacaacaaccagatccagcctttggtcgagtgtctagtcctcccaatgcaatgatgtcgtcaagaatgggtccctcccagaatcccatgatgcaacacccgcaggctgcatccatctatcagtcctcagaaatgaagggctggccatcaggaaatttggccaggaacagctccttttcccagcagcagtttgcccaccaggggaatcctgcagtgtatagtatggtgcacatgaatggcagcagtggtcacatgggaaaatgaacatgaaccccatgcccatgtctggcatgcctatgggtcctgatcagaaatactgctgacatctctgcaccaggacctcttaaggaaaaccactgtacaaatgacactgcactaggattattgggaaggaatcattgttccaggcatcccatcttggaagaaaggaccagctttgagctccatcaagggtattttaagtgatgtcatttgagcaggactggattttaagccgaagggcaatatctacgtgtttttcccccctccttctgctgtgtatcatggtgttcaaaacagaaatgttttttggcattccacctcctagggatataattctggagacatggagtgttactgatcataaaacttttgtgtcactttaaaaaaaa

SEQ ID NO: 271549 - DNA, 505 bp, Homo Sapiens
  misc_feature (165)..(451): n is a, c, g, or t
  misc_feature (474)..(474): n is a, c, g, or t
agaacatactctgtaagtcctattcaagtgagtccagatagcatgaaagcgcactctggttacagaggaaaaaagctttcatgattaacttgaatttaaaacgttaagctaacaaaataagttatcttttcctatttgttcctttgaagtggtaagccctactannnnnnnnnnnnnnnnnnnnnnnnnnnnnnnnnnnnnnnnnnnnnnnnnnnnnnnnnnnnnnnnnnnnnnnnnnnnnnnnnnnnnnnnnnnnnnnnnnnnnnnnnnnnnnnnnnnnnnnnnnnnnnnnnnnnnnnnnnnnnnnnnnnnnnnnnnnnnnnnnnnnnnnnnnnnnnnnnnnnnnnnnnnnnnnnnnnnnnnnnnnnnnnnnnnnnnnnnnnnnnnnnnnnnnnnnnnnnnnnnnnnnnnnnnnnnnnnnnnnnnnnnnnnnnnnnnnnnnnnnnnnnnncataattggcatggaatctattncctgagcctatggcacacacacacaccctaa

SEQ ID NO: 271550 - DNA, 458 bp, Homo Sapiens
  misc_feature (34)..(34): n is a, c, g, or t
  misc_feature (53)..(53): n is a, c, g, or t
  misc_feature (90)..(90): n is a, c, g, or t
gtaatccaaatacctacaaaccccaatttaaacncctacatacaaaataaaanacctccaagagatagctgatgtaccttccatagtaanaaacacggcctatttggtaagttattcaagtcccttgaagaaagaactgtaaactgaaataaaatacctgaaatgaaatcctgatttctctatagaaacaagacaatcggggttatattcctgatcgaggatcttgatgcccattagattctggagagtttctttgtacgagatttactgagatggcttcttgttgccgttttattaacgtcaaagatgaaatcgcagttttgctgcctttgaaatggtcactttacgtcctaagctgccatttcatcagcccaggcatcacacctactctcttgtgaggggcagcttggtgaggtgtgaagagtacgctgtagtgtcacagaaacctgggtttgatc

SEQ ID NO: 271551 - DNA, 468 bp, Homo Sapiens
  misc_feature (42)..(42): n is a, c, g, or t
  misc_feature (105)..(105): n is a, c, g, or t
  misc_feature (117)..(117): n is a, c, g, or t
aggtgaagtaacaaatttggtccccccgtttttaactggaanaagggaaaagaaagcaacaagaacaggcctaacaacaccctgcccgaaaggaacaatgaacangctcctaactantctccgtctggaagctttcctaaaccttgtaataagacatgtaacgtccatgattttccttgtgtccttgctttgccagatttaagcagctcccagggtgagataaatacggctctcgtgccctcccctctctgaacctagcttgcaccttgctcaaagcagcactcaggaaacgtttgttggcgtggtttttggctttatctgaacagcaccttcacggagtgattccactaaaactctcgacatggtggcggggacaagacctcagggctggccatcactgccatcagtgtggttttctgggtcatcatttgaaacaggatgttcttgcatttatgtaatgatgtaccc

SEQ ID NO: 271552 - DNA, 492 bp, Homo Sapiens
  misc_feature (23)..(23): n is a, c, g, or t
  misc_feature (36)..(36): n is a, c, g, or t
  misc_feature (78)..(78): n is a, c, g, or t
  misc_feature (107)..(107): n is a, c, g, or t
caaaacaaagcaaaactccccantgcccccacccantcctaacccgcaggacccatgggcccctgccctagtaaacancctccaggtgccaaggtagtcctggggtnccctagaattcgccccatcatccaaacgggggcccacccctcttcctcacactccttcggagttcggtatggagttcccgacttgatctgatttggggtctgatgtggcatacaggatcttcttttttgagtaggggttatagccatgggatatgaaccactgtaggcacacgaaatatccattgcatctaaagaagtcatgttcattctggatggttctgagttattggatgcattaatatgactgttaaaacttcgaaaagcaacagcatttcttttagaggctaacgttttcagccactccaaaggaggacctaacattttttggttactctcttgtacagcagggttctcgacaccttttggtgaggtcttttcttggcaa

SEQ ID NO: 271553 - DNA, 355 bp, Homo Sapiens
  misc_feature (131)..(131): n is a, c, g, or t
agtgctgccaggtgtaagagccacgtctggatgagactcgtgctggaatgtgtgtgcctgaggaggccaattaaccttctcaggtctccccactcgggctgtgtaatggaggtcactgcctgccttgcggnccgggagggctttccagtgacatgcgctgagagcgtgggctcttgttaggtgcttggtgaatggcacaggtgatctttacctcctgggcccacggacatccaggtccctgatacttattggcggatccagggcgctgaacaaggtgcccagggaacataaatgaaggtgacatgcagttcctaacgtgctaggagcaactcggccaggatggaagaaggacctt

SEQ ID NO: 271554 - DNA, 433 bp, Homo Sapiens
  misc_feature (21)..(21): n is a, c, g, or t
  misc_feature (50)..(50): n is a, c, g, or t
cagggttaagaaaaaggaaangggttaccaatccttagggggggggaaangtgtgccacccttgaatccatgaatggtccatgaaaggcccatgttacagcagaaccttgatgaaagcctgtaaacagctctgtgtaagagcatgtacacagccttgttgtcccaggggttctcactctggaggtcccacggagtgcagcacatacttgatgaagatggtgagcaccatcgtcatcaggatggcatactcaaagccaaacaccagctgcacagaggccccacgggtcaggatgctgtgataggcgtggctgacgaagaggaagtccaggatgcccaggaggaacataagagagacaatgcggcagtgaaagagccaggagatgttggggctgcgttccataaagtccacacggtcctcagccaccgtgccgaa

SEQ ID NO: 271555 - DNA, 319 bp, Homo Sapiens
  misc_feature (78)..(99): n is a, c, g, or t
ctcctgtcaccccccggctagagtgccagtgacacaatcctcggccctagaccgacagagcaagacctctgtctggcnnnnnnnnnnnnnnnnnnnnnngggtcactcaggcctactatgttgaaaggagactgtaataaagcaaagacgttaacagaggaaacagagtctagtaaaaaagtacaagtaagagaagatagtggcttttagattaaggtagtagcacagtggaggtggtaagaagcaataagattctagatatattttgaaggtaaagccaagagtttttgctatcagattggataagaatgtgaaaaaa

SEQ ID NO: 271556 - DNA, 403 bp, Homo Sapiens
ccccctgaaaagctttatgatacaacagctctgttttcctgagagatggcctttagggtagatgagcctcagtataagcccagagcatttctctaaggctaccaaggcttgaggaattctgtacttactcccactgtcaccctgctcttcatcccccagctcaggtaaggggaacgtcagggaaggctgaagagtgctagctgcggaaacactgaattagggtgtcctcagccctccattcccaactggaagccagtagttcacttagtgtatatagcagagcctcaaaagcacaagcattttgagtgtcgtttttctgtgccctccagcgatgagatggcaaatggtgggaaagtgtcagctgtgtgaaaagatagtgattgtttggttttgctaggacagt

SEQ ID NO: 271557 - DNA, 702 bp, Homo Sapiens
  misc_feature (153)..(153): n is a, c, g, or t
  misc_feature (164)..(164): n is a, c, g, or t
  misc_feature (461)..(461): n is a, c, g, or t
  misc_feature (597)..(597): n is a, c, g, or t
  misc_feature (641)..(658): n is a, c, g, or t
tgaatgcagattaccactatgttccaaacaactaaacaaacaaacagacaaaaactcagttgttaatgagtgttacaggagattttgttcttcttagttgctctggatccttctgttggccacccttgtagggcctgctgctccagcggcttncagctagactnggagtggttactgggctgcatcttgctgaagtatgtcacccgtcagtatcccaaggtgagcaatgtattgtccctgtttgtctctcacccatgccataggaatctgtgtgtctggtggtatgtgctggcctcattctatagtgagacagtcaaggacttgggggtcagtggccctgaagacagacagtaccaacggaaatactgtagctcctcctgctgccaggccatgttttccccctctttcaaaatctaacttgagactcgcatttcctagaaggttttcttagaaaaactgtngttaccattcactctgggcttccagtatctaggcaatgcccagaccaaggggagggaggatgctctctcttaaggcacttttatttcatacctccatgtttactccatcagtttggcatttttatatatgtttctnttttttgttttggactttggccattcacttttggaaaaagtaannnnnnnnnnnnnnnnnnagggtaacaaaccatatgttgggggcaagatcctttggggattt

SEQ ID NO: 271558 - DNA, 520 bp, Homo Sapiens
  misc_feature (14)..(14): n is a, c, g, or t
  misc_feature (73)..(73): n is a, c, g, or t
  misc_feature (86)..(86): n is a, c, g, or t
  misc_feature (485)..(485): n is a, c, g, or t
ccccccggactctnccccccggcgggtaccaaaaaccttcccccaccaaggaaagtgatggacctgccagaanccccagtgagatnccccccacccgcctggttccaccatggcaccagggtgcctcctccagctcctgcccaaagcgaatgaatgggtgtttccccggaggagcaagtccctttccccaactgggtgtgccatgcctaaaaaccctgtattttccatgcctttccaaacaacatgaatagtcagctgacctaaagactgtgtgtgttgtggtaacacaaagacaattttgtaagtttgcgcttcagtactgtgacagttatgtttactggacatagtcttttgggcaactatgatagatgcccaaagcatgaagcaaatatcttttattggaaatatgcaaattcaatacttttccattatagtctatagaactggagatttcatttctctatcaaagagagatcaagcgaacntattttaggttaaatccgaataaaagaactttact

SEQ ID NO: 271559 - DNA, 404 bp, Homo Sapiens
gtcaccccaaaaatcctcccctccccttggcaattttccctaattgtgcaacctaaagtccttgccttaagtaaagtcttgtcctttcctcctctgctttgaccctgtcaaggtattcccaacctcccctattttttgatgttcattttcctccttgctctctttccttcctttcttgtctgtgaactccattaaccgcttctgcatgtgaccattaatgtgcctgtctttcttctcatgtattagagagaacaaaagctttgggaatcagacagatctgtgttctgatcctgtcttatggtatctgtcttgtttgtctcggcttaaaatggggataatatctacctctcagttttgttggcagttcagtacacgggaaataaagttctcactttcttttttaa

SEQ ID NO: 271560 - DNA, 373 bp, Homo Sapiens
  misc_feature (11)..(11): n is a, c, g, or t
  misc_feature (23)..(23): n is a, c, g, or t
  misc_feature (355)..(355): n is a, c, g, or t
ccaagtagatnccgccagttacncagttggctacatgcaacagaatttcaaggaaagaagtccgagatagaaataaatttgaaaccttgtacgccctttagatgcctatttaaagcccataaaactggatgagatcccccaagagggtgggtgcagacagagaaaaggtctaaagactgaatcctgaaacacaacatttagccatcagggacataaggaggaactatcaaagttgctggtgaggtaggagaaaaatcaagagagaatagtatcttaaaagccaaatgaagaaagtacttgaaggatgaaaaaaaaggattaaattggctcatgctacagataggtcaaaacaagnacttgggaataaatcaaa

SEQ ID NO: 271561 - DNA, 419 bp, Homo Sapiens
  misc_feature (29)..(29): n is a, c, g, or t
  misc_feature (38)..(38): n is a, c, g, or t
  misc_feature (43)..(43): n is a, c, g, or t
  misc_feature (106)..(106): n is a, c, g, or t
  misc_feature (113)..(113): n is a, c, g, or t
  misc_feature (152)..(152): n is a, c, g, or t
  misc_feature (160)..(160): n is a, c, g, or t
  misc_feature (172)..(172): n is a, c, g, or t
  misc_feature (178)..(227): n is a, c, g, or t
  misc_feature (230)..(230): n is a, c, g, or t
ccctggcttgggaagctcctttggggggncggaaggcntcganccccaacccttagggaaatgaagagcctctcccgaatgtgtgcgcgtggccgtgtctgtgtanttcctangtgtgtcgctcttcaagaagcaacctagttccctggggnagctggantttgcatgttantgtgannnnnnnnnnnnnnnnnnnnnnnnnnnnnnnnnnnnnnnnnnnnnnnnnncancccctcgtcaagccacgttgctgttccttgcagagaaaaggattgtgggaaactccaggactcttcccaccgcctcccagcgcctgcctgctggggctgcctgcatgcctcccctgcacctgggggtacccgcatccacttcctttcccccttttaacaaaagagaagaacgaattccaaaccaaaaaa

SEQ ID NO: 271562 - DNA, 198 bp, Homo Sapiens
catagattataatgtaagttggttatcctaaagggcttccttttaagcccccatatcatgatttatctatcatgcttgttcaaaaagatatccaagtaacaacttagttgcttttctaagaaaagtctacaagaaatttgaagtgtttgacttgaagcgataggaatgtcaagagttttatgttggattagaaagttt

SEQ ID NO: 271563 - DNA, 591 bp, Homo Sapiens
aggaaagctgtgactcacacagctcagtgcaatgaaaagaatatgcacaacttgagatttctccctcaggagggaaaggagctcagtatgtgtctgatatactgattttccagggagctgcccaagaaattagtttttttctagcccaaccattatgccagtaggaccccacacgcactctagatgcctcagaactactgagaacaaagacagctgggtgttaagctgctgcatcagaggactcatggtatggcagacagataccacagaaagcaagagattgccagttcctgaaaaacagaaaccaggaaatccctctaattaggaatctacatgcacaaatacagagaagatactttcacagagtagaattgaaggtccccagaatctctatctgggctgattgtaaaagccagtctgggaagacaggaagaggtggctatttcttcaaatgtatagataccaatgcaaagctacaaagaacacgaagaaacagagaaatatgacacaaaagggaacaaaataaatcttaagaaactgatcataaagaaatggagagatatagacccaggcacagtggctcatgcctgt

SEQ ID NO: 271564 - DNA, 501 bp, Homo Sapiens
  misc_feature (326)..(326): n is a, c, g, or t
  misc_feature (438)..(438): n is a, c, g, or t
ttggtctcccaaagacacctaagttcagttaagaacagtgaccactgaattggtatgggcataccacatgaacaaacacacagtattttatcattctcttgatggcactatggaagtgagtgaaattacatttcctgattcgcaagctgaagctataatgtcctgtgggcaaacaaaagggggaaatttgagaactgacatgttggcccctgtaataggttgctagggctgccataaccaagtaccacaaaacaggtggcttgacacaacaaatttatcctctcatagttctgggaggaagggaaactctgcaatcaagggcgtcngagggactgtgctccctccgagggttctagggggatggaacctatttgcatgcctcccatcctaggctttcagggtaatctggggcagttccttgggcatgcctttcacctngaggcttacagtatttcccaatttcttcctttccagcctcacggggggattcacacgtttttc

SEQ ID NO: 271565 - DNA, 444 bp, Homo Sapiens
  misc_feature (361)..(361): n is a, c, g, or t
  misc_feature (367)..(367): n is a, c, g, or t
  misc_feature (405)..(405): n is a, c, g, or t
  misc_feature (414)..(414): n is a, c, g, or t
tttgaggggaattaaagcaaacactggatgagcttgataaattacagcaaaaggaggaacaagctgaaaggctggtcaagcaattggaagaggaagcaaaatctagagctgaagaattaaaactcctagaagaaaagctgaaagggaaggaggctgaactggagaaaagtagtgctgctcatacccaggccaccctgcttttgcagaaaaagtatgacagtatggtgcaaagccttgaagatgttactgctcaatttgaaagctataaagcgttaacagccagtgaggataggaagatcttaagctgggagaactcatcattacagggaaaaagcggcccaaggctggggaaaaatgcagngggatnttcagcatcagtttttgggcaacctgaggagctccaantccaaggantttgttagggatgcttcctaggtcctgcag

SEQ ID NO: 271566 - DNA, 469 bp, Homo Sapiens
ttccacataacgtgaattctgggggcagatggctttgtgctttgcttcactggttgtacaaggtcagggatccgggccacagttggtaactctcttggtcctcccctcaaggtggggagatgacagtagcagctgcggcaagcaccaagttcacacctgtgttccaacgctggggacgggagaggcctgcaaagagaggtcctcctcaacgccccctctctagtctattggccataaatgggtcacatggctacaggggaggctggaaaagtgactgcgatgtttcagcctctatagtgggagactagaaaggcagaggctccgtgaatgactatgagtaaccaattattagaaacccctaaatacaccgtcagtatcactggcctaaacttagaaattgtccttttccaaacctgtgtctgttttaagtgattatagcttaacattcagtaagtgcttgctatagggc

SEQ ID NO: 271567 - DNA, 490 bp, Homo Sapiens
  misc_feature (395)..(395): n is a, c, g, or t
  misc_feature (469)..(469): n is a, c, g, or t
  misc_feature (475)..(475): n is a, c, g, or t
ttaaagcaacatgagaaggtaacataagcctccatctaccaaggatatggggacaatagcctttcttctgacctcattcctgcctgttgtacaagccagggctgtcctaaggaatgatcatttgccaatctgttctgaccagtgggcagggcagctcagagacaatctggggccagaactagtgggtggatatgggtggaggtgggaaatatgccacactagtgtaactgagattaactgaggtcttgattctgatcctagagtaaataagctagtgcaggcaagcccttcatgtgaccttcagctccatgggatttataaggcaaaggcctttctgtaacccacagaggggcaaagcaggccaaaccactgctttaggcctttttaccacttgnaaaagggcaggaaagtctttggcaaagtctattttggaaaagacgttgtctttatacttccatcactctttctngggttntaattaaccttcagt

SEQ ID NO: 271568 - DNA, 490 bp, Homo Sapiens
  misc_feature (431)..(431): n is a, c, g, or t
  misc_feature (444)..(444): n is a, c, g, or t
  misc_feature (460)..(460): n is a, c, g, or t
  misc_feature (472)..(472): n is a, c, g, or t
gcttgtagttatgctgcctggggggaaaaaagagtacagaatattcggtgagaactgaaggttattataatccagaaagagtgatggagtataaagacaacgtcttttcaaatagactttgcaagactttctgccttttcagtggtaaaggctaagcagtggtttgctggctttgcctctgtgggttacagaaaggcctttgcttataaatccatggagctgaaggtcacatgaagggcttgctggcactagcttatttactctaggatcagaatcaagacctcagttaatctcagttacactagtgtgggcatatttcccacctccacccatatccacccactagttctgggccccagattgtctctgaagctgggccctgcccactgggttcaggaacagtttgggcaattgatccatttccttagggncagcccggggttnttacaacagggcgggnttgagggtcagnggaagggtttttgtcccc

SEQ ID NO: 271569 - DNA, 404 bp, Homo Sapiens
gggcttgcaacaaacacataactagtctcccatgtcatgtttcctgcccaagttgcatgggcaagaaagctaaagagtacgcttctagtttgcaaagataaaactgaacttcatctgtagtcttttgtagtgtttgtgggccaaaaagacagatactccagatcctaaattaaaagcctaggatggtcaccgtcaaggaaccatccttgaggatgagccttactaaggcttgggactgagccttactaggaagtgcagcccaaccctggacccagcttcaattcctgggcaagtgaggaggacttgatccacatcagtcccaatttttccttacaggatggaagggctgtgcttctctttgggttgggggaaattcatcttgggatcccctttttggggcactg

SEQ ID NO: 271570 - DNA, 599 bp, Homo Sapiens
  misc_feature (64)..(122): n is a, c, g, or t
  misc_feature (133)..(134): n is a, c, g, or t
  misc_feature (260)..(260): n is a, c, g, or t
  misc_feature (296)..(296): n is a, c, g, or t
  misc_feature (506)..(506): n is a, c, g, or t
  misc_feature (511)..(511): n is a, c, g, or t
aaacacagttacccacttcctatgacccaatccccttccccttgctttatacagactccttccnnnnnnnnnnnnnnnnnnnnnnnnnnnnnnnnnnnnnnnnnnnnnnnnnnnnnnnnnnncagtgtctggnnccaaggcctctgctcaatccactacactctcttccctacccaggcacactgtaaaatggggtctaataccagctcctttgttaggaagctcagatgaggtcatctacatggaagggctttgtaaancggaagtaatgctgacaaaagaaagggggcatatantgctgctgatactgaccaaaagcaccctagccttagctatgacaaactttcacatatggggtgagcaataaagtgtccctgttggacagtagttttccttcttagtgatagaggatctcaagatttcagaattaggagaaatgaggttgagtatgagagatgtgagcagaccagaataaccgctccccttccccatacacaattctgtcnggtcnaatgcaaaattcaccctctccaaaaactcttccccaacttagccgcaccctgctatggttctgcccttttatgccgtcagctcgtgcc

SEQ ID NO: 271571 - DNA, 481 bp, Homo Sapiens
agataacagaaataaactcttatccaaaattatccagaatcagtggtgggataagggtgaagcccaaattttcattgactttctaggcttacagtacccataaaaaccacacaaaattctctttcaccattcagaaggcaatttcagaatcttgccatgtgcctcaaagtaattagcaacagttaactacatggtactgaaggcataatggtagctaacattcgctgggatgctgatatgaggcaaagcactgtttcaggtaacatacctgtaccccattttaaaggttttaaggtatctaccattaatttaaccccactttacacattagggaaactggggcccaaggtcacacaggctggttagtgggggtaggaggccgaggactgggcacttaggtgctggggaagttctggtttgcagaaccaagggtttttggcccttgggttattgaaatagtggaatttatttattattcttt

SEQ ID NO: 271572 - DNA, 854 bp, Homo Sapiens
  misc_feature (86)..(196): n is a, c, g, or t
tagaaataaaatatataccagttaagaataatttattatttaggccaggcatggtataatctcagcactttgagaccctgtctcgnnnnnnnnnnnnnnnnnnnnnnnnnnnnnnnnnnnnnnnnnnnnnnnnnnnnnnnnnnnnnnnnnnnnnnnnnnnnnnnnnnnnnnnnnnnnnnnnnnnnnnnnnnnnnnnattttttcaaaaaagagtaattggttatacacttctgaagagccaataaacaatctctacttagacaacttaaagttatttcaattattactttataacattttttaaacttttattgaagttcagtggtacaagtgcaggtttgttacataggtaaacttggtcatgggggtttgttgtgcaggttatttcatcacttaggtattaagcctagtacctattagttatttttcctgatcctcttcctcctcccacccgtccaccctccaaaaggccccagtatgtgatgttcccctctgtgtccatgtgttctcatcatttagccccacttataagtgagaacaggcagattcagtttctgtcctatgtagttgctactttatacatttacatagaataggagtttattttagcataattagaactttatgagacaattttaaatgaatgtgtctggttctagatcctctcggagtatactggtagtgtgaacaaagctgtgcttcagcagggttttaacatccgtagtggtcttcaggagttcgtgccctgcttaagggccgccggattagggcttgaaaggactgctgcgccctagggaggggtccaaggtaaccctgctcagggtaaagggcaagcatgtgaggtcccaattcgt

SEQ ID NO: 271573 - DNA, 441 bp, Homo Sapiens
  misc_feature (379)..(379): n is a, c, g, or t
  misc_feature (414)..(414): n is a, c, g, or t
gagtcggaaggagctgaggaagaagacagactgaaggagcttgcgattattccgcctcggcaaccggacccagcagcaagcaggacgggcggcgctctgctactggtcccgttaagccagagtagcccaagccctgaagtcactgctcatccggaatggaaatcccgccgaccaactacccagcctccagggcggccttggtggcacagaactacatcaactaccagcaggggaccccgcacagggtgtttgaggtgcagaaggtcaaacaagccagcatgggaggatatttccagggaaggagggacataagtattcgccttaaattttgctgtttgaagaaattattacaaaaacaagttaaggtgaactgcacagntgaagtactttaccctttcaacggggacaagaaantgcaccagaagttcaatttcacttttg

SEQ ID NO: 271574 - DNA, 517 bp, Homo Sapiens
  misc_feature (117)..(117): n is a, c, g, or t
  misc_feature (312)..(312): n is a, c, g, or t
gaccccagattggaaggtaaaacccaaggactccacttttgttggttttcactgagtggctggagcactcactcagttacgtaggttggagtggcaaggtaatcaaatttctgtcantcccaatatgctggttagcatccccacagagctacagcccttaggtaaatacatgcactcgaaagtgatttatgaggcaaaatgagagagaaatctaccaccaactactgtagagagggcaggggtgagcactttatccctatccaacacacacctgcacagctcagtctctccattaaaaaaggagtccccaancccaggcaatgaactacaacacagcaaacacaccaggtcacctgcctcttaccatttgctgtaaagaacttgtcttccatgtagatgtcaaaaggcaagaacagaggcgggggaagggaggtgatgatagttgggcaaaaatttggtggtcaagtatttcctctagggcttactttatgaattttagccaaagtattacagattt

SEQ ID NO: 271575 - DNA, 571 bp, Homo Sapiens
  misc_feature (176)..(176): n is a, c, g, or t
  misc_feature (207)..(207): n is a, c, g, or t
  misc_feature (258)..(258): n is a, c, g, or t
  misc_feature (345)..(345): n is a, c, g, or t
  misc_feature (519)..(519): n is a, c, g, or t
gtaattaaagttactaatcatttgactttagtttaaaaaaggagacctaggtgtgcctattctaattacatgagctgttttaaaaacataaaagttttctcgggctcaaagcagaactgcaagtcagagcaatttgaaagatgagaaggacttttcccggttggctggcttgaaanatggacggggccatgtgagaagaaatgtganagggtcttgagctaagagaggcttgtggttaacaacccatcagaaacgggnccctcagtcctataccttaagggaactgaattctgccaacaaccaaacgagcctgtaagcagattcttttccagacaagaaccccancctggctggcaccttgattttggccttgagagatcagaccccaagcagagaacccagtcagctccacctaaacttctgacctacagaactgaaaaattttaaataaatgttgttttttagcctctaagttggtagtggtttgttatatggcaatagaaaattgatatgcaaagncacttggcaaccatgtgaataaatgctatggaagaaatggaaatctcacaaa

SEQ ID NO: 271576 - DNA, 522 bp, Homo Sapiens
  misc_feature (82)..(82): n is a, c, g, or t
gtgccccaaaaaataatgtcccttgtgaaccccttcccggggtgatgaacatttccgttttaaatggggttaggttaaaatntgtatatatggttatccaaaatgccattgaattggacatttgaaatcccctgtatttcactgaatataaaacccacagttgaaaaagaaaagattcctaatagttggggggccagtaagcctaaataaacagataaaaatgcacccaggtgcctgtgaacaaaattacagcagaacaaagggtccagagagcatgcctggggacaagggaatccggggttgagagacaattgtacatagggagcccagggagactttccaaaagacatttaagcagaagcctgagtgaagtgacacgcagaggtctggtggaagagcttttcagttggagggagcacatgtgcaaaggcccagaagtgggatgaagcttgacttttgttcaagcatcagtaagcaagtcagtgtgattggagtgaagtgtaaaagggggaaaagatggga

SEQ ID NO: 271577 - DNA, 524 bp, Homo Sapiens
  misc_feature (119)..(119): n is a, c, g, or t
tttttgcatcttactctcttaagtcaggtttctggagatgactgtcccaacactggaatccagcctgtctacagcaagggagaaagaggaagctgatgttgggctgagaggggcaggcnttacagggtaggtctcacaaatgccgacgtgacaggcagggcttctgagggggcttcagggaccagcagggaggcgagactcaggcactgacccgcagagagcatggccttggacgcacagtggtgacagcagcctccaagtgtcccccgtgccctcaggatgagggacagaagcttctggggcccctgcctctttcctgcccatcccctgggtgaaggaaaatcgcctctgataggaaaagctggggccagactccctctccctgcattagtgtcgccgtcctgcctgtgaggtccccgggcccaggggcacctcccgggacacccgagtggtgatgcacgaccctcagtcctggggcttaggacctctggtgcccccgcaggtccgtcctggagtcacttcac

SEQ ID NO: 271578 - DNA, 446 bp, Homo Sapiens
  misc_feature (16)..(16): n is a, c, g, or t
  misc_feature (28)..(28): n is a, c, g, or t
agtactttaattatangttaactaaacncccgggtgggttatctatgtacctcagaaagaaaccatacacccggatgaacaaactggtcaagtctgtagagacctgaatttgctgtaccttcttgactagaattctggtgctctagacacaagggtaggctgcatgtgactgctatgtgtctgctttcccagacttcctactcttaaaaaactccttcccttacatcagttatttatttatttattcagtatttgctgaaaatctaatgttaggctctgtaatgctcactgggaataccacaagccttagctatactaacctatctggatttcttccaatgtagagctttaaggctttgcacattctgcttctacctcctagaacaagcatcccattttccttcctcttcagcagcttcaactaattcttctggatttcattcagc

SEQ ID NO: 271579 - DNA, 416 bp, Homo Sapiens
  misc_feature (134)..(134): n is a, c, g, or t
  misc_feature (402)..(402): n is a, c, g, or t
gacttggcttgcacaaacgttccatggggcaagtgcttcatacgcaggtcagcagccgagatctctctcaataatgaacgatattactaatataaaatttgcctcaactgaacttcaaacctgatgtgattttnttttcctcaggtgggatgtggacagagaacatctatataataggtgttatcattcaggaggcctagactgaaccaatactttgcagctaaatgtaatttgcgacgcaaactttaacagctccatttagcgacttttcacaatcaagatgatttcaacagtctctgaacgccagccaaggataccacccaaaggtataccttaaatacccggcaaatattaccattttataaaaattccctggtttggtcctccccccgattttagggnaaatcacctactct

SEQ ID NO: 271580 - DNA, 476 bp, Homo Sapiens
  misc_feature (40)..(40): n is a, c, g, or t
  misc_feature (88)..(88): n is a, c, g, or t
  misc_feature (177)..(177): n is a, c, g, or t
aaaaggtaaccctgcccaatcttgtaaccctgaggtcccntcccccatctgaagcccccctgagctgtagaagcggccccccatcaantgcaccctgattggaacacactagatttcaaggcccctggaaactgggtgcctaggatccgtttccccctggctgcagagagtgggagntgtgatgtggaatatccccttctccccagcacaccccaattaatactgaagagtagggcaggaggaggtgctgggaaaaccgggtttcttggcacatggggggcaagcactgtggttgaaattggccatgtccaaggcacaccagacgatttcaggtcatttttagccctagactggaaaggggtcaggggacaggtgacccctggctcagcccccagcagctcccaactgcccctctcccaagcaactcctgatccctgcttttgaggaaataaacaaataaaaccccgctaaaaaaa

SEQ ID NO: 271581 - DNA, 675 bp, Homo Sapiens
  misc_feature (29)..(29): n is a, c, g, or t
  misc_feature (38)..(38): n is a, c, g, or t
  misc_feature (88)..(88): n is a, c, g, or t
  misc_feature (101)..(101): n is a, c, g, or t
  misc_feature (142)..(142): n is a, c, g, or t
  misc_feature (168)..(168): n is a, c, g, or t
  misc_feature (178)..(178): n is a, c, g, or t
  misc_feature (205)..(205): n is a, c, g, or t
  misc_feature (276)..(276): n is a, c, g, or t
  misc_feature (458)..(458): n is a, c, g, or t
acacactgaagctaccgtgtgaggaggtnctactcatngtactgcattattatagcttctaaacataccttggtaataaggactattncttgaatgcactncttgtctcctccacgatctggtggtgggccggagcttgttnccaataggctaatatttgtgagggancctggacaanagagagaggtgtgttaggcacgctggncctgcagcatttgtgtctgtcacctctaaccacgaagaggataatgacttgagagagagtgctgctgctgnagctcctccttcccaatctcaagtgaatacctcttgaattcctctagctgtagcctagaatcatgtatagaaaaggattcctgggaaatgtaggttccccttaacccaaatgctaacagtacaaactgcagttgtgcagttaagtatgtgtttgtacttatttgttatactggaaacaggangagatatttgtaattattttctgcttaaaagatatcagaatagttatttactattcaggtatcagatttgtttaaaaatgacatttaacttgattatatcattattttcttttccattaaaccctaacaatttttaaagccatgaaataacttaaaaaacagaagtaatttaatcttaccctctcctttggaaagaaaatattccttttttaaagtg

SEQ ID NO: 271582 - DNA, 384 bp, Homo Sapiens
ccaattccagcgtctggaaactgttgtttatgtcattgttttttgggtttgtggttgctgccgcctcgggtgggaggggatagattcaatccctgtgactctatccttggccagaagccacactctctaatctcatgctgatgttttctgtgttgacctgtcctgctgccacctgtcctgtgagctccttcaaggcagggctgtgctgatgccaagggatttagcaccatttttgtgctattcataaagtccacaaatgtttgttgaataaagtaagtgttagactccaaaacatacaaagatgaataagacaatatctacaatatctctgtcttgaaaaaacttagaaaccactggagagacaaatctcatgaagaagcattc

SEQ ID NO: 271583 - DNA, 354 bp, Homo Sapiens
  misc_feature (28)..(28): n is a, c, g, or t
  misc_feature (41)..(41): n is a, c, g, or t
  misc_feature (52)..(52): n is a, c, g, or t
  misc_feature (102)..(102): n is a, c, g, or t
  misc_feature (123)..(123): n is a, c, g, or t
agcccaggagccaccccatcctccaagnacactgaagcagnaagctggacanacgggcacactggatcccaaatgggtaaggggatgggtggcgatgctcantctgggtctgctacttctggngctgctccctacccgtgcaggtttcttcatttgttcctttaaccagtatgccggaagctactgcagccgaaaccacaaagccctccaacagtgccctacagcctacagccggtctccttgtggtcttgcttgcccttctacatctctaccattaagaggcaggtcaagaaacagctacagttctccaacccatacactaaaaccgaatccaaatggtgcctagaagttcaa

SEQ ID NO: 271584 - DNA, 470 bp, Homo Sapiens
  misc_feature (450)..(450): n is a, c, g, or t
attctcacttagatttcagaccccagacaatcctgaagtgtcagaggcaatgcagcagcaggaggctacagatgtccacaacagaggagtcgactcagaggaacccgagttcttagggcatgagcgaacccccttgctttccccttcccctgtcctcccaccatgtggcctaggacatggacacagctgtggaaactgttcaacagagtagggtaactaaagaaacagcttttgggacacagacccgaaagaggagttctaagggctggaaaataccaaggaactggcagaaagaggaagcaaacccataaagttctataaactcctgtttataaatcaaaacaccaagcccataaagcttataaactcctgagctcacccaaagttgtatatatatgtgtatctgaccctaaacagtgcagtaaagacgttgaggatgaactttggggntagctcaccacctagggtcc

SEQ ID NO: 271585 - DNA, 393 bp, Homo Sapiens
  misc_feature (41)..(41): n is a, c, g, or t
  misc_feature (104)..(104): n is a, c, g, or t
  misc_feature (143)..(143): n is a, c, g, or t
  misc_feature (223)..(223): n is a, c, g, or t
  misc_feature (232)..(232): n is a, c, g, or t
  misc_feature (234)..(234): n is a, c, g, or t
  misc_feature (236)..(236): n is a, c, g, or t
cattcgaaatcccgggttctaaaccccactctgctactaanttgtctgaccttccccatttataaactgttgtgggttaaaggtgggactaggtgaactctganaaccctgcactcggcgcggacgagggatttaggggaaantgtgctgtattccccgcgagccttccccaacggccccgcctccccgggtgaatccccggcggccagcgcagcgcaggcancgatcctgngncngcgcggggccggcagcttcctggaaagttacttcttgttggagccggcaataggcaaagtgtgttctgtgaaaatccgcagagccgagattgactacgttccgggaatgagagggctgtgtcattcccctcaatgcctgctgcattgacggcgtaac

SEQ ID NO: 271586 - DNA, 298 bp, Homo Sapiens
ggctaccacatgggtgaaatttcccttacatactatgccccaaaagagctgtgaccaacctggtggttttatggcacaccagggaagcagtcttggtttggagaagaaacccaccatagagaggaagcacctgaggctgtgtgttaggactcttctcttaatgtcttgccatccaaagacacactgaaatccacctctcagggttgaggtgaggaacaacaagttcattatattatggcgcgcttctgggactgtgctgaacacggcagctgtccgacatgtgtcactactcttcttt

SEQ ID NO: 271587 - DNA, 457 bp, Homo Sapiens
caaaccatccatacggcaggggcacaattataaagattgatcctgtcacgggaatggtttcaaatctgaccaacctcatggcatacattggggaagcaattgtgaaaccccttgattctttggatctggacatgctgtactgtgacaatggtttgtgtgtgacagaaaatgtagctgtgtctaccgggaaagactggggaaatttcttcctgtggagttctttataaagcaaaagtgcatgaaactgtcagtaatattgtagtctataaagggaaattgctcttagaggctaatattgcacaatgactactttttttgcttatttggaaaagatctttatctcttggagtattaagaagtcaacatataattgccaccctatacattgtgttctggagtgcctgatttattgaaatcagtgtgaaacctattttaaataaatatctatttcaaaacc

SEQ ID NO: 271588 - DNA, 371 bp, Homo Sapiens
  misc_feature (71)..(71): n is a, c, g, or t
  misc_feature (317)..(317): n is a, c, g, or t
ccccgtgggctgcagggtcaacaaagttgggtttcctcttttggctcagaaatttaaaagaaaggaagggnccctggtgtaagtggctcatgcctgtaatcctcagcatttggggaggtttaggcgggcagatcgcctgaacctaggagttcgagacccgcctgggcaacgtggtgaaacctcatctctacaaaaattagctgagcatggttgtgtgcacgtgtggtcccagctgctcgggaggctgaagtgggaggatggtgtgagcccaggagtggaaggttgcagtgagccatgattgtgtcattggactccancctggatgacagaatgagatcctgtcataaataaataaataaatataccaaaaa

SEQ ID NO: 271589 - DNA, 443 bp, Homo Sapiens
  misc_feature (37)..(37): n is a, c, g, or t
  misc_feature (81)..(81): n is a, c, g, or t
  misc_feature (104)..(104): n is a, c, g, or t
  misc_feature (149)..(149): n is a, c, g, or t
  misc_feature (195)..(195): n is a, c, g, or t
  misc_feature (345)..(345): n is a, c, g, or t
ggaatgttgcctggcatcctgctcggatgaacatgancttcaggctcacaataaagagatctacacccatcaaagtggaancccactgggccccgcccacccancaaccccaaactcccaacatcatgttggcaagtgcttcgtttgantcctacggtgcgactgtgggacataagaacgaggcgtctgcacccnaaacgctcacgaagcatcaggagcctgtctatagcgtactttcagccctgaccggaagtacttggccagtggatccttcgacaagtgcgtccatatctggaatactcagagtggaaatcttgtccacagctaccgaggcactggcggcancttcgaggtgtgctggaacgcccgaggagacaaagtgggtgccagcgcgtccgacggctctgtgtgtgttttggatctgcggaagtaaccacaaaata

SEQ ID NO: 271590 - DNA, 190 bp, Homo Sapiens
cctccgcaaagaggcagaggggcatggctttccttatataggagtgcctgctttgttaaaatactaaaatttaggtttaagatgttaatagaaactccttcaaggtccttcatagtggttcttattgccttccccttacttaccacctagccatagaaggaagaagtaggtggctgggcacagtggctca

SEQ ID NO: 271591 - DNA, 554 bp, Homo Sapiens
  misc_feature (92)..(92): n is a, c, g, or t
  misc_feature (113)..(113): n is a, c, g, or t
gatgattgtgcctgggaccaccccaaaaggaagaatctgaaggaagaaaggttttcccagcaccctgagtggggattcataggtgggaaaangggaagctaagccatgtggcnaagtttgtcaacctgggccattctcttaaggaatgctggcccaggctagaactgtccaccatgtcctttgcacctctctagagaaggtgtttctctgccaaccatcagatgtatatgatatatacaacacaggctatagaaatgtgattatttttccccagaaaatgtgtatttgtagaaaaaaatgttttaagacaacaaaatttaccttctctaacctgattattagtttattgacttccacaacatagtggtcaattctagcagctcggtgttttttgaagtcggaaagatggcttctcacagcacctagagggaaggaaggtagggagacaaatgacttatagtttctctgagggagcctctctaccttgcctcttatcccagtgaatttcaaaagcaggttggtcaacatagcgagaccccgtctctctcctaaaa

SEQ ID NO: 271592 - DNA, 901 bp, Homo Sapiens
  misc_feature (518)..(568): n is a, c, g, or t
  misc_feature (705)..(713): n is a, c, g, or t
atagtatgcctggaagatctgcagattgggacagttcttacaggcaaagttgagaatgccactctctttggaatttttgtggatataggagtggggaaatctgggctgattcccatacgaaatgtaacagaagcaaaactttcaaaaacaaagaagagaagaagccttggactgggccccggagaaagagtggaagtccaagtactcaacattgacatcccccgatctaggattactctggacctcattcagggtgttatgagtatcccacgaaggccagacgctgattttattttctcatttccacagattgacaaggataagtcagttgtttgtaaactctaaggtagcagatgagaaataattcacttaatatcagaaatattttccaaacactttcctttattttttcttctgaataaatagaaaaccaacagtttgatttccttttccccttaaaggaaacaactaatacacattcttatatggctttatgtagtaatagttttctgactaannnnnnnnnnnnnnnnnnnnnnnnnnnnnnnnnnnnnnnnnnnnnnnnnnntataacagattgcttaacttctacttgccaacatctgccttgctggacttgtatgggattgtcttcttgatttgaattgtaccgtctttgttgacacagtagggctgggcagtgtttaatccttccattttatagannnnnnnnnaatcaggccttttggacttcattcataattttgcaataatctcttttcccttgtcatgcaagccaaaaatataccagtaaaacagattctgacgtgtttgtagttatcaaatgaatggctcgaaacacttctcaaaaggatatacggtattgaccccaacaataaatgtttgtggctagtgacttaaa

SEQ ID NO: 271593 - DNA, 510 bp, Homo Sapiens
  misc_feature (15)..(15): n is a, c, g, or t
  misc_feature (62)..(62): n is a, c, g, or t
  misc_feature (90)..(90): n is a, c, g, or t
  misc_feature (174)..(174): n is a, c, g, or t
caccaccctatgtgncccgacctccccatgtaaccgagtggcctgtaatgggtacattccancacctattaggaatgaggaaagagaagncaaccccctgaaggcctaaagggtccagtttttataccatggccctttatgtaaagtaacctatgttccatccacatggccccnggaggcagccataaaatatagtagacctcaggggagctagcagtcagtgtaccaagtaagaagtgtgtggcccagagcctaggccagagaacaactggtgtccttgaagaaaagcagagcagcccaatcctcctaggccttggtttcctgaggactgtcccaggccctgttcccagctcccacaattatatccctcagaacaaaacctctttttgagttagcatgagtaatctctctgttccttgtgaaaaactgatagaaaaagcaaaataaaagaatctccctacaagtatctgtatctttggttcaattattccattcataagaatttagcct

SEQ ID NO: 271594 - DNA, 590 bp, Homo Sapiens
  misc_feature (76)..(76): n is a, c, g, or t
  misc_feature (143)..(143): n is a, c, g, or t
  misc_feature (222)..(222): n is a, c, g, or t
  misc_feature (277)..(277): n is a, c, g, or t
ccccctaaaaaaccctctcccccccttgaaaacctcaaaagcacaagctgccgaagaagggcaaccgaaggaaggnacccccctctcctcatggttgtcctcctttcccccccgcctatgtcaaaaggtaagtggagggaaancgaaaggaaagtgaaacgcctgaaatgtgaacgcatttcctgaaagaagctcaagctgtcacccggggcataacccccnggaaagccccccaagtcctgttcctgaactttgcccctggctgtcctcccttgancccgccctccctagatcattgtcccttgatgtcccaggctgggtcatttaaaatagagatgcaatcaggaaggttgggggacttgggactgtggctgaattgagaccttgctgatgtattcatgtcagcacctgagtcacagcccaggtgcccggaagcagcctcttcgcataggcagtgatttgcgattactttaaagctcaccttttttcttcccctctctgttcgctgctgtcagcataatgattgtgttcctctcctatgggatccatctgttttgtaaacaataaagcgtctgggggggtgtaaaaaa

SEQ ID NO: 271595 - DNA, 401 bp, Homo Sapiens
tgaagcagtgaggctgggaggactggggtccaaataaagtaacagccccaggattaatgtttgggggtttgatccctaaaacattatagttgagggctccctagcacttccttttagaacactggaaatagccttttttattattttctgtctctgttaaaatgggaggagggggattatcatgtgttccagttcaccaaagattattcttcccccaaatcagcaatagccagtagagggttcagcagcatagaatctgttttccctttttaaaaattttcaagccagacacagtggctcacacctgtaatcctagcatttgagaggctgaggtgggcagatcacctgaggtcaggagttcaagaccagtctggccaacgtggtgaaacctcatctctact

SEQ ID NO: 271596 - DNA, 226 bp, Homo Sapiens
ccttttttcttctttgtttggattgcagcattctgctcttctgatgatgcgctgtgaccctgcagtagcgcaaaaggtgcgcagcgttaaatgcccattgcgtgcgaatgaacccctgtgaacggttgactagatgagtaatctgattgactggctccctcagtcctattctgtagcctttttggataaaattgggttttaacatacctcgagtccaactaatctc

SEQ ID NO: 271597 - DNA, 516 bp, Homo Sapiens
  misc_feature (130)..(139): n is a, c, g, or t
  misc_feature (410)..(410): n is a, c, g, or t
  misc_feature (420)..(420): n is a, c, g, or t
  misc_feature (439)..(439): n is a, c, g, or t
  misc_feature (459)..(459): n is a, c, g, or t
  misc_feature (465)..(465): n is a, c, g, or t
  misc_feature (487)..(487): n is a, c, g, or t
  misc_feature (503)..(503): n is a, c, g, or t
ttaaaactggacacaagaacacaaaacgcttgggctgctgagagattagaccaacaaccctccacggctacaaaccttttccacgttatatggcacgttataagtgggtgttcctagtgatggttctgannnnnnnnnnaaaaagtctaaatatgtttaatgttgtctcagaagacaaaatatattttagacagatattcctcagtgatgagtaagcctcagctatctggaaaattcatgcaggcgccagagatcattactgagtaattcaagctaataactgcgtcatgctgggttgtaccctggcatgccaatatctggcttaaaagcggcaccacggaaaggggaaatacggaatctcactaagcacttcacccatttcttgtttaacgacactgggaactgattcntccttaatantacacagttaaatctatcnggggcctttccttgcttccngtggangggagtactcttcctgtgtccngtggaattcagccggnttgggagctggag

SEQ ID NO: 271598 - DNA, 422 bp, Homo Sapiens
  misc_feature (13)..(13): n is a, c, g, or t
  misc_feature (66)..(66): n is a, c, g, or t
cagctgagggttnaaacttctgcacctgcacttgcacccacatcctgtctgagctctttgctgaanagcccgtctctggtttgtgaaagctccctggcaagggtggggggactcccagagccagacaagcaggatcccacagcacagcaagggcagtgcctcttccccaaacccaagggagccctggctgaactgtcactgacttgtatactcactctcctcccagagatgaacagcaatgctaccattggcccccaactctgctcaagactttggaagaagtgtgagggtcagaagggcaaggaaatggcacatccagggaccaagacccccagaagcagccctgaagcgtggtcacagtgccagacaaggcggtaaaaaacaaggatagctggggtcccatcactccagcttcagagtca

SEQ ID NO: 271599 - DNA, 526 bp, Homo Sapiens
  misc_feature (27)..(27): n is a, c, g, or t
  misc_feature (40)..(40): n is a, c, g, or t
  misc_feature (44)..(45): n is a, c, g, or t
  misc_feature (60)..(60): n is a, c, g, or t
  misc_feature (62)..(62): n is a, c, g, or t
  misc_feature (68)..(68): n is a, c, g, or t
  misc_feature (80)..(80): n is a, c, g, or t
  misc_feature (88)..(88): n is a, c, g, or t
  misc_feature (113)..(113): n is a, c, g, or t
  misc_feature (118)..(118): n is a, c, g, or t
  misc_feature (128)..(128): n is a, c, g, or t
  misc_feature (131)..(132): n is a, c, g, or t
  misc_feature (144)..(144): n is a, c, g, or t
  misc_feature (152)..(152): n is a, c, g, or t
  misc_feature (215)..(215): n is a, c, g, or t
aatgtgcctgttgtgtggtaaccccgnatgtgtgccgggnccannttagcaaaccacaantnacagtnccttaaggtgtnactttgtnaaggccagaaaatatgtgggcccanttttnagggtccccnganncacccgtggaanaatggaanagttttcctgttgcctttccagtccgttgccccttaccccatcccttgccctacccccggttnattgcctaaaatgggtaactgacaataaagagattagaagtgggtttataggaagcgaggtgggttctagatgcaaaactaataccctgtcccatgtgaaattgtttttgtgattttgtggcgttggggatgacagatgagacttgaggaatgcaaatgtgctaatttcccacttgatgtattggaaagtgtggagcatgtatacatcacctggttaatttcatttggcactattttcttccggtcagctcactgcatttgacagaacaaatactgagtctgcaaagattcgaggtaactttaaatttgcc

SEQ ID NO: 271600 - DNA, 463 bp, Homo Sapiens
  misc_feature (78)..(78): n is a, c, g, or t
  misc_feature (379)..(379): n is a, c, g, or t
  misc_feature (386)..(386): n is a, c, g, or t
  misc_feature (417)..(417): n is a, c, g, or t
  misc_feature (427)..(427): n is a, c, g, or t
  misc_feature (453)..(453): n is a, c, g, or t
ggcacgagaaagtgaggtttgcgtagaattagggaactgtaatgcaaataaaacagcaacagtgaacttaacagcccnggttaaactgtctatagtggtagacctataatacaacacataaataagcactgtagtatgtaacttgataaaataaagcaaatacacaaaactccatcaaacgcatgtaatcatctaccaactaataacctggggactatcaggcagcaaaaagtgtacttggctacctttggcccctgttggattcctactctgtgccacaaagtatgctctagaggagccaactacagacacccgtagtatcatgtgacacagtctttatcctaggcacagagaacagggttcaccttttgggaggggnagggttncacttaagtttgcaccagaggcacagttttnaggagaggtnggttcagcgggcgggagtttagcttntttttttagg

SEQ ID NO: 271601 - DNA, 517 bp, Homo Sapiens
  misc_feature (275)..(275): n is a, c, g, or t
  misc_feature (441)..(441): n is a, c, g, or t
  misc_feature (451)..(451): n is a, c, g, or t
  misc_feature (460)..(460): n is a, c, g, or t
  misc_feature (472)..(472): n is a, c, g, or t
  misc_feature (480)..(480): n is a, c, g, or t
  misc_feature (491)..(491): n is a, c, g, or t
  misc_feature (499)..(499): n is a, c, g, or t
gacaggagtgtcagtttcctgaatcagattccccggacttagcagacaacagtgcaggagctgtgagttgggtctcggctctgctgttaacctgtatcttgtatttgtcacttctggacctcatatcttttggaagtcagaacctaacaggaagtggtatttaggaaagtcagaatatcagctccaaacctgagcattccatcaaagaaacacagaaggggctggaatatggtgtccaatacctggggaaggttgaggagtaacagccctggggnagttattggggcagtattcctgtatatctcagggttaccttgggctccatgtggctgttaaaatgtgtggttcttgggagcaggtgttactgaggaagatggagggatggatattgagcttctgaggagggggcttaaggccagcttcctgccccagggattcttnctagggtttnaggggccanttactcactgtncttctctnctctaacccgnctattctnaggggccaacccggggga

SEQ ID NO: 271602 - DNA, 375 bp, Homo Sapiens
  misc_feature (308)..(308): n is a, c, g, or t
  misc_feature (333)..(333): n is a, c, g, or t
actccttgtgtcacatgtccagtaccaacacaaagtggccaggaaaattctaaaggatccacctcagaaaaagatggaatgcaccatactgtcaccaagcacagaggtataattacactctacaggcaccagaaagctgcctttgctatcacaagtaggcgaggtcctacccccaaaggcagtaaaagctcaaataggcagatcttcctggcaggaagtagtgggaaatattcttgttgaacttggatgagggcccaggaagccttacctgggtacaacgggaggagggagctggaattttgcttttngacaactattaggtaaaggcttttnggttggttgaaatgggccgttgaagtttggcccacattttct

SEQ ID NO: 271603 - DNA, 633 bp, Homo Sapiens
  misc_feature (520)..(578): n is a, c, g, or t
  misc_feature (587)..(587): n is a, c, g, or t
cctaaatgactgacactgaatagccatcctttcaggagagagtccatttcagacccacaggaagtatgaccttagtctcaagacacctttatcaaaatacaacagttctaatagctgcctaagacttattcagatgaatctttttgttatacaaccacataagcatatggagaaagagaatattttgggaagtacctgtttatgcaacatgttttagcctttcagatagttcctgtggtacacatttggcttgtacactcaaaagatggatgtgaataccactctatcagagtaagttcatgaagcagccctgagagagaataaactagaacccatggggcgtagcgtgaaggacagcctggattgttcctttctcttaataggcttgtaccaactggactgcattttctgtctagttttaggtgaagtagatctttcagaacctgtcctggcccaaacctgaaaatggtcctgaagtcacaatgtctccagaatctaggagtgcctctctgaagtgccnnnnnnnnnnnnnnnnnnnnnnnnnnnnnnnnnnnnnnnnnnnnnnnnnnnnnnnnnnncatgaaaanccttacaagatgccagcaccatgctcttggagttcccggcttccag

SEQ ID NO: 271604 - DNA, 400 bp, Homo Sapiens
  misc_feature (11)..(11): n is a, c, g, or t
  misc_feature (30)..(30): n is a, c, g, or t
  misc_feature (294)..(294): n is a, c, g, or t
ccagctccacnggaaccctctgccctcccngggtttaaagcgatccctcctgccctagcccaccccgagtagcctggggacctacaggcacgcaccacccacgtcccagctaattaacaaaagatatattccttatgggatttctgagtcaatatgtctggatgcttaattgagcaaaaaatctatacaatgcttttcattgtttacatactatgctaagcatatacaaaattctggacaaaaagaaaatagtcattcaacaaactcttatttaatgtactatgtgaaaaaaanagaactgaaaagcaggtgcattcgatgcaagccaaggtgatatataagaaaagtcacttttaagggaccaggtaataaattaatacattctttaaaaccccaggac

SEQ ID NO: 271605 - DNA, 521 bp, Homo Sapiens
  misc_feature (77)..(77): n is a, c, g, or t
  misc_feature (155)..(155): n is a, c, g, or t
  misc_feature (224)..(224): n is a, c, g, or t
  misc_feature (252)..(252): n is a, c, g, or t
ccagccttaccccctagaggtaggggttcccaaccatatgaattttggagggggaccagaaacattccagccccccnagcaggatgagaaaaaagaaagggaaaggtaccaaccaaaggaaccatccaaccccataagggaaacacccatgaccntccggatatttaaatatccatgggatccacagattggtagggagtccgagaaacagaataaaaagacanaggccccaggccccagtgagcttttganggcttgaggctccctcatgcccttgctctccccactgaccctcaggctcagcactggctttcttctccctggtgatattttcccatttatcttttggtgtaaacattttagagatgagagaagtagggagcttatcattatttagtctgatcagacaatatcttcacttttaagttatgttcagaatttcattgtcctgttctttttaagaatcatatgagattatttttgtgtatgtgaataaactatgaagcattttcttacaaaaa

SEQ ID NO: 271606 - DNA, 417 bp, Homo Sapiens
ggatgagaaaaagaaagggaaagtacaacaaagaacatcaaacccataagggaacaccccatgacctcctgatatttaaatatccatgggatcacagattggtagggagtcgagaaacagaataaaaagacaaggcccaggcccagtgagcttttgatgcttgaggctcctcatgcccttgctctccccactgaccctcaggctcagcactggctttcttctccctggtgatattttccatttatcttttggtgtaaacattttagagatgagagaagtagggagcttatcattatttagtctgatcagacaatatcttcacttttaagttatgttcagaatttcattgtcctgttctttttaagaatcatatgagattatttttgtgtatgtgaataaactatgaagcattttctt

SEQ ID NO: 271607 - DNA, 441 bp, Homo Sapiens
  misc_feature (397)..(397): n is a, c, g, or t
tgtttaaaaaatccctcaaatataacaatgaagcatgcttttctaacacaaagagtaccaaaatgaatgtgctactttctgttaaagttttatttccagagcttgcccaagcaagaatctacttgccctgtaaaattctgcttatacagaattaaaactcctttattatcccacaaatacattatatatttccatagctttctttagcccatacacttcttcttaagtgttcaactttcaaatctctgataaaatgaaactcatcatgaagaccagtcaaaatgctaaaggaaaccttccttaatctactttgcaattactgttcctttcagttactccctacctgcggcctgccatggaatttttgtttttgtgttggggctattctggactaggngggctctacaatgagggatgcgtatctggaataccgagagcttt

SEQ ID NO: 271608 - DNA, 462 bp, Homo Sapiens
  misc_feature (12)..(12): n is a, c, g, or t
  misc_feature (28)..(28): n is a, c, g, or t
  misc_feature (40)..(40): n is a, c, g, or t
  misc_feature (52)..(52): n is a, c, g, or t
  misc_feature (70)..(70): n is a, c, g, or t
  misc_feature (92)..(92): n is a, c, g, or t
  misc_feature (132)..(132): n is a, c, g, or t
  misc_feature (233)..(233): n is a, c, g, or t
  misc_feature (294)..(294): n is a, c, g, or t
acccaataggtncccattaaaagaattnccccgaccctanaaaaggaataangggaaatgaggaaaaaanccatccccccagcccttaaccngggggttcccaggtgaaggcccccatcaaaaattccaagnccccagtttaaattaccaatatccctattggtgggtagccaccttgaaaaacaaaatccaaagtagttgaagtcaataaaacaatcccctgccttccaacntcaggtttggggagcaatgtgtgtgcatgtaaatgtgttgttccctttgctggggggaaanttttacagtgttgggtgtattttatttttatagaagttatgttctctgtgttttatggctttgtttgtttgttttgtcagtttaataccagctttattattaagaaagtatttttcttattcttgtaaccactttgtaaaatacatcagaaattttctgtgttttcct

SEQ ID NO: 271609 - DNA, 835 bp, Homo Sapiens
  misc_feature (20)..(20): n is a, c, g, or t
  misc_feature (51)..(51): n is a, c, g, or t
  misc_feature (56)..(56): n is a, c, g, or t
  misc_feature (114)..(114): n is a, c, g, or t
  misc_feature (138)..(138): n is a, c, g, or t
tgccatcggggggcccccanaatcagtccctaggctgccccaaagattaanaaatnaataaaaacataaaaaaattaaagaggggccccaagaggaaagacattcctttcctgncaagggaaaatttccttttaaaantcctgaaactgcctacctacaccacaagtgaaaagtcaaccccctatgtaaaactggtgtccctctctcctagcccctctccccttactggccccacttcctctctccgtagagagcctgaaaaactgccccaatgccacggtaaaggcgaggaagtcttggctggcgttgctgactcacagtcgccatccatctggacacaaagagagacctgtgggagtcgtagagggtactgttagccccggtccatgcagggggttcagccgagcccaagactcaaagctgctttcctttcaggatttgtagtaacgtaaggtgataatggccaaaagtggttctctctcattaaaccaaccagtaaaagcgtatcctatttttttgcacaaggtgtttcattttcgtttttatgggaaaccaagggaaaagcacattgcgatccattcagtgtttaactgtcgtggctcattttctgtgtcgttagcacttgtgtgacaaaagagctcagatccgacttctcctatgtgtcacttattccaagaacccaactatgcccttaggtagaaagatttgactcgtgtgtctactagccaacaggcagagcagggttgaaaaaaatatcagctccaaagggcccatgtgtctacatcatcatttactgtcatgcaccacatttgtgtgcagataccaaaagaggagg

SEQ ID NO: 271610 - DNA, 450 bp, Homo Sapiens
  misc_feature (20)..(20): n is a, c, g, or t
ccctagtgcctatgggtttnccctcccattggccccatgatttccaggggaagcctggcctgaaggcccggctgagggcccacaccctgtgcccagtggggccttcccccctgggctgcagcaccttgtaaacccacacacacagccctctctcccccggacataccgtagcacattggcattccagtattggtggccctggcatggtaggtacctaccccaatgaagagtgtactatatattttcattactataggccatacttatacagacgtgtatatatatttatataagatctacctatcttaggatggaaccttggggaaaaataaaattgaggggaagtaaaaagtatgtaacacttccagttgtgagccaagattgtaaccagagagcagccaggagcttcctgtcagtaaccatgttttcaataaatactctttcatgtac

SEQ ID NO: 271611 - DNA, 467 bp, Homo Sapiens
gaccccaggggtggtggcatctgcccccaccaaaccacagagtcctgctcagaatgccacctcgtcccaagacagttctcaggatacgctgacagaacaaataactctggagaaccaggtgcatcagcgcattgcggagctgaggaaagcaggtctgtggtcccagaggcgtctgccaaagctgcaggaggccccacgccccaagtcccactgggactatctgctggaggagatgcagtggatggccacagactttgcccaggagaggaggtggaaggtggctgctgcgaagaagctcgttagaactgtggtgcgccatcacgaggagaagcagctccgtgaagaaagggggaagaaggaagagcagagcagactgaggcggatagccgcctccacggcccgggagatagagtgcctttggtcgaatattgaacaggttgtggaaataaaactacgagtagaattag

SEQ ID NO: 271612 - DNA, 412 bp, Homo Sapiens
  misc_feature (70)..(70): n is a, c, g, or t
  misc_feature (144)..(144): n is a, c, g, or t
gtcttcctcaagcttgcgcgccccgaagccgacctgcgctacttcaccaccgagcgcttcctgcccatgntgcgatgcgcctggacgaccccagcggctccaactacgtcaccgccatgcaccgggaagtgttcggcgacgttngcacaaaggccgaggctggggccgaggctggggcgggccagggccctggggcagaggacgaggccgggccagtgcggtggggaccctgagctcggcgatctccggccgccccgcagtaaaggcttcctcaggccgctgtctcccgcgcccttctttgtcccctgggtctgtgtggtccctggggatggggcggcggtagcagctgtgggtggctaattaagatagatcgcgttagccagttttaccagcgcagctaggcgcgatgtgt

SEQ ID NO: 271613 - DNA, 494 bp, Homo Sapiens
  misc_feature (120)..(120): n is a, c, g, or t
ttgcaagcaggacctatcctccacttgtcctgggccttgaccgtggcctcaaagcatgaaaaagagcaactggcatttagaccccagcctacacatgggcctcaaacctaatgttggcancccatcagcccatgtaacctaggggtaatacctcaaaatatttaacaaatgacatggttccaggaacctaactagtcaattaccagctttggagcacagtaaaaaagcccctgctgtgcctgatgttatccttttggtttttggatcatggggtagaggtggaggtgggggatcagggaagcagctaattctcaaccaacacacaatatctgaacattttaacagctggtacaagccacacctgtgtggaccaggtagatatcagtaatggatacaaccagattaaagtaacttcagtgctctgagcctcagtttcctcatctgtgaaatggagttgaaggtagtagccactgctggggactttgaagggacac

SEQ ID NO: 271614 - DNA, 607 bp, Homo Sapiens
  misc_feature (309)..(309): n is a, c, g, or t
  misc_feature (401)..(401): n is a, c, g, or t
tgagatggagtctcactctgtttcaaaaaatagagaaaagaaaaagtcttgagtgctggacaagcctgtgactcaggactcggaatgataaacaagagagaaatacactgagtttctatgatagtcactaactcggggctgccggcactcgtgttcccctgcagaggaaaggtctgcgtgccctaagagagagctgctggcgtgcagagagaagcagagatgccgacgacggggaggaaacacactggcggtggtgaggctccttccagcagccacagccctggttcctctcagtctgtgaccctcccnacatccttccccatctatgagagcctgtaaactccttttgcttaaccttgttttagttaaggttttaaacaattgccaccagtgtgccctanaccaccccagtggcttgagtgtttctccgcttcttttgcctaggatgctgcggagatggacaggacaggagactaaggaggtgagaaccctgggcccacaccatcacttaagggcccttcctgaggtctgcttcccacatgaagtcctcccagggccctgaatccagccatccacctccttgttggacataggctccattagagag

SEQ ID NO: 271615 - DNA, 592 bp, Homo Sapiens
gacccaccttagcaagttcatggagcagctgttcttccaaaagcaagttgggactggattttgcccatataatcacacagttaaggacagctctggcatttatatatgaatctcagaattttaggtacaccatttcttttcccgtaaataaaatttctttctgcttttaagtgtcttttcctgattctacatagaaaatttgatgaatatttacagccataaaaaagaatgaaatcatgtcctttgcagtaacatggatgcacctggagaccattattttaagcgaactaatacaggaacagaaaaccaaaaagcacacgttctcacttatacgtggtagctaaacattgactacataaagatgggaacgatagacagtggggaatgcttgagagagagggtgggggaggcatggattggaagactaactgttgggtactgtgcttactaccttggtgatgggatccttcgtacaccaagcctcagcaacacacaacctacccgtgtaacaaacctgcacatatatctcctgaacctaagattaaagtagaaaagaagaaaaatgttaaaaacatttgcttaagtaagaaca

SEQ ID NO: 271616 - DNA, 409 bp, Homo Sapiens
aagtactgggattacaggcatgtcccaccatgcccagactaatatttacttttaatcagactaagatagggttactacttgagttgctatggctccagctgaaagaaagcccgtgcagtcatatcacgcgtaaacatttgctttatgctaaaaatatggtggacctggcattacagctattacaaatctcctaagatgtctcgggtagtgtattagttacttttcatactgctatgaagaaatactgggaaactgggtaatttataaagaaaaagaggtttaatgtactcacagttccacaaggctgggagaggcctcagaatcatggtgggaaggcaaaggaaggagcaaaaaggtatgtcttccctggcagcaggcaagagagcacgtgcaggggaaactgcccttt

SEQ ID NO: 271617 - DNA, 304 bp, Homo Sapiens
  misc_feature (52)..(53): n is a, c, g, or t
  misc_feature (61)..(61): n is a, c, g, or t
taaaataattttctctaaggctttttgagaaagaaatacaaagaaagaagtnnaaagcaantgggtgggattgcaagggctgatggatttacagattttccttacctgtataagaaaaattttatgaattttgtggagtttgtgagttctagaatggttttagagatatacattttgattattttaaagcatcaactcaaaactaggaggctgggcacaatagcccatgcctgtaatctcagcattttgggggctgaaggtggggggattgcttgagaccagcctgagtaacgtagtgagaccc

SEQ ID NO: 271618 - DNA, 530 bp, Homo Sapiens
  misc_feature (186)..(186): n is a, c, g, or t
acaagagaacagacgatgaggcccagcatttttagtgaaactgcttctaagctttcttttgccaaagcccccttaccacccctcttaatctcccccaccaaccctgacctcttgtttcagaagccctggaaaacccccccaagcttgcagccccctgccaactactgctgcccagaagggtggcanagtcccctggacttcaggcagaatctatcaaatcacagaaccagagggtgtctggaagtcacctcatctagtcctctgttcacatccagccctgctcacgaggacaggggcagacaggttcagggtagtgggcagcagaaggatgaagtgcccatctcccttcagctgccctttctcctttcttacttcttacacaatttatattggaagtcctcactcagatctgactttgcagacatcatgcataatgagaattggccagaatcaggagtcctatggtcaatagactgacccagtcctagattctccaaaaaataaaacgagatttttggctaggcctttca

SEQ ID NO: 271619 - DNA, 297 bp, Homo Sapiens
ttagcctaaggtgattggaacctgcctacaaattagttaagcctgacgttgatcattggacattcatccccgtttgtcaggcttaaattccaagtgctttggatgctgaatcaaattactgtggtagaaagaggtttaattttttcccctaagaaaaatccttatctatggataagtagaaaccattctctgacaaccttgtaataattttgacagggaatgtaactgctgtgttctgcttttggttaaaggctaaagtacatattaggaaaatttgaggctgggcgcagtggctca

SEQ ID NO: 271620 - DNA, 744 bp, Homo Sapiens
cataagtagttactaaattactttacctaattatgtaataaatggaatcattaggtatttcctttgccgtagggtcctgtgaacaaattactaagatactaagggttctgtgaatgagtttaagatcctctaactgtagatatgatcagtgtttatctatattatcaattttttttaagaacttgatttttagtggatgtttatactcttatatgaatatgcaatgctttactgaactctctctgcttgttgaacatttaagtttttcctaatattttgataatatgtgtaatactaatagctgttgttgtgtctaaatcttggtccttaatatctaattctttccttaaaatagcgtcttataagttaatttgctgtgtcaaagggtattaagttgtttaaggctcttagtatttataacctaattttttcatatatagttttctccactactactaacaatatataaaaagtgcccctcatctcaacctcagtggctgtgaatgttctttatcacaatttgacagttgaaatggtttctgctttagcatgatagtaattagagctgtttctctatgatttttcctacatctgagctaaagatcttaccagtcttacaatttacatctttcttagctcctaggacctgtagttcatggttgaggtaccacccctcttccaacctcactagtctttacccattttatagttggtaattatttttgacttactaaaaagcagcta

SEQ ID NO: 271621 - DNA, 171 bp, Homo Sapiens
ttcgccagttcttttctctgccctattgaaccatatatgccagagaaagagcccccaaactgtgttttttaaatgctgcaggtaatcattttcatctggaagttctgggaaaattgttctaagccaacctgtgatctcagcaaataaaacactaaacaaataccaaatata

SEQ ID NO: 271622 - DNA, 378 bp, Homo Sapiens
  misc_feature (13)..(13): n is a, c, g, or t
tcccccacagagnaaataaagttacccccaaatagcagcctccttaacttctttgattcaaaactatccctgaaatattgccatggtttaaaaaggcacaactaggaattgttgaaaaactttgttccagcacacataagattgcccatttcctttctgtacacctattctttctgaaggacacagtaaagagcaccaagttgtgctccacttgcagtggcccctcgccactctgagaatgcctggaatggcaaagttcaagtgagtgacctctcattacccgtggtaggggcagtggtgtttaccgaatttagcctgtgaattaataacatcagcttcctcaattgaggaaaacaaaacaaaacaattcatacttta

SEQ ID NO: 271623 - DNA, 393 bp, Homo Sapiens
  misc_feature (55)..(55): n is a, c, g, or t
  misc_feature (382)..(382): n is a, c, g, or t
ggagacacccctggcctggaggtaccatctagccctctgcggaaagccaagcgangctcgcctctgctcctccagcagttcggacacatcttcccgaagcttctttgatcccacctctcagcatagagactggtgcccttgggtgaatatcacacttggcaaagaaagcagggagaatggtgggaactgaaccagatgccagcgccccagcagagccagggctgggaaagcagttgctgaccatcctcttgggcgcacaaacagtctaggccagccagctggaaacgggactccatgagtcttcttcttgaggaaattcaagggaaagtatttccgattattttcgggcaatgggggatctctgttgcttcatgcttaaggntacttccagcg

SEQ ID NO: 271624 - DNA, 466 bp, Homo Sapiens
  misc_feature (27)..(27): n is a, c, g, or t
  misc_feature (64)..(64): n is a, c, g, or t
  misc_feature (80)..(80): n is a, c, g, or t
  misc_feature (358)..(411): n is a, c, g, or t
  misc_feature (436)..(436): n is a, c, g, or t
  misc_feature (451)..(451): n is a, c, g, or t
ccttagttacattccaaatattttatnaatagtataccagataagttagaattgaaagaattanaaaaagcctaattacnaaatagaaaaccatatccctaagcaaggcttatagcctgagatagaataaagttgcaagacagaaccatcccatttttggataaggtggtcagaatgagagagaaaacaataacaaagtcagatgtcttcttaactgtgaaaaatatatgtaaaaaatgagcattcataaacttagatttaaggtatggttagatcaggcttattctccttcaggaaaagcaaagtacagatatgcctattagtttaagaattaagatttttaaaaaggcaatgggannnnnnnnnnnnnnnnnnnnnnnnnnnnnnnnnnnnnnnnnnnnnnnnnnnnnngcaggtaggactactttgtgccccnggggtttgagggccngcctggggggaacct

SEQ ID NO: 271625 - DNA, 375 bp, Homo Sapiens
  misc_feature (11)..(11): n is a, c, g, or t
  misc_feature (24)..(24): n is a, c, g, or t
  misc_feature (44)..(44): n is a, c, g, or t
gccatgaatgnaccatatcaaatnaaccaatggaaatccctttnaaatgaaaggaagctctgcctgaaaacttaacagggttcccaatgcagagtattggggcagtatacatgctgctgtaaatggacttcaaagcctctctgcatcactctgggtgtgaataaagtcaactaatgaacttgacaaccctggacaaaagaagctgcaaaatctgcatgcatcccagtctaggtgaggccagtgggatctccatgggccacagtgaagaaatatcttttacctgtgataatatcttcaatggcaccatcttttccctcatatacatgtctgttatctttaacttgtcgtcttcttaattctgcaattaactcttgc

SEQ ID NO: 271626 - DNA, 566 bp, Homo Sapiens
  misc_feature (88)..(88): n is a, c, g, or t
  misc_feature (330)..(330): n is a, c, g, or t
  misc_feature (346)..(346): n is a, c, g, or t
  misc_feature (354)..(354): n is a, c, g, or t
  misc_feature (403)..(403): n is a, c, g, or t
  misc_feature (441)..(441): n is a, c, g, or t
  misc_feature (545)..(545): n is a, c, g, or t
gacttcacctttataaatggagatcgttaagcctggagccagctccatcaggtcacggactcgtggccttgggtagaaggcccagtcngcgctgctgtgatttcagcactcacccttgttggaaatgttgctttttcttcatgcacatggctgttttttcaaaagtgctgcagaaatgtggccaagacagcagaaaaggtgtgagcatccctgggctacaaacgtatttgaaaccaaaagggaaaagaaaacgcaggcagccagcagttgctacagaaaccgtgattttcaaatgcatctgcaatcacccggcaacctcatgggaagccntcggtttggttacaanggatcgangtggtcggaaagacgatttgaccacttttgtattcgtatgattcattcnggagcagaagtttaaaactccatgaaacacttgccccngtggtgggcacggtcggaatggggcttcactgggggcttttgaaagcaaaggctggtttaacaaaagttctgaaaagacagcacctctggggggtgtgcaaagnccccacctccacgtggttcac

SEQ ID NO: 271627 - DNA, 410 bp, Homo Sapiens
  misc_feature (339)..(339): n is a, c, g, or t
  misc_feature (362)..(362): n is a, c, g, or t
  misc_feature (390)..(390): n is a, c, g, or t
caggagcaggcagcctaatcgacatagacagcgtccctacctacaagtggaagcggcaggtgactcagcggaaccctgtggacagaaaaagcgcaagatgtccctgttgtttgaccacctggagcccatggagctggcggacattctcacctacttggagtatcgctccttctgcaagatcctgtttcaggactatcacagtttcgtgactcatgggctgcactgtgggacaaccccgtcctgggagcggtttcatcttccctctttcaacagcgtcttcacagtggggtgcagcttcatggatccttcaggcaaaccccacagccccgcaggcgggcnctggggttcattcacacattttntttccacgttgggccggaggaagcttgnttaacagttttgcaggaact

SEQ ID NO: 271628 - DNA, 275 bp, Homo Sapiens
atagcacagattcctttgccccttttatctccttatctggatatgataagtggttatgagggtctcactaactattttgtgtttaccttttatatgtgtaaaactttgcagtagcatttaaagtgtaatttatttttctatcaagtgcactattcatttagtgtgttccagttttatatgacttgtattagaaacactgcactgagttgtttgtacactgaaatgagaactctagatgtaactctattcaaataaaccttcgtgagacattcaaa

SEQ ID NO: 271629 - DNA, 575 bp, Homo Sapiens
  misc_feature (36)..(36): n is a, c, g, or t
  misc_feature (45)..(45): n is a, c, g, or t
  misc_feature (56)..(56): n is a, c, g, or t
  misc_feature (71)..(71): n is a, c, g, or t
  misc_feature (97)..(97): n is a, c, g, or t
  misc_feature (151)..(189): n is a, c, g, or t
  misc_feature (193)..(193): n is a, c, g, or t
  misc_feature (204)..(204): n is a, c, g, or t
  misc_feature (287)..(287): n is a, c, g, or t
  misc_feature (434)..(434): n is a, c, g, or t
  misc_feature (444)..(444): n is a, c, g, or t
tgcccccaaagaaaacccctagctgcccctcaaaanccccccccntcaccagtaancgggaccaggaaggnaacccccagtattgagggaatttgtnccccagaaaccctcgaaagaccccccctagcccctacagtccccaaccatggannnnnnnnnnnnnnnnnnnnnnnnnnnnnnnnnnnnnnntaanaccagtcctantttgttttggtggccaccataagttttaaaatgtttttacccctgtaaaaagtttccttcctgtgtaccttcccaattttaancgggtaccttttaataatgaactagaccctagaggttgggcgggtaactttcttggacaagataaaccctggggagctgtagagtttaatggggacataccaactctgagactttcgcagacacaaaattgtctaacacttttaaantctttttaantctttaaggagttttctttttattttcagcaagtagaatatgtgctctttggcactgttcttactattctttcttctttggcattgtttgtacttgcaatatcatagtattcagtaagtaaagaagatgga

SEQ ID NO: 271630 - DNA, 517 bp, Homo Sapiens
ttcctaaaaagactgccaggaaattcccccttaagggaaggaagaagcaaagccagttgtggccccccagcttctggaaaaatggcaagaaagaagagggttttcctcattgaaatgggggtgggggcctccgtgtgtccccgggaaacccccatcaagtccccttcatttccttgaagactcaactcccgggaggagagggtcctcaagagttgtcccctggaaggagggcgggggcagtctgcatctatttcaggttgtggctcttggttctaggactcttacttctctggctaagggctcagcttcttgggacttcaaccatcttctttctgaaagaccaaatctaatgtaaccagcaacgtgaggactgccaagtatggctttgtccctatgactcagaggagggtttgtcgggcaaattcaggtggatgaagtatgtgtgtgcgtgtgcatgggagtgtgcgtggactgggatatcatctctacagcctgcaaataaaccagacaaacttaa

SEQ ID NO: 271631 - DNA, 511 bp, Homo Sapiens
  misc_feature (313)..(313): n is a, c, g, or t
  misc_feature (359)..(359): n is a, c, g, or t
  misc_feature (434)..(434): n is a, c, g, or t
  misc_feature (472)..(472): n is a, c, g, or t
  misc_feature (478)..(478): n is a, c, g, or t
ttcctgataaaatgtaagaaattgctttagataaacaagaagattagacctgctaagtttaatagagcaaatacactgaaaggttagaaaatagattgtagatttgaagcctaagccttccaagaaatgccacacctgagaaatttacatttcggttcagcctttgtccctgtgctctgaaatgtgctgatttattatgcattagttacttgtacctggggagcaggccgactggtgataagagcctctagaacagtgcagctggtggggttaggggccatggacgatcactgtgagaatgcccaaggagaanttccccttcaaatcccattttcccagttacattgtcagctctactnagggaccagagaaacctgcatctctgggaaggcatgctgaggttgtctcctgcttggatttaactgttttctttnatcctttataacctcaaggacctttatgtccccaaagntgtctntgggccaccatttttggccaacaggacccattt

SEQ ID NO: 271632 - DNA, 319 bp, Homo Sapiens
  misc_feature (16)..(16): n is a, c, g, or t
  misc_feature (115)..(115): n is a, c, g, or t
attaaccttggatccnattgaaattcaaaaggtatcggtcaagattttcatttccccaagagtggaagcgcgccccccattgcccatgttttatggccttgtttgagcctctaanaagtgcttgtttggcagcgatattcagaatcacccaaaccatggggatgttctgctaggtaattagccccaggccagtggactcaatttttttataacattttcagaaaaatatgtgacccaaggaggggacttggctgttcagctgcagcctgcatgggaaagaactgttaaaaccaacaaagccaggcacagtggctcacac

SEQ ID NO: 271633 - DNA, 252 bp, Homo Sapiens
ttgagttatgaattactgtgttgctctcttcactttaggaagctttatacttagtatacatgtactaatatgtaaattatggttgattacagcatttgtaattattcctataatttacttaaaagctgcgattcaggcctttggtcaggcacttcttacactctgaactactttctgtccagtgtttatttgctaagaaaaatatcaggcctcacagccctgtgtttcatctgtaaagcccttttgttattt

SEQ ID NO: 271634 - DNA, 298 bp, Homo Sapiens
  misc_feature (220)..(220): n is a, c, g, or t
gcactcaacctgtagtaaaatgtaaaatggctcttattcagcataaatagaggcatgcccccatcagggtccatttcagagttcatcaagattctgagataaaaaagcatgggtacagtgaaaacaacaaaattgactttcctgtttcaggaagcccaaaagtcagacgggtttgtatcctaattggaataaaaggaaacttgaaggtacggtaaggttnaaaaccttgagggtggtatccccaaaccctggggggaggcgtttgaagggaggcctttttgaggatcctggggggtgc

SEQ ID NO: 271635 - DNA, 432 bp, Homo Sapiens
  misc_feature (24)..(24): n is a, c, g, or t
  misc_feature (224)..(224): n is a, c, g, or t
  misc_feature (256)..(256): n is a, c, g, or t
tgcccaaggtggggaaccaaccanagcttgcctggcccctgtggaaaggaaaccaccaaggtggaagtccagaacaggtgtgccgttccaaaattccccatcccctgtccgccccactagccagtgttaaacactgaacccagtccatttaacttccataagaggagtatctggccttcatctggaaaacagggacaatagcatataatgtgccctggtacagncaggtacccgatggttccctccctcctttccnccttgtaatgcaaatattactcatttgggtggagacgtacattgaaggcctgagagagcagctacatctgaggtcgtctgtgagttgaagagaatgtggggaagttcttagggcacaatgtcatcactgggtcatagcagtctctgtgctgggcagaaaatgggccctgtgccgaa

SEQ ID NO: 271636 - DNA, 511 bp, Homo Sapiens
  misc_feature (19)..(19): n is a, c, g, or t
  misc_feature (30)..(30): n is a, c, g, or t
  misc_feature (41)..(41): n is a, c, g, or t
  misc_feature (69)..(69): n is a, c, g, or t
  misc_feature (251)..(251): n is a, c, g, or t
ccaacttcctggggtctgnaaggccaaagnaaacaaactgnaaggggctgcaattcaggttaagggaanatttctctctgaggaaggaaaaggtattaatgtgggggaagagcagttagaatctagtgacctcaccacagttcttagcccaggcctcagctgggttttccctgcagcgttcctggagacttaagagggcaggacttggccaggaggtctttgacttgctgggatgagactgagcgcttgcnagggagaaatttccgtctgctctgatatctgtatgggccagagagatctggtggctctaaagaccagagatgttagagccaacctcagaagcagaaacgtcttggcacctatatgaagcgtggagtgagcccctcatcaaaaaagagacaaaagaaaaacctcaggcttgtactcagatctaagatacaggtagtcacttcaaggctctcaacacgcccaacacacctgtcctctgcaggcagcctttcctgggccagct

SEQ ID NO: 271637 - DNA, 431 bp, Homo Sapiens
  misc_feature (340)..(340): n is a, c, g, or t
cccattggtattactcactgactaatgtcggtttggcttcctattcttaacgttaccattattacctcagtgtgggatgtacagacccatgggcaggcacagtactgctagcctgcgctccgtttcttcaaaacaccgttagcgatctgatcatcctccactttagtgccctagagttccataagagaaggtgacaataaaaactggagcattgaaatgagcttactatgtaatcataactgtccctgagcattggtttaatattataaagctttgggaaatatgttatcccattggcactcagagacattacaaaggaacacttttttattgttgttgnctgttattactactattgagatgggaaatttgataacataagaagttaaaataatgcgtgcatcttataaattttaaaaccgatctactgg

SEQ ID NO: 271638 - DNA, 537 bp, Homo Sapiens
  misc_feature (517)..(517): n is a, c, g, or t
  misc_feature (521)..(521): n is a, c, g, or t
ttctgtgaataaataaaagtttatcattccgtacaaacgcactcattttccacaacagtttttacacgagccgcggtggcccggtggtggcacgtggggagcggccccgtggcggcgttctcgcgggcggcgtcacagcggctccaggtcctcatccccgcacgcatactcgtacaggtccacggcgcccagcggtgagggcgcctcgaagaagggcctctgggccagcggggagcgcagcgcactcagcttctgctccacggggctgagctcggcctcgaacccgtcctcccagggctctcccgcggtctcctcggccaccaggatgtcgtactcctcggccgcgtacttctcccagtccgagagctcggggccgccgctgtcaccgtccctgagcagggagatctgctctttctgctcgtggtcgaggtacttctcgatgttgaagaaggtgtcgaagaagacgttggccagcttgcagcgcttcaggtcctgcagcgtgatcttcccttcagtnctcngcttgaccaggtccag

SEQ ID NO: 271639 - DNA, 433 bp, Homo Sapiens
  misc_feature (27)..(27): n is a, c, g, or t
  misc_feature (52)..(52): n is a, c, g, or t
ttgcccaaagcccaccacacgtgtggnctgtggatgacccattgtcctgcanaatgacgaggaaggaacagaatgtggtttggggcctcagggtggccctcccccactgggagggaaaggcgggagggagcccttgcccccgggtttgaacacagcctgtgctcacagcctctccctctcatcctgcatttcctcagaaatgccctccctgccccagtggtgactttcccctcgtcactcctatggagttcctaccctggagcccagccatgtgtggaactgtgaagtttactcctctgtaaagatggtttaaagaaagtcagcttctgaaatgtaacaatgctaacccttgctggaaccctgtaagaaatagccctgctgatagttttctaggtttatcatgtttgatttttacactgaaaaataaaaaaat

SEQ ID NO: 271640 - DNA, 413 bp, Homo Sapiens
aggaaaccaaattactgtgggttgcaaagaattagcaggtcatttacaaagcagacatcccttcacccagactgtggttttgcatgctcaggttctcagtctatgagctttggtgcaggatcattttggctactggaaaaaccatagcttattttaaatttctggttgccaaagccaccacacgtgtggtctgtgggatgaccattgtctgcagaatgacgagggaaggaacagaatgtgggtttgggggctcagggtggccttcccactgggaggggaaggcggggaggggagcccttgccctggggtttttgacacagcctgtgcttcacagcctcttcctcttcatctggcattttcttcaggaaatgcccttccctggcccagtgggtggacttttccctcgttcattc

SEQ ID NO: 271641 - DNA, 543 bp, Homo Sapiens
  misc_feature (20)..(20): n is a, c, g, or t
  misc_feature (351)..(351): n is a, c, g, or t
  misc_feature (390)..(390): n is a, c, g, or t
  misc_feature (475)..(475): n is a, c, g, or t
tagggctcggcgtggtagcngtacctacattcccagcccttccttgcccctgacatttggactcttcccttgggccgaccactctgttctcattctccttcccaccaacatccatccgtccttctcagacaaaccactcactgggtaccccacctcctctctcatatgcccaacacgaccactgcctccctgccccccaaacctgcacccaaacagacacatcaacgcaccccactcacagacaccccttaccccacccccactgtacagagaccaagaacagaaaatgtttgtaaataatggaaccttattttttattattggccaatcccctaagatattgtattttanaaatctccctcttcccttcgcccctcccttgttttatantttatgaagttagtgcgggctttgctgctccctggcccaggaaagagggactacctgaccctcacctggcacccccctgctgctnccaagccgctgggcctttttaattgccaaactgctctcttcatcagctcagcacatgctttaagaaag

SEQ ID NO: 271642 - DNA, 486 bp, Homo Sapiens
aaaaaaaggaatctgcccaacagctgcctctcccttgggggaaaaaaagagtaaaactgacaaattcttattagcaaaaattaaacaagtgatgagatagtagtatagggatatattacttaaagatagaaaaaataaagatcactgaaatcacattttattggaaaaaaataaaatcagatgacaatatattttatatccacaaaatctggagattagcagcaaaaaatagcatatacatcataaatgaactgtgattcttatacgaatttgattccctgtcccctctgaagatctgataaagcagtggttcctaacctttttggcaccaggggaccagtctcatggaagacaatttttccacagcaggtaggggaaggggaaaggtgatcgtttcaggataaaaattatcccaccatcaggcattagattctcataaggaataaggaacgcacaacctagatcccttgcatgcgcagttcacaa

SEQ ID NO: 271643 - DNA, 506 bp, Homo Sapiens
  misc_feature (18)..(18): n is a, c, g, or t
  misc_feature (34)..(34): n is a, c, g, or t
  misc_feature (63)..(63): n is a, c, g, or t
aaccctagttccagggtncctcaggcaggcaagncccgccttcaacctagagcagacccccanaaaatacctcaagtaccgggaaaggcaagcatgtgtgtttacctgtggattgggtccccctgaaggcctccctttgggtgagaaacatgtgaaccccaggcacccctggtttgtttgggagcattgctgccccagaagcttcctatgggataggtggtgcttgggattgatgtgttgtggccatgcagccctccctgaggattgacttctgcactaatccagtgaaggaggctgtgtcaaaaaaagggctcaaaagccctcttttcagaggcaatgattcctgtcagtatgaggtcccttagttactaaaaagggacatgatttaactccagtttgatgaacctcctccgagtttacctttattgtcttcaaatcttttaaattcttcctttttgtgagatttgtgggttttgtgccttataaatggaaaaatatgaacatta

SEQ ID NO: 271644 - DNA, 376 bp, Homo Sapiens
  misc_feature (15)..(15): n is a, c, g, or t
  misc_feature (21)..(21): n is a, c, g, or t
  misc_feature (57)..(57): n is a, c, g, or t
gttggcttccccccnagagcnccccagggccatggttaattggccctctttccctgnacgcttccctcatttggcaaaacaatgtgaattcctgttccttgccccttataattaaaggaaaaatgaggaggatcaagagtggttgcttcagggaccttcccacacggctaaggccacctctatttttccagactcccaggtatattttaaaatgaagacatgtcaaaataggtttctgttgtagttaaaatgtttacacctattagcaattatatttgtatgagagttgaaggctcttccaacactgtcagtgtacttctgtgacagtatgtatctaaactcatttggaaataaacaataattgtctaattttggc

SEQ ID NO: 271645 - DNA, 486 bp, Homo Sapiens
gcagtcagctgctgtgccccagtgccttactggtcctttgtagatttgccttaatgatttgtacaaatgactgggaggcggggatgctgcctgtgtcctggtgaaccttaatgaaggggccgtcttaggcacagtgcaaaacaagcatttgtcctgtactgttagagccaaaattgtgatgagcaatactgataattgtccagtttatgtcatctttcccagattttaaaatctgttctagatattcttagcttgaaccacttttgattgtgaaatgtattaggtgttgtcccattattactgtaaaatgaagttttgaatcttcttgttaataaactgtggatttcccctctcaatttcttaaacaacaacaaaaaaatgcttgaagattgtctttgagtgtaagatctgccttttcagaaagggagtgttagtttgtaatgttaaaaaataaagacctcattcaataaaagttgaagtcatcaa

SEQ ID NO: 271646 - DNA, 470 bp, Homo Sapiens
actgctgttactcccaagtaaattccctctaaaaaataaaaatttttaaagctgtaatttaagctctctgctgcctcatgacttcaattccatcagagttacgcattgtttcctctgtacatctttgctctgcttccattgctaattccctagtaaagtgttgtatattcaaagttccaaagaaacagaatatccaagacatcaccaatcatccaaaacacagtgtaggaggccacagttaagagaagcaagaccattaggctctttttataggctcgaggaacaacagggatgctttgggtcctgttatcaggcagggacggtttttggggtaggatcctactggccaccctaacttttcggggtaggatcctacttgttcaccctaggctatggggggacatgttcaggaggttcccctggttaattaaaggggggacaaagggggaaccaccaggggttttaaactt

SEQ ID NO: 271647 - DNA, 454 bp, Homo Sapiens
  misc_feature (377)..(377): n is a, c, g, or t
  misc_feature (389)..(389): n is a, c, g, or t
  misc_feature (409)..(409): n is a, c, g, or t
  misc_feature (414)..(414): n is a, c, g, or t
  misc_feature (436)..(436): n is a, c, g, or t
ctctaagcttaaataccacaaggccaaagagaaatggtcataatttaaaccattattatattgttgaggtatccctagctattattatagcaaagtgggaaaaaagtgtttattctattgaagttatgtaatgatccgacattaatgggaatatagaggagtcctaattaattggtataatttcacaaagcggaatgggtattccttgggaggagttaaaggacattctctttagtaagtgtaaaccaaaggggcattttctttattcccgacttctaattccttctagcccagtgaattatttccccttttcactggtaatgttgatgaatgggaattggttattacatttgaagttgacttgaagtgaccttttngtgctttaggtncaggttgacactggaaaaanaaacnaaacactgaatttttcacaccnaatgtctgcattaaaggc

SEQ ID NO: 271648 - DNA, 367 bp, Homo Sapiens
gttcataggactcgacaagagctatctggtgattttctcattagtaacatgcaacgttgtactgcaaaatttcaatcaacatgacaacttataatgagtggagatttcatattaggtactaaatattatagtattatttctattttctttttccaaataagaagcttggattattttattttgtggtctttatcattaactttaattctttctgtactgtgtataatatttttatattattggccttaccataaaattatttaggaaaggttgtcaaaataaggtatacctctttgggccaataggataggatgtatacatctaccctactatggatcctaccaattttaggggttaggtggaggct

SEQ ID NO: 271649 - DNA, 552 bp, Homo Sapiens
  misc_feature (162)..(162): n is a, c, g, or t
  misc_feature (194)..(194): n is a, c, g, or t
  misc_feature (434)..(434): n is a, c, g, or t
  misc_feature (525)..(525): n is a, c, g, or t
agtgaaatgtatgaaaagaatgggaattatccaggaattgatgaacaattgacagacaaatgaaacacaatgttctggcgttaggcaaggtcggtggccgttgctctgttgacttcttcaggaagaaatagatgaatcaactgaaggtcagggaagccttgntgaatggagagttacagggactgaggcaagtnttctgcaggatgcctacataaaaaaggactaagtaaggccccggggtgcactttacgagtgacttaggagaggttctgggggtgattttgtgcattctgtatctcttgcccctgctctggggctcccagctgaggcccccagcagttctatattctatgcatggaaatacagataattaatgtccactggggcaaggccatgggggacaggagcagtggttacaggcctccctctctccnccctgtagaggaacattctgaagacgctccttgaagactcctcaggaggtctccagtcgcccacatgggtgaccctatcaagaatttctcncgcatcagccttctgtccttctctgtg

SEQ ID NO: 271650 - DNA, 340 bp, Homo Sapiens
atgtaacctgaaagatcttagaccagcaacagattatcatgtgagggtgtatgccatgtacaattccgtaaagggatcctgctccgagcctgttagcttcaccacccacagctgtgcacccgagtgtcctttcccccctaagctggcacataggagcaaaagttcactaaccctgcagtggaaggcaccaattgacaacggttcaaaaatcaccaactaccttttagagtgggatgaggtaagcttattttcatattcacccatctaaaacaccatttcaaaaacaaaattaactgaacaaatgccatcttattcttttataagacatgctaaacacaga

SEQ ID NO: 271651 - DNA, 423 bp, Homo Sapiens
  misc_feature (85)..(85): n is a, c, g, or t
ggcaaccccaacctccaaaaaggggtttcaactcacccccagtaatggaacagggaactgcctcccaaaaaatccccccagaaangctggaagactccatcaagtaaggctggtgtgccctccgtcctaaaataatcctctgtttacccaacccctctcccacattatggacagtcatgccctggagacaagcgtgatctcacccaataaaaagtaggacacctgacatctcccctcttccctaatatcatttaagtggtgtcagtttcattagtggtcccatcacactgcgggtcacttgagattgtcactgtggtgacaaggcaggtcattccccttctacgtttatgtaattggctttatgacccctcaatgtatgatttcatattgaacaacatcgaattcaggccatccaaaggtgta

SEQ ID NO: 271652 - DNA, 386 bp, Homo Sapiens
  misc_feature (359)..(359): n is a, c, g, or t
  misc_feature (372)..(372): n is a, c, g, or t
tgaggatctgtctgatattgcttctctaaaagccttataccaaacaggtgttgataactgtggtcgaacagtgatggtggtagttggaagaaacattcctgtaacattaatagatatggacaaggctctcttatatttcattcatgtaatggatcacattgctgtgaaggagtatgtattagtgtattttcacaccctgaccagcgaatacaatcacctgggactccgacttcctgaagaaactctacggatgttgttgatgtcaagtacaagagggaattttgaaggctgtttattttgttacatcccacatttcgttccaaagggtgttcaacatgggtttttttaccaccttttcntgtctcagggacnggaaggggaccaaa

SEQ ID NO: 271653 - DNA, 350 bp, Homo Sapiens
  misc_feature (272)..(272): n is a, c, g, or t
  misc_feature (293)..(293): n is a, c, g, or t
atgagcaagtacactcggcctaatttcacctctcttgatgaacatttagatgatttccaatatttgctgcaatgaaacaatttgtttatgtgtttctctacccataagtgtaagtcatctacacatctcactcctttctaaggttcttatatagtgtatacgttgagtatatttgaggaaatatttattaagtttgtaccatgggacaatattcggatagtttcatccatattggatggccagcgttttacttcaacctagtgggccttatncctaggattggtttccttgcnagggaaacagggtcaggtaattaaaattccttttttttgtccccttttgttgggtgg

SEQ ID NO: 271654 - DNA, 433 bp, Homo Sapiens
  misc_feature (22)..(22): n is a, c, g, or t
  misc_feature (36)..(36): n is a, c, g, or t
  misc_feature (43)..(43): n is a, c, g, or t
ctgatccggggaggttcccccnagggaacacctganccctaantcctcaaaaaaatgtgtaatgaatggtggttgcccataaccctgtaaaatatacctaaaaacttattgaaattttttaattttaaaaatgggtttaagggtaaaccttgccagtatgtatattagatctcgataaagcagtttttttaaaaggtgtattgaaactgggtcaaacacaccagaaggggaagaacatccccaagaaagagaagagccctggcaaacgcatggagatgtgaaccatcgcgacaagtagggggactgccagtcttagagtggctggaatgtagggtagctgtggatggctcaagtgtccaaaaggatttaagcagcaaaatcacagaaacaacttcattttcatgtaatggcccgaatcccagagtctcaatga

SEQ ID NO: 271655 - DNA, 404 bp, Homo Sapiens
  misc_feature (19)..(19): n is a, c, g, or t
cccctgagttccccccaantgcctgtaagtaacaggaaaaacagggccagttaagtccagccaccccatgtccccgacccagaatgtttaaagatgtaaattccaagaacaatcctgaaaaatacccacatggcctcaattattgggttattccaacatccaggcctcattccttacccaaggtttgcctttaggaaccattgtaggaagatttctgcagctttcataaaatacctatttatgacattgtcattaggtttcaagccctttatgtaacaatcagagatgggtgtgagaaagggaagtctgtctctcctgggttgctggtgggctttattttgtcagctagctgtgtgactgtgctggacagcatcattgctaaccacggtgaaatgaataagtcc

SEQ ID NO: 271656 - DNA, 603 bp, Homo Sapiens
  misc_feature (29)..(29): n is a, c, g, or t
  misc_feature (59)..(59): n is a, c, g, or t
  misc_feature (78)..(78): n is a, c, g, or t
  misc_feature (84)..(84): n is a, c, g, or t
  misc_feature (358)..(358): n is a, c, g, or t
aacggccggcaaggaggggaaaaaatggngcacccggaaccccaaatacagcaggatgnccttaacacaatgaccttncccccngaggccttagctgtgaaaaaatcaagtccccgttccaggcaccggggatctccctgtccttctctccccctaccccgctttccctctctttcctaacccaagaagttatccttaatgacccttagatgaaaggatccaagaggagagttgaaaaagacccccccaggtgaaaaagagtaaaccccccatttctggcatccccagggctttagtgaaaacaaacttttttaatcctagttctgtccttgaaagctaagaaacctgttctagttanttttatataattaggcagtgggtttcagattttgtcagatattttcagctcaaaatgtattcactgagcagcaaaacgcagggttgtttaatttgtaatttcagttatatattcctgagtacctttctgttctttcatttttgagtactgtgaaataatcatgttagtttttaattcatatattaaaaacaacctgtgcccccacctccccccaaaaaagtcccatagtagtcactgttacccaa

SEQ ID NO: 271657 - DNA, 587 bp, Homo Sapiens
  misc_feature (42)..(42): n is a, c, g, or t
  misc_feature (127)..(127): n is a, c, g, or t
  misc_feature (139)..(139): n is a, c, g, or t
  misc_feature (189)..(189): n is a, c, g, or t
agagggccgaggccaaaatccaggcccaaacagcctttaccntgaggtccaaagccccaagaatccagaagccccccggatgcccctaaaaaatcagccaatgttaaccagtgaacctgtgccccanttaagcctgtantcctgcccattgccctttgaaaagatcctatgttcctcctcagtagaaanaaaaaatcccttataaaattacatattctgaaagagcattcccgaaagatgggactggttgactccttcacatgatggaggtatgaggcctccgagatagctgagggaagttctttgcctgctgtcagaggagcagctatctgattggaaacctgccgacttagtgcggtgataggaagctaaaagtgtcaagcgttgacagcttggaagcgtttatttatacatctctgtaaaaggatattttagaattgagttgtgtgaagatgtcaaaaaaagattttagaagtgcaatatttatagtgttatttgtttcaccttcaagcctttgccctgaggtgttacaatcttgtcttgcgttttctaaatcaatgcttaataaaatatttttaaaggattac

SEQ ID NO: 271658 - DNA, 495 bp, Homo Sapiens
  misc_feature (54)..(54): n is a, c, g, or t
  misc_feature (74)..(74): n is a, c, g, or t
  misc_feature (87)..(87): n is a, c, g, or t
cggggcccccttacaggactggacccgcagccaagatgccctgcctgttaaccnatgccccagccccccgtcanttcccccgtgaanccgcaggccctcggagcccttggtctgaaatgccctgtggagtaacctcggtcccataaacatgggtgcacagtctgttctccccaagtacagggcaggaggaaacaccgccctctgtagctgctcgaatggaaagggctcttttctctgaggtctttatacattagaaagctcttctgggaagaatgtttgaatccatagtgtctttctgtattcacttttaattgctttctaaattagctgagaaattctgacttgaaatattgtcaggtaagcatttcttcagttttcatgtgtgtatgtaacagtagctttgcatggaaattgtaatcagagtcaaatacagtattgaatggaatgtactgccttctcctcctaaatcaataaacatctttcatggataaaaaa

SEQ ID NO: 271659 - DNA, 362 bp, Homo Sapiens
  misc_feature (74)..(74): n is a, c, g, or t
  misc_feature (142)..(142): n is a, c, g, or t
ggaatattaccttttaccccagtgtggtttatagcatacatttgtactgaagcatatagggatgttaatgtgancttttcctgacagattatggaaagcattatgaccttgtaaccaagtttcccttgtatatcccctaacnggtttagaagacataaatattagtgtgttttgccctacatggtgtatttaaatctattaatattttcctgttgcttttttaaaaaaataaatacacataatgtatattaaaagaggtgggatgaaataattttagtaattatgtgtacagatgaaacatttttgtcatggaatttaaaagctaagtaagtataaaaaataaaatgttatatgcaaaaaat

SEQ ID NO: 271660 - DNA, 618 bp, Homo Sapiens
  misc_feature (395)..(395): n is a, c, g, or t
  misc_feature (477)..(500): n is a, c, g, or t
acagaccgtctggagcacctagagtcccaggagctggatgaacaaatataccaagaagatgaatgctgaaggaaccaacagtccacctcagcgggccagcagcccagaggaacccctgcccaccaggattgctggaagtgtgacggagcaggcgggctgaggagagtggaaaaggaagcgacccagaaatggcagggacacttctcttgcagaccaagagggaccctgggagcaccttagacaaactacccaggcacaggcggggctggaattctggcggaagggcatgagccctgggactcccatgtcacgtttccttctgatttggaatctctccatctgtaattcctcaccctcacccttccaccgttgttagtatcatggtgtttttgttnttgtttttgttttaagaacctgcagtttgactcttcatcgttcatctaggggaagacatctgatgttgttttcctatggaannnnnnnnnnnnnnnnnnnnnnnnttttgcaaatctcacaaagtgcgcaagcccagctggtcaggaaagagaatacttgcagaggggttcagggttcctctttttcctgccacgtggatcaggtctgttcctgttactgttg

SEQ ID NO: 271661 - DNA, 593 bp, Homo Sapiens
  misc_feature (23)..(23): n is a, c, g, or t
  misc_feature (252)..(252): n is a, c, g, or t
  misc_feature (262)..(262): n is a, c, g, or t
gccctgaacctttcctacccggnccctaccttagacactggtcatggggtatcccaagaaagtcatggggcaatgcagccctctacagcctgagatagaccctgaaaaatttgacagcaggagatggtttgctgaccctcactcctcacagcagggcagccaagtttttcccattattaatatgaataattaccctatgttatccctagaaattgaacccctcccatccactggggaaaagggagggggganctgagagggnggatctcccttattccatccacagcatcctagggttccaacaatccttcagtgcttgagaactcaagggcctaggatcagtgcaaattgttctcgaaacctgctgattctcctcagattataatgactcaggtaattcatgacttgacatttcactttgacaatttacagatttatagataggtagttcttggttgacctgggcctgttgtggcttatccatggcaattttgaattaaggctcttataaataaatttaaatagagttcatgcttaaatttcttttaatcctcacttacgaaattggaaagcagaaataaaagtaagcttaa

SEQ ID NO: 271662 - DNA, 446 bp, Homo Sapiens
  misc_feature (19)..(19): n is a, c, g, or t
aacccccgggcctgagggnattcccgggcaggccgctgtggccccattcacagcttgaatgtaaacattatgttgtgtgtctggcatgagactgtgaagaaaacagccaacaccacacacacatcagctttatgactctggaaaaatcaggaagcacatttagaaacataaagtatttccagggttggtcagagaacctgctgtgccatcactcctttgtctttgctgctgtgattaaaaaatgttgacaagcgtcagtgggttgcccttatcgcaaatgttagtacaaggtcaagtgagactctattaagacatttcctccatccagccattcagttacaggccgcgggaacgtcctctttacaagaccagaggagctctgaaaagatccaccaaagtttatttcatcagtcctgaaacaaattcgatctttcagaaatattagt

SEQ ID NO: 271663 - DNA, 528 bp, Homo Sapiens
  misc_feature (19)..(19): n is a, c, g, or t
  misc_feature (118)..(118): n is a, c, g, or t
agctgaaaagaacttcccnacttgatttggggtggaactccagcctcccccagcaacaataagagatcaaaagcatcgttgaggaaagcagcttgctgaaacgctgagtgccccgccnactctcaggtcaggtgggacccggcaggcccagcatgagttccctgaacacttgggtcctcaatactggccacagccacactgtaaggggaaacaagagggcgctgtatgcaaacatctcttgaactctggagtctgctcaccttcctgcctcaagcccctctcccacgtggtccagtcaccattctccacagagactaccctaaaacccagcgactctcgtgtgcctgcagaatggcacagcccgttctcatagcagcactcctgtttaatcagagggatgttaacgaccaagtcatatttgctcgatttgtgttcaatatatttcatttgtaccgataaaacttaaaaatatccccacacattgcattgcctattaaagagtatcttccaggtacacctcccttaaaa

SEQ ID NO: 271664 - DNA, 533 bp, Homo Sapiens
  misc_feature (23)..(23): n is a, c, g, or t
  misc_feature (36)..(36): n is a, c, g, or t
  misc_feature (50)..(50): n is a, c, g, or t
gggcaagcttctgcatgcctgantatgaaagagtcncctaagtggcaaanaatatgttccccccccagcccatcttttggaccccaatcccattccttaggccccagttccctattgcaccctccctttctttccctcatgtttggtatgggtaccccttttcagggattcatagaaaatcccagtaatgaggcagaatattgtcctgccctctgatgaaaaaggagaattggatctgtctctggaaaatctggatctgtctaaagattgtggttcagtttcaacagtagatgagtttccagaagccaggggtgaacatgtacattctctccctgaagcaagtgtgagcagtaagccggacgaaggccggacagagcaatcttcccagacacgaaaggcagatacggcattggcttccatccctcctgtagcagagggaaaggctcatcctcccactcagattctaaacagagagagagaaactgtgcctgttgaacttgaacctaaaaggaccattcaaagcctgaaagaaa

SEQ ID NO: 271665 - DNA, 597 bp, Homo Sapiens
  misc_feature (163)..(214): n is a, c, g, or t
  misc_feature (290)..(302): n is a, c, g, or t
ggcacgagagtttagtgaacagtttactaaccataataataatacatttaacttaattatgtatattcaccaaaagtagtaattgagaagattaatcctcctttatttcaagattttactttatttgtatttatttatttgagacaaggtctcactctgtcannnnnnnnnnnnnnnnnnnnnnnnnnnnnnnnnnnnnnnnnnnnnnnnnnnntgggctcaagagatcctcccactgcagcctccctagtagctgggactacaggtgtgcaccaacacacccagcttannnnnnnnnnnnngtagaggtgaggtttcaccatgttgcccaggctggccttgaactcttgggctcaaaatatagccttggcctcccaaagtgctatattttacgttttaaagatgtcaataaaaaatctaaaataggccttttgaatgtaggttttgttgaaacagaagaaacgaaaattatttaataaaataaaataggcctggttgcccatttttttaaatatacttaaatgtaaaggatagataagaaagaacaaaagaatgaataatgagtgaaaaatctttacctctgcaggctagatctga

SEQ ID NO: 271666 - DNA, 132 bp, Homo Sapiens
ccatcaaagtgaggaagtgatgggctcagaatggtcttggagtcagatgtcagggtctgaaggcttggctgtatgatctgccacttggtatctgtgtggtcttgggtttagtgacttgatcttccctcgtgc

SEQ ID NO: 271667 - DNA, 518 bp, Homo Sapiens
  misc_feature (23)..(23): n is a, c, g, or t
  misc_feature (46)..(46): n is a, c, g, or t
  misc_feature (60)..(60): n is a, c, g, or t
  misc_feature (83)..(83): n is a, c, g, or t
aaattaatcgtctgtaaagcctnaactatgaacatcgccatctccnggggtgtggcccgnaaaccactctgcaaacccatgangttcgaagggtcccaccccgaaagtgtcctaatccacgaatgcccgcctgcttctctgaatgaatgaactgtgcagccgcccagatccccagcagtgcaaggcccaaactggtaaataaggcatcccgcggcccctgaaggcccaggtggcagaatgcccaatgtggagcttccaatcactcggaccctggggagagggaagggaggacagatgcaggcgggagtggagccttttctgtggtgtgcaagccgacttcagcgaggtaccccggctgggcattttccctagtgaaaaatgaagcacagcacttctgccaaagctctggaggctgaatataggccctggagccaccaaccaaacagcctccgccagacgcaaatgccttgtgccatgacagctcccagctgacctagctactgagcacctgagatgct

SEQ ID NO: 271668 - DNA, 386 bp, Homo Sapiens
  misc_feature (48)..(48): n is a, c, g, or t
  misc_feature (57)..(57): n is a, c, g, or t
cccacctggggcattggcccaggctgaagcaacatggcaggggggacncgggtggtncctggcagcctcccgaattgaagacatggagctgagagacaagggaggccgaggcagtccagagtgtgcggaacagaggactggagagatgaaagcccacccaagatctgctgaggatccccttcgagtaggaggcagagggcctaatcagcccctgcaggcaaggaaatgactgaggtcagggaacgaaccaccgaaaaggattctagggcaccgcagacagcattcacactggggccgggagaatgcccgatcccaccagccaggccagtaaacctcataatccaccatgagaaagtactgaggagaggcatggcactgtggttcac

SEQ ID NO: 271669 - DNA, 442 bp, Homo Sapiens
  misc_feature (22)..(22): n is a, c, g, or t
  misc_feature (102)..(102): n is a, c, g, or t
gattccatttaaaatggcatcnccctttttactgaggtggccaatccacattcctcctccacagccctgaacaatatttgccttcctccatgaataaactgnacaacatcacttttatgaaactgcatgacaatgtattggttaaaatattcccccggaacatcctacacttcagttaaaactgtactatttacaaatcagaaaatatactacaaagcatgcttgtaggcacagcatgcctgcaagacacaaatatacaaaattatggcaagctatggcaagattccttaaaccaatagaatattctgatgcaaaaagagagagatggaaatacaggccatatattatatgtgagccatactctgaagcccagaagactctctatccaaaagggaatcacagacataaaaataaaatatttggtattctacaatattttaca

SEQ ID NO: 271670 - DNA, 770 bp, Homo Sapiens
  misc_feature (15)..(15): n is a, c, g, or t
  misc_feature (36)..(36): n is a, c, g, or t
  misc_feature (82)..(82): n is a, c, g, or t
  misc_feature (555)..(617): n is a, c, g, or t
  misc_feature (666)..(666): n is a, c, g, or t
caagggcttgctttnccaggtgccaccccgggccanaggggaaaggacaggttccccagcaccttcccggatggcaccgggnacaagggagggcctgggctggggtcactcaccttgtctgctgagtgcgatggcacccaaccacccacactgtccagtccgcggacccagctggggggaacggtcacactcgccccaccaaggcacttgctgaggccaacgacgccgcctgacggggacacacaaaagccccagggactttgatccacgataaagagcagaggcgtctgggtaaagtaacacagggcaagggactttagaaaagtaacagctagtgaaacctttccatacacttcagaaatgttttaacttaagacttcagtataatgttaacttctcctgatgtccttgttgacatgaatgcgtgtgcgtgaaatctcacacacttccatggtcactaaacagccttcaccccgggccaggccatcgggtactcggcccgcttcacgtactgattacttgacttggcgttttctagatataaacatgtacatnnnnnnnnnnnnnnnnnnnnnnnnnnnnnnnnnnnnnnnnnnnnnnnnnnnnnnnnnnnnnnnaaggctaggtcctgggcacgtttcccctgtctcagcggaccctgtcctncacggagatagcccagaaagcccttggacagcacaggccacacctgagggtgctggatggtggtgactccacagagctgtggtcaggggtgagcgtgtgctgcg

SEQ ID NO: 271671 - DNA, 581 bp, Homo Sapiens
  misc_feature (73)..(73): n is a, c, g, or t
  misc_feature (160)..(218): n is a, c, g, or t
ttcttgcctccttcttcttctcagaatgaatctgtgtaattggatgtgtgaggtatgcttagttgccatttanctaagtctgtttccaaaaatgaccgaacaaaagactattacaagagaagaggcccaaacaaaccctgtagttttaacaaatttcctnnnnnnnnnnnnnnnnnnnnnnnnnnnnnnnnnnnnnnnnnnnnnnnnnnnnnnnnnnntagctagttaattacatatctagagttaaaactcagggtttccgagtcatgtgtccttggtgtgcagtcattgggtgaggagctggggacgtcaaaaatgaatttaacgtagtccctcctctcaggcagctgcaaactagaagcaggcgtgggacacactgtatgcccaggagtggctttgcatttgagagccatccttctggcagctgtgcagggaatgggtcgacctggccttgcattttcctcactcccctcctggcccactccagcagctggtaggcaaagctgtaaaggaagtaatgatgtggctcaggaaagaggcatgaggttaaagaaaaactgtggcaagggtagcagagatgg

SEQ ID NO: 271672 - DNA, 446 bp, Homo Sapiens
  misc_feature (22)..(22): n is a, c, g, or t
  misc_feature (38)..(38): n is a, c, g, or t
  misc_feature (44)..(44): n is a, c, g, or t
  misc_feature (69)..(69): n is a, c, g, or t
  misc_feature (94)..(94): n is a, c, g, or t
gttggaacccccataaaacaangaaatacgtttaaaanttttgnaacccaatatgtttaaattgtggcnggcaattattaacattatttcccanctttttgaaattatgtttgtatgtttttcttctcccacctatgtaattatattcataaaacatgtaaacatactcccaaagaaataggcccaaggattgtagcctaatatggatatcaagaaaaatgccttaaggttactttccactaacagtttggcattttttagtctggagcctacaggtattgtgaatctgggagccaatcaggttataaaataagcggtgaaaaattgtgttctcttgttacttcatataaatttaaaaattaaagattaaattactagtctctacggcctagtaatactaaatgtttcctttgttagcaaatttattggaggaagattcataagac

SEQ ID NO: 271673 - DNA, 779 bp, Homo Sapiens
  misc_feature (355)..(419): n is a, c, g, or t
tggggcaccagaggtagctggattattaatgagctgtcctgcatcaagttccccatgaaaacaaggacatgaaatattttagtagcccttcatccacggaaaaggaccctgctaggtgctcaatattcgttgagctatacatgggatattactaagcaggcaggtgcacatttctagcatttgtaacccaggatactttccaccatattaaagttgaaagtctttatctaatggtcataaaactaacattcactctctttctgtctctctcacacacacaatacatggcttaaaacaattatcttttacagttctctgggctgcctggttcaacaaggtggttctcgcctggggnnnnnnnnnnnnnnnnnnnnnnnnnnnnnnnnnnnnnnnnnnnnnnnnnnnnnnnnnnnnnnnnntacacacgttggcctcttcactcatgtgcctgggcctcggaggggatggaaccgccagggactggcagggcatatctacccatctaacatttcagtgggtctgattctaccaccaccactaccctcccctttcctgccccagtaggctctgaaacccccaacatgcctcttaacaagactgaagtaccttatgtttgaaaggattgatgctggaaggacagggctgaggtgcagaaggcctggagccaggtgttcaggggagagtgtttgtccttctgcttcaaatcactggacaaccttcagactctgagcatagccagctgctacttggcacccctgggttcaacaaagtccagcaga

SEQ ID NO: 271674 - DNA, 400 bp, Homo Sapiens
  misc_feature (289)..(289): n is a, c, g, or t
  misc_feature (344)..(344): n is a, c, g, or t
  misc_feature (376)..(376): n is a, c, g, or t
  misc_feature (387)..(387): n is a, c, g, or t
ccctgttaactgaattgtcaacttctataaaccatttcactgctaataacctttcatcagatcagacagaggaaataaaagttttccacttcttgttgagaaagcaaatgttagctgtgagatttgcaaattattggctatagatctattctgtatacatcagtgaaaggttactttatatttaaaactgaaactagaagcacaagcaacagaagaaaaaaatagataaatcggacatcattaaaattacaaactttagggtgatgcacggtgggctcacgtctgtaantcccaggcattttggggagggccaagggggggagggtccactttaaggcccgggngttttgaggaccagccttcaacaacacagganaggaccccgtnttcttaccaaaat

SEQ ID NO: 271675 - DNA, 431 bp, Homo Sapiens
acgacattgagcctttatcaagacccactctatcctgggtttccttgtaatgaaaagggagatcgagccattgtaccaccttattcactgtgtcagactggggaggacctacctaaagataagaatattcttcgattcttcttcaatcttggtgtgaaggcatacagttgtcctatgtgggccccacattcttacctgtaccctctgcaccaggcctacctggcagcctgcaggatgtacccaaaggtccctgtccctgtttatcctcataatccctggttccaagaggctcctgctgctcagaatgaaagtgattgtacctgtactgatgcccactttcctatggcagactgaggccagtgttaatggtcaaatgccacagccagagattgggaccgccgacatttttctttcacctctggttattccct

SEQ ID NO: 271676 - DNA, 414 bp, Homo Sapiens
  misc_feature (39)..(39): n is a, c, g, or t
  misc_feature (225)..(225): n is a, c, g, or t
  misc_feature (268)..(268): n is a, c, g, or t
  misc_feature (303)..(303): n is a, c, g, or t
  misc_feature (336)..(336): n is a, c, g, or t
ggcatggcactgactgcccacccctcctgcctcctggcnctgttggtggcaggcctagccaaggatcagaggcccccttaggccagggtccccagccgctagagctgaaagaggccttcaagttgttccagatccagttcaaccggagttacctgagcccagaagagcatgctcaccgactgggacatctttgcccacaacctgggcccaggcttcagaggctgncagggaggaggatttggggcacagttgagtttgggggtgattncattgcagttgacctcacagagggagggagttttnggccagttctattgggttattcggaagggcagntgggaaggggttccccagcattgggcaagagaaattaaggtttttaaagaagcccaaaaggatttcagtactttttca

SEQ ID NO: 271677 - DNA, 419 bp, Homo Sapiens
  misc_feature (391)..(391): n is a, c, g, or t
ttcggcacgcggaaggattgttacagttggggtaccaggtgggttgggaaggaagggaagtggtgcatgaaactgagatttaaatttattttaaaataaatccatgttgtcccacagcataggattagtgggaagaaatgggctttggaatgagacagttgtgagttccaaccccaacccaacaccagagttctgtgagtctgagctggttattgagtctgagtcacgatttcttcatgtatcaaatggataacattgagataacattctgtagccactgccaagaagtcacaaaattgtaatgttataattcttgaatggaaccttgggagattattccagtcccaggtttttaacttcttttgggctgatggggcctcttttggataantcaggtgggaagctttagaccactttct

SEQ ID NO: 271678 - DNA, 582 bp, Homo Sapiens
tcctggcttctgcgtccctggaggctccgttcccgtttcgccagctattttgctgcctcggccatctgttccctccctgtcatctcctctcgacatccttcacgacgcctggccctccttctcatctccagcaagtgaaccgctctgtcctttttaaagcctcatcccaaagacacggccagagcttggagttggattcgccccacacaactccccctctttgatgccatctgctttcaactccaccactggccaggggcaaacacctaccccttcccctgccttttcctcctgagacttcttctcaaactcggccaagaagctctcctggcatggacagcgtgtctgctccgggtctctacctggtctccatcaacagagccatgtaaccgcccagagggctccaggtccgcaagctgaggcggaggcaagaaactctgaagttcactcctactgtggaggaacgagggctcgtgctgggagtttgggtcatgaacagtttccctgtagaaaatggacctgaacactctgcagtaaggaattgtttccatgctggcatggtgggaacgaaccaaaacacat

SEQ ID NO: 271679 - DNA, 347 bp, Homo Sapiens
ttctttctcctctgaagagctcggtctttcaaggctcctcccagcttgtcatgtcgagtgcctggccactgctcagggttggaggctcaagtccctttgccctgtctgttccagctctggagctaactcagggatccctgatcagggttacataggtttggtaaaatgagtgctggaaattaactttctcccagtagtcttaggtcatgctcagtgaacttaaactttatccagatatggttttccttcagcctttctattccctttctagccagtgaaagacccgctgccctttgacctcagcccctccaagcccccaagtttaaaacgccaccccctgccaccag

SEQ ID NO: 271680 - DNA, 216 bp, Homo Sapiens
cccttaagtggaattaagttcccaatatgaagacatcatataaacctctgaacttttggcttttcctgaagactcagatctagcaatcttaggcctgcattctcacatgaaaacaatcagccgttcttcttacatgatgcatatattcttcactataccccagtcttgactgccattcacttacattacctgtatgtactctatagtcatttgagt

SEQ ID NO: 271681 - DNA, 245 bp, Homo Sapiens
  misc_feature (177)..(177): n is a, c, g, or t
  misc_feature (192)..(192): n is a, c, g, or t
gtagagataggggtcttgctatgttgcccagggtggtctcagactgcctaaagcagtccttcccacctagggccgcccaaagcactgggaattattagggcatgagccacttgcaccggggcctgctttgcctttctttaaatggaccttcatgttcatttgttccagtggaggganttttgtttttcaggntggacccctggaggtgtttgggttccccggaagtttcccaggccacaggttcc

SEQ ID NO: 271682 - DNA, 337 bp, Homo Sapiens
  misc_feature (31)..(31): n is a, c, g, or t
  misc_feature (86)..(86): n is a, c, g, or t
  misc_feature (108)..(108): n is a, c, g, or t
taaaccgggccaagtgaactaaaacccctanaggcgggaaagatgggggaatgcctggggaaggcctgaagcggaaattgaagggnagcaaagcctaggccctggtgnctcacgttacttttgaaatttgttgatattacttcttggactagtatgtagtcaattttcacaaaagtgcttgagaagaatgcttttttgctaagtatggatagtatatgtctatttatcaggcatgtaaatggtattgtttaatcttccattctttactattcacctgctcgacatatcaataattgagagaagtgtgcttaatcttccacttcataagatggtgggt

SEQ ID NO: 271683 - DNA, 189 bp, Homo Sapiens
  misc_feature (88)..(88): n is a, c, g, or t
ttatattctaataggattgccttgattcacctatggagaatggatttctgggatctcagtactgggatactgagatcccagggggaanaatatcactaaggttggaattgcttttctgcacattaaaagcaattctctttttccttgaaacctccatgtgatgttaattaggtaaatgggatttcaagg

SEQ ID NO: 271684 - DNA, 401 bp, Homo Sapiens
  misc_feature (33)..(33): n is a, c, g, or t
  misc_feature (54)..(54): n is a, c, g, or t
agggggggaaggactaaggtccctaggaaacanccactttaatttttaagttgnagggtgaaagtgaaactaacctacaacctactcatccccatatatagccaacccaccaggaatgtggttcccgtatttaacatgcctgcacccagcagtggatcacattccttgtgtgtgccatatgtatgtatatatgtgtatgtacatttcctttaaccttttcaatcctagttaaaagtatttttagttcataagcatggtatatgtacagacacattttcccagagctacttgaagaggacaggaaatcctttataacattattacaatagctaaatgacaattgtctccaatacccatatacattccctgaaaaatgcttcagtcagtccacaaacacgtac

SEQ ID NO: 271685 - DNA, 434 bp, Homo Sapiens
  misc_feature (383)..(383): n is a, c, g, or t
  misc_feature (392)..(392): n is a, c, g, or t
ttaaagagatggggtttcactctattgcccaggcacaatcataggtcattgcagcctcgaactcctggactcaagagattctctcgccccagccccacaactgggaccacaggtgattactaccttcttatgtttaaaagaagttctccattttatcatatgaggtttcaagatgagggtccagatcaagtgggaagactaagttctatgaaacatcacttttattttttagttgagggtgaagtgaactttacttacaacttacttcatccatatataggcaaccatcagggaatgtgttcggtattttacatgctggcaccagcagttggatccacattcttgtggtgtgccatatggtatggtatatatggtggtatggntaccatttncttttaaccttttccaatctagggttaaaggtatttttaggg

SEQ ID NO: 271686 - DNA, 437 bp, Homo Sapiens
ttaaagagatggggtttcactctattgcccaggcacaatcataggtcattgcagcctcgaactcctggactcaagagattctctcgccccagccccacaactgggaccacaggtgattactaccttcttatgtttaaaagaagttctccattttatcatatgaggtttcaagatgagggtccagatcaagtggaagactaagttctatgaaacatcacttttattttttagttgaggtgaagtgaacttactacaactactcatccatatatagcaaccatcaggaatgtgttcgtatttacatgctgcaccagcagtgatcacattcttgtgtgtgcatatgtatgtatatatgtgtatgtacatttctttaaccttttcaatctagttaaaagtatttttagttcataagcatggtatgtgtacagacacatttt

SEQ ID NO: 271687 - DNA, 352 bp, Homo Sapiens
tcggcacgaggcccctgggcatgggacatggtggtcagctggcaagtggggacctgtagggcaccaggaagacagagtacatgcctcaggcaaattggccaaggcaaagatccagcctcctgtgacaaaaagccaaaccttcggcctcagtctgagggtaaggagatcacatgctcttgttctctgatctgtcccccaggtggcagtgacgaaagaagagactctcaccgccgaggccccagtgcatggagagaaggaagaaatcaatttcctaattggtaccatatacatcaggtcaaataatttcttattttctaccctgggcaacacagcaagactctatctcaaaaaa

SEQ ID NO: 271688 - DNA, 545 bp, Homo Sapiens
  misc_feature (79)..(79): n is a, c, g, or t
  misc_feature (88)..(88): n is a, c, g, or t
  misc_feature (100)..(100): n is a, c, g, or t
  misc_feature (217)..(217): n is a, c, g, or t
  misc_feature (255)..(255): n is a, c, g, or t
ccaagagaatcgccttgaaccttgggagacagaggttgccagtgagccccaggatcatgcccactgtactcccagcacnggtgacagntggagaccttcntcctcaaaaaaagggaagagatgatttgttcccacccgggtgccacagacatccaaccaccagggaccacccagaaatattgagagagccatgggaaaattaggttgcccacccaanggaaccatcactttcctagtggcagacctgcatgaaanggaaatcaactaattgccagaaaaggaattcaaaattatgattttttaagaaattgaatgatatacaaggaaatacagatagttcagtcaatcagaaaaggatttatgatgtgaatgacaaattcaacagagatagaaatcataaaaaaaagaaccaaccagaaatcctgcaactgaagaattcagtgaattaaattaaaaaatacaacagagagattcaacaaaagaaagaatccagcaaaagaatccctgaacttgaagataggtcattcgaaattacctagtcagaa

SEQ ID NO: 271689 - DNA, 462 bp, Homo Sapiens
  misc_feature (449)..(449): n is a, c, g, or t
aaaatcctgatttaaatttcctggaattgtccaccccgggccattggccttttttaaaattttttaaattccccttaaataaattggaaatgtgccggacaggccctgagaacccatggcctatagcagggatgtggaagtgtctgaccccatggcaggggaagtattgaatgccctaattaagaaatatgtgttctgtttagcagaaaacaataggggagtgtttaatagccactatgatagcacaaggatgaggcaaagcagctgtagggaaaggggagccatggcagagcagaatgcacattttacagggcttgggtgacagatgtgtgttgtgatttcagggaaagagaaactgaaactgtaaggaagcaggtagacccctgaacaggccagtttctcttgaaaacttgagattccagctcgtgcccattctttggcctcgaggnccaatttccctat

SEQ ID NO: 271690 - DNA, 449 bp, Homo Sapiens
  misc_feature (29)..(29): n is a, c, g, or t
  misc_feature (38)..(38): n is a, c, g, or t
  misc_feature (45)..(45): n is a, c, g, or t
  misc_feature (62)..(62): n is a, c, g, or t
  misc_feature (66)..(66): n is a, c, g, or t
  misc_feature (120)..(120): n is a, c, g, or t
  misc_feature (134)..(134): n is a, c, g, or t
  misc_feature (138)..(138): n is a, c, g, or t
agggggtagtagaaaaatcccagcctganaatagaggnacctccnaactgtcctatgtggcncccnaccaccccacagagtcatctcttggaggccctggaaaaagtccctgctggggantggagggaagcctngtcntgttccagctcccagggtacagctgagagactcacagttgcacatctgaagctcccagtatggtgtctgtgctgctggtggtctggaagccactagccagtcacagcagggctcagtaagacaccccaacagctccttatcctgccagcccattacccctccctacttctcccccagcaagagccagaatgacacagaaagaaaaagaagtgctctgggtatcagaatcacctgggtgacacgatacccatgttagactccaggtggataaataaactgtggactattcagagaatgtactactatatagc

SEQ ID NO: 271691 - DNA, 473 bp, Homo Sapiens
  misc_feature (58)..(58): n is a, c, g, or t
agtaaaatccgcccacctaagtgaaggtttccaggccctatatatatttttttgaccnaaagagatgaaatagcctaaaaacaatgcctcacctatcctcaacagtttgcgggtatgtaatgttttgtaaatgccatttagcccttaatgcaggctttggtagaaggaattaaatatagttaaagtttcacgttgaaaataaacctcccctcttgcccctactgctagcattggaaaggggaacaggacccaggggcaatgaggggtgggcagggtaagcttccttcttgctccgggcaaggcttttagtggaaatgtatagaaggagccaaaattagggagcaatgttttggaggcaaaagccagcctttcccagcatctctgaaaggagcttatcttaacttattgcaacactgaatgatatgcttgaatgttatttgtacgaataaagatatttgcatcatgtcaataaa

SEQ ID NO: 271692 - DNA, 465 bp, Homo Sapiens
  misc_feature (368)..(368): n is a, c, g, or t
  misc_feature (425)..(425): n is a, c, g, or t
  misc_feature (446)..(446): n is a, c, g, or t
tttttggtaattaattttattgattaaagtattacaaagttctacttttcattttttcatgtacaatgtattgaaatgaactaaactcaatcacttataatataaaaagacattattatgtattagcagggtgatgcttcataatcatgtattattcctacctctaagacaccagtctgtattatagaatcacagctgtcacctgtgactgtcagaaacagaaggtgcaattgggattcttaggttggtgacagaatagcactggatccacaggccagagactaggagtgcttatcaaatgaggttttaggctctgaaagggaagggaatgaggaagggtgtgcccgggacaagggaataggcccagnttccccattaaaacttgggggaaacgtaggatttttctccaaaagtagggggtcccnacacaatttttttaggttacnttttttgagggaaaatttt

SEQ ID NO: 271693 - DNA, 557 bp, Homo Sapiens
  misc_feature (73)..(73): n is a, c, g, or t
  misc_feature (155)..(155): n is a, c, g, or t
aatgtgggattaccgggtgtgaagcccccacccgtgccccggcccagcaaccccggtttaaccaagatggccnggggtgattcccccatgccagcccaaagtatgagaacctgataccagtagaggaggttaaaacctaataatttgcccccccntcaaaattatggagggtgaaaggagtgggggatccgttatgtgagataaattcccctgtcctatccatggaaggaatttagtaaaataatgtcctagatcctgataaatccaacgagtagtagtatccagcatgttttcctagagatatggaaataatcatcaaaagaaacataaacggacgtgggtaataatgagtaataatggttgcccctggagaggaggactcagtatggcgaggtatgtggcagggggttattatttttctaaccatgtgattctttggttgaaattaaaataaaagaaaaaattgttcttagattgggaagattgtccaggagcctgagagaagttctgggagagcagttctttcttattgtccttttcctgattatggggaaaaa

SEQ ID NO: 271694 - DNA, 484 bp, Homo Sapiens
  misc_feature (16)..(16): n is a, c, g, or t
  misc_feature (47)..(47): n is a, c, g, or t
catgggggtaggattncccccccggaagaggaagatggtgtttggangggataccagagtttccagttgggagaagggtggaggtttccacctccctagaaaagggatgggtgcctgataagttgccacaccccatgtgaatggtaccgtaatgcccgcagtacaccctacaaatgggttaaaatgttccaattttatatacatccttacccacaataacaaaatttttttaaccaaaaaatctttgagaagaaataggatacttgcatagtctcaaagtatctcccccaagatgtttattaattacaaagagaagaatgactctacaatggagaaaattagcagacaccatcttaaccaagtatcaaagttaatatcaccagtaagacatattattgttatcatcatatattcttgccaaaatgcacaatctcaatctaattatgagaaaacatcagatgaacccaaatcaagttccatttaa

SEQ ID NO: 271695 - DNA, 660 bp, Homo Sapiens
aagccacatccaagcttaggaggaaagagtgtcatttattagtgatgtctgtcatggtcatcaggaatgaatctataagtgccaggcatttaccacttctgcactagagatgcagagatgtggaggaactcctgtagccctcactgcctccagctaattttagctgactattaattaacaagctctgtgtactaagccattgctatatatccgggagacgttgtcagtgttgccacagatatgaggccaacctgggatcacactggctatgcgtctcttcagtcaaatcctaagctaagcaatgatttctatcaccataagtcctcagagtgttcgtgaagtgcacacatgactgtggggcaacctgatggaatgccttctgggctcaaaataatatactctaccttctctttgcccaaatgcatattttatattgctacatgcaagcacaacctcttaatggggaaaaaaattctaaatcacttttctctctcagtttacgctgaaatccagtagaaatgcgttaggatataaggtaccatccatatactctcctttatggagttgataagaaattgctataaaccagagcagtgagagctggcttatataatgctatcccctgtctcacttgaaaacagggtgaaacacagaaacaaa

SEQ ID NO: 271696 - DNA, 525 bp, Homo Sapiens
  misc_feature (24)..(24): n is a, c, g, or t
  misc_feature (30)..(30): n is a, c, g, or t
  misc_feature (60)..(60): n is a, c, g, or t
  misc_feature (67)..(67): n is a, c, g, or t
  misc_feature (111)..(111): n is a, c, g, or t
  misc_feature (154)..(177): n is a, c, g, or t
  misc_feature (488)..(488): n is a, c, g, or t
tgtcatttaaattttgggcccccncttgtngggtatccaggtgtggatcctggatcaaanacctccngggttaccccttgggtcaggtgaaaaaggatggcctacctatantgccttttggtcccccaaagtgagtaaaatcccccctagagcnnnnnnnnnnnnnnnnnnnnnnnntccttcatgcccaacccacagcctgtttcctgctgagtttccttatcagccctcaagctatgctaggaaaagttataaaatgccaaaatatttataaacatttactttgtccataaaaaatttacattggatactctgtaagtaggaggtactttgtcccaaaaagatgtataagaatgtactaatagttttatttgattaggattgaacagttcagttgtatctatgccccacagtgaccagtaaagtccaattaaaatatggaaatgtaaaagtgtatgccgaataccttaaagtaacttaattatccnttacacacaaaagggcttcggtgcctttaattttttg

SEQ ID NO: 271697 - DNA, 353 bp, Homo Sapiens
  misc_feature (247)..(247): n is a, c, g, or t
  misc_feature (270)..(270): n is a, c, g, or t
  misc_feature (278)..(278): n is a, c, g, or t
  misc_feature (291)..(291): n is a, c, g, or t
gttggttggtttttttgctttaagttgcatgatctttctgcaggaaatagtcactcatcccactccacataaggggtttagtaagagaagtctgtctgtctgatgatggatagggggcaaatctttttcccctttctgttaatagtcatcacatttctatgccaaacaggaacgatccataactttagtcttaatgtacacattgcattttgataaaattaattttgttgtttcctttgaggttgancgtttgtgttgttttgctgcacnttttactnttttgcgtgtggngctgtattcccgagaccaacgaagcgttgggatacttcattaaatgtagcgactgtcaacag

SEQ ID NO: 271698 - DNA, 539 bp, Homo Sapiens
  misc_feature (85)..(85): n is a, c, g, or t
  misc_feature (104)..(104): n is a, c, g, or t
  misc_feature (117)..(117): n is a, c, g, or t
  misc_feature (123)..(123): n is a, c, g, or t
  misc_feature (126)..(126): n is a, c, g, or t
  misc_feature (134)..(134): n is a, c, g, or t
  misc_feature (167)..(167): n is a, c, g, or t
cctcccctgaaaaggaacgggtgaaaactttggtgtcctgccagaaaaattggctggaacaaaccccccctgttttggaaacgangggaaaggaacctgcccanctgtgttttaaanatgaanaantgggggantggcctggaatatccagccagaacccaagatgnaagagaaggtttttgtgagttccctatgcatagtggagacctgttcctagtgagggtccctggggctgagcctgtgggtcagtggaatgatgctgtgaggagggtcttgctatagcaggtggcccaaagaaggttgatggatcatgagcagctggaagaatggagagttcgggggaggtagttcccacctggctttcccaacagtgtgtaagcccagaattcttacataagcccatggagaagggaaaggaatactggtaacgacaagattgaattctccacctgccaggcatccagagactcagagcagatttaagtgaagttacagaaataggaatgtgacatttcctacatccgggtgtctggagcaaa

SEQ ID NO: 271699 - DNA, 432 bp, Homo Sapiens
tacatgagagctccggaacttactcatcgtgcgtcgtaccctttgatcagcgtctccccatttccctcctccccagtccctggtaaccaccctttgactctctgcttctatgaatttgactgtcttagattctccctgtaattgagatcatgcagtatgcgtggcttttcttgtcctgggcaccgaaaagggtgcctgctgtgggaaacccagggcagatgcccctggcttttatagccccttcaccacagtgcttttataagccctgcaaaaagggtagaaatcattgcacgtttacagaacttgggatttgtaaggggtgaggaggatagaaagacctttgcttttatttttgttttctaatcacagaaggaaaaaatgtcctcattgttaaaataacggaaaagccaaatgtttaggaaaatgtaaagt

SEQ ID NO: 271700 - DNA, 420 bp, Homo Sapiens
  misc_feature (374)..(374): n is a, c, g, or t
gttaaagaggggcagtgagtctctttcccatctgaatggagctgggaaagaaaaacttacacagaataagagtaatcttacgttcctgattgccttgggaacgatagcatggagggggtctccttgagatttctagagatggccaaccctcagacacagctgaatgtccttaggatcctgcaggctgagcaagtaggtgaggggtcctaagaagctagggaaaattgcacaagagggttggcttcacaggtgtacagtagtataaggcccagaaggctttttgcagctggtttaccatttctggcttccactatcttggaaattctttaaaacaagggggccccacatttttcatttaaacattggcaccctgncaggtttttgttaactgggttcttgatggcacaagcctgggggttt

SEQ ID NO: 271701 - DNA, 417 bp, Homo Sapiens
ttaattacagtataaaagggtttctagctgttgaaaaggttgggagctactgaattaggcctccagatcctgtggcctacctgttatacctcaaagcctcaattttcagccgcttccttagcctttctcaaccagggctgtgagacagttaagctctaaggaaaattgtgtgagtaactaatatcagttctcccaaggactgtatttaggtattctttacctaccatggatgtgttaggggccagactctcttgggaaggatgcttctcttctgttctcttcccttgccctctccctctctttatgcttctgttttgtgatcccccatttacacacagggaacaacctcaaagttctggggttgggaattggggaccagaaaatgactatagctttatcttctaatatttgtgttga

SEQ ID NO: 271702 - DNA, 383 bp, Homo Sapiens
  misc_feature (36)..(36): n is a, c, g, or t
  misc_feature (359)..(359): n is a, c, g, or t
cttttttggcaattcataaaatgatggcgtgcatantggtcaatggtgtctagtagacacttatatagtgctggtagcattataaactcctttaaaaagcaatctggccatatcaaaggcaaaaaaagtgtatataccaccctggcacaaaaaaccccaatgatcctatttccaagaatgtatccagatgaaagtatccaacaacaaaaagctatatacacaaagatacatatgatattgttcaagagccaaacaaaaggaaaaaaaggaggacttatccaaaataccccggttaaccaattacccggcttaccaaaattggatggggcacaggttaatttaaatccagggcaggtatngggtttaaccatttaaaggtttag

SEQ ID NO: 271703 - DNA, 527 bp, Homo Sapiens
  misc_feature (19)..(19): n is a, c, g, or t
  misc_feature (25)..(25): n is a, c, g, or t
aaaacttctggcaactgcnacaacntcctctccttaaaactaccactggtcttccccctgcccctgggcccaggaccagagctgggctttgggttgggtggccttcgttgcatgcaccacggtgacagccacagcagccccagctctcagactggctgactgcacccagagagctctgacttccccagggcttccgggaaaggctgagtaacaaaacatggaaatgattgtctgtggggtaaatgttgaataatggaagatgggagacaggaaggagccagcagataaatggcttctccttcttccctaggatagaactattcagagaagctgtaactccccagggacaggtcttgtgattcagcaaccagctgtaccgctgatggagctacggtcagctcggcacacacatcgcctgatcacctgtgtttgctttctctcattccctgccttacagcccctgtcccccttatgcccatttccctgggattgaacccccaaataaagtgttaagatatgaatttaaa

SEQ ID NO: 271704 - DNA, 540 bp, Homo Sapiens
  misc_feature (27)..(27): n is a, c, g, or t
  misc_feature (63)..(63): n is a, c, g, or t
aaaagctgcccccaaagaagttgctgnaagttctggaagcctcaatctggctgggaatctccnaaagggcctccctggattcaagtccccaactggccctgaagcacgacagcccttcttaccctccccaggaatgccgtgaaaggagacaaagtctgccccgaccccatgtctatgctcctacccccagggtagcatctcagcttccgaaccctgggctgtttccttagtcttcattttataaaagttgttgcctttttaacggagtgtcactttcaaccggcctcccctacccctgctggccggggatggagacatgtcatttgtaaaagcagaaaaaggttgcatttgttcacttttgtaatattgtcctgggcctgtgttggggtgttgggggaagctgggcatcagtggccacatgggcatcaggggctggcccaacagagaccccacagggcagtgagctctgtcttcccccacctgcctagcccatcatctatctaaccggtccttgatttaataaacactataaaaagttaa

SEQ ID NO: 271705 - DNA, 546 bp, Homo Sapiens
  misc_feature (26)..(26): n is a, c, g, or t
  misc_feature (92)..(92): n is a, c, g, or t
  misc_feature (130)..(130): n is a, c, g, or t
  misc_feature (141)..(141): n is a, c, g, or t
gggactttggcccctccagaaagcancccgtgagcccacccgcgccccggcccgcatcctctgtcttttccacttccctaatatttaaaagnggccagctcaaggcccacacctaccccccctttagtgncccattttaancctttcccttggtcctgtagtgccaccagatttaagtagactcccaatatttccaaaataatggcccccatgcccccaagtgttttcccttacagctctgtagacatcatgtggtaaaacaaaaacattaaaagcattcagaaaccaaacaaaacagaatagctttggtgttaccatttatacttcatttgaattactggatactagttctttgtagacatttggaggtttctccgtaaagtcctgataagaattttcagaaaaggaaggcatagctcttaggtgactgagtatattggggagtagtgtggattggtgacacaatagagtgctttacagagctagaggggatcattacagtgaagtatttctgagcaaggataggcatcaaaaatagggatggaa

SEQ ID NO: 271706 - DNA, 617 bp, Homo Sapiens
gcttttctttgtttgtattaaatattgaaccttcattgatatggttaccatggctacactacctcccaaacttagtggcataaaacattcattcattatgctcacagattctgtgggttagcgatttgactagaacacagtgggggaaggccaatctgtgctctgtgatgtctggggcctcagttggaagacttagaagtctgaggctggaattgtctgaagtttgctcactcataagtctgggcagttgctgctgggctgtcagctggaggaccttattagcagaaacacctacatgtggctttctttgtgggctgggctttatccctgcatggtggctgggttccccagggcgggtgtctcaagagaaagtgagccaagagaaagttgtattttctttttaatgacctagccttgtaataagattggacattaccgtgtttacccttgttccacattgattttcctgggatatttgtttttatcacaaccactcctgagaaacaatcttgacaaagatataatgtcattgataggaatggagcaatatacagttggtcctctgtatgtgcaggttctgtatccacagattcaaccaatttctgattgaaaatatt

SEQ ID NO: 271707 - DNA, 204 bp, Homo Sapiens
acaaaaatctaacagtttttaaatttaaaaagaacaaaatattctactcatacattgaattcaaaagcaaagaaggtttaatgaaactatagtcatttagtctcatgtaggaaaaaaatgaggaaaatacaactatcttctactatacaaataaaactaggttctctttcaacccaaggaaaggcaatgtggattacagggccc

SEQ ID NO: 271708 - DNA, 521 bp, Homo Sapiens
  misc_feature (74)..(74): n is a, c, g, or t
  misc_feature (92)..(92): n is a, c, g, or t
  misc_feature (116)..(116): n is a, c, g, or t
aaagggaaataaattcaaacagattatatgtttccaaaagtggaggaccagacatggtgtgggtaagtcttccncccccggatggcaccccnaagggctcccaccctccctgatantccttcccatttgtgtaagttcccttcccccacacctagtaggattggtctcccactacccaaaagagtacagcagaagtgatagcatgttacatataagatgggcttataaaaggcactgttgcttctaatttgattgctatctctctttcttctatcacttgctctggaggaagccagttgctatgtcatgaactgctctatgaagaagcctgtttgtcaaggatctgaagcctcctgccaatagctgcatgaacgagtttggaagatccagttctacccttcagatgactgtagcttgacgtcaacctcatgagagaccctgagacagaaccacaaagcgaagtccctcctggatccctgatgctacacaactatgtaataaatgtttgctgttttaaaaaa

SEQ ID NO: 271709 - DNA, 483 bp, Homo Sapiens
agtgtgcccaggaagcaggcaacgtatggcgacgctgggctgacctacacattttcaggcctcacgctgtctccaaagccctggatcccagttctagagcgcatccgggatcacgtctctggggtgactggacagaccttcaactttgtgctcatcaacaggtataaagatggctgtgaccacatcggggagcaccgagatgatgaaagagaactggcccctgggagccccattgcctctgtctccttcggtgcctgcagagactttgtcttccggcataaggattcccgtgggaaaagcccctccaggagggtggcggtggtcaggctcccgctggcccacgggagcttactaatgatgaaccacccgaccaacacgcactggtaccacagtcttcccgtgagaaagaaggttctggctccacgggtgaatctgacttttcgtaaaattttgcttactaaaaaataaaaacatttttaacaa

SEQ ID NO: 271710 - DNA, 700 bp, Homo Sapiens
ttgtttctaacctttgaggatttgtgaccttctcatcaaatatacttctcggacaacttatcctttgtaatttggccatcacagagttatacttttttcctttacttgcaaaggttccagaaatcaacccctcccattttcttttccttctgctatcaaaggttgccaggagcagtcctctgcaccaatccctagatgaatgatgccctttttctacttcccagggataagcacataacatttaccgttcttacaaaggtgcaatcacaaagattagactagatattacttaacaataacaggcaccagtgtgctaaaaatggtaaatggcaacaagaaaaatagtaatatcctaaatatttttctcatcacctttaaatatttataaacaagcctttaagcctctggagtcctacattcttactctttgccaagcgaaacacgattccttagctttcctttattcagaaccctctcttaatcaaaaatccccagttctagagtctgagttctcattcctttttgcattaactgcctgctaaagcttagctgcccagccttacaggaccaggcagtgggaagtggcacagttaatgttagctcctgtcgttttgcacaaccttagcctggccagattcccaggcctcccaagctgctttaggccttccctaaataatgtttcagtttagaaggaaggtcc

SEQ ID NO: 271711 - DNA, 459 bp, Homo Sapiens
  misc_feature (27)..(27): n is a, c, g, or t
  misc_feature (83)..(83): n is a, c, g, or t
  misc_feature (404)..(404): n is a, c, g, or t
catcacctcaggttttatctctccccnaaaccgcttggaacaagaggcatgcccccagtggaaagtgaggctgcctgcctggnccctaaaactcccagtgctccgcattcccaaaatgccccccggatggagggtggtgagatggtcaccacaggtggaaaccagcatcgagggcaccattcccttcagcaagcctgtaaaagtttatataatgcccaaacctgcacggcgctaaggcaaaaacagtcttcccaaccgtgcctagagggcccttcttaggtgtcagaatgagccaagcctgaagcacttcacctggaattgatgtgtaggcttaaggagtatgtgacccttacagtctcatctggtatcaaacacaggataaattgtttcttcattaaaaaatnaaaaaccttcaagtctacttacccttctcctgtccacaataaagttgagaaaaca

SEQ ID NO: 271712 - DNA, 461 bp, Homo Sapiens
  misc_feature (397)..(409): n is a, c, g, or t
ccagggcggcaccggctcatcactcaggtttatctctcccacaccgcttggacagaggcatgccaggtggaagtgaggctgctgctggcctacaactccagtgctcgcattccaaaatgcccctggatggagggtggtgagatgtcaccacaggtggaaaccagcatcgagggcaccattcccttcagcaagcctgtaaaagtttatataatgcccaaacctgcacggcgctaaggcaaaaacagtcttcccaaccggggcctagagggcccttcttaggtgtcagaatgagccaagcctgaagcacttcacctggaattgatgtgtaggcttaaggagtatgtgacccttacagtctcatctggtatcaaacacaggataaattgtttcttcattnnnnnnnnnnnnnccttcaagtctacttacccttctcctgtccacaataaagttgagaaaacacc

SEQ ID NO: 271713 - DNA, 372 bp, Homo Sapiens
  misc_feature (68)..(68): n is a, c, g, or t
  misc_feature (73)..(73): n is a, c, g, or t
ccagaagccagcccttggcatgcccatggggtggattgtgtgtttatagaaaagtctgggaccgtaancgagnaaatgggccacagctcagcggaagggaggccggtggtgaggatggaatggtggagaggcaggctcaggtgtggccccccaggagctgccttccccacttttttgggaggtagggtggggaagaagaaaagagcaaattgtttaaaaatacacatgtatatagaaaatagtaaaactgtaaggttatctgtgtgttgttggattctgggaaattcacattttctctattctctgtattttccaaattttctataacgaatatgtatttcttagaataaaaatttttttcttcaaaaaaaa

SEQ ID NO: 271714 - DNA, 439 bp, Homo Sapiens
  misc_feature (36)..(36): n is a, c, g, or t
  misc_feature (84)..(84): n is a, c, g, or t
cggagggtctcccctgggcaaccctgcaggcaggcnagaaccaccagtgtggggggtgccccaacaaagcctcagccctgggcnaaggaaagctttggaagcagcaaggtgggggtcaggctacaggtgccccacctccccagagccctgcagtcacagtgaggcccctgtgcagtagagagcctttcatccagcccatgctggctggggccgggctgccgcatctgcctggagcctgggcagcacctccgggactgacttcggcagtggctgggggactgctttcagtgcctgctgttcgtgactcagaaacagaagaaaaacactgagaaaaagcattaaaaataagccaaaataagacttattggtaaacacctaaatttttgtaagaaaatttaaaaattaaagcagcaaaggaactttttgctttctgccactc

SEQ ID NO: 271715 - DNA, 373 bp, Homo Sapiens
  misc_feature (17)..(17): n is a, c, g, or t
  misc_feature (34)..(34): n is a, c, g, or t
  misc_feature (40)..(40): n is a, c, g, or t
  misc_feature (45)..(45): n is a, c, g, or t
  misc_feature (59)..(59): n is a, c, g, or t
  misc_feature (73)..(73): n is a, c, g, or t
  misc_feature (88)..(88): n is a, c, g, or t
  misc_feature (93)..(93): n is a, c, g, or t
  misc_feature (98)..(98): n is a, c, g, or t
  misc_feature (111)..(111): n is a, c, g, or t
  misc_feature (123)..(123): n is a, c, g, or t
ccccgggtactggtggnaccccctacccccgggncccggnatccngggacttaacctantaacaaaaaacctnacgggaaaaggtgtnaaagnaaaangaaaaacctatanggcccttaacantaacctaaggcaaaaaggaaaaaagggcaaagggaatattaaatattaagacaaaaacaatatccaagaggaaaaagcatcacccaggaatagtcattaatgtaatgcctaaatgcctttgaattcactgcaatttaaaacgacccaggataattattcactgcaactttaaaccctggatataacttataaaatagactcaaaatacatagagaaaaaaatgatatacaactacatggagaaattttct

SEQ ID NO: 271716 - DNA, 460 bp, Homo Sapiens
  misc_feature (22)..(22): n is a, c, g, or t
  misc_feature (54)..(54): n is a, c, g, or t
  misc_feature (68)..(68): n is a, c, g, or t
  misc_feature (70)..(70): n is a, c, g, or t
  misc_feature (125)..(125): n is a, c, g, or t
acagagctggtcatgccacagngaaggcctccatatgaaacacaacaaacccangctctccccggtgntncgtagcccagctacgaaatctgtcatccccaaactaacactcccagagccacttnaatgggttttaggggagcgttcaaataaataatcatttccctggtattggagattggatttccatacaccatagccccaggcccaagcttaatgggagagagataaagaacagagttctttttcccaaaagtaaaatttacttctgatccattaatatgtatgcaaatagtttcttccagactctgtggtctgggaaataaaatagccagcttgatcataattattttcttacttccagggtgcttgatattagatgcagtaatggtttgctatggcaaatcctagggcctctttccctagaaagtgttaaataagaacaggttgctgtgccgaa

SEQ ID NO: 271717 - DNA, 380 bp, Homo Sapiens
  misc_feature (42)..(42): n is a, c, g, or t
  misc_feature (66)..(66): n is a, c, g, or t
  misc_feature (103)..(103): n is a, c, g, or t
  misc_feature (135)..(135): n is a, c, g, or t
  misc_feature (236)..(236): n is a, c, g, or t
  misc_feature (244)..(244): n is a, c, g, or t
agaagacaggggaaaaagccaggttgaaaggttcctgaaacnggaatccccactaaaccgtgggtnacattaggggacagaacactagcatgggcttttgccncctaattcagcgttctcaccacccttgttgtnccatagagcctctggaaagagagtgacctcaagtgggactggagtgaaaggccaagattgagaacgcctacctattttttacaaggtggtctggaatgtantattattnttttcccttctttatttcagtctgggcatttttgcctcttaaaagcagctaaccctttaccacggaggtgatgcagaaatctactcatcaagtaagcctgaaagccctttgcttcctgcagaaaaatctatatgtg

SEQ ID NO: 271718 - DNA, 392 bp, Homo Sapiens
aaataaactttggccttaaaaactgtccttccatgttccttcaacttccacaaaatataaaagctgttaacagtggacctttgtgaaggttcccatgtttttggtccagcccataaagaggaagaaataattccagaatgaagaggaaacagattcctaggcagccctcagggaagttgaggaggtggcaccctgcctccgggtccctcagaatgtcccatctccctgtcagtatcagtgtcccagataatcttcttctgattgggacatttccctgggaacagtggttacttgccaaattcacatttacggccaaaactgtggctgcagtgtcgacattcatgcaagtggggaaatgggcatgtgacccctgaaaaaagattctggattcc

SEQ ID NO: 271719 - DNA, 400 bp, Homo Sapiens
  misc_feature (20)..(20): n is a, c, g, or t
  misc_feature (38)..(38): n is a, c, g, or t
  misc_feature (55)..(55): n is a, c, g, or t
  misc_feature (72)..(72): n is a, c, g, or t
aaaacaaaaagggaagattnacgtttttaaggacattnacattaaagaatcttgnaaataatccagagttgnaatttgttggcctgccttccctcctaggcaccagatgacatacaaactattgtaaataagaagaatttcatcccaggaggcaaaacgggaaatgaaactcaggacattttatttctgagaatccctctaaatttactctaggagtaacactatcaaaatatcatatgttcaacattataggcaataacatgccacttagcttcctctaaagcaactttcaaataaaaaatcagggatccaggcaaagtaagaggcacttatgctacccaacctagagcttcctacgaggcatggggaagagatgagaacacacttctctagtttatcc

SEQ ID NO: 271720 - DNA, 448 bp, Homo Sapiens
  misc_feature (244)..(244): n is a, c, g, or t
  misc_feature (336)..(336): n is a, c, g, or t
  misc_feature (375)..(375): n is a, c, g, or t
  misc_feature (389)..(389): n is a, c, g, or t
  misc_feature (399)..(399): n is a, c, g, or t
  misc_feature (420)..(420): n is a, c, g, or t
  misc_feature (427)..(427): n is a, c, g, or t
gcttacctaccctctctaatggcccctcctgcaggtacacacccagcgaccagagtagtggctcaaccacatccggctcccgtcagctgcccgccgcagcaccagcaccctgtacagccagttccagacagcagagagtgagaacaggtcctacgagggcactctgtacaagaagggggccttcatgaagccttgggaaggcccgctggttcgtgctggacaagaccaagcaccagctgcgctnacttacggaccaccgtgtggaacacagagtgcaagggtgtcattcgacttgggcgggaggtgggaggctgtgggcacctggggcacgcccantatggggtggcccctaaagattgtgggacgaggaaggcnttcttttgacgttnaagacaacgncttcggtttttaacaaatttnttgttgncccagggacgttgcctttcgg

SEQ ID NO: 271721 - DNA, 412 bp, Homo Sapiens
  misc_feature (16)..(16): n is a, c, g, or t
  misc_feature (58)..(58): n is a, c, g, or t
tgccttaaaggaatgnccccggaagccagtggcttaagcaacatcgaattaaaggcanggctctgtccctgaaagtttgtccctcaagcctcccacagaaccacattttgggcctaagaactcccaaagcccttggtgaactcactgaggcaacatgtcctgttacgtttcccattcctccccattcctttctttgagtttttccttgttctgccttctggttctctatctctccgtcccccaagttctgatgtccacagggacaagaacccactgtttcctaaatctgtgagtcgggtttccagctcctaccaagctctgtatactaagaaggtaaaaagtaaagtttaaataatctcttagaagtaggaactcaaggagctcaagttaattcacaaacaacagtgtgaag

SEQ ID NO: 271722 - DNA, 495 bp, Homo Sapiens
  misc_feature (58)..(58): n is a, c, g, or t
  misc_feature (284)..(284): n is a, c, g, or t
  misc_feature (312)..(312): n is a, c, g, or t
  misc_feature (454)..(454): n is a, c, g, or t
  misc_feature (474)..(474): n is a, c, g, or t
tgtggcattctgaccagtgcaggagcagctcctggggtttgggatccagttccgaaangaccctctacaagattcatatatctcaggggtatcctgtgcagggagcagcaggtgggtacccaaaacatttgaatgttctttatggaaaagtgtcattccttctacttgctgcagagaaatccattgagaggacaggccctcgctgctggccatgtaccctttctgggtgcatgggcagagctaacctccctgggagcctggggtgcgccgggtggtgcagcttnggggaggagaggaggagggcttagcgtngctttttgtctttttcagccccttccaacctgtttggatccatttttcctctgtgggctatggatttgcttttaagtagtgtttactttgtagaattatttgggaaaatacaagaggagtgtaaagaagaccgtgtatggtnggctttctagggttcaggtncaggggggcccggcaggtttt

SEQ ID NO: 271723 - DNA, 683 bp, Homo Sapiens
  misc_feature (19)..(19): n is a, c, g, or t
  misc_feature (25)..(25): n is a, c, g, or t
  misc_feature (34)..(34): n is a, c, g, or t
  misc_feature (41)..(41): n is a, c, g, or t
aaccaaccctccaaccccngggcantttgggaangcgaacnactggaattgtaaggcccaacaacaaccctcaacttcccaccctggcaagccctcctgtcccaaagcggtgtggggaagaagaataaaacctgaatgaatgaagccggtgcccgcccctgggcccaggattccggaaagtctgcaaggcttggggtgaatcatctgaaccctggcccatctggatataagaccctggaccttaacagtgttctgaggatcctgcacatgctcccagggttgcatcaacatcccagggcaaccaccaacccagaggtaaaccgcaaagggttgtctgaacctgcccgctggctcgatgatggtggctgaggctttgtggatctgctctggaagcgggagatgcagaaaggcactctgtcgcagcatggtctgtagaattttgaccacttctgcaggtttggatgtcatgagtcggggcataaggtcaaggagtttgtccacaaagctgtcctgcaagtggggcaaatcagcgatgaaatacctctgaaaaaagtctacttcctgtaaaaatttttcacacatcccaaataaggggtcaagtcctcgtgtagttcgtgctgttactataagttgcaaagctttgcctgcagcctcatgtgatgtataatcaccacctgcttatt

SEQ ID NO: 271724 - DNA, 340 bp, Homo Sapiens
  misc_feature (40)..(40): n is a, c, g, or t
  misc_feature (73)..(73): n is a, c, g, or t
  misc_feature (97)..(97): n is a, c, g, or t
gcaggagggtgtcccaaaaagtcaggcttggctggggcgnagcgctgcaaacccctgtcgccagggggctccnaagctccacggcacgatctgctcnagggtggcccttcttccacgatccaagccctaagaacaagaggctgggcctgggcctttcaagggttccttctcagaggcctctcctgcaagagtggcgccccgtggcctccgctccctctggtccaccgtggagtatccgtctgggcccagcgcatccatggggatcacatcccggctgccagttttcatgccctcaaggctcttgtccaccagtggcagcgtgctgtcatcgaagccccca

SEQ ID NO: 271725 - DNA, 521 bp, Homo Sapiens
  misc_feature (43)..(81): n is a, c, g, or t
  misc_feature (379)..(379): n is a, c, g, or t
  misc_feature (404)..(404): n is a, c, g, or t
  misc_feature (458)..(458): n is a, c, g, or t
  misc_feature (466)..(466): n is a, c, g, or t
  misc_feature (473)..(473): n is a, c, g, or t
  misc_feature (490)..(490): n is a, c, g, or t
  misc_feature (505)..(505): n is a, c, g, or t
ttaagagacagagctagctctgtcacccaggccagattttagnnnnnnnnnnnnnnnnnnnnnnnnnnnnnnnnnnnnnnngccttaagcaatcttcccaactcaggctcccagagctttaggatttcagtaggattataggcatgagcaccgtgcctggccaattgtttatgtctttatgcaggactaaagtgaagagactggactaatcagactaaaattatatgcatgaaattctgcatacacatgaagaatttgcatctttctaggaaagtgggtctaaagcttccatctgattatcaaagaggcccatcagcccaaaaggaaggttaaaaactgggggactgggaattaatctcccaagggttcattcaagganttattaaccattaccaattttgtgncttcttgggcagtggcctacaggaatgtttatctccatgttatcccttttgatnctggaggnatcgtgnctccggctccaataccngctcaggctcccagnctctgggttttggggt

SEQ ID NO: 271726 - DNA, 687 bp, Homo Sapiens
  misc_feature (565)..(565): n is a, c, g, or t
  misc_feature (585)..(585): n is a, c, g, or t
  misc_feature (592)..(592): n is a, c, g, or t
  misc_feature (625)..(625): n is a, c, g, or t
  misc_feature (641)..(641): n is a, c, g, or t
ttttttttgtctttcattagactttatctgtacatcaaccacaaaatcagtcaaacacactcatttataagttaatgccatccctgaataattcagcgagagtagattaaggcctgcaacccagtacgatgcatttggttcccttggtttccacgggcagatgggctggtctggtggcggatttgggcttctcttttgtgggaagaagggaaggcaaagggaaggagggaccgtggtggcatcagatggttgcttcacttgaatccacagctcctctaggtgtttggagagtcttcaagtgtccagatgtgggcaggctacatctctgcctctctctgggggcaaccaagacttggagctatagtaatgtaagctgcccttaaccccagtggcgagagtgagagaagagcgttccctgcacggccaagatactcttttctgctgcagaggaagtatagaagggagatagaagaacccttatcaaggaggctgagctgtgagactttttagcccaaatccagggtgcagaagtcaaatttcgggcctttcccagcccatttctgtnccagttcaaggcatgtagcntggtggnaccaatctcaccaaaacagttctctccttaagngcttcttggctgctgngctcctcaaagctccgggtccttatgccagaaaaaaacgtcaatag

SEQ ID NO: 271727 - DNA, 455 bp, Homo Sapiens
gcagggctttacagccagagctcagaagagcacagtcctaacggcttgacttccgataactcagatggacaaggagaaagacctttgaatctccgaatgcctaatttacagaacagacaaccccatcattttgtggtggatggggagctgagcagactttaccccagtgaggcaaagtcccactcatcagagagccttgggattttaaaagactaccctcattcagcttttaccttagaaaagaaagtcatcaaaacagagcctgaagattcaagatagctgtgatttctctcaccgttctctggaaatggcatcagatttaaggataatactccatcatagaaataagccttaataaccagtgttgcctcattcagctcaaacagatttcatagccaaagcaaaaggactggtacggtagtctgtggaaaccaggaagataaaacaacagccac

SEQ ID NO: 271728 - DNA, 423 bp, Homo Sapiens
  misc_feature (38)..(38): n is a, c, g, or t
  misc_feature (108)..(108): n is a, c, g, or t
caaagggctcccacccctcaggccttgtgccccatggnccctaattgagaaacaagggactccttgtcttcttgcccccaaatgttgcatttttcccaagacccactnttggcctgcccatgcccaccccattctgtgccctataaaaacccctgagacccccagcgggcacacacacaagcggctggacgtcaagaggaacacactggcagaagaacacatcgaaagacgctggcaggccattgatggtggaacgattcggacgccaagggaaattcggccaaggacagtaggagaatactccgctgagcagccagactccagaggaagactaccttcccatgctatccccctttctgctccccagccatctgctgagagctacttccaccactcaataaatcttgcattcattctccaaaa

SEQ ID NO: 271729 - DNA, 446 bp, Homo Sapiens
  misc_feature (19)..(19): n is a, c, g, or t
  misc_feature (34)..(34): n is a, c, g, or t
  misc_feature (91)..(91): n is a, c, g, or t
gccctgagttgtggaaggncggcagggaagaaancccccagaagcccacctaataatatcaaagaaggcccggggccgtgccatcctgtgnctgggaagatccttaatgctggcgaacatgccctcccatcaccccaaggaaagatggataaagagttgggcccccataaagacccacaggggctggaggtggcactgagaagactgagttagaactaacgggccagccccaccctcccccagcaagggtatcttgaatctatcccagggtcccagtgcatgcatctctcccaccctttcccctgtcctgtgtgtgtgctgggtgcggaggtcactaattctgatattaccttcctctgggccttaaattcctcatctgtgaaaaagtcagttaccatgatctctgcagctacctccaatattgaaagtttgtagttgtcttaaaa

SEQ ID NO: 271730 - DNA, 470 bp, Homo Sapiens
ccagggcaccgttctagaacaacgtcacttcacacaggcagctgagaaaggttctcttgcttttccagtatcttcctaaggatggagcccaaaattgcagagcagtaactttggaataaaaccagggtgggtataaaacttcttattcttaaatttacatataagatctattaagcttgacacatctgtgtcatcacgcactgaagacaggaagcagttcactgagtcagctggttcccaagctcgcacagaaggtgataagttactatcaaatgccagtgagaatcttcttatagaataacctgggcccaagtgattttagtacaaaacttgcccttctttggtttaattttctatgtgcttttaggtgtgaatccagatatgcggtcttaattcctttggaaatacacagttcgtttagttactgtacactctgtttgttcaataaactgcatatcaacttcccacaa

SEQ ID NO: 271731 - DNA, 465 bp, Homo Sapiens
  misc_feature (257)..(257): n is a, c, g, or t
tttccaaataaaacaaatatttaaaaaatttaatgaataaacactggggtctacagtagtatttgaaggagatctcacaaacaggtttggtttttgaaggttagaactggtggtctagagaattcatttcattccagagaaagaaagagaggaatttcttgggttccttcaggaatgcatctagctttgcctcatctttgtttgaacgatgggatacggcagaagaaaagcatgagggatttcacaaatttaagggngcaaaaagtcactggggttctctaaggaagtctgggggattcttctgctggaaaaataagtttgttgagaaaaaatgagttggaggaggctgttattgaagtgaagcagaattgtttttactaatctgcttattacccactctgtagtgtggaaaattattcatgcacaaggtcctcttactgttccttgtctctggggagcctggaa

SEQ ID NO: 271732 - DNA, 403 bp, Homo Sapiens
agtgatggcctttgactcatgaggcctggagaaaagtatcaaaggtctcaccatgtaagagtgatttccgatttctctcctttcagttgtgtgaaaaaacagctggcctgggttccattagcaaattaaatcatcttcaatcttaaattagagaccagaatgatcttcaggataaaaagaacttctgaatctctgcaataggaaatgtttcgatcatgcaagtgctttcccagccaaatgtctgtgctctctgtgtcactgagggccacaggttcctctaacatctgtcactgtcacttcaccagggcaggccttggagttccatgacaaaatcacttttgtcagacaaagaatgtatcctttacttttctcaaatggaataaaattatttcttctgtggggg

SEQ ID NO: 271733 - DNA, 321 bp, Homo Sapiens
  misc_feature (92)..(92): n is a, c, g, or t
  misc_feature (289)..(289): n is a, c, g, or t
tgtggagttgctcaaagtcacactatagctgtcaggactaaacatgactctctctatacacaatatgtctccatatctatgtctacctatancccagggctttgtatctaccctgatacccactatctagtagatatctatattcattgcaccagtattttccagatttcaagtacttcgtaattctcaatctgtaccatatgtactcaccatcttcctattatttgtttccttcaagtcaactcaggattttccctcgtttatttaaaaacaacatttgtaacaccangtgtaaataaaaaaccagtttacttaccaaaa

SEQ ID NO: 271734 - DNA, 523 bp, Homo Sapiens
  misc_feature (12)..(12): n is a, c, g, or t
  misc_feature (30)..(30): n is a, c, g, or t
  misc_feature (38)..(38): n is a, c, g, or t
ctgggggggcantccccaagtaggaatgtnaaacccanaggtttccggaatccgtgacatcccaccccccgggcaaagtgaagagcatcctgcaaaatgccaaaagagaacctaccctcataatgccaggatgaacccaatggcaagtcctcaagaaatgtacctcgggcgacacccttaccctgtggaaagcaaatccttttccaaaataagcccactgggactcggtaggtggagcccccagctgctcttcctagggaccctatggggccttcgtggcatctctgtgctgtgtgctggggaggaggttgatgtaatggtgactcttttctgatcagcaccttggccgtgattcccaaggtcccagccaaagcaaagggccagttgtttcagtttaaacagacatgtctttagtctaataaaattagttaactgccagtaaagttatttgttagctttgatgaaagctatgttggtatctttccctaatcatcaaagtaaataaaaaatcatttctaaaaaa

SEQ ID NO: 271735 - DNA, 440 bp, Homo Sapiens
aaatacacccaaacaaatgtccccatacatactgaagatggaatctcacccacacaccacctgctggccccgggaaaaccctctacttgctagctccccagcttcccggacaaacagcgctgggtcaccgccttagaatccagttgtcgcaggtgggagagtttcctagggaaaaagcacaagctgatgctgtgagtatgaaagcgggccctggaggttgtctttgtaaagggggctgacttggtaactggtgttaacgacgagaatcccattggccattttgattcccctcaggctctctctctgagggctgatggctctagactgtgtcatggccaggagtctggtggtgatgaaggcacaagcaccaaggtagcttgtgtggcatcatgatccatttagaatgtgggaatcagggatgcggtggctcatgcctgtgg

SEQ ID NO: 271736 - DNA, 889 bp, Homo Sapiens
  misc_feature (57)..(90): n is a, c, g, or t
ctcaggctggagtagttggggtactccagctggaactccgaggctcaagcaatcctnnnnnnnnnnnnnnnnnnnnnnnnnnnnnnnnnngtgtgcatgagccaccatgcccagccctatctattaaaccttgattgaatataacagaccaagtacaactgcaccaaatcgatgggctgtaaccatccacactggctccaaggaagcagaccgctggaccccagctctgcacatggctcaggcaaggccgtgggagcccttgtatccattatgcttgagatcctgcaggtcggccttcttccttccttctcggtacattgtaatggccccagtttccttatttttatcctgattctaataaccagggtccctgaagaactttctgagggaacctctgttttaaagggaacacaaactgttctctgctgttttactccctctggacagcaagtatgagtatcacacagaagactagaacaaattcctagctcatgcagctttaaaagagaaacttaagactactatatgacattcacgaattacacaaaaaacactgttgctaataagggcaccattcatggccatgaaactccatcatgtctcttgtggtcaggcttgagacaaagctttctggtaggaaagtttcttcccttattaaaaacgcgagcatcacttcatttttcgacagaacttaggtcttcggtatggtttctctttatgtgcctcctcaggttctcttgctccaattttctctgatgctccaggaagtttaaaattgtaatccgttgtgacataaggtactgtcccttcgatcccacgctggcacttaaggacacaatgtggaatgggcaatagctccaacgagcagacaattcacggtccttagctt

SEQ ID NO: 271737 - DNA, 297 bp, Homo Sapiens
aatcggcacgagaatacgtgagaccctgaaaactcccccgacccccacagagagacagtcaccctggtgagaaatttatcaaaataacccttagtcttgcacattgggcaaccccaaaagaaataaaggtttttgcaattcaagcatgcaatccctttatcaagacaaataggttattactcccaatatatacaacagacagagaggggctaactcagtttggtttggcatttcaggtttgtctcagatgagatatgttcctccttaagagagctacagcctgggcgctgtgctcat

SEQ ID NO: 271738 - DNA, 417 bp, Homo Sapiens
aaataagggataacatattctttatagaatagtgcttgttctggaagagattcaggtgaaaagttggcgtggcatgtttgaggactctgcggatcagtgctacaggagtacatctgccctgccacatgactccagaagtctctgaccccatttgtttttaatggcatcagccaatgagttatcacccttttcctcctcttttctctttaatcttctgttgatttacacctttgacatttgtattcgtcaaccctgtggcttgttagcatcagaacctctctgaagaccaaacttccctgtgtggccagcagaggaagccttgaggatagatctcgggtgacgtgggattttctaagcctgagaggtgtccttctgcacacccttgtaacaattaaaattgcttttcttccatgttaa

SEQ ID NO: 271739 - DNA, 562 bp, Homo Sapiens
  misc_feature (14)..(14): n is a, c, g, or t
  misc_feature (32)..(32): n is a, c, g, or t
  misc_feature (60)..(60): n is a, c, g, or t
acctagggcgggancccttaccccaggatgtnaaaccctgaagtgatccgagctctggancgtggataccggatgcctcgcccaaagaactgcccagaggagctctacaacatcatgatgcgctgctggaaaaaccgtccggaggagcggccgaccttcgaatacatccagagtgtgctggatgacttctacacggccacagagagccagtaccaacagcagccatgatagggaggacccagggcagggccagggggtgcccaggtggtggctgcaaggtggctccagcaccatccgccagggcccacacccccttcctactcccagacacccaccctcgcttcagccacagtttcctcatctgtccagtgggtaggttggactggaaaatctctttttgactcttgcaatccacaatctgacattctcaggaagcccccaagttgatatttctatttcctggaatggttggattttagttacagctgtgatttggaagggaaactttcaaaatagtgaaatgaatatttaaataaaagatataaatgccaaagtctttacc

SEQ ID NO: 271740 - DNA, 575 bp, Homo Sapiens
gaaatgcaccatttaagtcccaaagatgaatactccattgccaataagcccatgaaaaacagaaccatgtttaaaaaccctcctgaaaaaaccctgtattgtttcctaagtgaatacttgcccagcaacgcaggaaaacaagctagtctcaggatcccctggggttgacatggggaaggaaaacaaaggcattggggcagctccctggacccaagcctcagaccttgtcgtcacttagaggaagtgcccagggacgcatgcttctggttggtatttgtgtgagctgataggctttgatgatgggcttgggtgtgtgtgtgcacgtatgcgtttaatagcaagttcaagttcagtgtaactgcctttggaacaatagtttccattctctgcagccagtacctgggtcactcccttgataatgggctcactgtacagctgtgaactgtgaattcagggacatgtatttctgcccagccttgaggttgcaagcacccagcacatccacacacctcgatgaaaggggcttctggaatgccatttgcacatctaaataaatccaccctcaaccgtaaaaa

SEQ ID NO: 271741 - DNA, 519 bp, Homo Sapiens
  misc_feature (19)..(19): n is a, c, g, or t
  misc_feature (75)..(75): n is a, c, g, or t
gcctataatgccatatatncccatgcctaaaataccttgccttatgtaaaattgccacacctaaaaataacacgncctatgggccaaaaatagatttggagccagaaaaggaaaaccctgccaacctttataacctaaggtgcctaacaaagtcaataattgataattccactggaaagcgcaggaagggagatccagtgggttggagtctgttataggggcaattaaaaaatgtacaaaagcaagtagggtggaaatgctagtatagaggcattgaagccatggcagatggaagtagagctctgagccagtgagccgagagtaaggtgggcacaagagaaagccaagagccctggaaagctgggaggtgctcctcacctgggatgcaggtatgcgtttttatttttcttgaaatagaactacaaagcctctcagctgtgtagtagcaaggctgagagccttttcctttctgcctaagcttataattgtactcttgatattgtggtttcccttgattag

SEQ ID NO: 271742 - DNA, 549 bp, Homo Sapiens
  misc_feature (488)..(488): n is a, c, g, or t
ctcatgtgcacctggggtgtaaaatgactgttatctggttgtgttactcagggtgggctggggactcaccagaagaatcccccccagcctgcccaagacaggtttttcccttgtaccatcttcagagaggtcaggggaagagggtccaggtgggttaaggggggtcgctatggataaccactaagaccagactgctgccaggaggagttgggggataatgaggtggccccagggtcctggcacctggctttggttttccgtcttctttcctcaggacgcccctgaggccctgggacctgtgccctggcttcgaggagcatctgtggctgggtgatccagctgctggtgtgatcatgggcttccctcctctcagccaggcaggcgctcctgccccagagactgggcaactggctgtttctatgacgtatttatttttacttgtgtttcatgtcacttttttaaaaaaaagcaaacagaacaattgtaangtcagtataactgcctatcagttttctttatttctctttttgtaaaataaaatttaaactc

SEQ ID NO: 271743 - DNA, 515 bp, Homo Sapiens
gaattagaatgaagtcaataacctcgaacttggcaactggaagtcctggctatttgggaaaagtagtcctttgttaaacttggacaagttgttccttttaatgtgccccatttccaaaaatattgaatttctttacctttcattcagcaaaagcagcagaaacttttgccttaaacgtttcccttgtccttttgcccacttggaggtgttgcttgaaatgctctcatcctccggggttacctttcgtcaaaggaagctgcatgaacgcatccgtcactcgcagctatttcagggctagcttgttttaagttaggggtgataacagatataggcagaactttgcaatgtaaatgtttagtcttatttgggcactgctgaatttgtttccgagcctcgtcttgtggttttaatttctggcttgtctcctgaaaacaacaaaaatgagctctttggttcacattttcagtggctttggtttgcagaaatcataaataaaagtaacttacatggaacag

SEQ ID NO: 271744 - DNA, 435 bp, Homo Sapiens
  misc_feature (28)..(28): n is a, c, g, or t
  misc_feature (30)..(30): n is a, c, g, or t
  misc_feature (33)..(33): n is a, c, g, or t
  misc_feature (54)..(54): n is a, c, g, or t
  misc_feature (58)..(58): n is a, c, g, or t
  misc_feature (207)..(207): n is a, c, g, or t
  misc_feature (386)..(386): n is a, c, g, or t
ctgggtggatgaggctcaccccggcggngnaangggacgaggaggggcggacangganaggtccgggagtgtccgcataaagtcgtttgaggtgaccgttgcgtaattgtgagtctgtgagagaagatgtgaagtatggcctcgtcccggtcatctgggcgtgcgggtccccgggttttggatcgccgcgtttgtgtagttttaacntcctagtcatggcgaatgatcgcaggagagcacagactggaccctgctacgatctctcttggagtggatcagactgatgatcaccaacaaccaactcaatcccggataaggaagaagagagtgtcacctacttcagtgtggttttcaaccctaattcttgcatcttaaagacactgtangggtttcagcagttagtgcccctgttcattagtccccctgatgttttca

SEQ ID NO: 271745 - DNA, 525 bp, Homo Sapiens
  misc_feature (498)..(498): n is a, c, g, or t
ttgatttcacaccttaggaaagtaaggttcctagaagaaaaacgcagaattgatgagaaaatagtaaaatggatgcagcaggaccacagatttttgggaaacggaaaaagatccagaaaaagtcattttagttatctctatcatgggatctggccttccaggaaaacggcaaaacagggaggaagaacacactgacattgtccgtgggtccctgatgaacaaacaagactgttttaagaagccacttccagggataagaggggtcttattaaaaggttaaagtagtatggaccagatgcagtgttaggagattacagaaaggatctcactctgttaacagggaaggtaaatcctgccgattcatggcaatcacatgtcttctgtttgatctgcggaacaagtgactgatgccattgaggaaacagctgatgccagtctttctttaaaacctttctcagtcattgggcgttgatgggttgcagccacaagaccctggangttttcttctttgggggagggccattt

SEQ ID NO: 271746 - DNA, 361 bp, Homo Sapiens
tctaggagcaggggggtgagaccagagggcactgctgagagattagctttcaattgcatactgtatttgcaactatcttgtgataattaaagtacctaaggcttacagagtgagctgacagatggtgcagtcccatcgtaagttacagaaaacagaatcttgctccaagtacacagccggttagtagtagcaggtcagtaactatgactcttgcgtctctttccctgaaggccagtgtcacagatccgccagtccttgtagtataatgtcatgctgccctgcaattatatggtacatttctagagctcccagaatcctaaaagtcgatgctttaataagaccttttatacttgggctttag

SEQ ID NO: 271747 - DNA, 505 bp, Homo Sapiens
  misc_feature (23)..(23): n is a, c, g, or t
  misc_feature (143)..(143): n is a, c, g, or t
ccccctccaaaattggtataggnaaaaatccatttggccaaccatattaacctttatatcccccagccccaaaccagtccaatccaaaattatggagggccatggaccatggtaaagttcctccccctcccaaattaaccccntcaatggcattcctttccgggaaacctacctggatgatgaattccccacctataacagataaaaacccaagaaaggaagatgctgtgcatccccaagaaacgagagatcctaatacagcagagaggagcaacagctttcccaggatagcaacaactcaaagtcagaggatgtcagctctgcagaaatccaatgcatgctggagcaaaatgacagacagtaatttgagagaggtgattgtttatttgatagatttcattatattacattttttgacttgagagctatttgggaatgtgaggaaaattatcatagaagcattgaaaactaacaaaataaaatacaaggcaattattaactacaa

SEQ ID NO: 271748 - DNA, 384 bp, Homo Sapiens
gaaacaggagatgtaggttggaggaagagctacagcccaccactggaaataactgccatccgtcccaacccatatggttaggctttgtgtccccacccagatctcatctcgaattacaatccccacgggttgagggatggaccaggtggaggtacttgcatcctgggggcagtttcccccatgctgtgctcgtgacagtgagtgagttctcacgagatctgatggttttaaagcgtggcagttcctctttctcgtgcttacatcctcgtaactatcctgtggagaaggtgtctgctttcccctacctccatggttgtaagtttcctgaagcctccccagccgtgtggaactgtgagtcaattaaacttctttataagttaaaaa

SEQ ID NO: 271749 - DNA, 428 bp, Homo Sapiens
tcccaatttaaatgtatttggagccttctaaacaaacatgccctttcaatatgttgcctgactgtttttgaagatttaatgaaggcccaaaactcgcaagcgatgtgtgtctggattaagagaacctgagaatctctatttatgtctgacccccaggaaattccctttaagctgcttatcagaggtgcatgctgagagcatgatgggaagatggagtcttccatccgctggtaaaatctggaatctgctctcatttcattttcactgaactgaaaataaggtaacagaccctcaggtctacctataagtaccttccaactgttccacttttgtaaatttagttcagataatacatatgctgaaattcctatatcccccccatactccagatcttcagtgtggaatttaaatataattccttattgtaa

SEQ ID NO: 271750 - DNA, 430 bp, Homo Sapiens
  misc_feature (20)..(20): n is a, c, g, or t
  misc_feature (26)..(26): n is a, c, g, or t
  misc_feature (31)..(31): n is a, c, g, or t
ccaagtaagggatccaatcnagttgntggcnttttatttaaaccagtaggcatcccatctggccccatttgcacgtaagaaggaaacaccccaagaatgaaaagtagcttgttgtaggtcacccagccaactagcacatagtggaaattagaatcccaggcacttcccagcagggcactttccaccaccctgcacttttgtattcatcaggcacagtatccttactgttgtctgtaactgtctatgttcccagtgtctgactctgcagggccctagtggtataaaggtactgagacttgcctgtgttcagggcttcctgaagattaaatggctgccgaagttcttgagtttagctttagctcaaaagatactgcgtcagactctgcgttctgagtagagtctcagagaatgaaaaaagaaatacaatgaa

SEQ ID NO: 271751 - DNA, 450 bp, Homo Sapiens
  misc_feature (17)..(17): n is a, c, g, or t
agtttttagggaaaagnggcctaaaacagctttaaaggaaaaaaagtaaaatggagggtcaaaacctgttcaaaccccaggccccttgtggcattaaagtagctcaaaatagagggcaactgattaacccatttgacacttcacacacctgcaaagttgacctgacccaggctggctcccagccaattttgcaatcattttctcgccacccattccctatttcacatcagcccccctcccccacttcaggctccttggccacctccctcctctccacttacacaacctgaattcatctgtaccaaaatattcacccctctctgacttctttttttgggttttatgaggcaggtggtctgagaaattgcttatgactgttggtcctaattatgaagctaattcattcagactatggaatacttagaaaacacaaagtgcaaagaataaaaa

SEQ ID NO: 271752 - DNA, 448 bp, Homo Sapiens
tatgttgtctaatgactttatctgattcttttcccagctctgcttcaccctcctccaaagtcaactgtatcctttcatctggtgtgatctcctcctagatcaacaagactaaacaaactaaccgggaggcccaaagccctgaactaagcctccatgtgtctaaaacccagtggttcatcttcctcctacaccactctcctgaatatcgaggcctaaacctcagagccagtgctcacactggcctttgcctcccacattccatctctccatcccatggggagggtagggaagtatagagagaaaaggagccaatattattttggggggaaaggggcaagtaaaaataaatactgtgttaggaaatcagggagggcttagcttctaggtgctgggatccagtaaatattgttttaaaaatggaattttatttgggtgttccggcaatgtt

SEQ ID NO: 271753 - DNA, 383 bp, Homo Sapiens
ccccccgggacattaaaaaatggttaagtattttaaaacccctggaccccaaatcctgaccatattaatgcccctgaatgaccccccactgtttttcctcctaatgccttgatttagggtagcccttgtgttcctgagtagagcttgtaataaatactgcagcttgagtttttagtggaagcttctaaatggtgctgcagatttgatatttgcattgaggaaatattaattttccaatgcacagttgccacatttagtcctgtactgtatggaaacactgattttgtaaagttgcctttatttgctgttaactgttaactatgacagatatatttaagccttataaaccaatcttaaacataataaatcacacattcagtttt

SEQ ID NO: 271754 - DNA, 480 bp, Homo Sapiens
  misc_feature (19)..(19): n is a, c, g, or t
  misc_feature (42)..(42): n is a, c, g, or t
  misc_feature (66)..(66): n is a, c, g, or t
  misc_feature (72)..(72): n is a, c, g, or t
  misc_feature (83)..(83): n is a, c, g, or t
  misc_feature (198)..(256): n is a, c, g, or t
agccccgaaggcctttggntgggtggaaaaaatggcctgggntgtgtgggcaagttttgagggaancctttncacctcgatgnacccccccctgaagctttccaccgggaatttaccttgtggcacaggaaacttccagtagcctgtatgttggtcacagatgctgctgttacagctggagcaggactgtttctgctnnnnnnnnnnnnnnnnnnnnnnnnnnnnnnnnnnnnnnnnnnnnnnnnnnnnnnnnnnnacaataatctataacatatacagaaattattttgtaaagtaaatgattctttggttttacttcctatacatacaatttagcaactgactttattggataaagtataacaacagtaaatagtacacaaaccttctaaagcagcactgtctaatgttacttcctgagatgacagaatgttctatatctgtgctactgacatggagccactattaaaacatagctac

SEQ ID NO: 271755 - DNA, 423 bp, Homo Sapiens
  misc_feature (68)..(68): n is a, c, g, or t
  misc_feature (158)..(158): n is a, c, g, or t
  misc_feature (379)..(379): n is a, c, g, or t
cccctccgggaccctaaaaacccagtggtgagggatttaaaaaccaaaccctccaatatagtatagtnaaaatgtattaataagaggtatgcccttgccagttatggaaatccaaggaagagcaccctacccaagttgagggttccaaagaaggcccncttagaagggatgtcccctgaacccaagtcttacacagttagcaagaaaaaattgggaagggtatataaacaaaagcagataggtgtgatatttacatggaagtataagcaattctgtgatagagtacaaagtataaaatgaagattggcagatgacattggagatagctatgtgattattatccttataatccatgttaaggaattttactttatcttcntaggtcaggagaccatatccagtctactttctaatttgtaaatt

SEQ ID NO: 271756 - DNA, 455 bp, Homo Sapiens
taaacagataaggaaacagaggtgtgcagaagttaactaccgttatccaaggccatacagtcaggaaggaatggggcaggatttgaacccaggcagtttcaccccagggccggagtgtttagtcaccaataaatggaatgttgtttgcagattacgtgcagaacatgatgctgggcatgtcctcagaaatctcatattctagtcaggaagtaagtcaccagtctaggaggaggaggcaggatgcaaagtccaaaaccctttgcctactcctcatggccctttattttggggattcaacttatttttctttacctaactgccttaccacggtaccattttcctgcttgaactctggactcattgtgaggtgtctagagaaaccctcaccttcacagctccatgcctttgtttacttgatgataatacgttcttctccatcccctacacaaatctgc

SEQ ID NO: 271757 - DNA, 410 bp, Homo Sapiens
aagaattcggcacgaggtttaaaagcatggccccaagtaaaggtggcatctctatcctatcctcgcctttatctaaactctgtgaccgatcaatagcatatgatggtggtggtgctctgccagtctcccagtcccagactgaagcactagcagcttccacttattatctcttgggactctagctcttgggacccaaccaccatgctgtgaagcagcccaggccacacagagaggccacgtgtacatgttcagctgacagcagtatcaaatgtcagacatgagagaggaaggcttcaagatgactccagcccagccaccgtctgagaacaaagtaagaactgcctcactgatgccattcaaagcccagcaccatgagagataataaaacgttgtttgaagatgctaaaaaa

SEQ ID NO: 271758 - DNA, 438 bp, Homo Sapiens
  misc_feature (34)..(34): n is a, c, g, or t
  misc_feature (44)..(44): n is a, c, g, or t
  misc_feature (397)..(397): n is a, c, g, or t
aaaacccaaacccctggaacccaacacggggctnaagctctctnctgcaaaagcacccttctgtaagccccaaaaagtggaaattgcaagacccccaggaaactgccttccttggcaagaagccaaccctggctgggctcccctcacatcggagcctgtgcccctcagtctagcaggagccactgggggccttgggcatttcattggccgtcagtgtcccaccacagaatgtcaacaggattcctagcctgcctatcacactgggtggctgtggagatggagagtgttggcccccatgacccgcgttctccgggaggcctttctgctgaggggaggaaagaccggcccatggctggctttccctcctcctcagtgcctctgaagccatgcggtcacnttacaaattctcttcatttctaaataaaatgatttgttaaa

SEQ ID NO: 271759 - DNA, 415 bp, Homo Sapiens
  misc_feature (111)..(111): n is a, c, g, or t
gcttgccttagcccatctgaacccagtaaggaaaaaggtcaagagttagaacctatagagaaaactgatagctcccaatttatccccatgaaaaatagtaaagatgaagcnagcaaagaaaaaatactctgtgaagtaagaagtccgtatggaaagtcacctaggaagcccaagataacagagtgtgtttaataggcaaattatcccggcccggcccaggcgcagtggctctcaccctataatccccaaaactttgggaggtggaggcgggcagatcacttgagccccaggagttcgagatctgcctagccaacataatggaaccccgcctctataaagaaatacaaaaattagctggcatggtgttgtgtgcctatagtcccagctactctgagagagcgttgcttgaacccta

SEQ ID NO: 271760 - DNA, 440 bp, Homo Sapiens
  misc_feature (27)..(27): n is a, c, g, or t
  misc_feature (47)..(47): n is a, c, g, or t
  misc_feature (78)..(78): n is a, c, g, or t
  misc_feature (176)..(176): n is a, c, g, or t
  misc_feature (251)..(251): n is a, c, g, or t
  misc_feature (293)..(293): n is a, c, g, or t
  misc_feature (392)..(392): n is a, c, g, or t
  misc_feature (394)..(394): n is a, c, g, or t
actctgggactaggcatacacacgganaatggacgagcttctgtganaatagaactctcaccccagaccctctgcagnaaccaactcccctggaagccaaaacccacaatctccccccagtgatcccattcagaatgggtcaaagacttactcagttactggccatcatccccaanattttccttcctcttcccaacatgggacccaatcagagaaagccaaataggttccccaaagcaatcctgtaaganacctgcagtgagctgatcagcctccagcttcctcatgccaanaccctccaagcagagcattcctgaaccttgcccctttccccccactataaacctatctgcctctgagtctgctaaacacaagagatcgtggctgattcncnttgtaacgcaagctctgaataaaaagtctgtttttctcatttaaaa

SEQ ID NO: 271761 - DNA, 578 bp, Homo Sapiens
  misc_feature (308)..(417): n is a, c, g, or t
  misc_feature (501)..(501): n is a, c, g, or t
  misc_feature (554)..(554): n is a, c, g, or t
  misc_feature (564)..(564): n is a, c, g, or t
ttattcttttcagatttctcaaaagtcctatttgtccaaagaaacttaactaaactggctccccaccaatcatgtcatctccctttcttctctcacataaattgcttaatacagccttacctgctaagggcaataataacaaataactatgtatgcattacatgggaaggaaactgaggctacctaatacaggacactctgtaagaggtaaatttaggaagaggagttagaagttttccaggtaactgtcacaataccactattccactctgctccccttcacctctttaaaaagtgcatcttctaannnnnnnnnnnnnnnnnnnnnnnnnnnnnnnnnnnnnnnnnnnnnnnnnnnnnnnnnnnnnnnnnnnnnnnnnnnnnnnnnnnnnnnnnnnnnnnnnnnnnnnnnnnnnnccccccatcttcaaaaataaaaaggggtattttagcacaaaaacaagtcacagtgattgattacaaacactcctctactcaccntaagaaatagggctctgagggatccatgagggcttagggttgaagctgggagncaatggaggncaaccctggaaagg

SEQ ID NO: 271762 - DNA, 416 bp, Homo Sapiens
  misc_feature (21)..(21): n is a, c, g, or t
  misc_feature (46)..(46): n is a, c, g, or t
  misc_feature (86)..(86): n is a, c, g, or t
  misc_feature (159)..(159): n is a, c, g, or t
  misc_feature (209)..(209): n is a, c, g, or t
  misc_feature (223)..(223): n is a, c, g, or t
cccatggacccctctgaaaanctcccatctccctaggaattgctanactctgacacaaacatttactgctggatcgacccacaaancagatgtggcttccttaggttcctctgggagctgctcctgtgggttgatggaacgtccctgaaagcccccagncctggggatggggaaggacatggagcctgagccagagaaccagctctgantcctgaggagacanaggcctggggacaggaagggatgggggtccctgctgaatatatagagacctcaacagactccccgggctctgggtggccaaggcgaaggcttcccatcaccacaggaagtgggggcttgcagggaaaagttgaaacgtatggccacccggggtcacctggaaaggatctgaataaaggggaacttcctctcaa

SEQ ID NO: 271763 - DNA, 432 bp, Homo Sapiens
  misc_feature (17)..(17): n is a, c, g, or t
  misc_feature (25)..(25): n is a, c, g, or t
cctgccacaaaaacagncctgttgncccatcccagtcccactgacaagagggtttcccccgagagccgaaagtggacctgaagcctacagtttttaagctggtgccggcccacaggcagggtcagattgagaagaagcaaagctggggaagcagaagttgggagtcttgtgttgctccctcttcctgtgtggtgctctgggtttctgtggatcgtgaaggcgatctcaagagtgtttccctccaaacctgatagctgcctaatcctgtctggttggggctgtggaggatgtagttgtatttattgcattgtaatatttttaacatcctgtgacttcatgctagaaattttctattgtttatagaaactttttgtagaaacattaactctaaagcacatctgcatgtcagtaaaaatctcagtttcgtacatc

SEQ ID NO: 271764 - DNA, 166 bp, Homo Sapiens
actcttttctatgtatctttctctcatttttgctctcttggtatgccaaagggacattactattttcagtcaaatccacacggcttatggagaagacttatctcccaagaattgttttggtttgttgtaaccacttagagaaatttgttttattatcaaggacaaa

SEQ ID NO: 271765 - DNA, 476 bp, Homo Sapiens
  misc_feature (224)..(241): n is a, c, g, or t
  misc_feature (384)..(416): n is a, c, g, or t
  misc_feature (464)..(464): n is a, c, g, or t
caacgatcatctgtggggcctggtacccacgcactattattaacatattctttaataggattatttatccatgtgactgcccaaattaaggacaggaaaggcacataggcccagtaagtataattagctgcagctgtttctgcagacatgaggagacttaccaccgttgatacaattatcaaagctgtaaccagtatattttctagagtttgtattacccttgnnnnnnnnnnnnnnnnnnagctaactgtgtcagcttctttagtgggaccccagggtcgggcagctccgcttttttgggtgggatgacagctttatctgtttttttggatattacccattttgtttacttggggggagtcgatggatgcttgattgtggggnnnnnnnnnnnnnnnnnnnnnnnnnnnnnnnnngcatcttcgagggggtttattgtaggaactttaaatgtctagtggggnattcaaacaggg

SEQ ID NO: 271766 - DNA, 378 bp, Homo Sapiens
  misc_feature (20)..(20): n is a, c, g, or t
  misc_feature (31)..(31): n is a, c, g, or t
aatcccataaaaatttaagnttaaatgtgcnccttgtaaaaatgaaaattgtaaaaggaaaaatacccagtgtttccctcatccccattgactcaacacccacgtcatcctggattttgggatttcccctcccatgcagcccagctatagttggctttcccaaaacaacagaaatccttcacccaatagagtgcactacttacctgcttatagcctatacagacgaactgatctgtccttcgtgaaacgcaacaaagctagttctgtcttttcagaagtcctacaaccttgacaaagagtagttttatcaggtaaatcctggtaattaaaaacgcatgtttttaaaaattagcctggtaaggccgggtgcagtcgtca

SEQ ID NO: 271767 - DNA, 202 bp, Homo Sapiens
aaggagaagctggaagaggcaaggaacagattctcccagaggcaacgcagccctgctgaccccttgattttggcccaataataccgatttcattcttctgacctctcaagctgtgtgaaaacaactttctgttgtttgaagccaccaattttgtgacaatttattacacactagccccaggtgccaccaataaaaatcctac

SEQ ID NO: 271768 - DNA, 435 bp, Homo Sapiens
  misc_feature (369)..(369): n is a, c, g, or t
  misc_feature (374)..(374): n is a, c, g, or t
  misc_feature (411)..(411): n is a, c, g, or t
  misc_feature (420)..(420): n is a, c, g, or t
ttcattctaatccatcattgcctgatgtatctcaatggcctactctgcacagatggtgacagaatccacataatatcagttagtatgggctgggttatgctacagtaacaatgatccccgaaatcagtggcttacaacaacaaagatttatttctcctcacactacacaggcctctgagggtctcagctaaaatcaatgggcagttttttttctgggaacactgttgggtcatcttgggcagagggaacagaggagcataaaaaacttcagctaggaacttaatacacattaggtttcattttacatttcgctgggtcaaggattaggtgttcacatggatccttgctttcactagggggccaggaggncttgnaaatccctttttacaaggggtgaggtcacctggaatnttttatggnggttataccaggttt

SEQ ID NO: 271769 - DNA, 343 bp, Homo Sapiens
  misc_feature (90)..(90): n is a, c, g, or t
aacaagggttgccttaaccaaagattgtctgaaaggcacacaggagcaaatgcagcaggaagaaactccccatttgtgaggcagcctgcngaagttggggttaacgggcagcagcattatgtaagatgtgcccggatcccttaggcagagttaatgcttattaactagaaaagaaaacagcctttatcggctggcagataggatgttaattggcttccgtttactgagagattacaggatccattttcacggctgcttataataaactccatccacagagaaactgtccccacccccacccaacatttgttacaaacattttcctgagtccccaggggttggg

SEQ ID NO: 271770 - DNA, 361 bp, Homo Sapiens
  misc_feature (36)..(36): n is a, c, g, or t
  misc_feature (38)..(38): n is a, c, g, or t
  misc_feature (312)..(312): n is a, c, g, or t
cagaatgagggcaagcaacacctggcccacccaggnangaaaactggaagactgctcaaggcattcctaaaccacaaacaatagcatgagtgatttgtgccttaaggacatattcctgttgcagataacaagccagagcctgtccctttctttctcataaggaatacttatagctgatctacaatctataggaataatgtttatcacaggcttactgtcaataaatatgtgggtcaaactctgttcaagctcagctctggaaggctgtgagccccgattcccactctggcactattatttctgtgtctttgntcttaattcctctagagccactgggttaggggtctccacgacccaggct

SEQ ID NO: 271771 - DNA, 400 bp, Homo Sapiens
  misc_feature (273)..(291): n is a, c, g, or t
  misc_feature (340)..(340): n is a, c, g, or t
agctagcaccatgagcttcaataccctgcccccatctgactggaccagtgatgggcacctggagcaaaggcagccagcccaacagggacttatgttgggaatctgaatgagaaatatggaagttccaaagaactggcaataggagtagaagcctaaagcttgcaagatagtaagaggcgtaaagaaccatgatggggccaaagttccaagggcgcaatagctataagaccagggaagccaactgcactgttggtgcaacaccctcaggacttnnnnnnnnnnnnnnnnnnncctttttctctccagcttcatcactggataggaagatttcaccaggcantcccccagggtttgccttttttccagcctcttgtttaaaaagttgtttccctgtgtttaa

SEQ ID NO: 271772 - DNA, 358 bp, Homo Sapiens
gaggacaaaagagactgcccccaacatgccagaggcctgagaggagaccctacacataaacccagaaagcccttatatcttcagtgaaaagtgaacaacaatagcaacaatgagaagcccaaaccaaccagaagaggggtataataaggaaacttgtctatcaaaaactagatgctaggtagaataaaaagacttacttcctctgatatccaaaaaaacctcaagccaattatttaaagcggttattagtcaacagagataaatcacttagaaggattaaaattatattctctttggtggaatattcttctatccagacctcaaataattcctataaaattccactgaacataagctc

SEQ ID NO: 271773 - DNA, 356 bp, Homo Sapiens
taaaacctctgaaacatgtttcctatgaaaaatgaattacttggacaaaaaccttttaaaagttaaaatgacattaaaagtccttaaaagttttcagaacaaggatgctatgcaatacactgcttgatgctgttatcccactcactttgtccagctcgggtaccagccctgggggagaagtgatgctattatagcaaacagaacaagaccaatggatggactgcaacagcaatctcaggatggagccacatggctttgataagagtctatccctgtattttagatgttctggatttaaaaaatgtttgtctcagagcacctctttaatgctgcctgccttttcctaaaagacaaac

SEQ ID NO: 271774 - DNA, 365 bp, Homo Sapiens
taaatccccacgtgtccaacactattgttaagggagcctacagtttgaaaagacacgatttacctaagccaaaggagcagacgcctgccaagacctcaggtgaaacagaaactgcctaaaggccctacccaatgaaaacaaatgccatatggtgggagcccaaaatccggaggccttaaaatttagaggtaaaaagaaagagttagcaggaccacatatttctccagcatattcagtcagaaatggagaagcagtgaaacacgggcagctcagaatagctgtggaacatgggcctgctttattatccatactatctgcagagcaacctttctggggctaaattaatggtcctcaactgactctta

SEQ ID NO: 271775 - DNA, 614 bp, Homo Sapiens
ctcactggggctagcagagggctgtgaagctctctctgacttgataaaatccctcctcctaggcttttcagtgcttggctctccttgtgtgggtgtaattggaactgggagaggaaaggattatggaaagcaatagtctgctttctgctagtttccagcagctgttttgggctggtgggggctggggtgttatgtgtgtggtggtgaatttgagtggccgccatttgtggaaatgtgacaaccatgtcatcaactgataagtagctagacctgaggaatgtgaggccagaagattctagctgcaaagggccccagctctgcagccccagatgcagggtcagacctctgctctactgctcctagcccctgctgtgacctcgggcaatgcacctgggtggggtaggatgtgtaagtccactctgtcattagcacagtcttccaggaaagaatcctgtgagacagaagaatccggtgagactgagagacacaagaaggagaagttgtgtagcacttatacttacctaccacaccagccagtggataaaggcgctgttctcagggttgcttgtagagctagacaggagttagttcatgacagaatcacattgcaaaga

SEQ ID NO: 271776 - DNA, 553 bp, Homo Sapiens
  misc_feature (22)..(22): n is a, c, g, or t
cccaagaattcggcacgagcgnggcgaaaattggatttctgaaacctgtaggccccaagcccatcaacttgcccaaagaagattccaaacctacatttccctggcctcctggaaacaagccatctcttcacagtgtaaaccaagaccatgacttaaagccactaggcccgaaatctgggcctactcctccaacctcagaaaatgaacagaagcaagcgtttcccaaattgactggggttaaagggaaatttatgtcagcatcacaagatcttgaacccaagcccctcttccccaaacccgcctttggccagaagccgcccctaagtaccgagaactcccatgaagacgaaagccccatgaagaatgtgtcttcatcaaaagggtccccagctcccctgggagtcaggtccaaaagcggccctttaaaaccagcaagggaagactcagaaaataaagaccatgcaggggagatttcaagtttgccctttcctggagtggttttgaaacctgctgcgagcaggggaggcccaggtctctccaaaaatggtgaaga

SEQ ID NO: 271777 - DNA, 353 bp, Homo Sapiens
  misc_feature (24)..(24): n is a, c, g, or t
  misc_feature (58)..(58): n is a, c, g, or t
  misc_feature (230)..(230): n is a, c, g, or t
cccgcttgattgacagaaaagggnccccaagaggcttgttgaaaatttcccccttcancccgtcagtgggtggggctggtagggtctcaccttgctccccaagactgttgccattagcaaccaacttcccctgttggttctgggggccctggaggggaagagggaagaaggtgaagcaatgctgtcaggtggcagctgagtgtctgtgccaggaggttatgcgggtgacnccaggaagaggcccaggcacacagagtcaccgcgtgcacagcccgttggtttgctcttcatcattcccagccatggggaaattatataaagacattgcattttttacaaaaacatctccccct

SEQ ID NO: 271778 - DNA, 330 bp, Homo Sapiens
  misc_feature (38)..(38): n is a, c, g, or t
  misc_feature (61)..(61): n is a, c, g, or t
  misc_feature (69)..(69): n is a, c, g, or t
  misc_feature (78)..(78): n is a, c, g, or t
  misc_feature (107)..(107): n is a, c, g, or t
  misc_feature (163)..(163): n is a, c, g, or t
  misc_feature (215)..(215): n is a, c, g, or t
  misc_feature (220)..(220): n is a, c, g, or t
ccccagctggttgggaagggattgaagatggtagcaantgctgcactaagggcactcgcanttggtcantctcttganagctaggaggggtcagcctgaggccgganaggaagggcttttgcctggggtgagagggtgagagacttgacctgaaagcagctcntgcccctgaggtgcagccagagtcctgtgtgcggacagagagaatggctaantgatntccgcgtggaattgcctattgttttatgccacctgatgtgtctgcatgagaggtttcctttttgttcctttttaagctgctgttaaaccaaaaccatgttgtgaaaaaaa

SEQ ID NO: 271779 - DNA, 513 bp, Homo Sapiens
  misc_feature (27)..(27): n is a, c, g, or t
gtcataatcaagggccttttcttactntgcttctgaaactgttttatttctgtgctccaaacacaggactctcattaaaatccaccagtatgtgtacagatgccttgtgattttccagctttcatggattttaaggccagatgagaaacatttacaacatccagttgttcctagagaggttaagcaaatgaaatagaaagctggggatgactgatgattcctcaatccgtgaagctgtgtttgggtaccgaaatgctccctaaaactcacccgctctgaactactttgggttagggtcccttcctgtcacccatccctcaccactacccatggggtgatcagttgcaggagaggaattcaaagggctcattcaggatcattgaagagaggctgtttttccgaatcatgatccctagtaatgactattggctttcacatatctatgattgcttcttaagatttaagaattacttctacccaacctaaatggtgatacctacctaaaatacttaa

SEQ ID NO: 271780 - DNA, 245 bp, Homo Sapiens
  misc_feature (68)..(149): n is a, c, g, or t
cctaagtgattccccagattccgatatgtgtcaagaatcaccccagaaggcttggctgttaagaggcnnnnnnnnnnnnnnnnnnnnnnnnnnnnnnnnnnnnnnnnnnnnnnnnnnnnnnnnnnnnnnnnnnnnnnnnnnnnnnnnnnctgccaagatgctccggtgcaggtcagaggctttctgggtccacctctcttagaagcagtttgaaaaaccgtatccctgcctggtatagtgcctca

SEQ ID NO: 271781 - DNA, 317 bp, Homo Sapiens
gaagaatgttctctctcattcctgaccgcccctccactccaattaatagtgcatgcctgctgccctacaagcttgctcccgttctctcttcttttcctcttaagctcagagtagctagaacagagtcagagtcactgctctggttctctgtccccaagtcttcctgagccttctccccttttatgtcttccctctcctcctccgggcccctagcctcccaaacccccattgcccgctggcttccttggggcacagaaccacaccttcctgcctgggcggctggggagcctgcaggagcctgggagcctgggttgggg

SEQ ID NO: 271782 - DNA, 436 bp, Homo Sapiens
tgcgggtccctgccccctaaaggagctcagcccttgggtccaaacccatgaatccctttggaaatagagcggccccacatggcacccactcaaacactgaactgcagtcgcactgaaacacccaggcccagaacaagtgtgggttcctactccctgaagcaggcttcctagagatcagtatcctcatcacttcattgctacctgtaagagggaggaaggaggaagaatttcacagcagcaaagtctgagagtttagtaaagctctgaccaggctgctccaggcctagttcagagtagctgcagatttaaactacaatcattgcttttagcctgggagagatgagattatcagagacttctctacaaagtactgaaaaatgtcaggaaataatacttttttaaaaacttcttctgatggtaaaaatgcttatataaa

SEQ ID NO: 271783 - DNA, 410 bp, Homo Sapiens
  misc_feature (392)..(392): n is a, c, g, or t
tcatggcaccaatcacagtttcatagccacgtcccattcccctatgatttgggcctatggggggataggatattccagaccccaagtaaagtccatgccaccccaagacactttgtggtgcctgggacatcttagcacctcctttgacacctgggcattggacatatcataattccagtcacaactatactacaacctttattcataatcacactgatcagtgcctgatttgcactacccatccatatgtttttccttgtgggggaactaatattttctgtttattaccccaaaactccatgtttgtgacccgggtgcaggggacagccttgggttcacctcatgtattaattaattacaatatatcttattattaaattttactaggagtngtgggggtttaagggggg

SEQ ID NO: 271784 - DNA, 429 bp, Homo Sapiens
  misc_feature (93)..(93): n is a, c, g, or t
aggaaggaatgaatccaagtgaaggctttctgctcttcgtgttacaaaccagtttcagagttagctttctggggaggtgtgtgtttgtgaaanggaattcaagtgttgccagggacagatgagctcaaggtaaggtagctttgggcagcagggctgatactatgaggctgaaacaatccttgtgatgaagtagatcatgcagtgacatacaaagaccaaggattatgtatatttttatatctctgtggttttgaaactttagtacttagaattttggccttctgcactactcttttgctcttacgaacataatggactcttaagaatggaaagggatgacatttacctatgtgtgctgcctcattcctggtgaagcaactgctacttgttctctatgcctctaaaatgatgctgttttctctgctaaag

SEQ ID NO: 271785 - DNA, 390 bp, Homo Sapiens
tgagcgccaagtcatctgaaatgaacatacttatccctcaggatggtgattatagagaatttccccattcctgaacagttcaagacagcatgggatggatcccaagttaatcactgaacctgcagaaattatggcctaacttcctgagagaccgaaccccctcacctgaatccccctctatcaaacaaacaaaaaagcagcagtaaagagctagaagttgcagtagcccctactgctttagctttggcctccaacgattctgtgctatagatacagcactgtttcctggcacgcctcgtgggcattttgaaatatttaacgtttcctcatgatttgcctttgtgtgtgattttagttccacatgatgacttgtgaacattagggatttaa

SEQ ID NO: 271786 - DNA, 253 bp, Homo Sapiens
  misc_feature (199)..(199): n is a, c, g, or t
ctaaagaaccccttgaaaatcagatgatcaccattcgcagaaaaagtgcacacatatggggtgttcacatgtgggtctcaaacgaggaaggacagctacagattacatcgtagctttagagaagcaggcacccatgcagaggtcagcatccacaggcaaggaaaagggaagggagaggtgagacgaggcaggaggatgnggtgaaagttagcccggctatacaggcttgctgcctttcagaagttccaagaaa

SEQ ID NO: 271787 - DNA, 375 bp, Homo Sapiens
  misc_feature (19)..(19): n is a, c, g, or t
  misc_feature (41)..(41): n is a, c, g, or t
  misc_feature (47)..(47): n is a, c, g, or t
  misc_feature (199)..(199): n is a, c, g, or t
  misc_feature (211)..(211): n is a, c, g, or t
caccctaaattctcttccnagctgctgttttgtaaaaaagnaaaagnaaaaagaagcccaaactagtgagagtaatatcctaattatcctcattttttgtaggtctgtgataaagaacttagtcatcccttccacctcctactgtgaagaacagaccctgggtcccacactgaaatcccctctagtcacccattcccanccccccagggangctcctcccaggcagggggggcagaaaatgattgatgggctggggaaccctggagagcctcgactccggaagtctcaaggtgcctcctcctctccttagctggcccgttggttttcatgagcagggggctgaactgtgaacaagtcagacaaataaagcaaggg

SEQ ID NO: 271788 - DNA, 320 bp, Homo Sapiens
  misc_feature (23)..(23): n is a, c, g, or t
tgccctcaacacatcctgggaanttcctctccctcttcagacatgaatctacagggaacgctgtacttgtttatactgatacttatttgacaagtgtcattcacatattagaaaatcatagaattctaggattgcaaagctctttaaatgccatttggttctgcattcttttaatgtttgtgtgctttataaaatagtgctatataaaatgaacttataagtctaaataagactattctttatcaacaaagaatgtcatctttgccaaactacctgaccagcatgaaataaaagaacatgtgctaccatgctccctgaaa

SEQ ID NO: 271789 - DNA, 436 bp, Homo Sapiens
  misc_feature (355)..(355): n is a, c, g, or t
  misc_feature (373)..(373): n is a, c, g, or t
  misc_feature (392)..(392): n is a, c, g, or t
  misc_feature (413)..(413): n is a, c, g, or t
  misc_feature (426)..(426): n is a, c, g, or t
cttctagagttgtgaatcctttccagaaggttttcaatgtactttgcccagatctatcagaggaatcactgtctatggcagttatagccttataaaatgtatttcttaagtaataagagttgcaagtcaaaattactccttgatccgtggagtacagaatggatgttgtattagcagacatgaaaacattgatcttgaacatcttcatcagagctcttgggtaactaggtgcattgtcaaatgaggcagtaatattttgaaagaaatctttctttctgagcaggcatgtctcaggcaatgaggctttaaaatatttcaggtaaaccaagggtttcaacaggtgtggctgtgcccnggggtttctttgtttccnattggaggcacagggtggngttgggttttagtgttccttncttagggggcacntggaaccttt

SEQ ID NO: 271790 - DNA, 356 bp, Homo Sapiens
  misc_feature (100)..(100): n is a, c, g, or t
ggacattatggagtggcccatgatcagagcccaaaacaccacatcccagctcctcccgctccatgcagcctcctagctctgccccccttcccagccaggnctttgacaaatgagtggtctgcacttaacttctcccttcctctcctcttcatgtccagatattcctcccacagctctaacacattgctcccaacaagggccactaacaacctctgtgctgtcaggagaagtcataaacatcgtcttatctttacccaagctgttcagcgggccttcacaatcgttgaaccctaccttcaacttgacatgttctctggctcttgggtttctgaggacaccatgttctttgggacatc

SEQ ID NO: 271791 - DNA, 397 bp, Homo Sapiens
  misc_feature (286)..(286): n is a, c, g, or t
  misc_feature (308)..(308): n is a, c, g, or t
  misc_feature (354)..(354): n is a, c, g, or t
  misc_feature (362)..(362): n is a, c, g, or t
  misc_feature (371)..(371): n is a, c, g, or t
gtcgccacagggacatgctaggcaaacgatgaacctaaccgggcatgaagatgtctagggaaaaaacaaggaagagtaaaaagttacacagaatctatgcagcggcaacaaaatcacttttaagggtgcaggagaaaaactaatgcaaatcttaggtcattagggagtctccgagccattcacataatttgcatttcttacactccttatccacagcacaatgaaaccccaagagaatccatctggagagagcgaaagggggatggattccgggtgttttggggtnagggacagggggagaaggtccngtttcaacaaatgtgacatacggggaaagtcagacgactttaactntaaacttngataatggnagttacaaacccaaataatcaggcag

SEQ ID NO: 271792 - DNA, 478 bp, Homo Sapiens
  misc_feature (310)..(310): n is a, c, g, or t
  misc_feature (382)..(382): n is a, c, g, or t
  misc_feature (395)..(395): n is a, c, g, or t
  misc_feature (413)..(413): n is a, c, g, or t
  misc_feature (432)..(432): n is a, c, g, or t
  misc_feature (437)..(437): n is a, c, g, or t
tgggtacctaaagagcagttctctgtctagctagaaccttctgaagtagtctctagaggaattgttctaggaatgggctttttttcaccgttgaaccctagacctgaagttcatgctttatcctctcgttgtttgtatctgtctgattattttgtttgtaacttccattatctagtttacagttcagtcgtctgactttccccgtatgtcacatttgttgaaactgggaccttctccccctgtccctcacccccaaaacacccgggaatccatccccttttcggctctctccaggagggggattctcttnggggggttttcattgtggctgtgggataagggagtgttaaggaaatggcaaatttatggtggaatgggcttnggaggactccctnaatggaccccaaggtttngcattaggtttttcttccnggcancctttaaaaggggatttttgttggccgctggcataggattc

SEQ ID NO: 271793 - DNA, 443 bp, Homo Sapiens
tctttctccttaaaactaaaccctttagtgacatttggcaatgagtggagagctgagctgatttctttcctgaaaatatcaatattctagtttctaaccagcagaccaacactgttcacattagctgaggacactgacaggaaatcacaggccctactgatctggcacccgtagacttggtgctggggtcccgtccacagatcaccctgactcagaaccggaaacacactgggccggacgctgtgctccactccttttgcctatgcacggttctgtcctggacgggtgcacatagcaaacaattgtgccattgttcagtttttagaaaaggataattttctaccaaacaaaagaagaaagaaaatccccctttagtttatgtaatttgttagtttatggagttccatgcgctcaaaagcttgtgatgctcgaacccggaatgg

SEQ ID NO: 271794 - DNA, 497 bp, Homo Sapiens
aaagatgatactaggtcaggaaatagcatttgaaagtcattctcatctggagggatgaacccaagataaggcggaacacgagaaaagctttaagaaagcaaagaatgaaaatagcccctgataccccaaagaagcaaatcctcatgcacccgtgggaagaaaatggccccccagagtggactctacaattctccccagtgatcgcacctaagtcgccaaagttcccttacacgcgtcgccgaaacccctcctgtggaagtgacaatgattctgtacagcctgtgaggaggaggaaagcccataacagtggtgaagattcagatcttaagcaaaggaggaggtcacgttcacgctgtaacaccagcagtggtagtgaatcagaaaattctaatagagaacaccggaaaaagagaaacagaatacggcaggagaatgatatggttgattcagcgcctcagtgggaagctgtattaaggagacaaaaggaaaaaaaccac

SEQ ID NO: 271795 - DNA, 425 bp, Homo Sapiens
  misc_feature (82)..(82): n is a, c, g, or t
  misc_feature (337)..(337): n is a, c, g, or t
gaaagatgatactagggtcaggaaatagcatttgaaagtcattctcatctggagggatgaagccaagataaggcggaacagnggaaaagctttaagaaagcaaagaatgaaaatagccctgatacccaaagaagcaaatctcatgcaccgtgggaagaaaatggcccccagagtggactctacaattctcccagtgatcgcactaagtcgccaaagttcccttacacggcgtcgccgaaacccctcctgtgggaagttgacaatgatttctgttacagcctgtggagggagggagggaaagcccattaacagtgggttgaagatttcagatctttanaggccaaagggagggaggttcacgttttcacggttgtttaaccacccaggcagttggttagttggatttccggaaaattttcttaatt

SEQ ID NO: 271796 - DNA, 319 bp, Homo Sapiens
  misc_feature (31)..(31): n is a, c, g, or t
gagaaactgaagcagctgatggagcaggatnctcctcctccccgtctgctcaggtcattggtctgaagaacgccctgtcatccgccctagcacaaaacacagatcttaaagaacgcttacgcagaatccatgccgagtctctgctcctcgactcccccgctgtcgccaagtcgggtgacaatctggcagaggaaaactccagagatgaaaaccgagctctagttcatcagctttctaatgaaagtaggactcttccatcacttgactccctttctgagttttttgatgctcaggaagttctgttatctccaagctcttc

SEQ ID NO: 271797 - DNA, 485 bp, Homo Sapiens
  misc_feature (71)..(71): n is a, c, g, or t
  misc_feature (84)..(84): n is a, c, g, or t
  misc_feature (100)..(100): n is a, c, g, or t
  misc_feature (144)..(144): n is a, c, g, or t
tggcccccaaaagaaaaatgaaaccccctgttaggccccaaaactgcctgggggtccaaaattccaaaggnccagaataaaaanggaaattgtttccccnaaccctaaagtccaaatgaaaggcctgccctgtaatccacatgnctccctcccccaagcaaaagtgccccagtggagaaaaggccacaaatacacaatgaccctcaagtgtcctggagcctgtccacagaccctaaagcaaaagcgccagcagagcccttagctgcacatgactatggagcctcctgctgacatctggataggcccaggtccccaaaatgaggagtcaccagatgccaaaagggtgagaagggacaagctaggagcagagaaggcacacgtggcagagggaccaggtgacttggctggagcaaagggctgcagggatgaaactggaaggagcgaggcacatggaagggtctcaggctctatgctgaggtgctggc

SEQ ID NO: 271798 - DNA, 495 bp, Homo Sapiens
  misc_feature (27)..(27): n is a, c, g, or t
  misc_feature (40)..(40): n is a, c, g, or t
  misc_feature (47)..(47): n is a, c, g, or t
  misc_feature (57)..(57): n is a, c, g, or t
  misc_feature (80)..(80): n is a, c, g, or t
  misc_feature (99)..(99): n is a, c, g, or t
  misc_feature (320)..(320): n is a, c, g, or t
  misc_feature (445)..(445): n is a, c, g, or t
  misc_feature (452)..(452): n is a, c, g, or t
  misc_feature (460)..(460): n is a, c, g, or t
gcccttcctgggttcctaaccatcccngaggttcctaatncaataanacaaaagctncctttggggcaagaaagccatanttgctccctgcctaaaacnaatctgtttcctcagcctgcaccccagacctcaacttgaagaaagcaagaccctcagctcacttcctaggtcttgccctgtcttgcttcagactcaccaactctaggatgcttccctggagtatctcagtggccactccccctgcaagccctttcatcttacacggggataatcacctgcattttttaaagcatgtttttgagcgctcctgtggtttgttncatctgggaagggcctgcccacttttcattagcttgggaagtttctgaatggcacagtctatcagctacaggcttctctaggggtggtaatcatgcctccatatcaactcaggactccttaattnggggtgnaggaggtnatttacttatttacttttattaaaattttaaaaaa

SEQ ID NO: 271799 - DNA, 287 bp, Homo Sapiens
ccctctcctgcgtgtgcccactgaacatgctcatgtgtacacacgcttttcccgtatgctttcttcatgttcagtcacatgtgctctcgggtgccctgcattcacagctacgtgtgcccctctcatggtcatgggtctgcccttgagcgtgtttgggtaggcatgtgcaatttgtctagcatgctgagtcatgtctttcctatttgcacacgtccatgtttatccatgtactttccctgtgtaccctccatgtgaccttgtgtactttcttcccttaaatcatgggt

SEQ ID NO: 271800 - DNA, 797 bp, Homo Sapiens
  misc_feature (314)..(314): n is a, c, g, or t
  misc_feature (532)..(545): n is a, c, g, or t
gcctattttgaatagcccgagccttaactttgtgactgataaccagaccctcccaaatcagccagcattctcttccatagacaagcaggtctatgccaccatgcccatcaatagctttcgatcaggaatgaattctccactaagaacaactccagataagtcccactttggactaatagttggtgattcacagcactcatttcccttttcaggtgatgagacaaaccatgcttctgccacatcaacacaggactttctggatcaagtgacttctcagaaggaaagctgaggcccagcctgttccaccaagcttnaccaaattgaggctccttttgaacagcccttccgtgctccctatcatggatcaagagctggaatagctactcaatttagcactgccaatggacaggtgaaccttcggggaccagggacaagtgctgaatttttcagaatttcccttggtgaatgtaaatgataatagagctgggatgacatcttcacctgatgccacaactggccagacttttggctnnnnnnnnnnnnnngtgtaaataatactggcactttagaacagattaatcaagagtggggttactctgtgtaaatggagtgctgtacagatttaagagcaatgcgtaataacaagttaagctgatatgaatagcaagataatccaataactgcatttcgtttggttagtcagcattctttgaactgccttacatgttgtcacctttatagaagcaatgcattacttgttttagatcagaaacttgctattccacccacaccaagtt

SEQ ID NO: 271801 - DNA, 501 bp, Homo Sapiens
  misc_feature (21)..(21): n is a, c, g, or t
  misc_feature (42)..(42): n is a, c, g, or t
  misc_feature (49)..(49): n is a, c, g, or t
aaatgtttggtatttagtggncctcctgattcctccccctgnaggattnaactgcctatagaaatagcccatttccactgtttaaaacctaggaccataggtgaaacaacctcaagacattgaacaaccatgccagttgaaccagagaaaagggaaacaaatgagttccagctctataattaccccccctgcttacctgccctagaggtagtttcctgggttgcagtgcaggcagtgggagcccaaacaaagcctagtagtgtcactgagttctggagactgaaactggagttcagggaggcctagatggctaaaatttgcaggacagaatactagaaagaaaactgtacagggaaaaagttctggaaattgacagaagggttccttggaatttttggctaaattgtgatttgtgcatgtgaggggtgaacccacacaagtttggggttagttgggaaagatgggaagcatcactggaaaacaaaaggtaaaacaattctc

SEQ ID NO: 271802 - DNA, 477 bp, Homo Sapiens
  misc_feature (153)..(153): n is a, c, g, or t
cagttggatttatgaccccggagtccaggggagaaattggggctgaagataaccccatttggaagtcatccagtgtgaagatggtgcctaaagacatgagacctgagtgaggtccacccaagggagcaggcagatagaaaaagttgggagganctgagtccccagggccctcccaaattcccagcagccccagagatgagaaagggaccagctttaaaggtggattcagagataccagcaaaggagaggagatacagcgtgtgctgataaacctgccctctgaaaataaagaaataaacgcattgatttgtagagttttccagtttccatggtgtaaataactcccaccgtggtccatttcaggctaccaacatgacgtcactgaacagggagtcaggagctttgcacatagtcaactcttgcaaactattatgagtttgtcctgcttcccactgcctggaaaccaagcaaacagag

SEQ ID NO: 271803 - DNA, 407 bp, Homo Sapiens
  misc_feature (51)..(51): n is a, c, g, or t
tccctcaaccttaagcctccccgggttcaccccctaacccctgtacctaancctgccttgggggaccttgggaaaagaccttggcctctgtcgggaaaggagagacggggcctcccatcacgccctgttacccagaggatcccccgagagcccacacccagctctggacatcacccgccccctggaactggggccaccagcccctgggcacgagatttgctctgactttatttatatggcatgaaatctctggtttattttgggattttttgttgttggtgttgtcaaagtttgttttttctaaagttgtgtcattatatatttgacattttacatttcaaagaaaggtatgttgtctaacaggggaccaacagaaggtagtattgacaactgttcctgcttctact

SEQ ID NO: 271804 - DNA, 233 bp, Homo Sapiens
  misc_feature (27)..(27): n is a, c, g, or t
agtttgccaccgttgaaatagaatttnttttttcattttaccttaattcctttttgcaaacctcagcctttggatctctaatactttccttatctgattcatgaagtcagcctactgattgggattaaaagatgtggtgtagaaactgatagtgcatttcacgttctaaaggtgtttgaggaaattggtagtgataatgagttggaatggtgtaatagccaaaatatacacct

SEQ ID NO: 271805 - DNA, 484 bp, Homo Sapiens
  misc_feature (263)..(263): n is a, c, g, or t
  misc_feature (307)..(307): n is a, c, g, or t
  misc_feature (348)..(348): n is a, c, g, or t
  misc_feature (421)..(421): n is a, c, g, or t
ttctcaaaaaaggagcaatttgtcgactaacagtgaagacggaagaagcctgggagttttgagagaaggaaacgtaaaatagttatctggagtggtgcaagagagtatactttgatgggctgctttaagaccttagtgcgtctgcgaggctaagcaagaccagttggcaaagtggctttccctgctgcaatttgctgtacatgtgccagcgtaaatgaagcagaaagttggatttaagtctggttttgacaaagcgaagtggngatgggggttaaggaaatgacttgcaagtgaccacagacttctngaatcaggaagagcagagaaagaggccatgagaggcagttnaagaacattgaaaaggtgggatccaatggactttggaggcttgcttggggtccctcttgggagcttggagttnccttttggggagggaggttggggaagaaagaagattgggcttaaggggcattgggagcacaga

SEQ ID NO: 271806 - DNA, 394 bp, Homo Sapiens
  misc_feature (143)..(286): n is a, c, g, or t
  misc_feature (366)..(366): n is a, c, g, or t
  misc_feature (377)..(377): n is a, c, g, or t
agagagagctgaatggttggtctgaaagatctgtatgacaggggtgagcatagatgacaggaagttgttttccttccacagcacattatgcttcgaatctctttctgtggagcattaaggcaatgattgaaatctgatgctcnnnnnnnnnnnnnnnnnnnnnnnnnnnnnnnnnnnnnnnnnnnnnnnnnnnnnnnnnnnnnnnnnnnnnnnnnnnnnnnnnnnnnnnnnnnnnnnnnnnnnnnnnnnnnnnnnnnnnnnnnnnnnnnnnnnnnnnnnnnnnnnnggaaaagagggctgagtgtgtttagctccatgccctgttaatcccccagcacttttgagggggcccatggccgggtgganccgcccgaggnccaagttttgaggaccc

SEQ ID NO: 271807 - DNA, 355 bp, Homo Sapiens
  misc_feature (336)..(336): n is a, c, g, or t
agactgcttagtatgctaatgtgaacacaaaatatctgagacaggtctcagtcaatttaggaaagtttattttaccaaagttaaagatgcacccatgacacagcctcaggaagtcctgagacatgtgccccacggtggttgggggtacagtttgcttttatgtatttcagggagacatgagacatcaatcaatatgtgtaagatgtacattggtttagtccagtaagggcagcaacaacttcaaagtggggggtttccacgttagacatagataggagacaaaaggtggccttcttttgatcagccttccactggattacacattgtagtctgggnttgagtgtgggagcccttt

SEQ ID NO: 271808 - DNA, 456 bp, Homo Sapiens
tgagaggttgctttgaacatcccaaggctgaagacggcctggaagaaaacctgatgttcctctactcatctctcccagagtccctttttgggcaagaagatagaaatagtctgcactctgctagccgaggagtcaagtgcagagagggagtgcagcattacccagtaagggcttgatctaccagatgggtctttgctttgagtcactgccagcaactaccagcacaaaccaggagggccaggacttgctgaaactggaagcagccacccatggctagtcacagcaggagaaagcctcctgcttggcatctcaggaggtagaagaaagagacctggggagacctgccacctacagcaagaacaataaggaggaagttgagcaacatccccctgaagctcacatgttactttatttcctgcccattatggccccagtgaggtccctactgctcaattt

SEQ ID NO: 271809 - DNA, 432 bp, Homo Sapiens
  misc_feature (380)..(380): n is a, c, g, or t
ggacatggcactgtactcgctgttgagggccaagggagagagggcctatgtagtggagccgaacctcgtgaaacacatcgggctcttctccagtctccggtacaactttcatcccagtctcctctagggtgccaagagatgcctttcggaagttggccacttcttgaagattcaaatatttatctctttatttaggacatggttgcctgcaggtatttcactgtttactgttgttaggagatatagggcactggggggcagctgagggaaccttcaatatgtttaaggagccttggcttttgggtaggcctcctggggaagggagcaggcagttttgcccacaggttcccgggaccttttccctcccacacaggccacanttgccttcatggcagttcttgaccccaccccagttgaggggtggcatttttg

SEQ ID NO: 271810 - DNA, 504 bp, Homo Sapiens
  misc_feature (53)..(53): n is a, c, g, or t
  misc_feature (55)..(55): n is a, c, g, or t
  misc_feature (492)..(492): n is a, c, g, or t
tttaacagaaaagccagatcacctgcctccaagatgccgggcactgcacggtntntatcagtttttattacatcaggtcaaggaaacaaatggaatctatccacatggtcctgcctcgttgggcatatattctaaacatacatccattttcatacccaatgagaaagaactcaattccaaaggatctcacctttcacaaaattctacccttaagatcctaaaacagtcatatcactgtggcacaaaatttttgggcagtcacaagctcttaacacaaagcagagcttaaaaacaaatgggagaatataatcagtgttcaaatgcaccctcactggggtgggggtcaggactgcatgagggcaggtgtgggctgtgtgggaggggagagggtccgggacctgtgggccaaactgcttgctcctgccgggggggttaccaaaggccaagggttctttaacatatttgagggttccttcaggttggccccagtgncttttatttttt

SEQ ID NO: 271811 - DNA, 387 bp, Homo Sapiens
  misc_feature (17)..(17): n is a, c, g, or t
  misc_feature (32)..(32): n is a, c, g, or t
  misc_feature (93)..(93): n is a, c, g, or t
aaaaaactcaacctaanccatgaaagggggangggcacccaaagcccatccatgcaggggatcccactccccatgaccccaaaacacctcccnactagggtcacaccctcccaacattgggggatcgcattttcaacatgaagatttccagaggacaaatatcccaaactatatcaacatgccatgtgtgtagcctcctttgtagttattctgcttgggtttcattaaatttctttaatctttgagctgagatctttcaatagttttcaaaatttcttgatctttatcttgtcaaatattgcccctgcctaactgtctctcctatctttctgagactccaattatatgtacattaaaagttcttactatgtattatatatccttcat

SEQ ID NO: 271812 - DNA, 449 bp, Homo Sapiens
  misc_feature (224)..(255): n is a, c, g, or t
  misc_feature (343)..(343): n is a, c, g, or t
  misc_feature (366)..(366): n is a, c, g, or t
  misc_feature (380)..(380): n is a, c, g, or t
  misc_feature (385)..(385): n is a, c, g, or t
  misc_feature (423)..(423): n is a, c, g, or t
ttagctcacaactaacattacgatagttgtattattttcataactagcctagtatttgctttatatttatgttttttaaatcctaaaaagtattctatatttattcacatatttccccattcatcttcattcctttctacatttccatgtttatctcttgaattattttcttttgtggggaagtgtttttcttttgctagaataattttcttctgtatctagcnnnnnnnnnnnnnnnnnnnnnnnnnnnnnnnngggtgcatgtctgctgctgatttctttcagtttttgtttgtctggggaatgtctttttccctttacatttgaagggataggtttttcngggggaatagggaattctagggnggaaccaattattntcccntaacaggcccatttatttaaaggaaggtaattccaacnggaattctgggcttccatccataatc

SEQ ID NO: 271813 - DNA, 374 bp, Homo Sapiens
  misc_feature (244)..(244): n is a, c, g, or t
  misc_feature (253)..(253): n is a, c, g, or t
  misc_feature (364)..(364): n is a, c, g, or t
agatctagaggcgcagagtcaagttagattttgcaggtgtatctgtatgccttttggaaggacatgatgtctggcactttttagtgatagtggaaccctctcttcacctttaatgatcagaaatgattttccagctccctggcccctcaggtgcttgaatgcttctcctgcctccaccctccccaccagtttggggcacttaggcacataagctcagtgagccttcctgaccttgtcttctgtngctcccatngcccctagcccatcttctttctttcccacctccctcccaatgggaactccaggttccagaggggaccccaggcaggcctccagttccattggatccacctttttcatgttntttcattggc

SEQ ID NO: 271814 - DNA, 422 bp, Homo Sapiens
  misc_feature (39)..(39): n is a, c, g, or t
  misc_feature (48)..(48): n is a, c, g, or t
  misc_feature (64)..(64): n is a, c, g, or t
  misc_feature (79)..(79): n is a, c, g, or t
  misc_feature (84)..(84): n is a, c, g, or t
  misc_feature (117)..(117): n is a, c, g, or t
  misc_feature (127)..(127): n is a, c, g, or t
gccccacaaaatggaggccaaaagattggtacctgtttncccaggttncatcgaattttcctantaatgggaaaaactntgttncccacagtagaactgtctgtgaacagaggaggnccttgtgggnccatgctaacaaagacaaaagtctgtctttcctgaacccatgtggataactttacagaaatggactggagctcatctgcaaaaggcctcttgtaaagacaggttttcagccaatgaccaaacagccaagattttcctcttgtgatttctttaaaagaatgactatataatttatttccactaaaaatattgtttctgcattcatttttatagcaacaacaattggtaaaactcactgtgatcaatatttttatatcatgcaaaatatgtttaaaataaaatgaaaattgtattat

SEQ ID NO: 271815 - DNA, 392 bp, Homo Sapiens
gaaaacagactgatacaacatcctattttcctgtgctgaacttgatctgtaaaatagagcaccttgtccaagagacaagaccctgggctgttaaatctgcttcctgacaacctactgtatagtgtgttgtattttgtgaatgtaaaatgttttggtttctgattttgaataaacttgtagagtagaccatgtttgtctttatgttcctggcaaatctgtaaaaaggaaagataagcttgtcattggagctcctaatgtttcataaatctttgtgatttttggtgtctagaaaagagtgtacatttgcgaggtgagaattgtggggaattccttgctggtgctgacatttaatacataagagatgagtttggaaagataaaatttccttgtta

SEQ ID NO: 271816 - DNA, 531 bp, Homo Sapiens
cagtgcagaagtgtgaccttcgttctccgaaatctgtagatcacagcgggcgatgggcgtggctgcccagtgcagaagtaggagacggtcatgtgcccttccactgctgtctgccatagtctcacagagctggcattttctaatacaaactgtcttaggcttttaatccacactaaatcttggcaatcactgcctctgtcaaagaaaagtacttgcttgagacactgttaagagtctcgtcttacagcctgtgtgcacgttgaggcatctgtgcaggtgccatgcacaggaggtgctcagcgggaagttggagcacctgggttctcatctgcctctgctcctggctgctccttgactttgcacgaatgaacggaacatctctgcatctgcaccagggtcgggaagtaaaagcaccaaactagatgtctctgagatcaccctcatctctgaaatcatgtggcctaactaaatgattatgtatcaacagaaatcaacattggaatttacaaaggatttgattaagagaaatgc

SEQ ID NO: 271817 - DNA, 404 bp, Homo Sapiens
  misc_feature (267)..(267): n is a, c, g, or t
  misc_feature (321)..(321): n is a, c, g, or t
  misc_feature (344)..(344): n is a, c, g, or t
  misc_feature (363)..(363): n is a, c, g, or t
  misc_feature (370)..(370): n is a, c, g, or t
tggaatttctgaattatattcactcatgtcaagtcctgtagtttttgtgatgcagtcagaagatttatcggtctgttgtttcacttggggaaccagatcccaagtcagtatttcgttagtaaagttatgcatatcattcacgcatctggacacctcttccagtgctgcatttgtgtgtgaaaaactgcctactgagcaatgcagacattgggtaacgtcctgcctctttatttctcagtgggaaaaagcttgtcattagtctctganatgtcttcgggatgattctttatcagtgtgcacaggaccaggctacccaaaatncatctgtggctctccttatatgnggtctttaaattctttgtncaaatgncggctttggtcaattaattactttcaaagggggg

SEQ ID NO: 271818 - DNA, 380 bp, Homo Sapiens
  misc_feature (86)..(86): n is a, c, g, or t
  misc_feature (91)..(91): n is a, c, g, or t
  misc_feature (288)..(288): n is a, c, g, or t
  misc_feature (297)..(297): n is a, c, g, or t
  misc_feature (325)..(325): n is a, c, g, or t
  misc_feature (332)..(332): n is a, c, g, or t
  misc_feature (353)..(353): n is a, c, g, or t
  misc_feature (359)..(359): n is a, c, g, or t
agactcagcctactgtttctagggtctgacatgatcaccagtcccactcccaccaaagagcagcccaagtccactgccagcgggantctgngtgaaagcatggactctgtcagcgtgtcatcctgcgagtcgaaccactcagaggctgaggagggctacattactcccatggacacccctgatgagcctcaaaaaaagctctctgagtcctcctcatactgttcttctatccatttccatgggacacaaatttccttcaggggatgtcttcctttaatcaaccccctnttcctcccntccgttcctggcaacaacaaccccaaantccacangcgttctgtttttgggtggangttccntttaccttggattgtggttgg

SEQ ID NO: 271819 - DNA, 374 bp, Homo Sapiens
  misc_feature (187)..(187): n is a, c, g, or t
aggtccaagccaaagtccatttggagggacacactctgcttgggggagcagtaggccatgggaatccacgtcctgaacagcatattcccagcagagtgcaggtcgatgaaggcctggctgagcctctgcacactgcagaagacctggagaggcagaaccatgaggttggctcacagagcatggcgangagggtaacacgctactctgcaacagcacacaggcctaccgccaaaagacggccctgtccacaggcccactggcatggatcttgcgcttcacaaggcctcccttccttcattcttacacaacccaccttgaggaagatgggcattcttcattcaggggaaaggagttcattgttaggaggttaaaat

SEQ ID NO: 271820 - DNA, 366 bp, Homo Sapiens
  misc_feature (284)..(284): n is a, c, g, or t
agtagcaagattcagccattgcctttgtaccatattgcaaatattaaatgatagcacttactgctgggattgtacatggcagggactttttaagaaatgctcgtttccttcagtatctttttctcttcctaagttaccttgcttgtgtttgggaacacttttaaaactcgtatataggaaagggcaaaaagttactccaaccctctcctttgttaacaaacccacacagaaggataaggaaccacagttggcaggcttaccctggaacttggagtttcttgttnagggagctgttgggctgtttactttagggaggggtatagggggattgttaatggattggtactttttccccacccttccacc

SEQ ID NO: 271821 - DNA, 658 bp, Homo Sapiens
  misc_feature (159)..(159): n is a, c, g, or t
  misc_feature (179)..(179): n is a, c, g, or t
  misc_feature (291)..(291): n is a, c, g, or t
  misc_feature (532)..(532): n is a, c, g, or t
  misc_feature (549)..(549): n is a, c, g, or t
  misc_feature (564)..(564): n is a, c, g, or t
  misc_feature (589)..(589): n is a, c, g, or t
  misc_feature (617)..(617): n is a, c, g, or t
  misc_feature (635)..(635): n is a, c, g, or t
ggcatgaccagaccagaagccctgttctatatgaagacaaacaggtggccatacttgggtggagggataccgctgctattcccagatgaagatttggtggaaggagaccatgacagatgacaaacggaacagtttctcaaaaacagaggtatgaagtanttacacaggaaagaaaacantttccaaaggagtgagacaagtcgtgattcttcattggtacctgacccctatacccaaacagccttgaaccagcccttccagagactgcccctagtggcccactgggcgttngcaaggctgtgaagaagacctgaaggcagatggggtgggggtgcttattttgctacagtggagaaggggcttgaatggggagggcagacctggctaacatctgccgccatcccccaactcccccccagacttctatcacatttacaaatacatacataaatacattacatacagtagccagtctggggaggcagactccccacagagggcatggctgacacatgtcggggaattctagggnaaggggcacttgggctncccaaatacgtgctncgtgttgttctctcctgcccggggntaagcctttgccccagcccacccctctnttcttgggtttagttttntccagtatggaggagtttcccta

SEQ ID NO: 271822 - DNA, 470 bp, Homo Sapiens
  misc_feature (17)..(17): n is a, c, g, or t
  misc_feature (27)..(27): n is a, c, g, or t
  misc_feature (59)..(59): n is a, c, g, or t
  misc_feature (65)..(65): n is a, c, g, or t
  misc_feature (84)..(85): n is a, c, g, or t
  misc_feature (133)..(133): n is a, c, g, or t
  misc_feature (208)..(208): n is a, c, g, or t
  misc_feature (363)..(363): n is a, c, g, or t
  misc_feature (414)..(414): n is a, c, g, or t
  misc_feature (433)..(433): n is a, c, g, or t
  misc_feature (445)..(445): n is a, c, g, or t
tttggttgtgcaacgtnttcacttgtnttgtacagactggttttgaacttccttaagcncaagcnttcctcccaccttcagccnnccaaagttctgggattatgggcgtgcgccagtgtccaccccagaactntgcccaccccagaatcttattaaaggacgcaggaatccctggagcctgatctcagctgccgactcacctctggcntgccttgagagcccaacacacaggtgtgcctcagcagctcctgcaggctcacctcaaagttgggttatgcattcaagcaattattttactgtccagggtaaagtcactgggaggttgccaagtatgtatttgccaccaacaaatatttactgagncatctgctatttaatcactctgataggatgttcacagggagttagggaggngaacccagggtttcagagntgctaatgatcntatttgggacaatttgggatttgaa

SEQ ID NO: 271823 - DNA, 541 bp, Homo Sapiens
taaagagatatatactcttctaaaaacctcccacccttgcccccatccccaacggaaagggtcctaaaataaggtgttaacaagtgcttaatagatatgtttcttaggttaatgtcccaactgacccttagaaaaatatattaattagacctttaagaagattatgttggttgtctaatgtgaggaaaagcctataattattcagtgaatataatatattctcaattgttattttcatgttaaccaagataggtttgttttactttactttgttaccctctacaaactcaacttatttgcaatactcctatcatttcccagagatgcatgaaagtgggattttactgtatatatttctagtcacttaaaactttgtggtagttcatcaggtagttttctaatgcatttaacttcaaattctccatccaaaatattgcaaggaaagatggattcacattgaatcagaaagataacatcggagtaggactgttgtttttgttttctgcttttgattcttaagggaaagaaaaacatatcaaat

SEQ ID NO: 271824 - DNA, 408 bp, Homo Sapiens
  misc_feature (310)..(310): n is a, c, g, or t
  misc_feature (367)..(367): n is a, c, g, or t
gaggaatcttctctgaaatatttctgaaaagtggtcatctagcctctgaacacttttaataataggatttctttacaagacagcccaccccattatcaacaagttggcttatttgaaagggacagaaaaattaggggtcttgctatagtcacacaatgaggtaatgagaagctggaaataaccctcagtctccttgaatctcagccctgttgctccttttccagttcagggattcccagattttatcttcgaaggctacgtgcaacctctgcgtgtgttttactgggccacagaggggctggggaacccngggcaactggcattttcttcttttctctttggaagggaagggatggatttgctgganggggtgggtgggaattggggtcttttcttttccacaggggt

SEQ ID NO: 271825 - DNA, 371 bp, Homo Sapiens
  misc_feature (11)..(11): n is a, c, g, or t
aagggccaatnaaagggctggggacttggatgtctgtcccttgaatatcctcccttgggtgcaaaaagtccaatagtggtttaatacacatgcaagttttatgacagaaacagctggggatatacatgtggggaatccttccccttgcccctggtggtgcccttattggaaatgtacagaagtagacaaatttaggtgacaaagaatactaactgctccatagattctaatattcctcctgtgaagagaggcatggatcattaatagaatgttattaacaacagtagaaagggaggccataggagaaactaggttccaaagagtgaggctgcgtggaacttgctacctattttctaactacatgtcaacaa

SEQ ID NO: 271826 - DNA, 659 bp, Homo Sapiens
  misc_feature (42)..(43): n is a, c, g, or t
  misc_feature (155)..(155): n is a, c, g, or t
  misc_feature (175)..(175): n is a, c, g, or t
ttccttatatggtgaaaactctaatagtctctcttcagcggnnactgaaggaagataagcctgtcactggtcctaggaacaagactgaaaatggactgactccaaagaaaaaaattcaggtgaattcaaaaccttcaattcagcccaagcctttnattgcttccagcagcacccnaagactcaaacaaaactccagtgttccagcaaaaaccatcattattcagacagtaccaacgctttatgccattggaaaagcagcaaccaattatcagtttacaacctgcacccactaaaggccagacggttttgctgtctcagccttactgtggtacaacttcaagcaccttggagttcttgccctctgctcagccagtccttgctgttgctgggggagtcacacagctccctaatcacgtggtgaatggtgggtaccagccccttcagcgaatagcccagtgaatggaaaactttccgtgactaaacctgtcctacaaagtaccatgagaaatgtcggttcagatattgctgtgctaaggagacagcaacgtatgataaaaaatcgagaatccgcttgtcagtctcgcaagaagaagaaagaatatatgctagggttagaggcgagattaaaggctgccctctcagaaaacgagcaactgaag

SEQ ID NO: 271827 - DNA, 455 bp, Homo Sapiens
  misc_feature (321)..(321): n is a, c, g, or t
  misc_feature (412)..(412): n is a, c, g, or t
  misc_feature (427)..(427): n is a, c, g, or t
cccagctggggtttggtgagagtgggactcgggggaagaagatggccctgggggtcccctgttctctgaattctggagctttgcttctccaggtagtacagactgagggatggtggggtctctgcaggcctcaggaaacccctaagagcaagtggagtccgagtcccttccccttgccagttcccgtcagcctgtgctgttggcgatggttctctgagcctgagcacagcggggtccgggccctgtcagcatggggccggaagccagttccacagaggaccccggctccggttctttcccgagaggggtgtttcatgctcntgctgtcttaaggtgattcagactcattcctctttcaaaatttagatgtggggaaccagggagttgttcgtgttgtttgagaagcccagtnagggcaaggggagcnggcttggcccccttttcctggggaagat

SEQ ID NO: 271828 - DNA, 412 bp, Homo Sapiens
  misc_feature (26)..(26): n is a, c, g, or t
acctaccctgcccttgggcccctcanaaacaaactcctcctcccccccaaaaaaccccagctcccacggtgtccggggccatatgttaaaaagcctgggccttaagtgccagccctaacaccctacttgtttggatttttccagccccacgcctttcccttgatttcaacaaatcatgtggacaaaattgttgagagtatatcaagaaacactaccaaaagagtaaaaaggcagtccatagagtgggagaaaatacttgcaaatcaatgcttacttcagcagtacatatactaaaattggaacaatacagagattgcatggcccctacataaggatgacaagcaaattcatgaagcattccatattttttataagcaaaaatatatgtacataataaagtttttaaatttgc

SEQ ID NO: 271829 - DNA, 407 bp, Homo Sapiens
  misc_feature (27)..(27): n is a, c, g, or t
  misc_feature (58)..(58): n is a, c, g, or t
  misc_feature (61)..(61): n is a, c, g, or t
  misc_feature (98)..(98): n is a, c, g, or t
  misc_feature (111)..(183): n is a, c, g, or t
  misc_feature (185)..(185): n is a, c, g, or t
  misc_feature (310)..(327): n is a, c, g, or t
aaaacaacctcccacctcacgggttcnaagcaaatcctccctgccctcctcctccccngantaaactggggaattaacaagcacgcgcccactaacanccggcctaaattnnnnnnnnnnnnnnnnnnnnnnnnnnnnnnnnnnnnnnnnnnnnnnnnnnnnnnnnnnnnnnnnnnnnnnnnntnattgtttacaggcatgagccaccacgcccaggcacaaaagcttttaaggccgggagtagcgtgcagattgcttggccctggattttcagaccaactgagcaacatggcaaaaccttgtctctacnnnnnnnnnnnnnnnnnnttagcagggcatggtggctgcacctatagtcccagctactcgggaggctaacctgggtgggattgcttatgaccggccat

SEQ ID NO: 271830 - DNA, 389 bp, Homo Sapiens
agctttctaataagacctgttggtttgaatactccagaaccacagataaataacactatgagatctcctggttctgaagctgtggggtttggctagacctgtaacattctattcagttggtagagagatccccagagattaggtgacagatttctggcctgcacttaaactatgacctggacaggtcattttgtcttgctatctgtaaaaggagaaaatcatatttagtgcagcttttatttttaaatcatggtctttatgtagaccatgctttttagaagcaaagttatgtaccttcaaagtagcatattctcttactttgttataataatacataccattatgttggtacaaatttggaagaatgtattattaaccagcaaagctgt

SEQ ID NO: 271831 - DNA, 600 bp, Homo Sapiens
  misc_feature (22)..(22): n is a, c, g, or t
  misc_feature (162)..(162): n is a, c, g, or t
agcgcccacttcttgacattgntggaggcccccaccgcttgcgaatgcaagcaaactctgcagtcccacggtggaccctaaggaggcatggcctgccctctgcatcctctgagccagcgagcagaaggcctagaagggtcctctgagactccaagcctgaangcagaagggctgcttccctgaagctcccaacagttccatctgcttcaggcccccgccttggcctgtgttcttcctgcccgcctgggtccaatgctcaggtgctggggcctggttcccggaaaagtgtgccttctctctcccttttcagggaccgccccctgtctctcagggccaggcctctccctcctccaggaagccttcccctaccccttgtcgcccctccctcccagagcacctgctgtctgggtggctcactcagcacttggtgtggccttcccttctacctagcgggatggggctcccccaggggctgtcccggaggcggtgggcctggttaaataaggcagggtttatatgcactttcttccgatctgtacctgagaggtttgtggaaaagatggcaaatggggaataaaaagattttgtgtcaacaaaaaa

SEQ ID NO: 271832 - DNA, 408 bp, Homo Sapiens
  misc_feature (301)..(301): n is a, c, g, or t
  misc_feature (311)..(311): n is a, c, g, or t
  misc_feature (318)..(318): n is a, c, g, or t
  misc_feature (345)..(345): n is a, c, g, or t
  misc_feature (374)..(374): n is a, c, g, or t
  misc_feature (397)..(397): n is a, c, g, or t
tattagtctagctagcagtctaccgtatcgttacttaattcccttcaaaaaaccaattccttagatttgctgatccttttgtatggctttttttgcatctcaatttcccttcagttcagctctgattttggttatttctatcttctgctagctttggggttggtcttctcttgtttctctagttcctctagttgggatgtcaggttgtttatttgagatctttctaactttttgatgtgggcatttagggctgtaaacttccctcttatcactgctttaggtgtgtcccagatattctggntatgttatanctttgtnctcaatagtttcaaagaatgtcttganttctgccttaatttcattatttacccagncattcagggagcagggttaattnccattaaattg

SEQ ID NO: 271833 - DNA, 270 bp, Homo Sapiens
  misc_feature (64)..(64): n is a, c, g, or t
  misc_feature (102)..(102): n is a, c, g, or t
tgtatttaactgaataaatgagtagacattgtggacctcacaagattatttaattcttaagatntgtagaccttgatggtaggtgtgaccatgttagttttnccatacttgcatttatttaagacactgttacagagatactgttgtccccttctggggcacggtctttggggagaggggagtgcatttagacttatgtggaactgtacaaattgtgatgtggctacatagaaagccatgtgctaagaataaactccatttaaaaaacaa

SEQ ID NO: 271834 - DNA, 505 bp, Homo Sapiens
  misc_feature (288)..(288): n is a, c, g, or t
  misc_feature (399)..(399): n is a, c, g, or t
  misc_feature (470)..(470): n is a, c, g, or t
  misc_feature (479)..(479): n is a, c, g, or t
ttgtagtgtctgtagtgtttccacctctgacaagtgcttctgccgaagactctgcagcttcagcccagaactcctcatcttccccactgctttctgactcctcgctgctcaaacacaggctgctgtaggagtagttcatccacactgggctgggatggctcaggggttgggggctgccccaactttggggttccttcccatcatctccttcctcctcaactccagcccccagaccctcagctgcacggtcgctctcagccagagcttccctgggtctctggcccgccntccagcactgtcctctgtatctgagctctctgaagtgagctgaggggttgaaggttttggagaaccagagagagtgggggattttggcttgcaagggaagaggctcagcgntttccttggatgaagtcacttgggaaacgcccaacaagctgcggctttccctcttcagagatggggcgccntgggctttnccctgggaagggcccaacaagaagtt

SEQ ID NO: 271835 - DNA, 435 bp, Homo Sapiens
  misc_feature (276)..(276): n is a, c, g, or t
  misc_feature (387)..(387): n is a, c, g, or t
  misc_feature (416)..(416): n is a, c, g, or t
atagggaccattgcaagagggtattgcagtgtggaagagagactagactcaactctctgtgaaataatttgtatgatcatattaactttgtgttaatatcctgtatcctcacagagcacaggtgaggacaggtctccaggtgacataagaggcagcttgcaccaggagcgctgccacaaggtgaagagagagggccaccttgatcacgcacctcccgcacagtgcaagcacaaccatttttgatttataaaaatcccacttgctcagacccctgtnaggaagaaagcagtgggggggcccgcttggggacctgggaactttgggaagggccttggactggccttgcaggacagggaaaggcatgttgggccacaagattcactttancttccttccaggaatgggcttgaacaaanaaggcttggctctttaaca

SEQ ID NO: 271836 - DNA, 343 bp, Homo Sapiens
  misc_feature (79)..(79): n is a, c, g, or t
  misc_feature (330)..(330): n is a, c, g, or t
aggggtttgggggaaaggggaagcaggggcatagtcagggtggggagtgtttgaagtttgcagatgagaaggtttgacnaaaagacagagagatgtagagacagtgatagagacagaggaacaaaaagagcagcagtgagaaggcaaagagagaggcagaagagacagacgaggcagagacaaaacactgagaaagagactgaaatggagtaataaatgaaagccccacaccaagcctcctttcttccactggcaaggtgaggggcttggtatagtttggggagatcccctgactattcagtaggagaacatttgtaaataaagttaaanttctaagtcaaaa

SEQ ID NO: 271837 - DNA, 354 bp, Homo Sapiens
gagccaaatggtgggggcaggggtagggggaagattcctttctccagcatgtaacagcattatgggagtgaattcagagcttctgtgtgttctgagccaagtgcctgctggaatgtggactgtaaatctctcatcgtcctcttcactgacccacaagcaacccctgctcctcccatctgcttcccgacccacctgccttccagtttttcctttataaaaaaaacgtttcccattctcctaccttcctctctgtctacctttgtatggtacatctcatccctcttctaaatatttccatctgaccacatttttccctaatgagacaggctcacaataggataaagtgtaacattt

SEQ ID NO: 271838 - DNA, 420 bp, Homo Sapiens
ttaaatcaacacccatcctgcctacagtggggagaattctcatgagagtaaaatgagatggtaaatagtattctgtggctggattccaagtacccttcaggtctctgttaggatagcactacctccaggagacctcctcagacccacagtctgggttaggggcccacactatgagcttccatagtaattgatccctgggcagattgattgtcagtcagtttacctctctggctaagctaatgatcaggactgggttgggtccctgtatcctatcccagcacgggttcccgggcaccacggagcagttcaggtaaaccttgggttgggcttgaattaaggtgtcgctgtttgaggtcactggcaggaatattaatgcaataggttacttgatttgcttttttatattaaccaaaatcaaaa

SEQ ID NO: 271839 - DNA, 416 bp, Homo Sapiens
  misc_feature (22)..(22): n is a, c, g, or t
  misc_feature (50)..(50): n is a, c, g, or t
ttgcttgctgccagttaatcangtttgccccaaaaaatttcaagcaagancccctgttcccaaaccgtctgcaagattttcctcccctctggcctctgttgcttgactttgactccatctccttagaagctgatttccacctctgcaagaaaaggatttacatgcacaataactaaacaatgggcaaaccacccaactacatgtctccgagtgccatgaattccttgagctttctggaggttccactgaggacacacatacctgggtctcaccatcagaaccctccactgcctcccctcagtctcacaggtggcagctgagctctctgacatcctaatgctaaagctggttcttggccaagtcagcttgtggttccggttcactcctatttcacatgaactgtaaatggtggtcgt

SEQ ID NO: 271840 - DNA, 265 bp, Homo Sapiens
aagaagacagacatttagaagaagagctgaaatgtcaggaacaaaaagaagaacagctgcaggaaggggtgcaccggaagggaccccagggggccacgtagcagcggctcagtgggtggccatcgatctggaccgtcccctgcccacttgctccccgtgagcactgcgtacaaacatccaaaagttcaacaacaccagaactgtgtgtctcatggtatgtaactcttaaagcaaataaatgaactgacttcaactgggaaaaaaa

SEQ ID NO: 271841 - DNA, 441 bp, Homo Sapiens
  misc_feature (46)..(46): n is a, c, g, or t
  misc_feature (265)..(266): n is a, c, g, or t
  misc_feature (346)..(346): n is a, c, g, or t
  misc_feature (366)..(366): n is a, c, g, or t
  misc_feature (371)..(371): n is a, c, g, or t
  misc_feature (398)..(398): n is a, c, g, or t
  misc_feature (405)..(405): n is a, c, g, or t
  misc_feature (410)..(410): n is a, c, g, or t
ggaagtctggaggagcgtcttgcctggagtggctggtcgccactangcctcttggggatccccaaggttgcctggctctgggtctcttggattcacagagcagtggggcataatcccagcacttcatttgatagtctgggccccttcctggagggaaagcagcagcaagacccagtggagacgatggcaaaggggctgatttcactttaggtaaatatggacagctgggccacgagggacaccaccagcttggatcggcctcggnngttggaatactttgtagataagcaactccaagtaaaggctgttcacctgtgggccgtgggaacaccttacgtgttattgntgtgggagaaagggaagagntgacntgttgttacgtattattgtattattgncaacacntgttnaggacccccttttcaggttcaagggaaaacc

SEQ ID NO: 271842 - DNA, 406 bp, Homo Sapiens
  misc_feature (368)..(368): n is a, c, g, or t
  misc_feature (391)..(391): n is a, c, g, or t
gcaatctttctagttcccatttagtaagttcagttaatatttgtcaaagggcagatttacctgccttcagttttatagtactagatagggaaaacatcccccagtcacatacagtacccattttcataagacatttaggtaaaaggagtcacaactaccttacataaagtctgtgtaaacatctcagatttcataattctgttaaactgtatggttttatgttctgggtcccaggaacttttctacccccaggaccattctaccttttctgggtaaaaaaggggtttggggttcccagcaggggaggtggaggccaaggggactcagggcctttttcgttcaaatttattatctttaattttggcctncaggcatttgcccccaggaaaangttcaggcttttttc

SEQ ID NO: 271843 - DNA, 444 bp, Homo Sapiens
  misc_feature (22)..(22): n is a, c, g, or t
  misc_feature (33)..(33): n is a, c, g, or t
  misc_feature (46)..(46): n is a, c, g, or t
  misc_feature (55)..(55): n is a, c, g, or t
  misc_feature (75)..(75): n is a, c, g, or t
  misc_feature (86)..(86): n is a, c, g, or t
cccggaagtggttttacccccnggccccccggntttaaaacagtgnaaaaggccnaattccccaatagccagttnaacccctccangggtagaaatccagaagccccactaaatacccaaacattggaatttgtattgtcctaaaccacaatgccggataaatggccctttgttaataatattaaataaaatggaactaaatagaattcctacatcatttgccttataacaaccaaagaacttgtatttttaaatgagtttactacttaataaagattgccaaagccagtaagccttgacaagaccaataattttcaactgtgttatgtctgaatttcctgtagaacttaaaatttcagatacctggctttacaccactgaatcaaaactttaggaatccaggaatatatgtttttttaaaagctcctcgtgattccaatactc

SEQ ID NO: 271844 - DNA, 378 bp, Homo Sapiens
  misc_feature (21)..(21): n is a, c, g, or t
  misc_feature (27)..(27): n is a, c, g, or t
  misc_feature (64)..(64): n is a, c, g, or t
  misc_feature (250)..(276): n is a, c, g, or t
ccccactaaataatgcctttncaaatncttttggttaccccatggttccacatgtacctacccntccctaaaaatgggaccactaatattgagggagacccctatttataaaaacaatccacttgtgtcctaagattgattgttaatgtcaataataatgccatatcatcctgtaaaaaggaaatttgtaagaaggaaatattaaaaaatacctgccagaacaacaggattctgaaagattctgtttggnnnnnnnnnnnnnnnnnnnnnnnnnnngttttatggggctaggttttatacctctttcccagttattttcttttgctttcttcaacacgttgtggcaggccaggtttcactaactcaggcttccataac

SEQ ID NO: 271845 - DNA, 382 bp, Homo Sapiens
  misc_feature (50)..(50): n is a, c, g, or t
  misc_feature (299)..(299): n is a, c, g, or t
  misc_feature (326)..(326): n is a, c, g, or t
  misc_feature (366)..(366): n is a, c, g, or t
tttcggcacggcttcatcaactcgtaaaatgagatcgccgcggactcgangcctatttggcgtctccggagactagcaagaccctctgaaagacaccgcgtccccagggataatcccccgtgtccggcaaagctgccccgctcgagcgcgaaccctgggacccagcgcgggaggcaggaccagcagctggccgctgggctgttgaacgccaggaccgagcggaagtttcccgcccggccgcgatcggtgccgcggtactcagggaagtggctacgcgcgtccctcgggaaagcaggcantcaaaattttaaccttgacaattgctnggattcggcagttgggattttattgagcctgggaattcanggggagaaattttggg

SEQ ID NO: 271846 - DNA, 845 bp, Homo Sapiens
  misc_feature (217)..(217): n is a, c, g, or t
  misc_feature (223)..(223): n is a, c, g, or t
caggagaacatggatgggtcttatactcccaagtattgcccacatgacagtcctatgttctaccaggtaggcagaggagtccctggacggaataaatgaaaaaacattcagctcaacttacacgcctctctcttgctatggcatatctctgatatatagtgagaagtgaagtaatagctcagatcctttttatgcattatttaagccacaaggcganagacanaatcatgtttctcagctatcagccactgcacattctttgcctcttatggcagtttccctacagtacattttaacccttggcaaacacctcccaatacagtccttttcacttctaccttggggatgctgattccttcagctcagatttcctgaggccttgtgttcttcctttctccagaaatgcagacgctgcgtgaggttttggcaacactgggcttaggagcgtcggctctgaccaatacccttgcttttgcccatggaaatgaagtaattcccaccataatcaggtacagaaccttaagtatgccctgtcaggttcaaaatggacctttctcagataattgacactttttgcgggaagaaatctaagactggttcattaagaaaataaatcataacagtcataaacacaaataattatagaccaactttatctcaagctgactttttgccactgtattaagtcctttgatgtattataatatcccacataacattctgagccacctgagaggttggtgctaaggatagcagtatttcctaaatgatgaaaatgcatctaatgcacttgtgaactgaaaaattaattgctagcaaataaaagtgaaaatttcaaacacagg

SEQ ID NO: 271847 - DNA, 360 bp, Homo Sapiens
  misc_feature (12)..(12): n is a, c, g, or t
taggggcacccnattcccccgggccaatgatttaaataccagacattttaaaatagtaaagttattaaagtgatgttttttgaatccacaagttatgcatagcctatagacaagaaaatatagttattcgaaataaaactaatgttcacactatgaaaaaacccatcatatatatctcacttcaaattaaagcattaaataggtaataagattttggagatctgaaaggacttttcagaatattttgcaacgaagcaaggtttgtacatcagtaagacaaggaaaagtgtctgctttttcaaagcaataaaaaagtgggaaggagagaataaatgatacagttcctttattccaaattcc

SEQ ID NO: 271848 - DNA, 343 bp, Homo Sapiens
  misc_feature (111)..(111): n is a, c, g, or t
agcccagcttggatttgcaaaaacagttcccaagaaattcaagattttaaatagaaggtgtacctaggacagggaaacacagccagcatcgcactatttgaaatcaagatnacaaccggctactgaattgaatgtgactttgaagaaaatcatctctgtggctttgtgaaccgctggaatcccaatgtgaactggtttgttggaggaggaagtattcggaatgtccactccattctcccacaggatcacaccttcaagagtgaactgggccactacatgtacgtggactcagtttatgtgaagcacttccaggaggtggacagctcatctccccgttgaccac

SEQ ID NO: 271849 - DNA, 629 bp, Homo Sapiens
  misc_feature (69)..(69): n is a, c, g, or t
  misc_feature (92)..(92): n is a, c, g, or t
  misc_feature (166)..(166): n is a, c, g, or t
  misc_feature (253)..(253): n is a, c, g, or t
agaagcctagtgccagcctctctcagcttgagtcccagaatcagttgttgcaggagcggctacaggctnaagagagggagaagacagttctncagtctaccaatcgaaaactggagcggaaagttaaagaactatccatccagattgaagacgagcggcagcatgntcaatgaccagaaagaccagctaagcctgagggtgaaggctttgaagcgtcaggtgggatgaagcagaagaggaaattgagcgactnggacggcctgagggaagaaggcccagcgtgaggtggaggagcagcatgaggtcaatgaacagctccaggcccggatcaagtctctggagaaggactcctggccaaagttcccctcagctgctgagtcagctctcaaaaacgaagggctgagctcagatgaggaattcgacagtgtctacgatccctcgtccattgcatcactgcttacggagagcaacctacagaccagctcctgttagctcgtggtcctcaaggactcagaaacacaggctcgaggcctatcgccagcaagtgctgctctgctctgcccaccctgggttctgcattcctatgggtgacccaattattcagacctaagacagggaggggtcagagt

SEQ ID NO: 271850 - DNA, 611 bp, Homo Sapiens
  misc_feature (151)..(151): n is a, c, g, or t
  misc_feature (481)..(481): n is a, c, g, or t
  misc_feature (490)..(490): n is a, c, g, or t
  misc_feature (548)..(548): n is a, c, g, or t
  misc_feature (553)..(553): n is a, c, g, or t
  misc_feature (578)..(578): n is a, c, g, or t
gacccgcccctacctcttcagatagttgtaggccacttttctcttgtaactttggaaaacaaaagaggagaaataagtatcataccatatgcgtgtctccaaagtggatgtggttgcctcaaggagggtggcaggcaggggtgacctgctnggccctcagatcaatggtcgtggcaggtctgagagctgtcccactggccagacttctctccagcagcaaagccagcctgggcttgcatgttgatcctgagcaagcttaacggggtgaagctgggctttctcccccctgtgactggagtgcatgttgacaccagcactttttctgcacatgtatcttcaatccaacaaggccgtttttttaatgctgagtaacaggccaccaagcggctactgcgttatatcttctcaggcaactgggccgcagtctctttctgcaccattttcttacaccagacctgcttgggcaccacaggggagcttntttttcctngccctggcacaatggacatttccaaccaccaccaggccaggacatttacaggccaacnttggntggatttgttcacaaggaggggacnttggggggcattggggattgttcaggtaggtaa

SEQ ID NO: 271851 - DNA, 289 bp, Homo Sapiens
  misc_feature (12)..(12): n is a, c, g, or t
  misc_feature (67)..(67): n is a, c, g, or t
  misc_feature (69)..(69): n is a, c, g, or t
  misc_feature (93)..(93): n is a, c, g, or t
  misc_feature (183)..(183): n is a, c, g, or t
  misc_feature (210)..(210): n is a, c, g, or t
cccaagcggccntgtggaatgccaggagacccaggctgaatttgccaaaatgctggagctggacccnanccctggcgcctgtggtgagccganagctgcgggccctggaggcaaggatccggcagaaggacgaagaggaaaaaagccggttccgggggatcttctcccattgaaaggagcacnttgccctgccttacctgccaagcccanttgttgcaactgccaagcccccctgcccgtgctgcgtcatgcttctgtgtatataaaagcctttatttcctcaaaacaa

SEQ ID NO: 271852 - DNA, 365 bp, Homo Sapiens
  misc_feature (11)..(11): n is a, c, g, or t
ctccaggatantgaaatacgtccccatgagatttgaagggttttaaaaaaggggagtttccctgccataatctctcctcttttgactgtcaccatccatgtaagaggtgactttgctcctccttgccttctgccatgattgtgaggcctctgcagcccacgtggaactgtaagtcaatgaaacctctttcctttctaaattacccagtcttgggtatgtctttatcagcattgcaaaaacagactaatacacagatctactttaggtacagatttgctttaccatgttctttttttaatatgcctagtattaccttgtgtgaaggtgcctgaatttatttaactagttgatatgaagagtttcca

SEQ ID NO: 271853 - DNA, 392 bp, Homo Sapiens
  misc_feature (12)..(12): n is a, c, g, or t
  misc_feature (84)..(84): n is a, c, g, or t
  misc_feature (89)..(89): n is a, c, g, or t
  misc_feature (98)..(98): n is a, c, g, or t
  misc_feature (101)..(101): n is a, c, g, or t
  misc_feature (116)..(116): n is a, c, g, or t
  misc_feature (348)..(348): n is a, c, g, or t
aatggtacgccnagaaaactcaaaacgcccaggagtgaagggttcgaggcgaatccgccctggtgagagcacaatgtcaacacncgccncccgatccnccnatccgccctaacccnacgcccggacgtccacaccagctcctatagggagcccgcccttgatgccaacacggggagacccgagacaccgccccttttctctacgtgacgtggtgaattcgacctcccagctgtggaagtgaagggacaagcgaagattagaaaggccccgccacgaggcgcgttcgttccttaggggatttgcaaagaatgggcaaaagtagggcatgtgcaactgcgtacttgtggnttgccgaagcccctgtgttccctgtgaagccccggagacgccct

SEQ ID NO: 271854 - DNA, 477 bp, Homo Sapiens
  misc_feature (357)..(357): n is a, c, g, or t
  misc_feature (375)..(386): n is a, c, g, or t
  misc_feature (453)..(453): n is a, c, g, or t
ggtaggcaggccgctttcagccgcttctaacaaggtggagagaggcgcttcacttccctaccgcccttaccgccgctccgtcttgtctcccaccgactcacagggaggcttgctgctcctccgcggccgttacagagagcggggcttctgcggccgctaccgtttccctggggctaggttgcttcgcagaaggctctggccctgagtccgagggggactgcggggtccaggggcgatgaatgctcccgcaacctccggagcttgtgcgcgtacttcagggaccggcaccacgtcaccgtcacctcctgagtagttgagtttcccttctgatggaaaccactggtgttgttttaattnaaccattcccccaaccannnnnnnnnnnncccccaaacttgatgggaaagggaagttaacatattgggagagcaagtttttttaaaaggcagggtngttgttcgttgttgaaatttggtt

SEQ ID NO: 271855 - DNA, 305 bp, Homo Sapiens
  misc_feature (164)..(164): n is a, c, g, or t
atatctattgttgtatcctcccacccattttccatagaggagctagagtcgactggtcctaaaatgcaaatctaggctcttcactcccctgcgtaatcccccttgcatttacaaagatcccagtccttccctctgatgtcctctctgacttggcctcctggctncttctggcttcacggcatcccactcgcccttactaggcacgcttttcataaatgcgccagcttcgctctcccttctgggtcttagggcccttctcccacctacatccacacacttcaggacataaaaaaatccttcaggcc

SEQ ID NO: 271856 - DNA, 347 bp, Homo Sapiens
gaacaaaaactacaaccttacacaaaggccactgcaaccttgcaccaaaaaacttctctcgtgagaaaatctgcctagcaactgcctgtcaaccttggactggtgtcatccttgttattgatcttggtagccaagaataattacctcaaagtaattttgtaatcctcatcatttgtccttaaaaacttgttttcctttactcctctgaatatgtacataggttgactataggcacagggcattcccattgcaatgccctattccccaaatacaggatcacttccttttaggagaggcctctctccatttggtcatttaaatggaacaggactttacctcggcaaaaa

SEQ ID NO: 271857 - DNA, 349 bp, Homo Sapiens
  misc_feature (318)..(318): n is a, c, g, or t
  misc_feature (328)..(328): n is a, c, g, or t
ggaaactggggagtttacccagcttaaggaactcaacattcagggcaactgctggacccttctgctcccagaactaggaaacttatatttaactggtcagaagaaggtatgcaaagtggagaacagcccctgggttaccccaattgctggccagttccagcttgatgtgtcctgtgtgtctgaatgtgtctgttctgagacatatgagtacctctatgggcagcacatgcagggcaaatccaggaaccaccaaaacataataatcacaaatcaggaaaagatgaggctgggaaacacctggacaggacagttaacaantaagggggtngggcttgggctggggcttctg

SEQ ID NO: 271858 - DNA, 460 bp, Homo Sapiens
  misc_feature (26)..(26): n is a, c, g, or t
  misc_feature (41)..(41): n is a, c, g, or t
  misc_feature (48)..(48): n is a, c, g, or t
  misc_feature (73)..(73): n is a, c, g, or t
  misc_feature (94)..(94): n is a, c, g, or t
  misc_feature (103)..(103): n is a, c, g, or t
  misc_feature (116)..(151): n is a, c, g, or t
  misc_feature (206)..(206): n is a, c, g, or t
ccctactgggccactgtaaccccccnttaataagtgccctnggaatgnaaaacagtgaaattaaaattgaacnaaaaatatcctccttcctcanggatttacntcctagtagaggnnnnnnnnnnnnnnnnnnnnnnnnnnnnnnnnnnnntgcagcccataaatgcccccggcggaaaagtggaaatacaacacaatgggccagnatgaaacccgtatccctgttcccctcacttcattcctcaaatggagggcaaatggagggcgtctaaggttctttatcaacagcaaagacatgaggtaggaatggaggaggtgaaacccggccagtgcccagtggacagccctatctcagacttgacttcaggaactggcgatgttggaatatgggtccctactattctcccccaatctggaatggactgaagaaaaggcccatgtcagatgatttcagaaatcc

SEQ ID NO: 271859 - DNA, 622 bp, Homo Sapiens
  misc_feature (254)..(254): n is a, c, g, or t
  misc_feature (443)..(443): n is a, c, g, or t
  misc_feature (495)..(495): n is a, c, g, or t
  misc_feature (594)..(594): n is a, c, g, or t
gacccatctaaaattgcctcaacccccaactttctgtctgtcataagagtcaacttcattttactcatatcacttatctccatctgatatttatttatttatgtagtctctctgtcttcccatcccctcagcttatattctgagctcaatgtgaggtcttttcttcattactaggtccatagaggaaactcagatcactatttgatggggtgaatgaatgcttcaataaatgaatgcatgcatgcatgatgganaatttctgtgagggctgggcttctttattcccatttcacaaatggagaaactgaggcccagagaggctaagtggctttcccaggattgctgcatagaatagacacaaatctggaattcagggttcttgccacctacccctggaattcccctctgcctttcccttgtgatctccttcctctcggggtcancccacctgcctccagggactgagcacaaagctcctcttgagctttgcctgtntgaggagtcttggggctctgtgtggttattttgttttctgtgtgttgttttgggttctaaaaagttgagcgccatggcaggtggggtaagccagggcangctgtcccaaacttgtatgtccccctgg

SEQ ID NO: 271860 - DNA, 332 bp, Homo Sapiens
gccttctccatactggtaaggtggacacctgggtcttggtgatgtaggtgttgacactcaggagataaagagcctggtggaagttcgccaggggtcttttctgtcccccacgtagtccctcatgagctccttggtgggcacagctatgccttagactgcttctgggtgttcccaccccatcacctctccccactcaggcagaacccgttaggctaggatgcccagtaagtttgagataaaatgggagttggcttgcaggtagggagttacagggaagagggcacgagcaccagggcttccctgttgccaaaatacacacagggagggaaggg

SEQ ID NO: 271861 - DNA, 466 bp, Homo Sapiens
  misc_feature (17)..(17): n is a, c, g, or t
atcgcccccaacctccnacctgtgaagatccgtaaaatcctcggaaatggcaaggggaaagcccttgcaacctagggtggcaagaagaaagcatccctcccaacatccctgtgtcaagaaacccctggtctcccgtggcacttgtaaactcacccgtgctgtccttctggtcctgtgtgtgttccttcaagccagctctaggcttcaggccgagcccaggttcacactcagaaagaggtctccccccatcccattcggggctgacgatgggggggctgatggcctcccctgcgtggcctgagtcctggtccctctgaggcagttgacggggcagtcagatttttaaagttttgtacaaagttttcctttgtaatcactcccatttttacttaacaaccaacttgttgtggctcttatttctgaattcaaagcttgtgaaaaaataataaagaaaatgaactgccca

SEQ ID NO: 271862 - DNA, 439 bp, Homo Sapiens
acatttgaggggccactgcagccccaccgccacgccccaggggaccagccaggcctggaatgccccctgggcaggaccctgggcaggaccagaggcccacatggatgccactccccacacagcccccaggcctgcccagcccacctcctcatggcatcctccctgtacccaggtcaggctgtccacaccacatgggagcccagaggaggaggggcccgccttagccatgtgaaggtggattggtcgccatctgcacgccaggcggcatccttttctatgaagtgttgactttgtaaatctgcccacacccagctggccatatccacccctcgacgccgggatgaagacgtctgcctgtgtcacagtggaggggtcctttagggccaggctcacccctcaccctttttttggttgcttttctaataaagatggaacagtt

SEQ ID NO: 271863 - DNA, 463 bp, Homo Sapiens
  misc_feature (424)..(424): n is a, c, g, or t
  misc_feature (441)..(441): n is a, c, g, or t
tagggtcggcgtgggcaagtcatttctcttcctcaccaagccttcttccatttgaaaaggaagagatgatactacccaacttgcctgcaaatggattagccagggcaaactttgcaaatcaaatgcctttgcattcattaacgcctcccaggcagaacgtaccctccctagggcaatgaaatgttcccaaggtttatggagctcagaaactctcaagggagaagggcgggagtcctcaagaatttgtttcttgtttggtctcagaggagggcaactaagccccaagtgtggggagagctgctgttacaggccacaagggaaggatggctccagagaaaacacaagtggacagctgctgctgaacatgttttgaggaccttgggacaagtttcattgcctctgtgggggaaggggaacaaagttntttggtttttcccctgnggattcaaagaaattttgagtc

SEQ ID NO: 271864 - DNA, 449 bp, Homo Sapiens
ttgtagaaacgaggtctcaccctgttgcccaggctcggacctgaactcctagcctcaagcaaccctcccacctcagcctcccaaagtgcacagattacatgcatgagccaccatgcttggtccatatttctctactaaaagaacccagatgctctgaggacatgattgattctgtcttcagcagaaaaaatatatctaaggtgggtctagagcattcttttgtggccaaaaggaagggtggttttatagcaggaaaatataatgttggaggtacaggggagaagcttaaaagttatccacagaagaagttgtaaaaagccaagcatgaaaaagaatagtaatttttaataatgggaataatgttaagttcaaaattatactcaaaagagagcagttaatatacagtgcataaattaatgttatagaaaatactgctatatatgatggaa

SEQ ID NO: 271865 - DNA, 398 bp, Homo Sapiens
  misc_feature (317)..(317): n is a, c, g, or t
  misc_feature (381)..(381): n is a, c, g, or t
gattatgaactagcggcaggctttgacaacattgccgagaaagcttgctgtggggttccctgcaagtgctctgggcagaggggagaccgcgggcccatcggcagcatcgggccaaagggtattcctggagaagacggctaccgaggctatcctggtgatgagggtggacccgtgagcgtggtccgcctggtgtgaacggcactcaaggtttccagggctgcccgggccagagaggagtaaagggctctcggggattcccagggagagaagggcgaagtaggagaaattggacttggatggtctggatggtgaagatnggagacaaaggatttgcctggttctttctttggagagaaagggattcctgggaagaaaggggtnataaaggacctccaagg

SEQ ID NO: 271866 - DNA, 418 bp, Homo Sapiens
ggtaaaaattaattggtgccatccaaaaaaataaataaacaagggtgcccttttaaaaatacccattaaatcccacagtatcctgaacaaaattgttccccctatctgccttattgcccaatttaagaacttccccggattcaacccacaaggcaaatccccctacatttttattatttttctgtgtgaagtaccccagatttcatatgcctcagccctgaggatgactcccctcatgggttaaatagaggggttttctgctgggcctgcaaaacagtcttgagaatgaaaatacccttgattactgtcaaatgacctagtctttcagagtaaaaatttaaatcccaacagtgatttaaagtctatattcagctgttaatccctttatagactcaaagagcagacacgcacaataaac

SEQ ID NO: 271867 - DNA, 420 bp, Homo Sapiens
  misc_feature (382)..(382): n is a, c, g, or t
cctgatgtgacaagtatctggaaacatggctttctaaagtcagttggcttctcttgcttaatgttcttccctgggacttggtctgcctggctctccctccagtccctgtgcgagggtcagcagtgagcattctgactttgccttctctcagtgatgctttctcctccctccagtccctgtgcgagggtcagcagtgagcattctgactttgccttctctcagtgatcctttctcctaagagcacagccttgccctctccctcctgggtgcttcatccatgagagttcacctaggctgtttttcctgaggaaaggacttcctcaggctggcctgtgtggacttcacctggggaagacaggggagaatgtggcccacaggtgantgcgaagggtccctgttaagtcccctgtgtaatgtgtt

SEQ ID NO: 271868 - DNA, 386 bp, Homo Sapiens
  misc_feature (16)..(16): n is a, c, g, or t
ccatccacctgggtancctagataaaccctttgggaccaatggaagtatataaaacctttccctgttttaagagtcccaaggcaaagtaagttccccagctattgcccctgttatgtagcccaacagccataatatgaaggtttactcatttccaatatatcctgggattgacatgccatattcccataaatattttttaatgaccctcatcaaaaaatgtgaagacccatgtgtttttcaagatcacaataaataaaaagttggtgcagctaatgcctttggtgttaaattacaatatggtaatgtatgtagcattcacagagatatagtcacttcttgctgcaaagacatgatacaaatgcattttgggagaggagcaattcac

SEQ ID NO: 271869 - DNA, 140 bp, Homo Sapiens
taagttttattattataattacaaattaattacagagaaactgaagccattcttcatacatgacaaacatacatttcctctgtgtgtacagcacacaagtaatatacacaaatatattccatgtctgaacaaatcctttt

SEQ ID NO: 271870 - DNA, 489 bp, Homo Sapiens
  misc_feature (36)..(36): n is a, c, g, or t
  misc_feature (215)..(215): n is a, c, g, or t
  misc_feature (422)..(422): n is a, c, g, or t
  misc_feature (427)..(427): n is a, c, g, or t
  misc_feature (430)..(430): n is a, c, g, or t
  misc_feature (437)..(437): n is a, c, g, or t
  misc_feature (453)..(453): n is a, c, g, or t
  misc_feature (459)..(459): n is a, c, g, or t
  misc_feature (471)..(471): n is a, c, g, or t
actggcactgtcagatagtaagccatttcttgggtnagaggaggaaactcctctccacaaatccacttgggcctgtgcaaaatggcacttgaaagagtccccatgcaacttggagtccatgagccaatgggatatgcaaagacgcttaaacatttcagggctggtttctctgttcatatccaattctggtgcttaggaacagggacccatgctgnatcccaaggcaaaaagccccacttcctttaaggaagtgaacaggcctgaccctgatgcccaataacgggcaaccctaggctttttgtttttcttgcttttattcctttttgttgttggccttgtgctgcgtttgtttacaaaagatgtattttgtttaaccaaatattaaaaatggaaaactccaatatatgtccccttgtctgccntgaantcntaataanttgtgtaaagaaaaantaaacntttagtatgacngttgttttaaaaggaaaa

SEQ ID NO: 271871 - DNA, 432 bp, Homo Sapiens
  misc_feature (408)..(408): n is a, c, g, or t
  misc_feature (417)..(417): n is a, c, g, or t
ctgcatgtgggtggagcactgttccagcctcagaagatggttctgaggccacttagcaagacattttccagcatgagcaggtttctctgtggaaatagtgacacctgttctggtgtgttgtctttcctcagggaacttaaggggtacaaagctcctgaaaatgttctttatgctggttgaagctcttatgtcgctgtactgattccctacggatgcagatttgaatcacagagtaattaaaatatgggatcaaataaggctgggggcttcaccaaggctggaaagctgttagccatttcaagggcatcattttctgtccatggaaaatatagggacctttttccaaaacatggcctttcagggaagggtgttcttctttttcaaacaaaagttcttaatggactggcntaactcttncttggaccacatctt

SEQ ID NO: 271872 - DNA, 434 bp, Homo Sapiens
  misc_feature (66)..(66): n is a, c, g, or t
  misc_feature (82)..(82): n is a, c, g, or t
ctgagggccagttcccctaggcctaacgagaaacaaactggttccctcccccctgtcaaccctccngcacccccactgcccnagtagacccccaaagatgccaaggaaataaaagcctacaaggaaatggggaagagaagaggagaagtggggtgaggctgttttccccagacgtttgtcaggaggagcctacagaggcacacacagcagggcaaagaccagactatctcccacctgttgttttgcattgtttctgggaaggaaacaaaagcgggtttgctcagcgatttctgatctttagacattaaggcgatgaagaggaaccatttaaattttttcctaatggggcttcagaatgctcctgtcagatttacattaaactatctcaaaatgcatttttagaaaacaaaaattattttcttctacttatgata

SEQ ID NO: 271873 - DNA, 460 bp, Homo Sapiens
  misc_feature (24)..(24): n is a, c, g, or t
  misc_feature (44)..(44): n is a, c, g, or t
  misc_feature (65)..(65): n is a, c, g, or t
  misc_feature (398)..(398): n is a, c, g, or t
  misc_feature (425)..(425): n is a, c, g, or t
  misc_feature (432)..(432): n is a, c, g, or t
gttcaagctcagcagcgtccgttngcagcgagcagcgttgcggngacatccagaagcaggtgcgngaatggaaggagcagggtagcaagaccttcatgtgcacggggcgccctggctggctcactgtctcactacgtgtcgggaagtacaagaagacacacaaaaacatcatgatcaacctgatggacattctggaagtggacaccaagaaacagattgtccgtgtggagcccttgggtgaccatgggccagggtgactgccctgcttgacctccattgggctggactctccccgtgttgcctgagcttgatgacctcacagtggggggcttgatccatggggcacagggcattcgagttcatcattcccacaagttacgggcctgtttcccaacacntctggcattgctttacgagctgggtcnggggttnatgggcagtttttttgcgattgatttcc

SEQ ID NO: 271874 - DNA, 402 bp, Homo Sapiens
  misc_feature (33)..(33): n is a, c, g, or t
  misc_feature (41)..(41): n is a, c, g, or t
  misc_feature (65)..(65): n is a, c, g, or t
ggcccctcccatcaaagatctgcccttaatacnaacagttncagggagcattttctgcccccaanccccaacatacacacacccctacacacaatgcacgcatacacatacacatactccacgcatcctttgcaaaacaccagaggcctgcatctgattcagggctgtgtctcaggcctcaagtcctgaataacagtctctctgatgctgaatggatagacatggaccatgtcatcttggggtttacagtaggcctggcacataccaggtgcctgataaatgtcagaagagccaaattcttgctgccttgcgcctgctgcatgaaaagtcataaggaacggcataaagagtacgtccttggggatgagacagccaagcttggatttgggttcgtggtacttc

SEQ ID NO: 271875 - DNA, 433 bp, Homo Sapiens
  misc_feature (52)..(52): n is a, c, g, or t
  misc_feature (78)..(78): n is a, c, g, or t
  misc_feature (227)..(227): n is a, c, g, or t
cccaaaaaaggttggggaaaactccccctaataggaacccccacttctgaancactgaataattaaagggttaatccncacactgtaagggactaatagttcctgaaggcccaaggaaccatatttaccttgcctcactgcagtatcccctaggatctagcatactgccctggcacatagttggcattttttgtttcacattccttgcctaatcttgagttccttgnaggcagaaactgcccagctcctgatatggcatatggtgccctgccatatttttgtctggtccttccagtatatacaatgcaaagagcatgaaaggtggcttgaactctaggtgctggagggtgtaattcttgtgaattagtaaaaatcatgagaagagctttagacttttacgtgactagaattgtcacaggtttcaaacaccatt

SEQ ID NO: 271876 - DNA, 392 bp, Homo Sapiens
  misc_feature (31)..(31): n is a, c, g, or t
aagcctccttaatcaaagaggttcccgtgtncaccccggggaaaactgaagttcccatcgaacatttgggccccaaagcataaatcccctcaagcgttcaaaagtccttttcctctttgtaatttctttagttcacttcgaaagcctgttaatttcactatcttttgcctttggcttctgcccaaaagttcccgaacttgggactcaagcgcagccttttctccaccttcattctcttgcttgggctttgtggaaggggtcctcaggtgtttcgtaggagtgggagtgttggaagaagttggactggacactgatttcctggggttggagggaccacgtggcacagacctctctcttgagacagttactgaaaaattccgtggggctggaat

SEQ ID NO: 271877 - DNA, 478 bp, Homo Sapiens
  misc_feature (29)..(29): n is a, c, g, or t
  misc_feature (34)..(34): n is a, c, g, or t
  misc_feature (58)..(58): n is a, c, g, or t
  misc_feature (91)..(91): n is a, c, g, or t
  misc_feature (96)..(96): n is a, c, g, or t
  misc_feature (107)..(107): n is a, c, g, or t
  misc_feature (217)..(217): n is a, c, g, or t
acggggaaccacaaacccccactttggtnaaacncccgggcctttggagaataagagncccaccttaacaaggcccaaacctaagtgtcgnccccnccccctccgtncccccgggttaaagtttggctttccccagtgaaacactcctgcaacccattgaagaatgcaggcctacctgccaggtatttgccttctaaagaagccccaagaagtaccnaagtgggaagaagccaagtattaatatatatgtatggtcctgatttccttgtgtgaaaattttttacatttgtaaaaatgtataatttattcagagaaaatctctagattgatacattaaaagctgttaagttatttctgagcactgggattaagggccttgggagagtaagaagatttttattttttacttcactcttctgcactgcttgaatttttaatgaaccggattcttttcgtaataaataatttttaaaactac

SEQ ID NO: 271878 - DNA, 472 bp, Homo Sapiens
  misc_feature (21)..(21): n is a, c, g, or t
  misc_feature (29)..(29): n is a, c, g, or t
  misc_feature (47)..(47): n is a, c, g, or t
  misc_feature (119)..(119): n is a, c, g, or t
  misc_feature (132)..(132): n is a, c, g, or t
aatcaacaacttttccttagnatctttcnagaagaactaggtccacnggacaaactgcctactttgcaaactggaagagaacagacgggtggaaacagaagtccacagccttaacaagnaagcagaagcccnaagagcaagaagatcaaagatggagccaaatacaggtaggaagacttaactgaaaaactgctggaggctcaagtgtagactagcttcagtgttcaaaactccaagggttcagggcaggggggaaccctcacacttacacttttgttgagttttacctcccaggaattccaccagattctcactgtgaagactggagaaaaatacctttatgtttccagcagaagcatgagaaggtaaccattctgaaatatgcccagagctctctgttctccctaacagcctgccttcaaagaaaacttctactacagcttaactgacttgggtttaacaaaagcctaac

SEQ ID NO: 271879 - DNA, 312 bp, Homo Sapiens
ccatagtagaatctgctcccatgcaggtggtccagaaggagcctgttcagatggagctgtctcctcccatggaggtggtccagaaggagcctgttcagatagagctgtctcctcccatggaggtggtccagaaggaacctgttaagatagagctgtctcctcccatagaggtggtccagaaggagcctgttcagatgtagttgtctcctcccatgggggttggttcagaaggagcctgctcagagggagccacctcctcccagagagcctccccttcacatgggagccaatttccaaaaagcctcctctccg

SEQ ID NO: 271880 - DNA, 164 bp, Homo Sapiens
caagaaagacagaccttaaccccttttctcactcaagtctcctctttttgggaagtccttcctgatgacctcaatttggagcgaggtagaattgctattatttattattatacatttaatagtaaacatatattacatagttaataattatgtgccgtgccgaa

SEQ ID NO: 271881 - DNA, 365 bp, Homo Sapiens
  misc_feature (50)..(50): n is a, c, g, or t
  misc_feature (70)..(70): n is a, c, g, or t
  misc_feature (205)..(267): n is a, c, g, or t
  misc_feature (317)..(317): n is a, c, g, or t
  misc_feature (354)..(354): n is a, c, g, or t
agaaaaaatattaaatgatcgtaaagaaactgtgcctgtagggcccagangagatggatgtaaagaatcnaaaattctccccagctaaagggaaatataactacaatcccataaagtcctaaaacttgaatttaactgctggtctcaaatatttccttcctaactcaaagtttaagaaagtcaacagcaaaatgattattgttgnnnnnnnnnnnnnnnnnnnnnnnnnnnnnnnnnnnnnnnnnnnnnnnnnnnnnnnnnnnnnnntcactttgagggtaagggagctttaaaaccagttctgggcccaacatggnccaaattcctgttctcttacttcaaattgccggggcngggtggggcac

SEQ ID NO: 271882 - DNA, 396 bp, Homo Sapiens
tttcggcacagcctggcttccaagaccccaccataggcagaggcaggccttcctacaccctactccctgtgcctccagcctcgactagtccctagcactcgacgactgagtctctgaggtcacttcaccgtggtctccgcctcacccttggcgctggaccagtgagaggagagggctggggcgctccgtggagccactcctgcgcccccctgggccttgtctacctcttgccccccgagggtttagtgtcgagctcaccccagcatcctatcacctcctgggtggccttgcggcccccacaaccccgaggtataaaagccagagtacaaggagggcagggggacaaaccaaggatgggagatgttttccagggggtttgttgttgtttgtttgttt

SEQ ID NO: 271883 - DNA, 293 bp, Homo Sapiens
ggcctcctcctggctcccaggaccccaccataggaagaggaaggccttcctaaaccctactccctgtgcctccagcctcgactagtccctagcactcgacgactgagtctctgaggtcacttcaccgtggtctccgcctcacccttggcgctggaccagtgagaggagagggctggggcgctccgctgagccactcctgcgcccccctgggccttgtctacctcttgccccccgaggggttagtgtcgagctcaccccgatcctcccacaataaaggcttctcaatccgcaaa

SEQ ID NO: 271884 - DNA, 227 bp, Homo Sapiens
tatgagataagtccctaccaagtaggaccaggttcaaatgtttttgaattaatgaacaatctatataggtaaatatcatcccatttacagatatggaaactgaggttcatgggattaaataatgtgtttcaaagtggaagtagttatttttaatttcaaaatcagtttttaagtattcatgggtaacagtaggcttcctttcccccactgtattgttagaatgaaac

SEQ ID NO: 271885 - DNA, 395 bp, Homo Sapiens
gaaataataccacagtgataaaaatgggaaaggagctgtcgctcagctcttcttggccgtgttgtttgcttttcgatgtctaatttatgaaagcatttcaaagtgacatatatactgaacagcttcgtcttgccaaatgtaaaataaactggagatgagtttagcactgagctttgtagattgttgtcctcttggtagagtcggggcctaaacaccacctgggcctctgtgccagtgggacaggtgacctgcctgtcctactgctggtctctgcagctctctgtcttggggcaaccctgggctctgagttccagagtgttctccagtagggaggagtctgcagggggcactgtgggagcacctggggtatgttgcacatctgtttgtttggctgg

SEQ ID NO: 271886 - DNA, 439 bp, Homo Sapiens
  misc_feature (404)..(404): n is a, c, g, or t
  misc_feature (415)..(415): n is a, c, g, or t
gctcacggaaggtgttccctgcacataagggcactacaatgtgaaactttttcctggaaatcaagaacaagattgtatgtgatgaccaatattatttttctcctatcggaagaaggaaagttatctgctgctcataatttcttctatgcctagaagattctgtgagaatttaaactattaaatgaatagcccagtaaaatggctgaatataagactaatatacaaaactgaagagtctttctatattaggagctattaatccaattaggaaaaatacttaatgggggaaaatccccatttcacaattgttaaccaaaggataaaataattaactttggttcccatacccctttttaaaaaattttatttccccgttattttgggaaaaattagggtttgggggntttgggggccngtgggattttaagtgtttccggcc

SEQ ID NO: 271887 - DNA, 460 bp, Homo Sapiens
  misc_feature (92)..(92): n is a, c, g, or t
  misc_feature (385)..(385): n is a, c, g, or t
  misc_feature (393)..(393): n is a, c, g, or t
  misc_feature (407)..(407): n is a, c, g, or t
  misc_feature (443)..(443): n is a, c, g, or t
gggttgctgctcagtctgtaacggcaggtgggagacggacactgggtggaggatggagtgcggtaatcagcggttgtaggccgcttaggttntaatccagcgttgttttgtgtaaagaacttaaaatggtattgtcttaagcgccgtgtcagccctgacagtcttcctggtgtttctaggaaggatgccgttatgggaaataagagggtttcattttttctcatacggttgtagggtaaaggtagtttattcagcaggctccatccatccatgaattcagctggaccttttttatttcttttctctaattaaggggttgggcatgtagtaggccttcatggctttatttgacttgaattgaatttatgggaaggggctcagtttnccgttccnccattgttgttatngcccttttcccgttttccctggcaaattgttttttnaaaatggaggattaatc

SEQ ID NO: 271888 - DNA, 390 bp, Homo Sapiens
  misc_feature (260)..(260): n is a, c, g, or t
  misc_feature (267)..(267): n is a, c, g, or t
  misc_feature (301)..(301): n is a, c, g, or t
  misc_feature (328)..(328): n is a, c, g, or t
aaaaatacttactcattaataggagatataaattaaagagatgcttaggaataggagaattccaactaaaaatttttaagccacacaaaaatctttcctttaaaaaagtgttcatcactcattcatgatttgacctttgaaagttgctatttgtttcatatacactaatgatttaacagttctctagggtcttaaattagtaaaccattaccagacttgcaagtgtaatgggtcagaattcctactcctgttttattggntaagganaccaaaactatattaaatttaaatatatcatagntcataggttttttagtgctgacacccnttgtgggctaaacctagtactctggagggctcctatatttgaaagccctggaggtactccgg

SEQ ID NO: 271889 - DNA, 641 bp, Homo Sapiens
accaagtgtctgggcaaaagcaagggccggaaatatcccgagatggacttggattcccgagccttcctgaaggactattaccgggaccacaacatcgagctctccaagctgctgtataagatgggccagacacttcccacttggctacgagaggacctccagaacaccaggtagccgtggccaccacagccagactgaacgtttgtgaaagctgggacatcccaccacacgctgagccagacctgcagagtggggaagctgggaccaggggcagctgcgcacttatgagcaatactctgtggaggtctggtggggctgggggagcacccaggcggatctgcaagcacctcggagcacccaccgctgggtctgcggcctaagggacctccctcgccagcagaggtccattccgttcccaagctgctcctggggaggcacgcttcctggtaaggaagggaagtccacgaagactcttttctgtccctcactgtgttcccgccgacttgtcccctctccgtcacccatcactcccttgcttcccgcagggcgcccctcaagtattccgctgccataatgtccctggtcctccaaggctgtaaggggaaggaagaagcctttggcccggggggaagaacaagact

SEQ ID NO: 271890 - DNA, 506 bp, Homo Sapiens
  misc_feature (386)..(386): n is a, c, g, or t
gcaagtgggagaaaactaatcaatggcacacagggcagggtgtggctctatgagcaaaggataatgtcacctcaggaccaaggtggaaacttacagctgaatccagggcttactaagtagggaagtcagtttacatatttcagttttcctctgatgtttttgaggtactgtgtatttgcagaagtttaagcagaagggttttgtttctattgtaagttaggttctaaaagtgtataatctgatactctagcccaactgaaatattatatcttgggcgttacagcctttgtctttttctttagtcaccttaatacccagtcctatggctgtatctctgatagcctatataaatggacatattaggaatattattttccatatgatcntgttgtatggtgtatatgctatgtgttcatttcgtgtgcaagttcagagtgtaatagatttacccagagaaggtgtttctatacaatgcccctatctatttgaaattacatgcttgccca

SEQ ID NO: 271891 - DNA, 551 bp, Homo Sapiens
ggcacgaggagccatccatccatgccataccacttgtcagggcacaggggactggctgggccccaggctgtctccccacttgcagcacaatgccttctccacctgccctcccactcttccagtccaatccacgctgtcttctgttgcaggactaacctttgagaaatccttttgtgaagtcattgcctgctcaagaatgtacagtggctccccaatgccttgggaggccataaggcaggccagttctagctctctattacctgtccccactcaactgactcatacctttttcgggtggcatcactatgtgccccacagagaacgatgatcgtcacctctgtgcctgagttctccctgttgtctcaaagcggtacccatcctcccccagaagctgtccccagcgagcctcccttctttgtttgaattctctaataagagcaacagcagctcccatttctagaacacatttacagtattacctattttctaggatataaagtgccatatatatttttaattccaatattaataaatgtatgccaaacactacc

SEQ ID NO: 271892 - DNA, 965 bp, Homo Sapiens
aaagaaattaatttaaagatgattagtcctgactcaaaaagttggagaaacctttgaaaagtgagtaaatattattacaaatttgtgggtgatttttcttatctttccatttggtaattctaggtgatctggtttagtcagcatgactatgtgtcttctctcctcaggccttcctaaagccaaagaaaacaaaaatggcattgaatgctatgctccagaattaagcaaattcactttctgcatccacccttcaataaagggcccaaaactactcatgtatgcaattgtagcaggtgtttttcaggacaaaaataccctaatatttcaaaagtgttcaaaaatggggaaccagtgctagggcaaactccagagagatccccagtacttttctgtggctgaagaaagtctgttcacagaaggctccatctggctgtgggtagacaggtgcaagaagacacacatgcatacacacacgagcacggcttgcctaagttctgtatatctcacctggcttgggttcctctaccattgtaatttccgttaatgatcagaggcccccttcaaacatactctgagaatttacatgagggaggccaacaaacccatcaggctcagctctttagtttcaagtgttttttccatttcacacatgtttgagacttcactgaatttgccatcaaaggacattggcaagaaatttgctaaaagaaccatcctgttaccatcggaaggtgcattaagacttggattattaaactggaaaacatcaagtcaatttctttggtgtctttttgcattagatatatttcttacttagtagacttaatttttccaaaagaatcataaactctagatgtaagatgtgggttctcactaaagaatttcacagaataattaggaaaagaatgaaatagaaattggcgacaggttacaaatgaacacattcaaaaccttaagccacataa

SEQ ID NO: 271893 - DNA, 508 bp, Homo Sapiens
  misc_feature (37)..(37): n is a, c, g, or t
  misc_feature (66)..(66): n is a, c, g, or t
  misc_feature (394)..(419): n is a, c, g, or t
ttgggaacacccccccgggccgctggttactgaaggnacccaacaagcaacccgagggaaggcaanaacaggcctcaagagcaacgccttcccatttaatagggaaacagaaacgcaggccctcccgagtgtcccacggagcaatgtgcaaatccgcagtgatgaagtagagtaaaacctctacttcgagcacagtatctctggcaaacacaggggactgcagtcgacaatgctgcggagtacacccgagtacacagtcagacatttgttcggtaaacagtaaatgcgtaagatcaatgaccttgagaggcctgtctgtgctccagacgtgtggttcacgtggagagaatggctgccactcaaagtatcttcacaggaaaacagggcttgaggnnnnnnnnnnnnnnnnnnnnnnnnnnggctcacccaaaaagtcactgtgtacggacttaactttgttcaacatggattttggttttgtggaatctaaatgcagacactcgtttac

SEQ ID NO: 271894 - DNA, 444 bp, Homo Sapiens
  misc_feature (36)..(36): n is a, c, g, or t
agcctcccaaagtgctgggattacaggcatgagcanccgtgcccggctgcatggctcacttttatcactttcctaggttcctaacccaactggggcataacccacaaataacatcccacaaataacatctgacagacagatggggatcagaacatgggctttattcgaggcatggtcacacacaaccccagaggcttctggtaaatgtgctggagaatacagcttaagcctgacgtcagcagggcttcctatgttcttcttccagacctgaaggtggccaggttcacagagcaaacctgaacttgatttacctgtccaggcaaaggctggactagaagaagtatagaccagattaggcctgccaggggaacacctccctaatctccttattgcctgaagacagcaggcaaaaagtagaggatagctggcacctttctgcaggcc

SEQ ID NO: 271895 - DNA, 459 bp, Homo Sapiens
aattgtgaagccaaaccactagggaaagcaggggtccaacttgagccccagttggaggcccccctaaacgaggagatgccactgctgcccccacctgaggagtcacccctgtccccaccacctgaggaatcacccacgtccccaccacctgaggcatcacgcctgtcacccaccacctgaggaattgcccacatccccacttcctgaggcattgcacctgtcccggccgctggaggaatcgcccctctctccgccgcctgaggagtctcctctgtctcccccacctgaatcatcacctttttcttccactggagggagtcgcccttgtctccaccggaagagtcacccccatctcctgcacttgagacgcctctatccccaccacctgaagcatcgcccctgtccccaccatttgaagaatctcctttgtccccgccacctgaggaattgcccacttcc

SEQ ID NO: 271896 - DNA, 437 bp, Homo Sapiens
  misc_feature (37)..(37): n is a, c, g, or t
  misc_feature (54)..(54): n is a, c, g, or t
  misc_feature (329)..(329): n is a, c, g, or t
  misc_feature (349)..(349): n is a, c, g, or t
  misc_feature (354)..(354): n is a, c, g, or t
  misc_feature (384)..(384): n is a, c, g, or t
  misc_feature (413)..(413): n is a, c, g, or t
cccttaaaggccttttaaaaataacaattggcccccnggaaaaacctcccttcnacttccttcccctttttaacaacctcaactgtactttcctctctcctcacccctaagctctgagggggtgggtggggggtttgaattgcctcacacaggatggagggttgagtcagcacacgctttcttttccatccctatgttttctgcagcctgttattctgctgaggatggcataacctgcccaactcaaaataagtatcacctgggggcttcaggggaagcttggggcccagaggagggatacccaagtgtcttcttgaggtagtaggggnaatacattttaaaagctccnggggnaccaaaaggaattcagggacatacccagtncccgatagctctgtggtacttaatagggnaggggcaagttttggccccacttt

SEQ ID NO: 271897 - DNA, 422 bp, Homo Sapiens
  misc_feature (286)..(286): n is a, c, g, or t
  misc_feature (341)..(341): n is a, c, g, or t
  misc_feature (361)..(361): n is a, c, g, or t
  misc_feature (396)..(396): n is a, c, g, or t
ctgtcactctgatgcctctctctactcaaatggcagaaaccaaccaggtacatcccagccttcttgcacatagaaacactacacagcacttcagctgtatgtttgggggccattttaaacagcaaaatcatcaacaggaagcagaaaattgtaaaaattgtggcactaaatagaccatgtaaaggacacatgtttgcaataagaaagctgaaacaagaagggggagtgtcaccttatttgatccagctagaaactcaggtgctggtattccagcaacacttcaggncggctgctccagggaggctgtcagaggggtcctttttagccgttcaacaaaactnggctatggtcacgtccattngggaaacttcattggcttgcctttcaaggttgatnggcccacagtgggcaggaaccttggg

SEQ ID NO: 271898 - DNA, 488 bp, Homo Sapiens
  misc_feature (397)..(397): n is a, c, g, or t
  misc_feature (447)..(447): n is a, c, g, or t
  misc_feature (459)..(459): n is a, c, g, or t
  misc_feature (472)..(472): n is a, c, g, or t
gttaaactaaagaaaccatatacaaatttcaagtcaggtgcttttactcattttataccttgattcttgaatggccagattttctgaaaatacccagttaatgattagattatgctacttcagtcaccacgtgtttgaaggctgatcacagaaaactagaagcaatgtaactagtttcaaaatataattgaaatggaggaggaagtgtttggcttttttccctccagaccacaaattggtaggtaaagtaaaagttagatttgaaaattgggcccggggtgtgggtgggcttacacctctgcaggcacgttggggagggccaaggtggagtgggatctgttggagtccccaggagttttaaggacccagcctgggggccaacatggggccaaattgnccttttttttacttaaaaatttaccaaaattgttggcttggattttggtngggccgctgccncgtttaggttccntaggcttaccccgggg

SEQ ID NO: 271899 - DNA, 364 bp, Homo Sapiens
ttcctttccatcaagccttccatgagcctagagtaagtatgaaattccaacctggagtgaaccctgttttcctaagtgttccacaaagcttggtttctgtacctgttaaagttgaagagccagatgctcccactgtggtaaaagtgcccagggtaatgagttgaggcctgcaaaccaggtttattttgacgtatttaaagtttgagacccactcgatgctttttctaggtaaatagtcatactaattctgcttcttctgactgaagtatcaggaatcccagccaactacagtttaaagatggaaagattggtgctaaatactcatggatgtaaacctggaaccaggggcataagtacaaataaa

SEQ ID NO: 271900 - DNA, 484 bp, Homo Sapiens
  misc_feature (17)..(17): n is a, c, g, or t
  misc_feature (26)..(26): n is a, c, g, or t
  misc_feature (39)..(39): n is a, c, g, or t
  misc_feature (48)..(48): n is a, c, g, or t
  misc_feature (53)..(53): n is a, c, g, or t
  misc_feature (62)..(76): n is a, c, g, or t
  misc_feature (84)..(84): n is a, c, g, or t
  misc_feature (144)..(144): n is a, c, g, or t
cctcaagtaaggagaantaaacgaanacgggaacctcanggctccaanccccnacctccttnnnnnnnnnnnnnnnattatttncataaagattttccttgcccccctattatgcccttagtaaaatcctagatccaagaagangatccctgccccaatttccagagttagagaagcccccaggactagctgccgtaatttgtggggctcattgaaaaatggaaatgtcgaattccttcttaaaaaataaaggatttcaagagggtaactgcaaagcattaaatttagcatgcggtccttctgagcatgtgaccctttgcaactgaacagatcacacacatccaagaagctggccctgtagaaaacaaagaaatgttttcccccaccttccaacattctcttttgctcttaacggaatggaaatcttagaaatgttgatgggacaatgacatgaatcatgaaagaaaggaatagtgggaatacg

SEQ ID NO: 271901 - DNA, 556 bp, Homo Sapiens
  misc_feature (295)..(310): n is a, c, g, or t
  misc_feature (323)..(323): n is a, c, g, or t
aaattctcaagatcacatcatgtctgtctgcaaggctgtctgatcttggagagatggtttcatccctgggaaattaaacactatgtgctgagcccctggtaaagacaaataggacctcgtggggctgaatttggtctcgtggtctaagattgcctcacttggtcacagtaatggtaaatacaggtagccacgattccagctgtattgtgcgttcttgggagggttggttccatgggttgttatattgataggtacactggcctcctgcgtttgtggctttctagctctatcagtnnnnnnnnnnnnnnnntgagcatgacctnctaatggatgttcatttacaaatagtctatttgttttgtgtgttgtaaatcacttcaaaaggattgggttagaaagatgatgttgatgttcttaatgctccagtgacccgacttctgtactcccagaaaggggacgtccccttcctcatggaccctgcgctagatgcttgtgaagatctgcagggagacacgatgcggctggagttgacagacctagggaacaaattttccca

SEQ ID NO: 271902 - DNA, 465 bp, Homo Sapiens
  misc_feature (422)..(422): n is a, c, g, or t
atggcaggattttgtggttggaaatatggaaacttctgccgatttggaggtgtaggaggttgactattggatgtctttaggaagcatagcctttactttggctgttttggtaacccctgacccttctatcgcaatgggacttctatgctggtgggaattccacactttctgccctagacaattagggtctgccatgagtcccccactctgctgagggtgtgttctaaaaatgaactaatattattagtcattattgatattcaaatccaatttgtccaaatagatcattaggcactctgaggacctggggttccctcctaggctcctgtggacatcttatgcaggagtggattcaaataggcaggatggcttcagtaaaatattttggttgggtgggccaaattacatacttggggcaaccntccagtggacttttacccgggggcagttaaaataatttgcttt

SEQ ID NO: 271903 - DNA, 319 bp, Homo Sapiens
  misc_feature (279)..(279): n is a, c, g, or t
gagatttgggtggggacacagaaaaaaccataccacctgtctttatgccaggaccacactgtctgaataactgtagctttgtaataagtcttgaaattgggaagtgcaagccttccaactttgttgggtttcaagattgtattggctgtttgggatctgttgcatttccctgtgatttttaagatcatcctttcagtttctataaataaaccagatagggatttgataggcaattgtgttgaatccgtaggatcaatttgaggaagtatttgccttttntaacagtatttaaggtctttcaatccatggaacacaaaat

SEQ ID NO: 271904 - DNA, 346 bp, Homo Sapiens
  misc_feature (109)..(109): n is a, c, g, or t
gggtaaactgaagggcaggtgccttacctgttccctctggggaagtgcctcggcttatcatttcaaacccctaggctggaactctagtgcctccctagctgtgcccccnagctcaagggacagcagcatcaggtgcccactgggactgtctgtctttcctgtctgtctgtctgagaggtctcaaggggagatattattagccacaagattcagggtgtttgtcttccctctggatcgcccaaacccgcaaccctccacctgagccctgaacccacaggggtggcttgatttctgcaaagggtctaaaggcagttaaagcaccatagtaatagctttgttcagctga

SEQ ID NO: 271905 - DNA, 417 bp, Homo Sapiens
  misc_feature (60)..(60): n is a, c, g, or t
  misc_feature (232)..(232): n is a, c, g, or t
  misc_feature (269)..(269): n is a, c, g, or t
  misc_feature (331)..(331): n is a, c, g, or t
  misc_feature (337)..(337): n is a, c, g, or t
  misc_feature (352)..(352): n is a, c, g, or t
  misc_feature (368)..(368): n is a, c, g, or t
  misc_feature (379)..(379): n is a, c, g, or t
  misc_feature (403)..(403): n is a, c, g, or t
atctatccttcactgctctgagcctagaccctggcccctgcctggctccctgccagttcncctgccacccctcacgacctctgatggtcgttgtgggggtctcttgcctggctcccagggctagggttagggctctggaggtgctttcactcaaccaagggggccacagcactgggggagtgaaactgccccgccttcaccctgcgttgccctcttggttctgtgaggggtngggctggcaggaggcttaggctttgccctaagggaanttcctgttttcctcattttataagataaggggaaattaaggtttttgggaaggatttaattnaaaaanctaactttaaagttnaatttaagttgggttnaatttttgggnttttgggaaaaagggcccaatggntttttgggaaagaa

SEQ ID NO: 271906 - DNA, 405 bp, Homo Sapiens
  misc_feature (20)..(20): n is a, c, g, or t
  misc_feature (27)..(27): n is a, c, g, or t
  misc_feature (38)..(38): n is a, c, g, or t
  misc_feature (64)..(64): n is a, c, g, or t
  misc_feature (207)..(207): n is a, c, g, or t
  misc_feature (210)..(210): n is a, c, g, or t
actggggaattaaggggtanggagtcnataataccccngctgagaagacagctttaaaggaaanccccttccagagggtggaggcctgtgtggtccctggagtgaacagtgggttcagcatcctgctggaatacagctttgaaatggatacccaataagaccgacttcccaggtcccaaggcttcctatctctacaaagtcccgtgnagntacgcttcatatggaagcaggtgaattgtttgccttcataggaccatacagatggtgaacagcacggatggctgattacagacccctttcatagctgttccaggctatagacgaccctgaaactctcatacaaccctagtgaccaggacggtgttgctcaaaataagaccagttgacttttcctaccctcgtgcc

SEQ ID NO: 271907 - DNA, 598 bp, Homo Sapiens
  misc_feature (432)..(432): n is a, c, g, or t
  misc_feature (495)..(495): n is a, c, g, or t
  misc_feature (520)..(520): n is a, c, g, or t
  misc_feature (534)..(534): n is a, c, g, or t
  misc_feature (580)..(580): n is a, c, g, or t
gtcattctaattcaaagagagttctcaacctttggggggttagcttaactttataatcccctgcaaaacctttcttaaagttttgtaacatgcacttcaatggagtaagttttgatggactttccttctattccttcctttacggcccagcacactcactcttcctctagtttcggccaactataccatctcctattacgggagttttcagaagctacttggctttggagagttccttattcctgctacaactctgaggctgtaggggcagctcctattagccatacgcagatgcaccactagtattaggttggaccccacactttggctcgggagcacccagttccacactaagaggaattgtggacttcccattttgtgggctgatcagccttaataaggcttctttcattttacacactgtttacacanttcccccactcccagttcctaagttcctaattaggggtgggtaggccactcttcggccacctncagttttcctttttcctaaatcganttaggggcaaaccnttcttcacatcctgttggaggggtgggggggtgtggagttttcatnccaaatcgacgggggcca

SEQ ID NO: 271908 - DNA, 450 bp, Homo Sapiens
  misc_feature (364)..(364): n is a, c, g, or t
  misc_feature (386)..(386): n is a, c, g, or t
ggttgagcagttcagcagtttatacaaatcacattctcaggaatttttggatgctcagctgatgcaaccagaagatacttgtgtgatgacaatatgttattgtaagtgggaagtcagtatttcttatcttctgagctttcttgtttttacctcctttacaggccactcgctctggtgggaccctcgtgcttgtggggctgggctctgagatgaccaccgtacccctactgcatgcagccatccaggaggtgggatatcaagggcgtgtttcgatacttgcaacacgtgggccagtggcggattttcgatgctttgcgttcccaagtctgtggaatgtcaaaacccctcgtcacccatagggttncctcttgggagaaaagcttctnggaaggccttttgaaaacattttaaaaaaggggattgggggttcgaaaattcatggctccaagt

SEQ ID NO: 271909 - DNA, 401 bp, Homo Sapiens
ttgacttcaataccctgtggttattccaagcaagtctacaattttgctatgacttctggctagattcatgatcttcctttctaatgttatttaccatggaactttcttgagaaaacatttcctatgccaggagctgtagcaatccacttcttagctaatggaaagccactctgaatagctaatgtacctatcacaaaatgggcaaaaatgctgctttgcatagtatatgcaccacaacatttgctgaacatcatctttagtacaaacttaaagggggggcaatatcccaaaaggactaaaataacggcaactttcctttaatgctgttcggttttaggtttacacttttactttttaggggtggaattattaaaggtactttcataacctattttgttttg

SEQ ID NO: 271910 - DNA, 478 bp, Homo Sapiens
  misc_feature (56)..(56): n is a, c, g, or t
  misc_feature (75)..(75): n is a, c, g, or t
  misc_feature (86)..(86): n is a, c, g, or t
  misc_feature (453)..(453): n is a, c, g, or t
aaactttaacccttcttgtgggaaaaaaatctctgtccttctttccttttaggttnaaacccgtgcccaacaagnaggataaatgnttgtcccaatcccatcaaaactgaaagatcccaaaagcttacaaaaagcaaaagaaagatgcaagaacatggcgctgcaagcaaagggtccctgaacgcaagaagcaagcaaacaccagaggtggaagcagggagggcaagacacgtcacaggacgggccctccacggcctgcagaggctcccggcacagctgtctcctgccttcaacatcccctctggaggccctccgtacggcccacggtgtcagagcactttcacacggctggcacatcagctcagggcacatgggcaggatcctactgtgcaggcctccccaagatgctcctctgggaaccccaggcccaggctctctgcacacaccccacanttcacagccaagagcacgtccccac

SEQ ID NO: 271911 - DNA, 402 bp, Homo Sapiens
  misc_feature (316)..(316): n is a, c, g, or t
  misc_feature (345)..(345): n is a, c, g, or t
gtgatacggatgctcttctacacagctcctgaacctctttgtatgtttccatttcaatacgtgagcattttcctttgaaggctctcttcagagcttccatctttctcttcatttctgatttgtcttcatttcagaatgattcctaattctctagagctaaaacaccctggctttccagggctccccatcatgtcatgatttcatattacttgaaagtaggcatgggtgctcagagagctggatcgaatgcgttctgccctggacttccctgtggactgggtttggggggaagggagtgtgtttctgtgggggacgnagggtattataggaggactttgtcccatnaaaggagggggatccaagtgggccccaccgtgtgggttgggccttgggccaaggaaa

SEQ ID NO: 271912 - DNA, 356 bp, Homo Sapiens
  misc_feature (66)..(66): n is a, c, g, or t
gtcccccgaggcctatgtaagaggagaaaagccagaaaggccccatgtccagtcccattttggaanagttaaaaacctccagcaccttaaatgtgaaatttaagatcccatttaaagaagaggattccctcagttttaatgggtttgtgctccctcctgagcatccctcagggaagtgagaacacaagacttctgttcttcctaagcaaaaatcattatcaaatgaatttattaaagagctatcccgagcaaattgcaattgtatgtatgtagctacataggcttccatgggaattgtaaatggctagctgagggcactttcaattgattcagagtaaaacaatctgaggcttgta

SEQ ID NO: 271913 - DNA, 440 bp, Homo Sapiens
gccttggggtccatgaaccccatgaaattatttgtagacttgtatgtacatttttctggggagaaggttcaagagattcataagattgtcaaactccttgaaggttcagaacctctgcagggaagggggaagaaaaccccccccattaggaagcatgcttttgcagttaaatggcgatggtggaggtgatagggacttcaagagtaaaatgcaccttgtattgcataagaagcatacacaaatcaataaatcaagggagattataccagtaggactgaatcagggccttcaaagctggactgagttggtcctgttctggcacatatggtccactggagacaatgtatgattgagtttttctttggtctaaaaattatattaaacatttattttgaaatagttttcttcgtgtttttttcttctgctatgacgtcatgcag

SEQ ID NO: 271914 - DNA, 420 bp, Homo Sapiens
  misc_feature (251)..(251): n is a, c, g, or t
  misc_feature (266)..(266): n is a, c, g, or t
  misc_feature (311)..(311): n is a, c, g, or t
  misc_feature (337)..(337): n is a, c, g, or t
  misc_feature (368)..(368): n is a, c, g, or t
  misc_feature (388)..(388): n is a, c, g, or t
gcaccatgtggcagtccatgtgtcctctgcgccagttccggaaactccctgaggaagtagtgaagaagattgagaagaagaatttcccctttgagcgtctgtacgacctgaatcataatgagattggggagcttatccgcatgccaaagatggggaagaccatccacaaatatgtccatctgtttcccaagttgggagttgtcagtgcacctgcagcctattcacacgctccaccctgaaggtggacttgnaccatcacggccagnactttccagtggggatggaaaagttgggcaggttgcatggtttcntccgaggcttttttgggttctgggtnggagggtgtgggacaggcgaggttgtttctngcaccttggagttttttttntttccttccagggcccagttacggccccgggg

SEQ ID NO: 271915 - DNA, 502 bp, Homo Sapiens
  misc_feature (36)..(36): n is a, c, g, or t
  misc_feature (70)..(70): n is a, c, g, or t
  misc_feature (98)..(98): n is a, c, g, or t
ccctcacttgaaaattgaacctcaatttgcaagctnaaggatatatacttttgtgtttcccctggacaanagtgcaaagtggctcttatcaacccaanggtggtgaaggttcaggaaaagctgggcagcactgggccccgctccctctcctgcacctgtgtgcgccatgacacaccccacatgcagattccccaagtctgtctcccctcccccttagcaagtacaaggctgtgcattaactcacctcggtcctagaggagtatcctagtactgcttggcaacttctaagaccctaacttgtgaaactagggaagtaagaaaccgttcaaatttaacatctgtcttcagtcatctttaaatcgtctctctttataaacactctgctcacttagcagaaggactgaaggaactaaggaacttgctaaagagaagaagaaaacaaaagctagacttagttccagttaattctgttattcttctgaaataaaaatgaaataaaagg

SEQ ID NO: 271916 - DNA, 377 bp, Homo Sapiens
aatttaaaagcaccgaatactaaacccaggaaatcttggtggcctcccttccaaaccaaaagacctgcgaaccccttaactttgcttcttgtaagcactgactttgcttcccctggaaggtaggaaacacgtgacttgtcctaaaaacttattttccctgaggctccccatggatgcgtttgcagaatgctgccttccttgtgctggaggggatggtttcagagggctgggctgtgtgttcaggactctgagctgagttgctgcactctgtgaaccagcttgaccctcacttacctgcagctctggccggcagacccgcacctccccagcagttgcagacactcattaagaaacaagtggccgggtgcggtggctca

SEQ ID NO: 271917 - DNA, 445 bp, Homo Sapiens
  misc_feature (371)..(393): n is a, c, g, or t
gagactgcatagggctcggagtggggggtggcgggaacacacattttaaaaatcatgcttctaatccttaaaaagactaaaatagtttcatcctttcataacctgtcatcacgcatgtttttctaaaattaaacacatatggctcaagccagagttacattatgcaccatattatgtaattatcttttcaatttattactcctcaaaatagaaaaagattagcccatgtttcttaagtctgagtaaacatatggcctgaggattgtaaatgacatcctatctttaaaagaagttccaagactaaacaacatacaatactcccttcggaaaggccatatgtgggtatcagggttgtgagatacagaaggacnnnnnnnnnnnnnnnnnnnnnnnatacatctttttgctttctggccatgtctttgatgccgtgaaatattccctg

SEQ ID NO: 271918 - DNA, 356 bp, Homo Sapiens
gaagggtggaagtaggaagttaaaatacagctttactcagccaccccctggattctaagccctaaatttaactccaaagaaacttgtcttgccctacttcatgattccaaaccatagacagaaactattacctgtttctgcaaatcagagagccctgacaatggagcaccagggaggtgtgtcatccatcctggggtgctgggctgcaacactggagctgtcgtcagctgactggggagaggggcaagagggggaacaaacggccctactttgtggcctaaatcttgatgaacatgtcccctggggagccaggagagctatttgtacagccagtcagaatgaccagggtgtggcca

SEQ ID NO: 271919 - DNA, 549 bp, Homo Sapiens
  misc_feature (70)..(70): n is a, c, g, or t
ttcggcacagagaaatttggatgaaatctggtactgcatggacttggaggccagaggaagttagattccnagtggttttctaatttggtttctgacttctgccagcccccaacccattcctttctaagattcgatactctggctgggctctggctgacttccagccttctcagatggagccaggattacatctgtgtctttgcattttgtatccaggtttcggctgagtccagctcctccatgaactccaacaccccgctggtgaggataacaacacgcctctcttcaacggcagacacccccatgctggcaggggtctccgagtatgaacttccagaggacccaaaatgggagtttccaagagataagtgagtacttctcttggccatgtcccaggatggagactcagctataaatggggatattggattaacattttctttttatgacccttagccacaaaggtcttggtgtgatgatgtcagcaggagtaagattgtatttctaaataaccaactcctggaaaagaaaaaaatggatttaaaaaaa

SEQ ID NO: 271920 - DNA, 557 bp, Homo Sapiens
  misc_feature (12)..(12): n is a, c, g, or t
  misc_feature (34)..(34): n is a, c, g, or t
  misc_feature (59)..(59): n is a, c, g, or t
  misc_feature (85)..(85): n is a, c, g, or t
  misc_feature (97)..(97): n is a, c, g, or t
  misc_feature (103)..(103): n is a, c, g, or t
  misc_feature (119)..(119): n is a, c, g, or t
  misc_feature (140)..(140): n is a, c, g, or t
  misc_feature (148)..(148): n is a, c, g, or t
  misc_feature (220)..(220): n is a, c, g, or t
aaacaaaggccnacacccccccaaaccccaattnaactttaacacgggtaaaaaaattncccccacaagggccccccaacctaangctccccctaanggtcangctggaacctccacantacccccaaatttaatggganaaataaantggtgcctccagaaggggatcaaaaacaggccacaattccaaacaccccacaagggcaaagccaaatttaanatttaaaattgggggactcggaaccccggggtctgctgacctacaaccctttttgcctgtctttatcccacacatccagatatttccttgatcaaggcaaagccttaaatataaaaccactatgacttcgagacctgaaagtgtttttgttttccagagaaatgttattcctcagcatgtgtcaaagatatggttatgagaaagacaaaactttatagttttcagttatattttgccttgtcccttcaattttaccccaatagatagtaatagcaagactgtcccgttcatccgtggacagtgccattattagatactgggaatcctcgttataaat

SEQ ID NO: 271921 - DNA, 498 bp, Homo Sapiens
  misc_feature (208)..(208): n is a, c, g, or t
  misc_feature (318)..(318): n is a, c, g, or t
  misc_feature (376)..(376): n is a, c, g, or t
  misc_feature (385)..(385): n is a, c, g, or t
  misc_feature (394)..(394): n is a, c, g, or t
  misc_feature (412)..(412): n is a, c, g, or t
  misc_feature (417)..(417): n is a, c, g, or t
  misc_feature (477)..(477): n is a, c, g, or t
  misc_feature (482)..(482): n is a, c, g, or t
aagcttgctgttggtccaatcatccgtttttagagatggggaaactaaaactcaaaaagatgtgcctgaggtcatatggcattatcagaaccaacctctggccctcttgacctgtctagcattctttctttctgacctataggatgactctaattcagtctaaatcggctgccctcagattcttgagaacttaaaattgagcagaaanttcccaaggccaacctagctctcagggaccaacctgcagaactcaagattgagcgaaatgtttaggccagttgagttttgcaaaatgagtggtaagggaaaacagatctngcctgttatttaaaaccagggttcaaaagccctattgggagaggtagtattgtcctangcatttaanttctcatgnaatgtgcttggtctgtgntctcntggtcagatatctgccttccaggcgatccttttgaggttgtggtaattcagctggccccnggctncctgggtccctggtta

SEQ ID NO: 271922 - DNA, 255 bp, Homo Sapiens
  misc_feature (130)..(190): n is a, c, g, or t
  misc_feature (193)..(193): n is a, c, g, or t
ggggggttacagttctgttaaaaggtttaatattcaaattatacattaaatagaatcaaacaggcagcagcagttttattaagcatcaagtcagttggcatgtgggtggcggagtgtgagtttcgctctnnnnnnnnnnnnnnnnnnnnnnnnnnnnnnnnnnnnnnnnnnnnnnnnnnnnnnnnnnnnnggntcaagtgattctcctacccgctcgtgcccgaattcttgggcctcgagggccaaaattcccta

SEQ ID NO: 271923 - DNA, 420 bp, Homo Sapiens
  misc_feature (21)..(21): n is a, c, g, or t
  misc_feature (52)..(52): n is a, c, g, or t
  misc_feature (95)..(95): n is a, c, g, or t
  misc_feature (194)..(194): n is a, c, g, or t
  misc_feature (216)..(216): n is a, c, g, or t
ccccgggcaacaacagctagnccccgcctcccaaaaatatttataaaaattnaccccaggcatagtagcaccctagctacctcaggaggctgagnacaggaggactgcttgagttcaggagtgtcaggttacaatgagctatgattgcacccactgcactccagccatgcatgacagagcgaggccatgtctcnaaaaaagttgtaaaagtaaaantcagtcaatcaattttatcttccatttaaacaggaacaatattgcaaatttctgtcctttactgatggcaactatgcaaaaattttaagacatgtaagatccacacatgattataataaaaacctgtgagggccacatcataaccgtacgtatgcaaagagcacacaactcaaaggggagcaatttacacagagtctaacagca

SEQ ID NO: 271924 - DNA, 462 bp, Homo Sapiens
  misc_feature (451)..(451): n is a, c, g, or t
gaggacctgggcacggggtcggatggacacacagccagaccgtaaaccctcacgtatccccacgcctcggggcccccgccgcccctccgggaccccgaagagctggggacatggcatgccctgcactcaagtcaaccccgagggctgagccagattccctggatgtgatggaccagctcagctgtcccccagaccccatcccttctccttttcctttgtggccttaacccttctgcatcagggagccccctctgcctcttgagtaccagacctcatgggaccagaccccttgggaccacatggcacaatgggacctctgttgtacattccggttgggggatgagcgttgctatttaattactaatattattgaatgccttagaaggaagtgggcgagcccggtgttctgaagacctgtggcccaacagagcctctgacagtaaaagttttntccagcaaaaa

SEQ ID NO: 271925 - DNA, 425 bp, Homo Sapiens
  misc_feature (283)..(283): n is a, c, g, or t
ttttttttccagtaacatgccttgcttgtcaacttataatcccctcccaggtcaatgatggtgttatatggattagatacattaggagccgggaggattctgaggttaagaaagggtctgtaactaacccaaggttaagcacgtgataagtatcaaagcccagattaggcaaccagtaagtaagctttttataattataacattgcacagtaaatgggtttgagactgctggttaaataaggcaaattgaaaacatgttatctcttccccttccagaataccnaataaaaatgacagtgaaggaatttaaaaaatgggcataatgcccacaaagtaaaaagctccagggagaagcagccgaaggaaggcagggtatatgaaagcaggtagaagagcaagaccactcctagtagattgagagagcc

SEQ ID NO: 271926 - DNA, 382 bp, Homo Sapiens
  misc_feature (22)..(22): n is a, c, g, or t
  misc_feature (33)..(33): n is a, c, g, or t
  misc_feature (43)..(43): n is a, c, g, or t
  misc_feature (63)..(63): n is a, c, g, or t
  misc_feature (120)..(120): n is a, c, g, or t
cgccccccgggaaaaacctaantcaagggcctnaaaaagcctnaacctgaaacctgtggctgnaagcccccgacctcctcttggccgaagttgacctccccaaactggatgggacccctnggggctgtcgctggagatcggggagaaccgcctggtgatggggggcccccagcagctgtatcatctagacgcttatatcccgctgcagatcaactctcatgagagcaaggcagccttccaccggaagagaaagcaattaatggtgccatgccgcttctgccggtgccttcttgatcaggggtgtctccttgtgcttctgagatgtggagaagaggctgctggcttccctaaaatgttgaaataaaagatttttgcctttaaa

SEQ ID NO: 271927 - DNA, 243 bp, Homo Sapiens
  misc_feature (176)..(176): n is a, c, g, or t
caagcatccccatcactgagacttaataattatcaacccatggttttttgaatttcacgcacatcctcactcacttccccaccccacttcacatcaagctttggtaaatctcagacatcacagtgtttttttctttgtttgtttgtattttggaggatgggagtctcacttctgtncatggcggggagtgttagtgggctccagttcttcgggcttcactggcaagctttcgccttccccggg

SEQ ID NO: 271928 - DNA, 416 bp, Homo Sapiens
catccccaccacccaccagaaggcgacggtctccttctcccgcccctcctcctcgacggcgcaggactcccacaccaccaccacgacgaaggactccttctcctcccccacgtcggcgctcaccttctcctagaagatactctcctccaatacagaggagatactctccttctccacctccaaagagaagaacggcttcacctcctccccctcctaaacgaagagcatcaccatctccaccaccaaagcggcgggtctcccattctccacctcccaaacaaaggaagctccccagttcaccaagaggacgtttcacctttcattattcatccaaggcatagggaaagggtctttccccaaggccggttcttacccggggagggcccggtttcaccacaaccaaacaaaggggattt

SEQ ID NO: 271929 - DNA, 507 bp, Homo Sapiens
acaacatcgacatctggatgggcggcgtgtccgagcctctgaagcgcaaaagccgcgtgggcccactcctcgcctgcatcatcggtacccagttcaggaagctccgggatggtgatcggttttggtgggagaacgagggtgtgttcagcatgcagcagcgacaggccctggcccagatctcattgccccggatcatctgcgacaacacaggcatcaccaccgtgtctaagaacaacatcttcatgtccaactcatatccccgggactttgtcaactgcagtacacttcctgcattgaacctggcttcctggagggaacctcctagaggccaggtaagggggtgcagcagtgaggggtatatctgggctggccagttggaaccacggagatctccttgccctagatgagcccagccctgttctgggtgcagctgagaaaatgagtgactagacgttcatttgtgtgctcatgtatgtgcgaagtatataaattggcttttcatgcgta

SEQ ID NO: 271930 - DNA, 603 bp, Homo Sapiens
  misc_feature (528)..(552): n is a, c, g, or t
atttcggcacagtaccgctgggaccagccttatctcagacctgcttacctgcatgatgcctttttgggggctggggattgagtcttgctgctctgcccagccctgttctattctgcagggtccctgtgttggaattctccctggggaacctactttctgctcagtgaggctccggccagaaacctgggagtccttatcctcccctctgtaagtgttttagggtctggcttttgcaggcaccctctgacctcagcagagctcctggggcctgctgcctgcacaccacatcgcctacctacaatgccaaagcctcactgtcaccctttctgccttggtttccctagctgagccacgctgcccatgcagcagagggcagaaggcttgcactttggccaaagggcctaaggtccactggacagttgggaaaacacctgaccaccatttaaggactctaagccagaatggaaaattcaccaggactccattcttaagcctatgcgagtcccctagagagaggcattgtactgnnnnnnnnnnnnnnnnnnnnnnnnncatgagacatactgacagaatctgtaagctaataaaatgtaagaaaaggtt

SEQ ID NO: 271931 - DNA, 401 bp, Homo Sapiens
  misc_feature (14)..(14): n is a, c, g, or t
  misc_feature (253)..(253): n is a, c, g, or t
  misc_feature (324)..(324): n is a, c, g, or t
  misc_feature (344)..(344): n is a, c, g, or t
  misc_feature (351)..(351): n is a, c, g, or t
  misc_feature (380)..(380): n is a, c, g, or t
agagcccttggacntgaggctgtcgcatgatatgccaagggtcttgttagggtgaggatggtagactgggagaaaggcagagggagtcaggtgtgacttagcaccccctctaggcagagattgagaggaccaggcaggatgatggcactcagccccttctcagagggtgtgtggtcagaagtgctttcatctggcaggctgggagatccaagcccaacttgggccacttcaccagatggttttgttaacttgngggcagattatccgagcagggtttaattcttcctcctttttgggaactgggcccagtcactgtggggactncggacaagttaacaggtatnggaagcnttttgacgtgggtgaattgaaggcatttnccagttgagtctcttattttt

SEQ ID NO: 271932 - DNA, 399 bp, Homo Sapiens
  misc_feature (51)..(51): n is a, c, g, or t
  misc_feature (76)..(76): n is a, c, g, or t
  misc_feature (103)..(103): n is a, c, g, or t
  misc_feature (109)..(109): n is a, c, g, or t
  misc_feature (376)..(376): n is a, c, g, or t
tcgaaaaccaatagggcccccccaggacccaactaacctttctggccccanccagtcaatgcccctccaacaaaanctgggtcccgtggaaaattgccatgtnaggaanacacacccagactcccccaggacagaagcccttttgggaatggccagcactacccagcctcccactggtgaagggaggtccaggggctgtgtgacctttgccttctgggactgatggtttattgagctggagagtgtgcccagcagtgttctccagccctcaggaacttctaatgtggctctgggttcctggagtgggtgggtcgaagctccactcggggaagaaacttccaaagctgcctgcaggtgctggaggtccggtgattcnacctgctctgcccctgcagttca

SEQ ID NO: 271933 - DNA, 401 bp, Homo Sapiens
  misc_feature (56)..(56): n is a, c, g, or t
aagcagggccccagtgcctgccccagctttccctgaaccttcaccaccttggctgnataagagcccacttgcactctgtcccaggaaaacacaaaagtatatatacttagctgacaatgaaggttcaatttcaagtgaggaaaaacaagaagggctggaggaagctgagaataataaaggtatagcagtattcttgactttttgggaaaagggttggtttttctgtgtgaggggaatgatgtaaatatgaatagtggtgataccatattctcactgcagtgtattttacgtcacagtgaaatctgtgtctgacagccactcaatgtggaactcttatttcttaaaaagctatcttctgtagaaagaagataggtactggcaaaacgctgccctctcaaatc

SEQ ID NO: 271934 - DNA, 308 bp, Homo Sapiens
ggatattccccacgacccccgggaattatacagttgacacaccctcatgggtatatttggcagcccagtactcctatatgaacaatccgtctggatcacggatgtagggaagtggtatgtatagtaatatctattaaattatccttactggaaatcacatctttgcacatgtccttgtttgtattgtttaaaatcagagttgctgaatctaattgtaatttctttaacgattcatgaaatcacatgtttttaacaaactttattttgtacttctgtggaattaagaaatttaacaaaggctggacgcc

SEQ ID NO: 271935 - DNA, 625 bp, Homo Sapiens
  misc_feature (86)..(86): n is a, c, g, or t
actttcagggaagagagattccagcaaagatcctgggatggagagggtaccatttgagagaaaggtgagtaagaagttggcagaancccaggggtcctgttgaagagtcagagtggacgccttctagctcagcttggttgccagcgcagggaacagagggctgtagccctttgcatcttatactcaaggctgtctgcaaagtgattccagaatggtttgagccccctgatccatttccaatgcggggtagcttagggcatatgcctacgggagcccaggaaattaccccaagtgctggaatggccggggggctaattggagaggaccctgtgtttcccactctcctccctcagtattgccagaaggtcagatttttttctgagaagccagaaatgtgaatttttattgaaagttcccaacttctacaagtttttttaaatactaattacagaaataaaacttagaaccttttgggggccaattttgggggtgatggacatgtcctggagttagatagtggtaatagttgcacaacattgtgaatatagtaaaaaccactgaattgtagatttttaaaatgcttacagtggtgaattttatgtgatatgaattttatcttaattag

SEQ ID NO: 271936 - DNA, 404 bp, Homo Sapiens
  misc_feature (15)..(15): n is a, c, g, or t
  misc_feature (27)..(27): n is a, c, g, or t
  misc_feature (45)..(45): n is a, c, g, or t
  misc_feature (85)..(85): n is a, c, g, or t
  misc_feature (167)..(167): n is a, c, g, or t
cccagagggacgaanccagatggtaanaggttacctccatggttncaccccgcgggggacccctacgggcagggagggtcaagantcccttttttcccaaatttttccttcccctaatcgaggaagaatcccgggatgttcaggcatggacgtccgcttgataaganctcttctataggattcaccttggctgataaagtggatggtccattcttccctggagatagattttattggcgtgtttactgatccagctcatacagaagaatttgcctatgaaaattctccagagcttaacccaaggctttttaaataaagatcatatggtagttttgttttactaatctaagggtactagcatctacaagtgatatagacaaaataaaatatttctttaatggcat

SEQ ID NO: 271937 - DNA, 390 bp, Homo Sapiens
  misc_feature (22)..(22): n is a, c, g, or t
  misc_feature (75)..(75): n is a, c, g, or t
cccctcagactgagaactgttncccagtatatacatcaagtcacctgagggtagggacaaaagattggctacatnccctattattttatgggttattataagtgtccccaggacctcctaaaagaaacttgtttgtataatgctattctatcccaaggtatgtagccccaggaaataaccaacttgatgcgtgttatgacccattttaagcctcccatgatcacagtttttaaaatacaattaaggactggtccttttctaggtgacacaagaaaggtaatagctagaacagaagaaagaggggtccccaaaaatgtaaccttaaaatttgacacttgtgccactattgatagtaagcagcatggatgaggatgtggttctctaaattgg

SEQ ID NO: 271938 - DNA, 532 bp, Homo Sapiens
gaagaagatgacaatacctgcttcagtcacacccggaagctgactggtccacgcatggccaaagcatgagaaaactcattgcgggactcattttccttaaaatttggacttataccatagggacttcaactgaccttcctcagactgaagactattcccagtatatacgtcaagtcactgaggtaggaaaaaagttgctacagtcctattattttatggttattataagtataccaggactctaaaaagaacttgtttgtataatgctattctatacaaggtatgtagcccaggaaatgaccaacctgatgtgtgttatgacccatctgagcctcccatgaccacagtttttaagattaaggactgaaacctggtgggggctcataaacgatatgagtaaagtgttagccaaaacaaaagaaaaaggggtgcccaaacaagtcaccttgaagtttgatgcctgtgttgtcattaatagtaataagttaggaataggatgtggttctcttaattagcaaaaaggctatatggc

SEQ ID NO: 271939 - DNA, 424 bp, Homo Sapiens
  misc_feature (16)..(16): n is a, c, g, or t
  misc_feature (25)..(25): n is a, c, g, or t
  misc_feature (37)..(37): n is a, c, g, or t
  misc_feature (65)..(65): n is a, c, g, or t
aaatccacatgccacngggaaagcnccggacatccanggccaggttgagtaccccaggggtaatnagactgtcccccacgtgggcccttagccctcagacagttattttgccttttggtgacctttaaacatactttgtgatttaatgaatgcccatctgttgttaaaagctgcaacacaggaactgctcccacctcatgaacatactgatcatagcctaagtcctcaggaactgttagtatcataaacggtaataacttttccctggaagaccataaaatttggggattgcttgtaatatagcaaatgacctatttcccctaaaaaagcaatttgaaaacaatcctgagaaattacccttaggacacagaagtaaaataaattactaaagagtaattttaaaaaagtataataaacttttata

SEQ ID NO: 271940 - DNA, 484 bp, Homo Sapiens
  misc_feature (19)..(19): n is a, c, g, or t
  misc_feature (37)..(37): n is a, c, g, or t
  misc_feature (52)..(52): n is a, c, g, or t
  misc_feature (347)..(347): n is a, c, g, or t
  misc_feature (466)..(466): n is a, c, g, or t
aagcctggggaattgggangcctggggaaaagaggangcctgggaattgaanggcaaccctgggttcccctcctggtctctgcccttcctcccctggctgccctggttggtccccaaggcccacactccagatttggaaggtgatctgtgtctcatcccaggcgtcccactgtggcttcacgtttctgtcagtccatatgcactaggctgcacctcaccttcacgcaccgtcctctgtggctgtggaaacatccggcacaatgagcacggggcgactgtgagacagggccttagaaagggcgcggtctctggacttggagtgaatgtctgcacccttgggtgtcagnacgccccagtggctctcagtatcgactggaggctctacagagaagtgcagttgtgtctgctctgtggtactcgctggtgacgatgagttactgagctgtgaccatcgacaccgactccnactctcaacagggctgaa

SEQ ID NO: 271941 - DNA, 412 bp, Homo Sapiens
  misc_feature (24)..(24): n is a, c, g, or t
  misc_feature (29)..(29): n is a, c, g, or t
aaaaagggggctgaaaaccttggnccccntaagagctactgcaaagatccccaagaattaggtgcttgtaaaagcattccagagcaatgacttgcacagggaaaacgacaatgtgcttggttaaaatacttaattatcccttgcaaatagccatgtaattccagagacattgatgccttatgttagcttatgctggtgggtgtttgtggtctcatcaccttgaatgcaaaagctatcacttcaattccaatggaataattaggtgttgctagactgggaagggggagggtatattacttcttatgacccattgtacctcattttattttttagttagcaagaacaaattcacaactgagtgaaaataaaacatagagagtgctttttgttaataagaatgttctaattttga

SEQ ID NO: 271942 - DNA, 377 bp, Homo Sapiens
  misc_feature (152)..(152): n is a, c, g, or t
cggaattttaaaatacggccttcacttattggggaaattttggccctcgagggcccaagaaattgggcacggagcgccccacccttggccctccccaaaagtggctgggcaattggcaaggcttgaggcccacggtgcccccagccttgaanacccctttcccctggtaaaacactcccaaaaccaggaaaagaaggaatgtacagcaacaaaataaaggccagtcatgcaaggcccatggctgaaagtctttcagtcattttaggtgaaagactgaaatctttgcctccaagatcaggaataagagaaggatgcccgatctcactacttctattcaacacaggatttgaagtcaggctggtcacagtggctcacac

SEQ ID NO: 271943 - DNA, 206 bp, Homo Sapiens
atgtttgggggctactaaggtctacagatacatgagtaaataagagttcaataagcagtaagagctacaataatgttaagcagcaagcactaagagaatacttggacggtgcacaggtgtccaactctttgaatgcaaggactcttttgcttatctgtggtggtggatatcacaaaaatcatgcatgggccgggcgtggtgcttat

SEQ ID NO: 271944 - DNA, 391 bp, Homo Sapiens
  misc_feature (373)..(373): n is a, c, g, or t
ttcatccaaattattggcaaaatcagtagaaaaacagccctgtggcacatcagcagaagccctttcctactttaattggcatgttataaatatcacagtccaaagagtcaactaatctacttagcggcgctggcccagcttgtacttttctactctgttctcatgagaggattcctcaaataccactttcccctaacttatcagtctagtaagcttttcaaaggagaaaatgggttacctttcagggcctgttcttgtaaacctagggccagcctcactgatcacaactgctgctttaaggaaaaggtcacggccctcataggccctaggattcttgccgggggggaatcggcccatttaggacttctggggnaaccaaagggcccacttt

SEQ ID NO: 271945 - DNA, 318 bp, Homo Sapiens
caagaatttcggcacgagccccctggaattcctagcccattagatagcaatgcaaactcactggtttatgaacatgttcacatggctaaactttgtttgccccaataggtaatccagtgaaggctgtgaaccaaaattttgggtaaatcactttccatggcagtttgatttttaaaggcaaaacctcctcagactttaaagaatattggggccaaacagtaccactgaagaacatcacaagcagccaggcccaaccttgcttaggacagcagcagaaaagcctgggatacatgggaactccatcctgccttcccatcc

SEQ ID NO: 271946 - DNA, 429 bp, Homo Sapiens
  misc_feature (29)..(29): n is a, c, g, or t
  misc_feature (82)..(82): n is a, c, g, or t
  misc_feature (88)..(88): n is a, c, g, or t
  misc_feature (102)..(102): n is a, c, g, or t
  misc_feature (184)..(184): n is a, c, g, or t
gggcaggggaatgaaacccccaggtgaantaggggaccccccagaatcctaaaaccccagtggccttgaggccaacagggantgtagnaaagccgttgtttncttaaagatttatcaaatcagtcagtgcaaatgtcagatacaatgtatttatttaaaagattcatttttaatcatgaaattncttatcatccacattgttttaaaaagaaacaagatgctggatgtctggccaatttttgccttcattaccttttttgataaagtttctcagatccttgtttcaaacacaaatgcagggattgctgccactttttaactattaagaggcagaaaattgcacaatattgaacttttttccactgaagtagtgtgcagttctagtttgcattcctgatatgatttaaaacatgtaatataaagatgtta

SEQ ID NO: 271947 - DNA, 417 bp, Homo Sapiens
  misc_feature (361)..(361): n is a, c, g, or t
  misc_feature (367)..(367): n is a, c, g, or t
  misc_feature (373)..(373): n is a, c, g, or t
  misc_feature (384)..(384): n is a, c, g, or t
  misc_feature (393)..(393): n is a, c, g, or t
  misc_feature (405)..(405): n is a, c, g, or t
cagaatgtgggaagagctttagtcacggccatcagcttacacaacatcagaaaacgcacagtggggcgaaatcctacgaatgtaaggagtgcgggaaggcatgtaaccacctaaaccatctccgagaacatcagaggatccacaacagttgaagagccttttgaacgcagtaggcccgctcgtatctatggtttcgctttccacagtttgttacctgcagttcaactgcagtttcaaaaatatttaaatgggaaaattcccaggaaataaaggatttttaagtcttcaatgggtgttgcccttcttgagtaggcgttgatggaatctcttcgctgttccggcttccaggccccccgggggnttttgnagtccntcccttgggtncccagcacntccccggttttnttacggccaccc

SEQ ID NO: 271948 - DNA, 443 bp, Homo Sapiens
acatagttgacaatgggtaattttactcaagaccctcccctactgattggctaggatgcctgtcaggaactcattatgctactggttgtttggggatcccccatagtggactactttcaggaatggcatgaattgtaaccaactgagtgctgcccccactgttacggaagtttataaaaccttagttccagaagacccaaaggagagtactggtttgtgtttggtgcttggcctagatccagccaccactctgaaactcatcacatcttcattgacagggagggagcccaggacatatgtgtggctcattgaccagaaggctttcttagtcccaacagccatgaaccatgcacttatggatacccagccttttagggctacgtgaaatgcatccttgtaacatcattgtattctttcaataaatagccttctgagttgaaaaa

SEQ ID NO: 271949 - DNA, 523 bp, Homo Sapiens
  misc_feature (363)..(363): n is a, c, g, or t
  misc_feature (433)..(433): n is a, c, g, or t
  misc_feature (498)..(498): n is a, c, g, or t
  misc_feature (507)..(507): n is a, c, g, or t
ttctcccttctctcctttgccctcacaacacggcgagaggaagccaatcacatttttcagtttattaacctggctggcagtccaatcacactgcagagtgaaaaaggcttctggcagcccagctctgcccagctcactgtgccttggaggcggtggtggtggtggacgcagccccgctggcagaggccactgtgaagagagagttctggatggactcagcagaggtggaggtggcgtgaaggctggctacaggtgcagagttccctgcagatgctgcggcggcagaggaccaagctaacagggttgctgggtgagcagagagaggttcttgagggttcagggaacagaggggcagtcacgatntttggggggctcctcccgcattgggcaaattaccagggttcccagtttgcattcaagtgatgtttatttnggaagagagccaccagaagcaagagtttgaatagtttgccagtgtactttttgctcatttaaganttggggctnagagcaccgttaaggg

SEQ ID NO: 271950 - DNA, 678 bp, Homo Sapiens
aggtggggtcttcagtggaaagagcagggcactcaaagacaaatgagaaagggcattatccctaaggggtccccaggtttgggctggggtgcaggaccctgtggtcactagatggtgatgcctgaattttgattctgaattctcaaaggaagctgggaaaatgatgcgagatcaagttagctgaagagcgtttggctcagatcacacattttaaatatgcaaatttcctccttctcctctcccctgaaggtccactgtccttcctgaagataagcagaaagtcctggaagtttaaagaactataaaaaggatctcgccaggtcttaacagttcagtggggggataagtgaaaccaatcagtttgctatgaaaattggtcaagtaatttatcttaattaccatgtaattgcttttagtgttttgagaggagacaagtaactaaatggcccagaaaggatattttaataccctaaaacgtaattccttcccacacacaaaacaagctgcattcagattggaatggcctatatgagaagtgaaggaccaccatctacagagagtcacccaggatctctaccattggatgctgggccttggggaaatgttggccaaaggttctggtacaaattcttgtatcacacatcccctgcttattcattcagcaaagaccctcgtgcc

SEQ ID NO: 271951 - DNA, 422 bp, Homo Sapiens
  misc_feature (175)..(175): n is a, c, g, or t
tcgcccccttctcctaatgaaacttaaaatcaaaaaaacaacttcccctcccatctccctccctgctccctgcgtggaaggggaaatgtgtgctggctagggtggaggactgagcacctgagcctggggctggctccccggggtccccgactcagctggtggctgtggagctgantcccctccccgtaacctctgcaaggccagcacccaccatcactacctgcacctgctgtggtcccaccctctggaggcctgggaacctggctgcaccctgggaaggctggagaggcagacggtgggacccaccagctctctccccatcccgcttcttccctgggccaggccctacctgtgtggtggtgggtgggctgtcaagacgtgtcatgtacatttgtatcaaaaataaagaagtgaccatgaat

SEQ ID NO: 271952 - DNA, 473 bp, Homo Sapiens
  misc_feature (17)..(17): n is a, c, g, or t
  misc_feature (30)..(30): n is a, c, g, or t
  misc_feature (45)..(45): n is a, c, g, or t
  misc_feature (63)..(63): n is a, c, g, or t
  misc_feature (101)..(101): n is a, c, g, or t
  misc_feature (106)..(106): n is a, c, g, or t
ccctacgtgcccccggntgagcccaggcgnaagcaaatgtgaaanttgcggtcctgctcatantcccttgtaggtcctgctcatattccatttattaattnccccnggaacaagtttggtgttttcccaaacaaatgtgatatcaatattgactttaaaagacactttgtggtggagaatgagtggctatttacccatttatttctacccagaaaaatactctttgtacttcctaaatgaataagaattgtggacaacctctaaggtacaaaactctttcttcccccttaccagatcagaaatgatccccactgaacatgtaaacacatttagattcaaataattattttatgtgttttgcttaaaatgcttaatatctgtgggaaattaaatgccctgtaaacccggtaagaaaacacaaaacacataaagcctgtgagaaattatatgccctacaatcctgcctctcccaa

SEQ ID NO: 271953 - DNA, 416 bp, Homo Sapiens
  misc_feature (24)..(24): n is a, c, g, or t
  misc_feature (270)..(270): n is a, c, g, or t
gcccttttaaaacccatgcaatantccaggatagtttgaatccaaagaagtaagaagctgcctatttggggtaaccttatttcctctgtgggaaggggcagggagagtcacccaaacaatcctacctccaactctcttctcttttgtctagagacattacaaagtgcacttgaggctgcccccaacctctgacatttgttcttgcatgtgatgatagaaagtcttcagatggacttatacattctgtgctttggaagcacaagaagaacnaaatatgtgtatatttcctttaatgtttatacaaaagtttatatggagcagtattgttatgtttgtatgaatttgcaaaaattaaagtgtacaaagaagattttgattttgcagtatataaaataaatcattttattggttttcaa

SEQ ID NO: 271954 - DNA, 525 bp, Homo Sapiens
  misc_feature (298)..(298): n is a, c, g, or t
tagcatctactttgggagctatgccaaatacattacaaatcactcctgctatggcacaaggaatcaatgctgatataaaacatcaattaatgaaggaagttcgaaagtttggtcgaaaatatgaaagaattttcattttgcttgaagaagtgcaaggacctctggagatgaagaaacagtttgttgaatttaccatcaaggaagccgcaaggtttaaaagacgagtcctaattcagtaccttgagaagagacattacaaagtgcacttgaggctgcccccccaacctctgacatttgntccttgcatgtgatgatagaaagtccttcagatggacttatacattcctgtgctttggaagcacaagaagaacaaaatatgtgtatatttcctttaatgtttatacaaaagtttatatggagcagtattgttatgtttgtatgaatttgcaaaaattaaagtgtacaaagagattttgattttgcatatataaaataaatcattttattgattttcacaagaacaaa

SEQ ID NO: 271955 - DNA, 385 bp, Homo Sapiens
  misc_feature (112)..(112): n is a, c, g, or t
gatcaaatgctgtaatggtggaggtgtgggcagaggagggaggcaagtgtcctttgaaatttgtgagagctcagagtttctggggcgcgcgattggagcccccatccctttntccccaagaattcagagaacagcactggggctggaatgatctttaatggcccaagccgaacgagcatatgcctcactactgcctggagaagggagagattcaggtcctccagcagcctccctcacccagtatgttttacagattacggggggaccgggtgagccagtgaccccctgtagcccccagcttcaggcctcagtgtctgccagtcaagcttcacaggcattgtgatggggcagccttggggaatataaaattttgtgaagacttgaa

SEQ ID NO: 271956 - DNA, 466 bp, Homo Sapiens
  misc_feature (291)..(291): n is a, c, g, or t
  misc_feature (399)..(399): n is a, c, g, or t
tcagagaatgaaacatgctttatgccctgaggtgatcagggtagactttgagcaggggcccagcattcacactgcaatatagaaaagtggtctgtctccctcatcccacctgcagatccagtcccttcggtttcagagtattcaatgcacatttggttgttcaaagtatggagagctagattgtcctcttgattcctctatcccagtgggtacacaggaaagtcaaaggaagttgcatgggtgggggctgggtcttgaaacagggagacacatctaagggatcacaggctnttcacaaccggggaagggccacagcaactaggggttaggacccacccggggtgccagagggggtgggatgggaggggagttcttgcatccccagagagatgccttcanttgggaggacattcagagggcccatttggtattggtcagttggttggccttggccagcccagccttc

SEQ ID NO: 271957 - DNA, 455 bp, Homo Sapiens
  misc_feature (65)..(65): n is a, c, g, or t
  misc_feature (68)..(68): n is a, c, g, or t
  misc_feature (233)..(233): n is a, c, g, or t
  misc_feature (352)..(352): n is a, c, g, or t
  misc_feature (412)..(412): n is a, c, g, or t
  misc_feature (422)..(422): n is a, c, g, or t
  misc_feature (433)..(433): n is a, c, g, or t
gagaggatccttgcaaacagtgcaagaaaaagtatgtgaaaggggatgtgtccctgtgccgatgnccncaaagccctattgccaggcattgcctatggcaggggtattggatgtgctgccaccggtctcagaaaggattccctggctgtaagtggggcttcatgacaatcactgggttcctgcctgccacagcttttaatcggggcaatccataaggaaagcaaaagtgactngaagctgaagaggaatactaaagttccatgtgagaggcaacaaaaggaccggtttctaaagctgcaaaacacctaggatacaccgttcaaatgaggcgttgcccccttgagtcattcantctaggaagaatcttgtacatccttcaggattgctttgcttcagggctttttcttaaacnttaaattttncggggctgttnccaaaaaatttggggtttgttg

SEQ ID NO: 271958 - DNA, 381 bp, Homo Sapiens
  misc_feature (226)..(244): n is a, c, g, or t
  misc_feature (253)..(253): n is a, c, g, or t
  misc_feature (351)..(351): n is a, c, g, or t
  misc_feature (365)..(365): n is a, c, g, or t
gaaacaggtacctgtggattgtggtcgagatgaaaggcaagttgtattttagtcactttgaggcgaatggggcctacgtgctgttttactcttggctttaacacttccatgcgaggggttgtctgagcagctgagtcaggactgtgagccctcaccatgaatagtcatctccaggtcacagaacgtgtttagagcttgggcaacatagtgagaccctctctgtacnnnnnnnnnnnnnnnnnnnttacccagntgtggtggtgcgcaccgatagtcccagctgtttgatgacctgaagcgggaggatcacttgagcccaagagcagaggttgcatgtgaactgagattgtnccctgcactccatnctgggtgacggagcaa

SEQ ID NO: 271959 - DNA, 343 bp, Homo Sapiens
  misc_feature (66)..(66): n is a, c, g, or t
  misc_feature (76)..(76): n is a, c, g, or t
  misc_feature (243)..(243): n is a, c, g, or t
  misc_feature (296)..(296): n is a, c, g, or t
atttcgggcgagaaaagcagctgtcccagacacagtcacagcagcaagtttaggaggcagagggtnccctggcctncaagagcaagaagccatgtgttcagtacctgccccccgagaagccctgtgacagccctgcctcctcccacgggagtcatgctggactccccggccactccctctgcagctttggcctcaccagctgcccctgctgccacccattcggagcaagcccagcccctcttnccctcaccaccaaaccagaaacccgggcccagctggcttctccactctgccgncttcctgttcggctaaggctggcagcttccttcctctgggcagatgg

SEQ ID NO: 271960 - DNA, 438 bp, Homo Sapiens
  misc_feature (24)..(24): n is a, c, g, or t
  misc_feature (39)..(39): n is a, c, g, or t
  misc_feature (49)..(49): n is a, c, g, or t
  misc_feature (54)..(54): n is a, c, g, or t
  misc_feature (65)..(65): n is a, c, g, or t
  misc_feature (114)..(114): n is a, c, g, or t
  misc_feature (163)..(163): n is a, c, g, or t
  misc_feature (260)..(260): n is a, c, g, or t
aaaaagccttgtgaaagccctgcntccttccaagggganaatgttggantcccngggcaactccntctgaagctttggcctcaccagttgaccctgctgccacccattcggagnaagcccagcccctctccctaaccaccaaaaccagaaacccgggcccaanctggctcttccactcttgcgccttcatgtcgggctaaagctgcagcctcctcctctgggcagatgggcagccagcctcccctcctgtcccggccccntcccccttgggtccatgcccacagctctgctggcctctcccccgtccttccacgccacgctccatgcccaccaggccctcccggtgctacagcccagcctctttccctggtcaccaagtctgcccactaagctccccccgacccctgcaggctgtcacatgactcattgagtagtaat

SEQ ID NO: 271961 - DNA, 442 bp, Homo Sapiens
  misc_feature (251)..(251): n is a, c, g, or t
  misc_feature (372)..(372): n is a, c, g, or t
  misc_feature (405)..(405): n is a, c, g, or t
ggctcggctgggggtctgaaggggccgggtccgctccacaagtgccgcagctcacctgtgccgatctgcgccttgaaccgatcctgcagccgggtcaccagggcggacaggatgtcattgcccagcagaaccaccttgtaattgctagagttcacccaagaggtaggcaagtccatccacaagtttatctaacatggtctggtcatgctcaaggtcagcagacttctgtttgtcttgaggaaatagtctantcagttcttgggccaacctggcaatcgttttccccacattccttcttgcaacacctgcgccagggcaggaacttccatgcgaggcttccattagtgggaatttcaaattccagattccagncaaaagcttaggaggggcagttcacggatggantcccttccccaggcaggacgttttctggggaggtttg

SEQ ID NO: 271962 - DNA, 217 bp, Homo Sapiens
  misc_feature (193)..(193): n is a, c, g, or t
tgcaccacgccccgcctaaaatccatattcaaagaagcaatttcagttcctttctaagctttgtcagtcaaggggctccactggacttcctagggccctgttaatttaaccagtcttttaaggttttgcagggaaagttcccttctttccaagtgggttttttccaaattcggcacaatgggcaaagcaaaancagagggaggaaacctttaaaaaa

SEQ ID NO: 271963 - DNA, 656 bp, Homo Sapiens
ggccttctgccttcagaaatctccaggttttggcctcaacgagcatgggtgcctccaaactcccagcacacaagccaggttcttcaagagctttcccagggtcaccatgttctgctctactccgagggcacccccagtctcagagcacatccaagtctccacctagctttggggaggaagtcacctcccctctgtgaacaccacattgactaacacttgccctctttctccttctttccctagctctctgcttatattacagaggggagctggggtgaaggctggggggagccagcaaggacgagttctgaagcctcttattaagccttgagcaaagggtctagcccctctttaaaatgaggggttcctaattaacacccttcctttcaaatgcagcctggcctcccattcctcttccactttcttttccagctgcttttcaaagagccccaccttttggtgttgacttttcatggactccacttgtcagttgtaacagctaccctcacaagtgagccaaaggattcaaaataaggtttcctgtgagcacagtccataaggattgggatttgtatttatgaacatggaagaagcccagccccatagaagtgaaacacaaaagaacggaagagttttattaaatgctatggtctgaa

SEQ ID NO: 271964 - DNA, 409 bp, Homo Sapiens
  misc_feature (368)..(368): n is a, c, g, or t
ttcaaaaaagctctctagctgctacattgagaataaatgtagacatgattatctgctaggagactattgagacttggtgcctgcagtggaatgatagtgagaaatgattctattttggatatgttttaaaaggagaacccacaggatttaccaatagatgtggagttgaggaaaaattatgaattatttagaatattttttgcccaggcaattgaaacaatggacttgccttcaactgagatgaggaaggtagtatatatagcaggttttggatgagatgatatttaggaatccatctagttgcacattaaggcttccaggatggccttttaaaactctttaggaaggaaaacacagggggttaagtncttcacggaccttgggattttgacatggttttctccaggac

SEQ ID NO: 271965 - DNA, 439 bp, Homo Sapiens
  misc_feature (22)..(22): n is a, c, g, or t
  misc_feature (55)..(55): n is a, c, g, or t
  misc_feature (78)..(93): n is a, c, g, or t
  misc_feature (194)..(194): n is a, c, g, or t
gttgaaccctgccagtgagacnaaaacccgcatccattgccactctaccccgggnaaaaaacccagatattgtcctcnnnnnnnnnnnnnnnngggtactaaagaggtccaaagtggcccaagtggtcccagtgaaaaggaaaagcagactggtcaagagtaaaggccagggcaatagtttttgggggatgccncaaggcattttgccttgttgagttcctggaaagcccaacaaatgataatatcctgccttattatgagtgtttggacaaagtcaaagctttagcagaaaaatgcctgggaaagcttcaccagagagtcctcctccaccatgacaatgttctcgctcattcctctcatcagacaagggcaattctgcaagagttcccatgggaaatcattaggcatccagcttacagtactgatttgactccttctc

SEQ ID NO: 271966 - DNA, 417 bp, Homo Sapiens
  misc_feature (163)..(172): n is a, c, g, or t
  misc_feature (190)..(246): n is a, c, g, or t
  misc_feature (271)..(271): n is a, c, g, or t
  misc_feature (273)..(273): n is a, c, g, or t
  misc_feature (289)..(289): n is a, c, g, or t
  misc_feature (330)..(330): n is a, c, g, or t
  misc_feature (392)..(392): n is a, c, g, or t
  misc_feature (403)..(403): n is a, c, g, or t
gaaatttaagtccctcttccccacctctctcatctagaccaaaaagaagactacaatttagatccttggagacttttcctgtatgccttccaaaacttcctgctcacttagatgtaccttgtgctttgaagatttctttgatgcagtctttgtaacaaataannnnnnnnnnaaatggagtttctctctnnnnnnnnnnnnnnnnnnnnnnnnnnnnnnnnnnnnnnnnnnnnnnnnnnnnnnnnntgggttcaagtgattctcctgcctnantcccaagtagctgggnttacaggcatgcaccaccatgcctgggctaaattttgtatntttagtagagacggggttttctcccatgttgggtaagggctgattctaaaactccccaaccngcaggtgaatnctgccttgcctggg

SEQ ID NO: 271967 - DNA, 356 bp, Homo Sapiens
  misc_feature (12)..(12): n is a, c, g, or t
  misc_feature (37)..(37): n is a, c, g, or t
tgcctgaagganccagtgaattgaaagccttaaatcnccattgtcctaacagtcccgtcctccctcctatggaagctgccactattcctttccccatcctcaattatttcctgatgtaaccaaaacactctctctcccccactgccttttttcttttgtaaagacttgcaaagggtcagttccagaggctcgagccctgtgttctgactttcacagacagaggcctgccactcttacatttacaggtcatcattctgagcaatacactttttttgaagagtagtcctaaaagctcactaaaaagttgcatttgtatttaacttaaatagagaaccttatgtgtagtccatgtttct

SEQ ID NO: 271968 - DNA, 427 bp, Homo Sapiens
tgcttcctctctcaccaccccatctccctctcttccccagcaagatgtcaattaagcagtgtgaattctgactgcaataggcaccagtgccaacacatacagccccaccatcatccccttctcattttataaacctcaaagtggattcactttctgatagttaacccccataaatgtgcacgtacctgtgtcttatctatattttaaccgggggagactgttgtcctgggcatgggagatgaccatgatgctggggttacctcacagtccccaccctttcaaagttggacatatgggccatcccattgggccaggaattccacaggacacaccttaaggcctgtgggaactgggggacaggaataggatttttccattttgaggagggcactttccctgttgttcagttcttgttttgaagggaggt

SEQ ID NO: 271969 - DNA, 323 bp, Homo Sapiens
  misc_feature (72)..(72): n is a, c, g, or t
  misc_feature (125)..(125): n is a, c, g, or t
  misc_feature (254)..(254): n is a, c, g, or t
  misc_feature (270)..(270): n is a, c, g, or t
  misc_feature (292)..(292): n is a, c, g, or t
gcctcatcgacacccggctgaacttcatccagggtgtcaaagctgcttaaagaagtgcagcccctgcacgtngggtgtgtcctgagcagtacactcagccgcccccagcccagtcccacaggatngacctcatgatcgactgccagccccccgccatgtcctatcggcgggctgaggttctcgccctgcccttcaaacgtcggtacgagaagatcgagatcatgccagagctcgcagattcactggtgcccatngagatcaagcctgggnatctccttgggcaactgttttngggccgtgcttgcacaacaaaggtaacaagg

SEQ ID NO: 271970 - DNA, 492 bp, Homo Sapiens
  misc_feature (398)..(398): n is a, c, g, or t
  misc_feature (415)..(415): n is a, c, g, or t
  misc_feature (443)..(443): n is a, c, g, or t
  misc_feature (477)..(477): n is a, c, g, or t
ttcatatagggatgggctattagcaagagtatatgaataacgtactataacaagaaaaaatgaattgagaagaaagtagtggttttaagaaggaaaggagaacaaataaattagtgaaacataaggttaagtctatacatattattttctaattgcctattatgtcagactacatgtagttagaaaatacgatgaaagaaaaagccatattataattccaacaaaaagataaaataattaagaataactgcaacaagaaaatataagttctgccaacaattaaaactattacaatggaaacttaaaggaggcacaaaaaaggaactttaaacaggattaaaaaggcaggaccacgttttttggggttaggagggtttaaaattgttaaatattttccntttttcactgtttaatnttttaatttcagtgttattccccattanaatggcccacgggttttcccccattggccttggnatggtttttaaattt

SEQ ID NO: 271971 - DNA, 469 bp, Homo Sapiens
  misc_feature (16)..(16): n is a, c, g, or t
  misc_feature (31)..(31): n is a, c, g, or t
  misc_feature (67)..(67): n is a, c, g, or t
agtgggaaaaaatccnaccccctggctttgnccccctaagaactccccacttgggcgaacaccttangatccttttccagccagccaccgaaagttccctaaaggcttcgtcccagccctcatccctagatgggcctgattgaaagaaaaagaaaatgcaaactggctgttctggttacagctgatgaaggaaacaacaggagaaggtgaaggtcatgtaactcacacgacgctgagtgcagttcagccccagcttactcctcagagctggccgggacagcccagagatggaaggagaaagaccaggtcttcttgccatttttgaggccctggacccagctgagcctgacaaatgccctttcattataggaatgatgacactttacaatcaaaagtgttggtagatatgtctggatgaatttctcgattggtcagtgtttctgatgagccacacaatctctgtgccgaa

SEQ ID NO: 271972 - DNA, 443 bp, Homo Sapiens
  misc_feature (41)..(41): n is a, c, g, or t
  misc_feature (386)..(386): n is a, c, g, or t
tcaagtctgccttgtgtggaaattatgtcagctttggcgtncttcaagttgtatggggacaaccattttgacaatgtactccaggcttttgtcaaaatgctgctgtcagtgtcccacagtgacttgctacaataccggaaactgagccagtcttattatccactcctggaatgtctcactcaggaccatatgagcttcatcatcaacttagagcctcctgtactcatgtatgttctcacatctatctcagagggactcactactcttgatacagttgtctccctccagctgctgtaccagtttaggactacatcgtcacctaacctcttcaaggcacatagcaaaagaggggcaaggaaggccactttcggatggcagaggagggntacccgggctgggtcaggaggattatttacattttatggcagcaaaacccagatgtt

SEQ ID NO: 271973 - DNA, 488 bp, Homo Sapiens
  misc_feature (81)..(81): n is a, c, g, or t
aaaacctgaaccttaagggtgacctcaaaacattaaaatgcctccctgaaagcccacttccctttaaacccttcccaatgnatatcaaaaaccccttgcaatgaactgaaacctcccagaacaccccctggtttgccctcgaaggccagaaaggcactcgcccagtccttcaaagtaagaactgaagaggagggggctggtgcattttagcagcagcagcagcagcgagctgaggcacccctccagaggctgctcacacattctgattaaccaccatgaacaagcttttggggagcgattactcccttttcacagatgagaaatgagagagagggaaaagcgcagaaccaggggactctaggcttcagggaagtttccaattgggggtctctgatgccaaattctatggctttcctgcttaggtcctcccccttgtttccgggtactggtccctgaaggaaacaaggtttctacctggtgctttctat

SEQ ID NO: 271974 - DNA, 383 bp, Homo Sapiens
  misc_feature (76)..(76): n is a, c, g, or t
  misc_feature (359)..(359): n is a, c, g, or t
  misc_feature (364)..(364): n is a, c, g, or t
atttcggcacagagctcctgacctcagatgattcaccctcctcagcctcccaaagtgctaggattacaggcgtgcncgcattgcccggcctgagcacacattttatgatggggcttctattttgactattctttctgtctcttttcatatccactctgtcttaaatgaacattcagaactagggtaccaatgttttctttaatgtttcagatcatccaagcctagaaaacatggaacagatagagaaatttcaggaaaaggcttatgtgggaattccaaggattatataaccaaaacatatccaggatgacacctacaggttatccagacttacttactcaggttgccagcttttaggncttgntggaatggctacccttcac

SEQ ID NO: 271975 - DNA, 444 bp, Homo Sapiens
  misc_feature (433)..(433): n is a, c, g, or t
ttaggtaaaactgatgttgccccaggggaatagctccctcatcttggatctaggggagcttataacatcttttaaaaggcgaaaattcaagttatctgtggactgtcagaacattttgcataagtcatccccagatgttctacatttcaactccatcaaatattaaattgatgtttatgggctaacctgggaaaccgaaaaacagtttgtttcactacaagaataaggaaaatatgtccaaattcctgtcagctgacttattaaagggacttttaggaacacaacccaatggcatgagggtactccttaagccctggacaaccatcttgaagatggaatcatgaatatggccaaattttctacggggggctttgaaggaaaaggggataaagaacgacaggccctgagggaccagtttgaggcaaaggagganaaaggaaattc

SEQ ID NO: 271976 - DNA, 397 bp, Homo Sapiens
  misc_feature (14)..(14): n is a, c, g, or t
  misc_feature (79)..(79): n is a, c, g, or t
aaacacaaaaaagncctaaactcactccaagaaacctaagaaaaaggccccccggaaacactgggtaaaaactgcctanaatgaacagggtttccaggcaaggggaaacccagatcaacctgtaacttccttgcctgtgaaactactctgtattgggtttccaggtactggctgatcttgcctggttctgttcatggtttaacatcaagatattactgccccaaacatgtcagtcttacagatttgttttcagaaacttcaagtactctttgaggtaagaataggaaaagagatcctcaagcacgtgcagatgcttgcgggatggacctgaattttcattagtctcctagccttggtgtagtgaatggagtcaaccgttttccttacttaaaagctg

SEQ ID NO: 271977 - DNA, 548 bp, Homo Sapiens
  misc_feature (18)..(18): n is a, c, g, or t
  misc_feature (93)..(93): n is a, c, g, or t
  misc_feature (305)..(305): n is a, c, g, or t
  misc_feature (342)..(342): n is a, c, g, or t
ccttatccagggaggaanccaggctgtgacacggtgatcccaccctcagtaccaacatgttttaaccatacttaacctagcctatctgttaantgcagaccataagtaagatcaggttccgaaaggaatgcatggaccaaatgcagacatattacatgatgtagtatatctcgtgagttcaacttaaaccaatgctttcaataagcaacatatattttaagctacatgtatgcggagcgtaagcggagggttctgatttttttcaatagcccttgctacttaaaaaaagctggggtaggggaganctacatatattctttccagatttaaaaatgcgtgccnctatggatatgtcccagacaaggataaggatggcacatagacgaaaactgtccttattaacctgaaaagttggttcccctggttcagtaaaccctggatgactgtcgttagcaaatgtaatgcctaaggtggtcaacactaacaatattttggaaagttctcctaaggtgaggcctataatattgatttaggtttaagaaaattca

SEQ ID NO: 271978 - DNA, 426 bp, Homo Sapiens
ggggttatcaggcatcagtctacctgaggaggcaacagcattggtgggtccaccagtaaaaaatggacaggagactgctgtgccccctttgtgggaaaagcctcccttgggaagcagtggttgtatgctcagtcctcccctgggaagaacaacaacaggcaacttgcagggttcccttcagaatgtctctctgagtgcacctgggcaataagcagcacaagaccctggggtgctgaaccctcttcaacagcctgggcagcaacgagacactcaggaactaccagccaggaaagcaggaaccgttttgctttggggttcattttccacaaccgccatgttctttccagcaacagttgattttgaggaaggcaaaaggaaggaaattttcaggggacagcaggaaaacattttttcggagttttaagg

SEQ ID NO: 271979 - DNA, 401 bp, Homo Sapiens
  misc_feature (30)..(30): n is a, c, g, or t
ctacgagggggaaaaggctagcagtgaggnagaggaggaggactgcaggcggaagagcgcgcggttcttaggatccccgactcagaagctctgcctggcctcaggatgtggcgagcctcaagagacggtttgaaggtatttgtgccaacgtgacccccagggagatttggaggaagctttctacgtcctaggaggctgagatcccacggagccggtttacggttgagagcagacagtttcgagtagatagcgctggaagagacacgaagaatctctctttgcttcttgggaacgcgattaaccacattttcttttctctgtttacccccactacttaaaaattcaggcaattcccgcacagagcaggcagccgttttggttttcgaatgaatttaattttg

SEQ ID NO: 271980 - DNA, 382 bp, Homo Sapiens
  misc_feature (206)..(206): n is a, c, g, or t
  misc_feature (211)..(211): n is a, c, g, or t
  misc_feature (350)..(350): n is a, c, g, or t
gagagagctagcaccatgagcttcaatacctggagttgtattgttcatgtaacatacaatgagaatggtgcttcctggagctgtgcagtcaggcagcctgctatcttggaagactagagatgatggtgagttcactgttcactcctctcctccagtgaccttgtcctccacctttggagatacactcccatgcatgctcgtgagcngttgnctttccactgtgggggaggaccagactttgtttgtatctaatctgttgcagaccaatacttttgtaaaatatagtcacaaaaatgaggattaaaaacacaaagggctttcccaaatacaagtccactgattcatatggnttgggatgttcggcagcagtgttttcttaaac

SEQ ID NO: 271981 - DNA, 460 bp, Homo Sapiens
  misc_feature (13)..(13): n is a, c, g, or t
  misc_feature (25)..(25): n is a, c, g, or t
  misc_feature (39)..(39): n is a, c, g, or t
  misc_feature (70)..(70): n is a, c, g, or t
  misc_feature (79)..(79): n is a, c, g, or t
  misc_feature (91)..(91): n is a, c, g, or t
  misc_feature (341)..(402): n is a, c, g, or t
caagaagtccccnccccccctaagnagaagggggacccnaaagggaaggtccccctttaaggataaagantggtaacanttgccagcccanaagcccaggggccttttggaaactgttttccagtagatgtatgggggtttcctcagtatatgtcctatttattttaacatgcccagaatcctattttaataaaaactatacaatgaaaagctatacacagtaaatatatacgcaaataaaaactggttatacaagtctcacaaaggaaatagctttatcactttactcatacctgtttgctttattttgatttgttttgttttaagaagccagtacagannnnnnnnnnnnnnnnnnnnnnnnnnnnnnnnnnnnnnnnnnnnnnnnnnnnnnnnnnnnnnttgagcccaagagtttaagactagcctgggcaacatagggacaccccatctctagaag

SEQ ID NO: 271982 - DNA, 267 bp, Homo Sapiens
  misc_feature (28)..(28): n is a, c, g, or t
  misc_feature (197)..(216): n is a, c, g, or t
tgggaaatgagaagaaaaagaagcagancatcaagtttcgaaggaaaactatttcccaaactagaattcctatatccggtaaaaccttcaattagtgtcagtatagaataaaaagatagcttcagataagcaatgtctaaaaaaacccatacatccccccaggtgtccctttccctagaagctactggatgaccgtnnnnnnnnnnnnnnnnnnnnccaatgtgagacagtaaatcaagaaagaaatgggccaggtgcagtggttca

SEQ ID NO: 271983 - DNA, 545 bp, Homo Sapiens
  misc_feature (400)..(462): n is a, c, g, or t
ggcaaagactcagaatagccaaaacaattttgaagtcagaaaatagcacttacatgctctgattttaacattacctttaaagctgttgtaaacaagacaatgtggttttggcataaggacagagaaagagaacagagttcagaaatagaccccagacttatgcctcgttttccaacaaaggcatcaatggaatgaaatggagaaattaaagtcttttcaacaaatgggtgctgggaataacagattactcacatgggaaagatgaacctagatccctacctcacaccctatataaaagctaatttgagataaatcatggatttaaaaataaaagcaaaaaatgtaaagcttctagaagtatatataagagaatagcttttacagggtgcagtggcaggtnnnnnnnnnnnnnnnnnnnnnnnnnnnnnnnnnnnnnnnnnnnnnnnnnnnnnnnnnnnnnnngttgtatagtatactatggttgattttgcctgttagtagctgctgcactccagcctggtcaacatagtgagacatcatccaac

SEQ ID NO: 271984 - DNA, 417 bp, Homo Sapiens
  misc_feature (88)..(88): n is a, c, g, or t
  misc_feature (263)..(263): n is a, c, g, or t
  misc_feature (268)..(268): n is a, c, g, or t
aacactcctgggttgccccaaaagagggggaaacaaaaagttgccccctacccactccagggagactgttaattaaagtaccctatcntggttttggcctttagtttagagtggaaaacaaatgaaaagtccttcccctggataattcctttaactcaaagcccccctaccctaatcagggttagagccctaaatttatacctacctagtgtgatcccccccaaaatcaagacaaaaatgcagtttaggtgggcttatgttgngttgncctgtaggcacctgaaggaattgaatgcaaattcttctcagaagagacactttataaaagaaagtgtccatcctagaaaaactggagacccatctcatatgcagagacacacacaggctcaaaataaagggatggaggaagatctacca

SEQ ID NO: 271985 - DNA, 461 bp, Homo Sapiens
gcttggcacttcctttgctcatagacatatcattctagtctctgcttcatccacatggccttctcccctgtgagtctctatctttccctcttctgtctcctctaaggacaattgtcattggctcagtcttatcccggattatctcatctggaaatccttaacttaattacatctgcagaagctttttttcccaaaattatcacattcacagattctgggtggacatattttgggaggtggggacagggacagggtgcatcattcagtccactacgggaatatgtaacctacttttaaaacagaaatggaagagatgtgcactcaaattttatgctgatggtacacctttatcaaagcttggagacttctagtttagagaactgtttgggttggatacagttggcctcttttcatgtaattagacgaccctctgtgacatgaaaagtagtataagagtttag

SEQ ID NO: 271986 - DNA, 544 bp, Homo Sapiens
  misc_feature (46)..(46): n is a, c, g, or t
  misc_feature (374)..(374): n is a, c, g, or t
  misc_feature (384)..(384): n is a, c, g, or t
  misc_feature (404)..(404): n is a, c, g, or t
  misc_feature (416)..(416): n is a, c, g, or t
  misc_feature (450)..(450): n is a, c, g, or t
  misc_feature (521)..(521): n is a, c, g, or t
tttgtggaccccaaagtgacagtggagatccatggcgtgcggagancgtggccagccgccagactgctgtcatcaccaacaatggtttcaacccatggtgggacacggagtttgcgtttgaggtagttgtgcctgaccttgccctcatccgcttcttggtggaagattatgatgcctcctccaagaatgacttcattggccagagtaccatccccttgaacagcctcaagcaaggataccgccatgtccacctcatgtctaagaacggggaccagcatccatcagccattcctctttgtgaagatctccctccaggactaggctggaggaagccaagtggggtcccccctgaagtggctgggccctctgtccanatgtgggganagggctggtgtgctgctccnagcctcttgctnagagctaggcccccaaattgccttcagccctaanatagtgtctgctgctgcctccctggggcccaggagctagcccagtccctggagctgtccttcattccgttnggaataacactgcagccctctcc

SEQ ID NO: 271987 - DNA, 350 bp, Homo Sapiens
  misc_feature (21)..(21): n is a, c, g, or t
  misc_feature (196)..(196): n is a, c, g, or t
  misc_feature (203)..(203): n is a, c, g, or t
  misc_feature (326)..(326): n is a, c, g, or t
caggctgggagcattgcgtgnggtgtgcgagggagatggatgccaccccgaatgcctcctgcaccctcatgcccttcggagcgagtgactgtgtaaccgaccacctcccatgacccaccccagccccctgaacccccttcatggacagatcccccacagcctggggaagaaagaggcgtcgagggcgcaggaagtngcgcaanaggcagccgaagcagccaaagagaggcaagagaaagagaaagcgggcggtggaggggtcccggaagagctggtccccgtggttgagctggtccccgtggttgaattggaagaggccattagcnccaggttcagaggcccagggcgct

SEQ ID NO: 271988 - DNA, 329 bp, Homo Sapiens
agaatcatctgaagaaactgaaggaaaaataagaatttacaattgtctgttttggaaataaagctctaagtacaactttcaaaatcgacctggctaattaataagcctggtagtaaagacaaattgcctgcaattttcaaggctcttagtcacctcatccttcccccaagttgtcttactctttaaggatacacaatactgtattctaggccaagttactgtacaggcaaattctcttgttactaaggtcctgttttaccattggattttcaaaatctttcagttggggggaattaagtgggtcagttacatcttcaggatctctggcc

SEQ ID NO: 271989 - DNA, 370 bp, Homo Sapiens
  misc_feature (321)..(321): n is a, c, g, or t
ggcacgagtgtagatgtggaagaacaggccacttcaagagaggatgtcctgaactaagaaaggagaaagaagcccttccacccataactttcgaggaagaataggggggtcaggggctctgtctcttgagtcccaccaggagcccttgataaatttggaggtgggacctaaacatgagcttatcacctttttagtcgattcagaggctgctcgctcctctgtttgtttccccccgtctaatgttgtctcctcctcagaggaacttttattctccggggtaaaaggggaaggagaggggagaacagcagcataagtgggctnggcagaggcaggggaaagaccagccagagagggagagaagacagagcca

SEQ ID NO: 271990 - DNA, 332 bp, Homo Sapiens
  misc_feature (16)..(16): n is a, c, g, or t
  misc_feature (121)..(121): n is a, c, g, or t
  misc_feature (125)..(125): n is a, c, g, or t
aaaatggaaaagccanctgccagtgtgaattccaaaaaccatgtgaacacggccgccagagtccagtgcccgcggaaggagcatcggcagagacagacccccttgccatgctcagggccancggnccggccggcagagggagtgcccgtctcggcttccccagcccctggacacacctccacctggcagagggggtccctggacacagtggggggtctctgtgctgaagaagcccctccactggcaatcattaaaaactgaaaactgtgaagtctacggtacagaccctctttgctgtctattagagttttgacaacaggactgtgacttat

SEQ ID NO: 271991 - DNA, 389 bp, Homo Sapiens
  misc_feature (261)..(261): n is a, c, g, or t
  misc_feature (274)..(274): n is a, c, g, or t
tgtttcctgtagcggttgattcaagatgcactccatcagacaagcctgactgcatacatatctttaccacctcttccttccctatgctaggtatcacccatcagttgcagcaccgtattcttactgatcccaggaacagcctccaagtccctaacacagggatctaggcagtcagtgtcaatcaactcgggtcggtaagagaattgaaacctatttttcatcccttgcaggtgtttgcacccctatttctagttgtttttnggggtcactgcangtggggcatgaatgctcctgaggaacttcatcagccatttaactggaagtcttatcatccatcatgtatctgtgagattattactgagtaggcagtgctttgttttaacagctcc

SEQ ID NO: 271992 - DNA, 439 bp, Homo Sapiens
  misc_feature (425)..(425): n is a, c, g, or t
tcatattcactgataacatttactactgttattgactgcctttaaaagtgttgggcattgtcctagaaaccattatatgcattatctccttgaattctcacaaccgcctacctgaggtattctcagacctctaagaaatgagatttaagagaagttatctgcccaaggtcactcggctggaacctgggctgtaaaaatggctgaagcaggtgatgagggagctgatgcgtttggacgtgtctccagaggaaaccatgggagggcgctgcggttcctacccggttcttgggatgccttcttacagaggacaaccataggccccaaattattaggggaccacattctcagtggggtgaggacacccttgctttggggatgagggagggggatgagcttgttgttgaagccaagggcgctcttgttgnggggttccccagtt

SEQ ID NO: 271993 - DNA, 561 bp, Homo Sapiens
  misc_feature (318)..(318): n is a, c, g, or t
  misc_feature (498)..(498): n is a, c, g, or t
atggagaggcttcctgatgcctcatctgcagggtcctgtgcctctgaagttctagccatgaggtttccaggtaggacagctgctccccaagcctcctgaggacacaggaagagacggaaggagcaccttgacagacttgtgtgagtcttctcgaaggagggttgactcagaaccccagagacaatacaaaacccctcacttcctctgagagggccaaatgctgtgagtctgaagtatgtgcccgggtgtgaaatgatctatggcctgtttcttacacaggaagccccctggaacctcctgtaacatgtgttcatgttncccagccagctctgagacccaggaaccaaatattccattttggcttctgctagagcagtcatggttcctctcctaaaagccatgggcagcagtttccgagggcctgcatgatccacctgctgcacgatcctatgagggcttcctgtggcacacagcctctgggtgcttgggaactaagcnttaggacagcctgattctggtgatccagtgatctatggaagtcgtgtcttactccaggtgaat

SEQ ID NO: 271994 - DNA, 551 bp, Homo Sapiens
  misc_feature (17)..(17): n is a, c, g, or t
  misc_feature (155)..(155): n is a, c, g, or t
  misc_feature (479)..(479): n is a, c, g, or t
caaggaaattcatgggnttggggagacagcgatgggaacccagcaggcacaggatgctaggataaagctgtggcgccccaaaagtggcctgctctgccaacatacataaatacatacagtctgagcttgacactgtataatttggcccagaacantatgtattttgagctcatttaggtgaatgactttggcattccatgtacccactaggggcaagctttatcaggctgcatttgccttatgcagaagtatgcctttgttctgaggaaatggcctcaggaacacactgttgaggctgtctcctttagtgagtgtcatcctctcatccatttcaaaagattgcagatgccgtcttgaagtcctgcttgtaagaaatgcaggggttgggaatggaggagatgacgatgtagttttgcttttagttttcccaaacctgtttacattttttaaaaatgtaaccaacccataattgcattttncttgtcgtggttcgatctgattgtattgtcgaaggactatttttgaacctgtccaaataaactctgcaaagt

SEQ ID NO: 271995 - DNA, 511 bp, Homo Sapiens
  misc_feature (413)..(413): n is a, c, g, or t
  misc_feature (479)..(479): n is a, c, g, or t
  misc_feature (494)..(494): n is a, c, g, or t
ggcacgaggggagctgaggaattgcctaggaatcagcactgtggagaatgaggaaacgtggatatcaggattcctgtttgagtggtacccggaccttgggtcatgggaccaccactaattgtgaggaaagggagtaaatttaagtctggactctgagctatatgtgttagactcagaccacgtactatgtaaggacaattacttatctaggacaattgcttgacttccttgtatcttattcgaccaacctccatttattgagcaatttacctcgtgctaggcattgtgctaggtgctggtatgcagtggtgagcttacagacaagatccgctgctttcctgggagcctctgggttttgcctacttttcatttttccctagttgccaaaaatagacattcatagcatctcttgnatgtggtgagggttttatggaggtgatccgggaaaagtggttagcacagagcctttctttccgggnagggctaaactggtngttctcatttggggcat

SEQ ID NO: 271996 - DNA, 408 bp, Homo Sapiens
  misc_feature (64)..(64): n is a, c, g, or t
  misc_feature (66)..(66): n is a, c, g, or t
  misc_feature (268)..(268): n is a, c, g, or t
  misc_feature (274)..(274): n is a, c, g, or t
  misc_feature (290)..(290): n is a, c, g, or t
  misc_feature (296)..(296): n is a, c, g, or t
  misc_feature (346)..(346): n is a, c, g, or t
  misc_feature (371)..(371): n is a, c, g, or t
  misc_feature (379)..(379): n is a, c, g, or t
ccactgagacgcagctgtgtgaaatatgatttggcgaggaagatcaacatataggcctaggcangngagaagtgtaccacctcctgagctgattgggcctatgctggagcccggtgatgaggagcctcagcaagaggaaccaccaactgaaagtcgggatcctgcacctgggtcaggagagagaagaagatcagggtgcagctgagactcaagtgcctgacctggggaaggctgatcttccaggggagctgtcttcagttcaaagatngggggnttgaatgttggaaatnggtccntgattgaccagggggggaaggatttttttgcccaaaaattcaggaaccanttttaaaaatttgcccaggaagggnagggtttnacaggggcaacccacaggttttttaaatt

SEQ ID NO: 271997 - DNA, 520 bp, Homo Sapiens
  misc_feature (68)..(68): n is a, c, g, or t
cgaaaaaaatgttcaccaaaggtcaggccctttcccttccccgggaaaaatcccacattcaatgaacnggttgaatgtaaggggcctaataaaggccccagttccttcaacccccaacttgggcaagtccagaaggttcaattcccaagtttagaatctccctggttggtttccctaaggcctttgttagacatatcacagcccaacttccccctctgcctcaattttgatttctttcctacccaccccaacaatgctccctaataaacctcctgcatgctaattcccacctagatatcggcttcctgaggagcctaaactggaagagttgataccagaagtggtgcatgaaagcagatgctagctaagataggattttggagtcagactacatgttgtcacagtggcaaggacactgttattcctggtaggcagaacatagatagtgcctggcccaaggcagttatgcaattgtaaagacttgcactggtgttgaacagagataggatacaagtggaag

SEQ ID NO: 271998 - DNA, 435 bp, Homo Sapiens
  misc_feature (397)..(397): n is a, c, g, or t
actggagggtattaaaacacttcctctgatatttctcagaattagaattctaacgaaagagctgtttagtctctgatcgtcatagcacatgatataaaacaacgataattagagatttttggtttactgaagacttttgactgcatagtagtttcctggggctgctgtaacaaactaccacaaactggttggcttaagacaatggacatttctcttacagttctggaggccagaagtccaaaatccagctgggccgtgctcccactggggcttgagggagaatgtgtcctttgactcttccagcttctgggtgactattaaggcattcctcggcttgcggtttacatccactcccaatcttccgcctccatggaggcacactgctttcctccttttnctgcgcgttcgtcttctctgttaatggggtctacttgt

SEQ ID NO: 271999 - DNA, 541 bp, Homo Sapiens
  misc_feature (12)..(12): n is a, c, g, or t
  misc_feature (44)..(44): n is a, c, g, or t
  misc_feature (69)..(69): n is a, c, g, or t
  misc_feature (82)..(82): n is a, c, g, or t
  misc_feature (114)..(114): n is a, c, g, or t
  misc_feature (137)..(137): n is a, c, g, or t
  misc_feature (143)..(143): n is a, c, g, or t
ggactgcaaggnctcggcgtggtagtgggcgcccggtaaccccngctactcagaaggctgagacacganaaatcgcctgaancccggaaggccgaggttacagtgagcccacgncactcccagcttgggtgaacagngcgagnactcccaccttaaaaacaaataaacaaaaacaggtacagcttttccacatacacatgatcaattatcatatactttacttaaacatgtgttggacaataattacctatatgacttatttaataagttggaacacttgcccatctaattttactgagacaggaacagtagtatagattatctcacagcaactggtctgcatacagtacgtactcaaacagtgttcatttggtggataacaaggccttaaagacaaaagccttgacttatttgtgctaaatgacttgaaactgtaaccctcaatcaaaatcaaatttcagccagccaaaaaaggcaggggttacctggacaatattaactggaaaaggctggaagtcattagctcaacttctcatctcct

SEQ ID NO: 272000 - DNA, 304 bp, Homo Sapiens
ccctgcctcaggtggtgtgcaactaccgcgatgtgcgcttcgagtccatccggctccctggctgccgcgcggcgtgaaccccgtggtctcctaagccgtggctctcagctgtcaatgtgcactttgccgccgcagcaccactgacctgcggggcccaaggaccaccccttgacctgtgatgacccccgcttccaggactcctcttcctcaaaggcccctccccccagccttccaagcccattccgactcccggggccctcggacaccccgatcctcccacaataaaggcttctcaatccgcaaa

SEQ ID NO: 272001 - DNA, 526 bp, Homo Sapiens
  misc_feature (443)..(443): n is a, c, g, or t
  misc_feature (448)..(448): n is a, c, g, or t
  misc_feature (462)..(462): n is a, c, g, or t
  misc_feature (493)..(493): n is a, c, g, or t
  misc_feature (503)..(503): n is a, c, g, or t
  misc_feature (508)..(508): n is a, c, g, or t
acctgagaccttgtattagcatccaagaaatgatgagagagagagaaattatatactatgaaaagtgcacccccacactctgctagaggaatgaatttattcaagagccattcggggcacgtgtgtgtacacaccgtatacgttcacacacatgcactatgtaaacatctgagtatgattacacatttaaatactgcactcaccaaggttaaagtggggtaatcataaggctcctttttatcaatgaagttttgaagtttttctatttttcactttgcccaaaaatgttttacactcacaaagatattctcacttagtcaactcctgtcaaaatgaaggtgaactggcatggcccgatcacttgtccataagggagaaagtggctcattcctggtagaagtatgggtggttatcatttcaaaaattattgtgattctcacctncctcnccacctcagttttntgtctggtccggcgcccaacgaaaagataangcaagtaatntcctngctggcattggggggttt

SEQ ID NO: 272002 - DNA, 494 bp, Homo Sapiens
  misc_feature (25)..(25): n is a, c, g, or t
cagtcaatcatatggagacttcttntgtgatgaaaaagggctttagaagttaaatacatgcatgcacatgaaaacatgcacaaccacagcctcaatcttgtatttagtttggggaaagagaagagaatttcctgtggattattttttcctcaagtgcacctctctggttaacccaaactctgcaagaaagcactgtgactaaaacatacataacgcctgcataaatattccatggtttcagttaaatttcagtttttagcctttacacatgaggtcaaaggagtgacgaaaatacaaagcaaggaaaaaatgaaatatctggtttttgctgaatgcttaatttattttttactgtgccactccaatatttatcaaatccaaatagcatgaatgcttctctgtagtaatactaattttgtgccttttgtctgctttcttaagaccagttgttcacactttgtagatattagacaaatatatttcgattgaataaa

SEQ ID NO: 272003 - DNA, 549 bp, Homo Sapiens
ccagttaaattggtagcatcactgttactgataatttatcatatacacttgtcaatttttcctttgttatcttaaaagatctgccttagcaatggctcctttttcatgttgatctttaaattttcccacaccataagagaggagcgaaggaaattaccagtttagactaagttacagtatgtgtttcataagtgattaaagctatatcattcccagttattagttaacacaaattcagccacattctgagtattgtttgttcacctttcagacttggtgatactggacatgtcagtgtaaataacactaaggttaggatcttctaagtgtataactgtctcctaagcccatcactgtggcacactgtagagtgagcttatagtttaattgagatatttatcttgtggaaatattaaaaagcctatgcttgtgtaagtgaaaaaaaatcacattcatttgtttaaaaatgtaaagctattttgtagaggctcagtacttttccaatgcactgttgtatgaatgcattaaaaattgtaaagtaccatgctt

SEQ ID NO: 272004 - DNA, 475 bp, Homo Sapiens
  misc_feature (251)..(405): n is a, c, g, or t
  misc_feature (434)..(434): n is a, c, g, or t
  misc_feature (441)..(441): n is a, c, g, or t
  misc_feature (458)..(458): n is a, c, g, or t
ttaaaaaatcgctgtctcatgatctaacctgttgcaaagattaaagcaaaattttccacagctaatcacagaggattagtaaggcctctataataccacacattaaaaatgaggaaatcacaaactgagtcccatgtcttcattctttgtagatttgttttctaggtaattaaaaaaggtacttgtgaatatactctgcctacttctaaaaagtatttggggatagcctataataatagaaataggagtannnnnnnnnnnnnnnnnnnnnnnnnnnnnnnnnnnnnnnnnnnnnnnnnnnnnnnnnnnnnnnnnnnnnnnnnnnnnnnnnnnnnnnnnnnnnnnnnnnnnnnnnnnnnnnnnnnnnnnnnnnnnnnnnnnnnnnnnnnnnnnnnnnnnnnnnnngtttcagctacttggggtggcctgaggtngggaggntcacctgagcctggggnggtttgagggttaccaa

SEQ ID NO: 272005 - DNA, 426 bp, Homo Sapiens
ggaaaaggggcaaaaagggactggatagcgcaagggccctaagagacacaaaccccaagactcccagggtacccaccggaggctaacatggctggagtagagagaggggtagcagtaagggaagtcatggcaggaggtgatgggagagtactacaggaatttgtaggtttttatagagattaaatgtcactttaccagactgtttttaagaatttaaaagcctgagaggaaaaaaaattctcatagctatggaaaccatcaaagaccactgaatacattcaagcaagtttcaaatattttattttcttattcatacagtatgaagttttctaaagatcccacaacatgacgtatcatgcagaagaaaaactaaacattcaacataaaccatcccctcccttacccacccccacacacaaactaaaa

SEQ ID NO: 272006 - DNA, 538 bp, Homo Sapiens
  misc_feature (142)..(240): n is a, c, g, or t
  misc_feature (478)..(478): n is a, c, g, or t
  misc_feature (481)..(481): n is a, c, g, or t
tcttgctcagacactcaggctggagtgcattggtgctcactataaccttgaactcctgggttcagggaatcctcctgcttcagcctcctaagtagctagtactaccggcatgtaccaccatgcctggctaattttaaaattnnnnnnnnnnnnnnnnnnnnnnnnnnnnnnnnnnnnnnnnnnnnnnnnnnnnnnnnnnnnnnnnnnnnnnnnnnnnnnnnnnnnnnnnnnnnnnnnnnnatgagcaccatgtctggcctgataagtaggagcttttgaagtgggtttcacactgattttgtagttttgaacttgggatgcttcttttggggagttgatgcagtaactaatactggtgctgtctttcagaacagcttcatgtgaaaaaggcctgcttaagcctgtgtctttgggaagaacatctctgccgctgttacagcagatacagtaatagcaaagaaagtcttaaagatgattntanccatggcaaggaaatatatgggactcttgtttgaatataaacactcacagaattcca

SEQ ID NO: 272007 - DNA, 426 bp, Homo Sapiens
  misc_feature (304)..(304): n is a, c, g, or t
  misc_feature (363)..(363): n is a, c, g, or t
  misc_feature (388)..(388): n is a, c, g, or t
  misc_feature (415)..(415): n is a, c, g, or t
taagcccagaatgaagctgctgggtcatcgtagggcacttgcatgctttatgatttaatgactgcctagttgtgcacagaggcctgcccagtctgtttccaccagtatatccagtaaagggtgctgtacacccacctctgcccacacttggcctttcccactctctggtggttgccagtccacaggcgtagagctgccttgctgttctcaggcacatccctctgggcacccacatacagaggtgtctctgtgtgctctgcctgctgttcattcccagctaattcggggagggccgagggcaggnaaaattcgctttaaacccggggagggcaggaggtttggcaagttgaggccgaggatggncaaccatttgcggttttcagttttnggggcaaacaggaggttaggatttccntttttcaaaaa

SEQ ID NO: 272008 - DNA, 388 bp, Homo Sapiens
  misc_feature (223)..(231): n is a, c, g, or t
tttcggcacggatccagtgaagatattatcctcattttacatatgaaaaaaccaaggctcagaggaattatttcagagttctttttctccatcccaactcccattggacagttgccattgccttaactcagataatcatttcttgtctgtatttttaaattaacttccaaactgtttttctaatttaaccctgtctaactccatcctttgctgtgtccaggannnnnnnnnctaaatttcatcatgccattctcctggtcttatataatcaggtaggctcccaattacatataggatttaaggtcccaaactggtttatcacaacctactcctggattactggctccaatggcccatctctttaaaatttcctgacaagggaattttc

SEQ ID NO: 272009 - DNA, 120 bp, Homo Sapiens
tctgcattcttcccttgttctcccttctcctttccgctagcactgtcagccaggccaagaaaaaacaagagttgtccaaaggcttaactttcctgtccgcactttgtattttagtaaaaa

SEQ ID NO: 272010 - DNA, 347 bp, Homo Sapiens
  misc_feature (32)..(32): n is a, c, g, or t
  misc_feature (112)..(112): n is a, c, g, or t
  misc_feature (267)..(267): n is a, c, g, or t
  misc_feature (293)..(293): n is a, c, g, or t
gtgcaggggagtgccgcagcttcttccaaaanagagctctccctggctgctgcagctgctgacgtcttcctgcatctctcaacctgctcttcctctcctttcttcccaccangccatctcccctcgcctgcttcccctcacttggactggggccgctgggacatcacccagtctaccaccctggtgtctcagagggtgggtgaggtcactgttttccattccaaaccacacctggtgttaggaacattccattttcaactcttcacntggtttgcttctgtgggggcagaacntcaagattttcaagaaaatgcattacattgtaaaaggggctttcaagattacaa

SEQ ID NO: 272011 - DNA, 289 bp, Homo Sapiens
  misc_feature (64)..(64): n is a, c, g, or t
  misc_feature (81)..(81): n is a, c, g, or t
accccttctaaccccagtgctcctgagcttgtgtgaaaatcagaccctgaagattgccttgaancagcccaagaacccacnatgcattgccccagaattacaggagttagcacacccagctcctacagataagaaaacattgaaattcaaagattaaggccaaaaatatctcacttgcaattttaatattttcatttggatttatataaatgaaacatatatatgttttggaatggccagagtgaggcaaaggggatccctgaaataacattagaacatacaggaaaaa

SEQ ID NO: 272012 - DNA, 366 bp, Homo Sapiens
catccttgcatcactggggaggacgtgatgagtgaggacttgggtcctcggtcttacccccaccactaagagaatacaggaaaatcccttctaggcatctcctctccccaacccttccacacgtttgatttcttcctgcagaggcccagccacgtgtctggaaatccacgccgctgcttactgtcggtgtccccttgggatgtacctttcttcactgcagatttctcacctgtaagatgaagataaggatgatacagtctccataaggcagtggctgttggaaagatttaaggttcacacctatgacatacatggaatagcacctgggccaccatgcactcaagtaaagaatgaattttattatga

SEQ ID NO: 272013 - DNA, 425 bp, Homo Sapiens
  misc_feature (17)..(17): n is a, c, g, or t
  misc_feature (42)..(42): n is a, c, g, or t
  misc_feature (86)..(86): n is a, c, g, or t
  misc_feature (91)..(91): n is a, c, g, or t
  misc_feature (130)..(130): n is a, c, g, or t
  misc_feature (159)..(159): n is a, c, g, or t
  misc_feature (164)..(164): n is a, c, g, or t
ggaacccagggcttatngagtgggaatccttgatgtaccccnttcccccatctttaaaagccagtgctgcgtatgggccatcaagnaaganagtccatttatacccactggacaaaagattgggaggaanccagccccaagacagatgatggctcccanacccnactgtgcttccctgactactcacagtgacctacgtgtggcttccagtcaggaaactaccatttaactttctgctcagccctttcatggctcaggttggtgggatgatgccactgctccaaacccgaaggcaagggagcttcccaggcctcagcagcagttcctgggtggcactgtccccatgatctgaagcagacatgaaattacaatacgcttttattcactcatctcaagaaagctggcatgcccaaacctaaaaggcc

SEQ ID NO: 272014 - DNA, 458 bp, Homo Sapiens
  misc_feature (40)..(40): n is a, c, g, or t
  misc_feature (48)..(48): n is a, c, g, or t
  misc_feature (54)..(54): n is a, c, g, or t
  misc_feature (99)..(99): n is a, c, g, or t
  misc_feature (119)..(119): n is a, c, g, or t
  misc_feature (139)..(139): n is a, c, g, or t
aggggcgggaccaaatccccttaggccataccattccagncccggttnttcccngcaaccaaataaataaagtccccatctgtcaccttgcaatccccnccttttggttccccataganagagcctgaccccctttaanccccaaaaggtctctttaccattgtgaatgctgtgggaaggcaatttctctgccacacaagaggcctacgttttggaagtgatgtatgctatgtgatgactgaaaatgaactgtaaatgctcctagagtatattcctctgctgaacaaaattaaacttcaaaaaaatctaacagtaacacacccctgcttgggaccctagctatatgcattttatgtgaccttgccatgcttcagtgaacatactaattctatgtctagcacatgttgatttcctatgtattctgggtattctattaaaggaaactttgaactatgaaa

SEQ ID NO: 272015 - DNA, 422 bp, Homo Sapiens
  misc_feature (119)..(119): n is a, c, g, or t
gtggagctgccacgcaggtgcctgagggccaggtgccacgcaggtgtctgaggacccaggtgccacgcaggtggtgggggtacagacaagatgctgggatgtcccctgccccatggtcnaagggtgtcctgcctgcctgggtccagggcctgagggagccacatggatcccgagacttgtgttctcttggctgaaaacactgaggtgctcccatctgtgcgtggcccatgagctgggatggtcctccagctgcccacaaggtccgcccctctgtctctgcaccacctgtttgcataaacacactttgctacaatcttgctagtgcgttttcttaaaagataatctatttactgtaaaaataaattggactttgcaaaagcttttagaaggaaaagaaagaggattaaagagaattgctggtg

SEQ ID NO: 272016 - DNA, 454 bp, Homo Sapiens
  misc_feature (21)..(21): n is a, c, g, or t
  misc_feature (100)..(100): n is a, c, g, or t
  misc_feature (284)..(284): n is a, c, g, or t
taacaaccattaaatgggaanaaacctaaaaaacatgaggaacccaacttgcgaacttccaaaacccctgggaaagacccccatgaagaaaccagggaanagggtgggggcaagtccatgggcaaggctgggaaaactcccctcctgctcactgaagcctgtgggagcaggccccctggagacccccaggtttcacatagtagcccacacgaagcagaaagtcagaagcacagaaggcttcttcccaaggtggtgtggcaggcccaggaagcaggtggcagggncctggcatgaaggccagccagagagcagaacgccaaacaccagcccctggggttccactggcatcaccactcccgccgtgctaagtggaattttcaggtggaggagagttgggaaaggatagaagtgatatgctatggaaatccttacattgtatgcctctgtgccgaac

SEQ ID NO: 272017 - DNA, 430 bp, Homo Sapiens
gcaacaccaccttgggaagaagccttctgtgcttctgacttttctgcttcgtgtggctactatgtgaaacctggggtctccaggggcctgctcccacaggctcagtgagcagagggagtttcccagcctgcccatgactgcccccaccctctccctgcttctcatggggtcttcccaggtctggagtcgcaagctggtcctcatgtcttagcttgtcccatctatgctgttagctccatttaccttgggttgtgatattatttcccaatttcctgcatggtatttaatagcgaaacattagagaaaatcctgttaaaaacatagaaaaacacgaatgcctaggattcccgttattatttattactattctgaaaaatccaagcaattgcaagaacaatgtggtaactagaataaaattttaaaatggagg

SEQ ID NO: 272018 - DNA, 446 bp, Homo Sapiens
  misc_feature (48)..(48): n is a, c, g, or t
  misc_feature (110)..(110): n is a, c, g, or t
  misc_feature (133)..(133): n is a, c, g, or t
  misc_feature (167)..(167): n is a, c, g, or t
  misc_feature (182)..(182): n is a, c, g, or t
  misc_feature (185)..(186): n is a, c, g, or t
  misc_feature (220)..(220): n is a, c, g, or t
  misc_feature (303)..(303): n is a, c, g, or t
  misc_feature (341)..(341): n is a, c, g, or t
aaaaaagatcccaaaaaactactctgtcccaaaacctgtgccaaaaanaaatatcaatgtggtctccctctttcaagaaaagctccctcttccctccctccaaaactctnaagcttttggccctgcttcttanttctctgggggaatggaacaaatcagaagggaanttctgcatgctcccncanngatggctgcccacccctctgtgtctgcaccccanacggcagccttccttcccagttctgtggatgacctgtttgtccctggctgcaaccacccctttccttgtgtgccagatcacantccttctcttttactcaagggcatcactctgcaattantccctctccctccttcaaccttagatgtttcctgtctattggatgattcctatcagcgttcctattgttcataccctatctatctgtagtattccctatcttgaa

SEQ ID NO: 272019 - DNA, 450 bp, Homo Sapiens
  misc_feature (199)..(230): n is a, c, g, or t
  misc_feature (440)..(440): n is a, c, g, or t
tctttgacctaacattttccactgggccatatcccacaaccccaggagttcctcattcatttgctgtaagcaacctagacagactagatacaccccgtaaaaaggatgccacagaaaagggtctcattacctttctgctagtaaataccttcaggaggcctgattagtatgtttccaaggattctttactgggtcattnnnnnnnnnnnnnnnnnnnnnnnnnnnnnnnnggacgtcctcagagaagacacgatgggttactaaataagcccaaaccctttccttctcaagaaccatttctatagcaaatgttattacattatgaccttttttaaaaatgtgtgtgcccctctccatatgatgatttatcatttgtaacacactcagagtgcacaaaccatcagaaatccttatctactatggtaaaatttgagcttcanctattgggaa

SEQ ID NO: 272020 - DNA, 230 bp, Homo Sapiens
ggcaccccaagcaaaatgcccttccctgtggatcaagtgcagatacgctgtccttcctctgtgtgtgtatttgtttgatgaagtagatggttcagagcaagtggatctgggtcaagattgaccctgggttcaaatccaagctcaggctcttacttccctggcacatgactcaacctttctgacagtcaatttcttcagctgtaaactaggagtgatgtgccgggtgcggt

SEQ ID NO: 272021 - DNA, 422 bp, Homo Sapiens
  misc_feature (11)..(11): n is a, c, g, or t
  misc_feature (107)..(107): n is a, c, g, or t
atttaatggcnccttgcccgtttatgtcaactgacaagtttcctgaggcaagaaagcccgtatccatgtcctacccaccctgtgagggtccccacacagtgtgtatncatttaccctccctgaaccctgcctcaaggaaagcagacctctgcttctcccccatttgcctagaagaaatcatgaatagtctgagtcttcctctctgacaagttagggcatggacttgacccagctttgtgccagagaacccaatatgagtgttgttggcagcttgccaagaaggactgtctttttcaagacatactggtttcatgtgacacctccatggatttttttccagcctctaagtcaccaacttgggaactgcttgtctcacgttgctttgttttttacaataataaaagcattattatttaagctaa

SEQ ID NO: 272022 - DNA, 480 bp, Homo Sapiens
  misc_feature (355)..(355): n is a, c, g, or t
  misc_feature (357)..(357): n is a, c, g, or t
  misc_feature (359)..(359): n is a, c, g, or t
tttcaaccctcaggaatccaagcgctttgtgcagtggcagtcgtctatctgagcccctcctcccggctggactggagcctggctccctcttcgttccttccctggctgccggagagaccccactaacccagcctgcctgggctctgaccactaacactcttggccatggacagcctgcacaggaccgcctccctgctcttggcccactgtgctccccatttctgtccttggccttgggagtagctgagggggcagactaggggagtagggctggcaggggagggggcagacagcctcgcctcgcacccttcatcccgggcttgccggtcccatccttggagggactaagctgggngngntggacatgagtccccctgctgcccctgccacatcccagtgggctctgaccccctgatctcaactcgtggcactaacttggaaaagggttgatttaaaataaaagggaagactattttacaa

SEQ ID NO: 272023 - DNA, 459 bp, Homo Sapiens
ggagaagctgagtgcaaatgccatgtgggctagagtatgggaaggttgaaaattcccaagtaactgggagagtgggcaagtccctcagctgaacaatcttggatgtagtctagcagcaacccacctacaatggcgttatgtttggagttatgaggggaagtgaaagataagaattacctacagctttgtactcagataatttatatccaaaatttgtgttttaaatttcatactccagaactttcatgtttatgagtattagccttttaagttatgggaggtgatatacttagtccattgatgttgtcacttgtcatctaaacttatgagaccttgtcttagagaatctaaaatatattgtcatatgttttctgtgctgagtttggtttgttacactgtgaagcttttggtgaaacaaaataagacttatgaagtaaaaagaccaatcatgtcgttgac

SEQ ID NO: 272024 - DNA, 338 bp, Homo Sapiens
  misc_feature (54)..(54): n is a, c, g, or t
  misc_feature (61)..(235): n is a, c, g, or t
accttccccaaaagtgccgggaattaataggccatgaaacccccccaatgcccnagcccgnnnnnnnnnnnnnnnnnnnnnnnnnnnnnnnnnnnnnnnnnnnnnnnnnnnnnnnnnnnnnnnnnnnnnnnnnnnnnnnnnnnnnnnnnnnnnnnnnnnnnnnnnnnnnnnnnnnnnnnnnnnnnnnnnnnnnnnnnnnnnnnnnnnnnnnnnnnnnnnnnnnnnnnnnnnnnnnatatactacttctttttccatgttaatgtgcagtctaggatctgtactaagaagttgaataaaaatggtgattttgggcattcttgccttcttgatttaaaga

SEQ ID NO: 272025 - DNA, 489 bp, Homo Sapiens
  misc_feature (23)..(23): n is a, c, g, or t
  misc_feature (41)..(41): n is a, c, g, or t
  misc_feature (128)..(128): n is a, c, g, or t
ctaaaaatagaggaagggatggncctagagattgaccttcnaccccagatgttgattgaaaattaccctcaagtcaagtttaccagagtgaagaaaggggacctggagatgttttccccccggcaaanaccctcctattaaaagggatgggtttaaccaaaaggagagtgaaagaaaatctggaggtgttgaaaggaaaatccacaaggggctagtctccctcaaaacaaaggaggggagcacttggagagaaaggaagggttcacagtgcccaggtgcccacagtggggtcgagcagtgtggaaaccccagggagaaatcctgaggaaggctgtgtcctcacagacagcatccgtggccttggggaagagactctgagttccatgctttatgttcttgttaagttttaccagtttcataagtaggttgctgtcttttctaattctaaaaatagtgcacatttattgtagaaattttagaaatttacaa

SEQ ID NO: 272026 - DNA, 403 bp, Homo Sapiens
  misc_feature (146)..(146): n is a, c, g, or t
tgggctcaggtgatcctcccatcttcagcctgtcaagtagctggaaccacaggcatgtgccaccacacccagctaattttttttaatgttttagagagacagggtttcaccacattacctagggctagtctcagaactcctggagnctcaagtgatctgcccatctcggcctctttgtatgtaggactgtaccatgttgaatatattatcaatattcaaggaaactaggctttaactaacttttgctggtcaattccactgtactggctccgaaaattatcctctgggtactccctactatgaaaatggaggtattcttcaaaagatattaagaaattctccctatcaagacttatttatctatccactgatggttgttacatattaaataagcttaactgcc

SEQ ID NO: 272027 - DNA, 364 bp, Homo Sapiens
aaggatgtaataatgtttccataaaccccctggcactggtcacaaagcctcagctgtgaaaaatgaaatttgtaagtatttttaaacatgaatgtcaatttcaagtgtatttgaaatggttccctccccaggagagatatttgtgcacccattaggaaaatcttctctgcagaggaagtagccttctttggagaaaatggaaaatgggttctgatatgtgatctcagagtagcccatttcctagggcaccatggaaaacacaaatgtgatctttaagtatacctcttccccagtttggggaggaaaggactcagtttgcaccctttttgtatgtaaaataaaatgtcttacctttcttggctaa

SEQ ID NO: 272028 - DNA, 350 bp, Homo Sapiens
tttatgatgatttttaaaattaatatataataatgtaggcatatcctaggccatccggaggtcaatcttattatagccatgtaatctcaattcccacatttgcattcataagcacctacggcgccccagacatagtctcagggtcaacattggctcaagtttcacatccatttggaaggaagaccaagttatgatggttacaaacaaagaagggtgatatgctctgagaagcacacaacatcatcacttccataatattctttaacaaaaatgctttattcagtcatggaggaggataaccaaaaaattcaactgaggggggcattcttacaatacaaaatggctggccc

SEQ ID NO: 272029 - DNA, 354 bp, Homo Sapiens
  misc_feature (41)..(41): n is a, c, g, or t
  misc_feature (65)..(211): n is a, c, g, or t
acatggctgaaacccccatctcctactaaaaatacaaaaantagccccaggtgaggtggtgcatnnnnnnnnnnnnnnnnnnnnnnnnnnnnnnnnnnnnnnnnnnnnnnnnnnnnnnnnnnnnnnnnnnnnnnnnnnnnnnnnnnnnnnnnnnnnnnnnnnnnnnnnnnnnnnnnnnnnnnnnnnnnnnnnnnnnnnnnnnnnnnnnnnntgtattgagaactactctggggaagttgatttagcagtcttctcaagtgagcacctgaatctgtcccacagatcattacaatattttagtcttcattacttctttcagtaggtttttactctctgccctaaaaatctttccaa

SEQ ID NO: 272030 - DNA, 304 bp, Homo Sapiens
  misc_feature (24)..(24): n is a, c, g, or t
  misc_feature (258)..(258): n is a, c, g, or t
aaatgacccccctcaaaagcaaancccaaactgcttgtgcaaaaaggggtgtgaactggagactcaggacccacgcgtcctcagctgccctgaagcaaaattcaactacagcaggtgtggattcgttttgcccacatccccttctctgccctgctagcttggatatccactcatttcaagggagcattgggactccctggcccccacgggaaccccaaaacccatcagaaaggaaacgggtttggaattccatccctncgcccacaagggccactcctgtaaaatcagacaggttccaatcacc

SEQ ID NO: 272031 - DNA, 392 bp, Homo Sapiens
  misc_feature (11)..(11): n is a, c, g, or t
aaaacgcccantgccccttccccttccttccaccctaaggaggagcctccagcccattaaacagttaacgaagtccatactgtaaagtaagagccatgaaaaaaaatcacccaacgtatccccagccccccttttccgaagatctgctggccttggcaatgatgacttttttcctgatgcacaacattttaagacacttgccccagtgtcatagacatcactgccaagacatgtcatcaaaggatattggaatgaaaacagaagtccatgctgaaacttgtggacaacacagatgctcatggcagcattattcataatagacacaaaatccatgaactaatgaatggatacacaaaatgtggtatatccatacaatggcgtattctcgtgcc

SEQ ID NO: 272032 - DNA, 406 bp, Homo Sapiens
  misc_feature (344)..(344): n is a, c, g, or t
  misc_feature (377)..(377): n is a, c, g, or t
tggaagaaatggtcgcaccctctggttaggggagggccatattgacctctggcctctacagggcctgctgtcccaagggcttcagcgtgccctgtgtgcccgtcccctgaggagcccctcatgtctttctccctggcctacacactctctccagccctaggtccagttacagcctcgcggtctatcagggctgcctttagcctgaacagatccttgcccccctgggcgtccagaggctgcctgctggtggtgaccacgtggtgtgtcttccttgcagacttgggactccagcacagacatcttcttgttcacatgatggccctttcttacagctatggacgttnccccataacctgtggggcccagattcccaaggnttttgttggccaattttgatttttcaaaa

SEQ ID NO: 272033 - DNA, 619 bp, Homo Sapiens
  misc_feature (16)..(16): n is a, c, g, or t
  misc_feature (32)..(32): n is a, c, g, or t
  misc_feature (63)..(63): n is a, c, g, or t
  misc_feature (70)..(70): n is a, c, g, or t
  misc_feature (83)..(83): n is a, c, g, or t
  misc_feature (194)..(194): n is a, c, g, or t
cccccaaaacccaaangtgggaaacccaacangtaaatcccccgggcccaaaaccctccaacnctggccncccaaaatccctncctgtgtaaaaagtgtgttgttgttgtaacgccatgtttgaataatgtgccatgtaatgtaacatggggaaacctgtgtgccaaatatgttacaaagggaagacggtcacntgtcacagaggctgggggcaggtggggcttgcttggaggcgaaggcctgcctggggcagatagctcacaagtagatcctccgcaggtctccgggcgctgtgatcgtgttgcactgagggcagagcttcttggcacccagggtccgcagccagcactcctcgcagtgcacgtgccaacactggatggacgttaggggcatcgagtacgagtccatgcagatgaggcatttgtaacggtccccacgagatagctgccgttcaagttctctgacccgagccttcagagcctcaaacgtggtcacagctgaatcttcggtgattttctcgatgtcgctgttcttgcaggtcttctgcatggcctcctgcttgctgctttcaccattgctggtggatggcatctcatcactggcccatttagagaactca

SEQ ID NO: 272034 - DNA, 484 bp, Homo Sapiens
  misc_feature (416)..(416): n is a, c, g, or t
  misc_feature (460)..(460): n is a, c, g, or t
aaaatttcagaaatgacagcgctagtttatgctgcagtatctagtacaatagaacatttctgaaactggtttctttttctctccttgcctgaccttgtaagacactgaactacaaaatgtggcttgcctcttaatattatattctctaaagctggagatttttcaattgtaactaagataaatcacaccactaaaaaatataaacataaagtttgtggtcagtgatggttccactccttgagattgtaattcaagaacaagagcagcagagttgctgaggctagttagtggggtaggggaatctgtaagacatacacaggcaggtgcttcgattaagtagtttttccaagtaggaacaactcccaacaggagttgttcttggggcaagggttgggatatgggggagtctattagcntgaggaaaggagggaggccccggacacattgggctttaccaccngttaattccccggcctttttgggg

SEQ ID NO: 272035 - DNA, 433 bp, Homo Sapiens
  misc_feature (98)..(98): n is a, c, g, or t
aaacccggtaacaaaaatctggaaaaaaacatcccagtgaactcaaagtaacaagtccccccttggaacaggtctgccaggggatggccccttaaggnaggacctaaccaactcgcctacgtcaagtttcctccctttgtctttcccatgtaggcttgccctcccagaactcctgtctagaccccctccccagctcttgtctttactcagcattaaccacctggcactttagttacatgagtctctcatgatttaggttaacaagaatctgctccccagagttcaatcactttacacatgtgctgaaaaataactgatttccagattaccatagctgagagccagcccctggactatagtgatacagagctacttgcccagtagccctgcccaaggaccattctgcagcctggaacacctgtaaattgttttc

SEQ ID NO: 272036 - DNA, 339 bp, Homo Sapiens
  misc_feature (27)..(27): n is a, c, g, or t
  misc_feature (67)..(67): n is a, c, g, or t
  misc_feature (113)..(113): n is a, c, g, or t
aggccccagagcccctccctaaaaaanaggatgcctttcccaactatcctatttgggttaccccganggtacaattccatattaaaaaagccaggataaggctgccatgccgngtgtcacgccctgtaatccccagcaggccaaggtgcccaggattacagatgtgagcctaccatgcccggccctaaaattagttttaatttagaaaagtattatactaaattttttcagactacttaaagctatagttttggggagaaagaaaaatgtttttcaattaaagacttaaatattacacttttaaaactttttattatggaaatctaaaaaaaattcacc

SEQ ID NO: 272037 - DNA, 409 bp, Homo Sapiens
  misc_feature (358)..(358): n is a, c, g, or t
atccttctgctttcaatatttactgtaatgtacgccattgcgttctggaatggcagaaaaaggaaatatcattggcagccgcatctaagaactctgtgcagagtggagaatcagatagtgatgaagaagaggaatccaaagagccccctatcaagcttccaaaggtaagccactgagttctattaatatttagatgtgtaacctgcaggtgttctgggctataatgcatatatacgcattgctaaaatactttgctttatgtaaaattgcacactaaaaataacacgggcttatggggcaaaaataggtttgggagccaggaaaaggggaaactctggcaactttattaactaagggnggctaaccaaagtccaattatttggttaattccactggggaagccgccggg

SEQ ID NO: 272038 - DNA, 338 bp, Homo Sapiens
  misc_feature (85)..(85): n is a, c, g, or t
  misc_feature (189)..(189): n is a, c, g, or t
cttttgaaacaggcatggggtatagcccaggtaaagtacccatagaggtgtattggatttggcacaagcaagaaatcatcttttnattgggttaagcaactgagatttcccaggttggtttgtaacagcacagagtgttacttaatgtcgctggtactcctgggttttgaaaggatctctgtgtggatnttaaaaaccatcatgaattacgacagatagagagtcagaaagagacagcgatccaggtgctaaaatcttcaaggaatgagggagagcaaatcaggcaatctgtaataattgcaatgagaaaaggcaacaggtggtagaagcttgaaggc

SEQ ID NO: 272039 - DNA, 405 bp, Homo Sapiens
  misc_feature (322)..(322): n is a, c, g, or t
  misc_feature (341)..(341): n is a, c, g, or t
  misc_feature (349)..(349): n is a, c, g, or t
  misc_feature (357)..(357): n is a, c, g, or t
  misc_feature (377)..(377): n is a, c, g, or t
tgatccctcacaacaggagttgggggttcttgaccaccattttgcatcatgaccccacccccacctctaaccacagctgatggaactgggatgacacctgtccccaagtaggcgaagtactttctcttagaactaggagtgagagctgctgtttctgtctgggattcttgctggagctcaagtgacacaggcctggggaggtccagagcagtcatcttccatccatcatgtagacaggggagaagagaaatccgctctgggaaggagagacgtattgcaaccttcagagagcaggagatgagggcaggggaccctttcctgntggtttccaggggtttccnaacgttcntgggtttnccagggccttgggaaaaggnccccttgggcctttaagatttccagggg

SEQ ID NO: 272040 - DNA, 436 bp, Homo Sapiens
  misc_feature (20)..(20): n is a, c, g, or t
  misc_feature (25)..(25): n is a, c, g, or t
  misc_feature (42)..(42): n is a, c, g, or t
ttaatcctgtttcctggaanaaatnaacaaacccctttacgnctcctcaaacaaaacaacaaaccccagacataatttccacctgatgtccttattaaaaagccaatttccattaaagtcctgacaaagcggcctcctccccatgtgccagacaagggagtgtcctcgcccttaaggtccttatagtcagaggagatcagaagaaaccttcctagggggcagtggtagataccaatggaaaagaagcaggcagtcacatggtggagaacttaggaacgggacagcccttcacatcatgtggtttttagtttctttctgaagaaagcagacaaagataatctcctgaaattaaactcacacacaatttaatcaccaaaggtcttctctctaaacagcaggcaacacagtacacagtatctgcaattctggattcttg

SEQ ID NO: 272041 - DNA, 272 bp, Homo Sapiens
cccccaacctgatggaaggaagtacataatggagagcaagtttttaaagcacggtcgtgtcgtgtgaacttgctctagccaaattaggtttatagcactttttttggctctcattacctccagtccccacataaacaagagtgaccagctgggtcatccgcaagaccgtttgaaattattgtggcttgggtggaaacttaaaggagtgaagtatctgctttccagaaaaatcgttgtcattcaaagtgaaattaaacttgttttctttgcaa

SEQ ID NO: 272042 - DNA, 480 bp, Homo Sapiens
  misc_feature (49)..(49): n is a, c, g, or t
  misc_feature (85)..(85): n is a, c, g, or t
  misc_feature (96)..(96): n is a, c, g, or t
  misc_feature (129)..(129): n is a, c, g, or t
  misc_feature (179)..(179): n is a, c, g, or t
  misc_feature (444)..(444): n is a, c, g, or t
  misc_feature (450)..(450): n is a, c, g, or t
taaaaatgacttttaaccccccaaaaattgacaagaattaaaaaatcgngtaccccccctaactcaaggccacgcaagtggaaanctgtccccaanaggtaaggcccctctcaaaactgaggcccccanagttgctccccccaggcttggaaaagcaaatgaaaccccctgctttcaanaatcaggcacagctacaagctgcggacggcggagtgccagctgggctctcttgctctttccctggcctcctcccctcaccctcattgttgcctctctgagcttcctgttgagttcaggttctaaggggactggtgctgacttgtgaggatagaatgtagaagagttggccaggtgtggtggctcatgtctgtaatcccagcactttgggagccaaggcaggcggattacctaaggtcaggagttcaagaccagacctgaacaacntggtgnaaccatatcaatactaagactgcaaaaaaa

SEQ ID NO: 272043 - DNA, 345 bp, Homo Sapiens
tgagatttcctatgtgccgaaatgtggaacaaactacaagataagcccattaggtaagaaaattcagagtacattaggcttcccatgtgtgcactcatgcatatgtgtatatatgtgtgttaatgtgttagacatagagaaatataaacatatgaataatagtataggcgaaagaatatttgtcagtggctaccccaaataagctagaaagagtgtctctgggagacagggatcaggtaactagggagggaaggaggctatttttcactatgtactcttttgcactatttaaatttttaacctgtgcatgtattacatttctaattccaaacaagatattgttct

SEQ ID NO: 272044 - DNA, 428 bp, Homo Sapiens
aacctgagccatgggccacagtggccaaagaaacagtgtaaacagcccgcctggtccaattcccatttggtggccagcgcggtagccagccaaggaaaattccccaaacagctcccatgtgtatcccagcttttggaaaggaaagatttaaaaatcaataaacagatttcttttatatccaagggttttagggtttcttgtaactgctctacccaaacaataacaacaaaaaacacaaatgtatggcagtagtgtgagagcagaagtgacaggatgtcacttttcaaggagaaaatgtgacctcaagacaaacttgtcaccatcagaaataataatataaaataatctattgtttcctaaagtgttgagccacacaattgcagatacattccaaactgggtcaaaaatgagtggagacaatgacatag

SEQ ID NO: 272045 - DNA, 440 bp, Homo Sapiens
  misc_feature (330)..(330): n is a, c, g, or t
  misc_feature (349)..(349): n is a, c, g, or t
  misc_feature (372)..(372): n is a, c, g, or t
  misc_feature (427)..(427): n is a, c, g, or t
ggaggtacaggtggaccagatgacggcctctgcctgtgaaatccaaattccagtgttcccagccattttctctttttagagtgcacatcctgtgggtggtttgcagttcaggctgccacagtaccccaaaaggcccccctaactcttaatctggagtcagcgtttccctcaggtgcactccctgtgggatccctcaagggtggaaacaggaccaagaaataccagggatgctagagtccctctggatagtgccaggggacatctgatccttccatttgggctggggcaatgtttgttcaggacatgttcattcatttcaaggaagttgantttcccttcctggggattngggatgggcttgagggctggaantgttcttgaggggcatttttcaaggggttaggttacccacagggatatgggttantgtttttattagg

SEQ ID NO: 272046 - DNA, 467 bp, Homo Sapiens
  misc_feature (55)..(55): n is a, c, g, or t
  misc_feature (363)..(363): n is a, c, g, or t
  misc_feature (389)..(389): n is a, c, g, or t
  misc_feature (411)..(411): n is a, c, g, or t
  misc_feature (437)..(437): n is a, c, g, or t
gccggaagaaagggagttctggcagcttctccgagaccccaataccccactgttncaaggtattgctgactacagacccaaggatggagaaaccattgagctgaggctggttagctggtagcccctgagctccctcatcccagcagcctcgcacactccctaggcttctaccctccctcctgatgtccctggaacaggaactcgcctgaccctgctgccacctcctgtgcactttgagcaatgccccctgggatcaccccagccacaagcccttcgagggccctattaccatgggcccaccttgggagcagagagccaagcatcttccctggggaagtctttctgggccaagtctgggcaacnctgggccctggcaggtcttcccatgnaagggccaccccatgggtcttnatgggggcattgaaggcatcttcagnattccttggggcaaaaaaacgggattcccg

SEQ ID NO: 272047 - DNA, 485 bp, Homo Sapiens
  misc_feature (39)..(39): n is a, c, g, or t
  misc_feature (44)..(44): n is a, c, g, or t
  misc_feature (51)..(51): n is a, c, g, or t
  misc_feature (56)..(56): n is a, c, g, or t
aaaatttcaacagcccgtaaacccactgaaccttcgggncaatnatgaatnaaccntgaatcaaagtacccccttaaagccgtggaaaggaagagtttcctggatcaattagagtgagttttccctagacattccagcaacaaaatttcctggtcccctccctcctgcacactcaacagtgctttaagtaataaggccccagatgttttccaacatatggtttaaggcccacccactgatgcagagctaataatttccttcaaggaatgaagtaaaagatactgccttttgggttgactagttatttcttgcaggacaaacggcagatattcaggaaggttgcccacactaatgctgcctaatgcataggatgcagctgatttgacttcttcactaggagatgagaaagcttctagtattacagattttagttccaactgtccacttaagtcaatatgatgcccaacttctccaagagaaaagta

SEQ ID NO: 272048 - DNA, 484 bp, Homo Sapiens
  misc_feature (241)..(241): n is a, c, g, or t
  misc_feature (367)..(367): n is a, c, g, or t
  misc_feature (393)..(393): n is a, c, g, or t
  misc_feature (415)..(415): n is a, c, g, or t
  misc_feature (442)..(442): n is a, c, g, or t
  misc_feature (453)..(453): n is a, c, g, or t
tttccaaaggttcagagctcatctaccaggagccagccaaggccaggttttgaagacaagtctttcttggggaatatgcagggtttgagcaactcagtcctgctgagttaaccctttcttgtacagcaagttagctcttcagggagttagctctgtctatcctgcccctgtctgcctagccactccttttctagggtaggagtgggaccttgctgttcacggtcataggatgggccattcnggtgttacctaggactccttttttattccttttggccaacaagtaattggggaatgtttggggatttaaggaacatggtctgtggcttttggcaattttcatggtggaccatggggggaaattatnggcacacattcttattcattggtggnatttcaacaagtatttttttgngaatggctggctgtggcatggagggcngggtgttaggngggccaggtttgacagaatggactattacag

SEQ ID NO: 272049 - DNA, 434 bp, Homo Sapiens
  misc_feature (416)..(416): n is a, c, g, or t
cccttctgaaggatcccgtgagccaggcagaaatggtttgctaggggacccagcgagctcacaagtctttcctcattgcttcctctgcccctgtattttgctaggctctctaaattgactcggcttcaggtatcaagacgctcaccttctaagaggcttgcctaactggagtgctggagtctgaactttctttgaacatcgtttgatctcagatgcagccagtcctgtgcacagcctgatggggatgggaatgttcagggatcatcatgtgattccccggggtggcctagctgagggacacaaatttccccaggcagagaagacagcacaggaggaagaagctccaatatcgagagtgagagggctgcaaattcgtcaagagctggcacctccaaccaaaaatgtgcagttatcgntcaataaaaccagctttt

SEQ ID NO: 272050 - DNA, 381 bp, Homo Sapiens
  misc_feature (255)..(255): n is a, c, g, or t
  misc_feature (331)..(331): n is a, c, g, or t
  misc_feature (348)..(348): n is a, c, g, or t
  misc_feature (363)..(363): n is a, c, g, or t
gctgtaagttagggtatgcctaccaaacatccaaaggtagacgtggagacattttaatactacaaaactaggaaaatcagaactcatggccatttcctgccctcctccaacttgttaaaacatgtttattctaaagttcgaatggataaatttgagtataaaggttttgttataaaactgttctttagtgtaaggctgcattgtggggtttgggggaaatgtaaataattttctgtgtaaaacaaattcataggntctgatttgctcagagtattatttcaaggaatgtattaataagggcattgccccctgtttggcactcggggttaantatggtccaaatggaantttaaggaggggaanggggaggatttcgggtac

SEQ ID NO: 272051 - DNA, 435 bp, Homo Sapiens
gcaggtgcagccagctcctataagcaggagagcggcaggtgcagcatataggccacatcctccctcccatcataacaaggcacttcagcctctgctgggttgcaggccaatccttcatggggtgtagccaattggaggcctctcctagggcaccgtggggtgttgcccaggttccttgggcttgaaaaaaatcctaaataaggaggctcttgagccgctttgttcgagctcactctcactctgtgaattgtcttcaattaagtctgttttccctactcttcttctgttgttttgtcttcccttgttttcgttcttttgttacttcgtggcatttggttcaattctctgtttcaacacgccaaggaaccttaacaactctatcaggtaaaagtcccagctactcgggaggctgaggtgggaggatgcttgagcctg

SEQ ID NO: 272052 - DNA, 186 bp, Homo Sapiens
  misc_feature (128)..(128): n is a, c, g, or t
  misc_feature (151)..(151): n is a, c, g, or t
  misc_feature (165)..(165): n is a, c, g, or t
gtgtgaaccactgcggcccggcggaacttctctttcctcacttctctctctggggtcccagcttctgggaagggacaccctggccttggccttcacccccagacaaggggcaggaacaaccccaaatnggggaatttgaggaaggattttnccatttctgggganaattgagggttattttaatgg

SEQ ID NO: 272053 - DNA, 461 bp, Homo Sapiens
  misc_feature (196)..(196): n is a, c, g, or t
  misc_feature (284)..(284): n is a, c, g, or t
  misc_feature (333)..(333): n is a, c, g, or t
  misc_feature (420)..(420): n is a, c, g, or t
aggtttccaaacgctggcccccatgtccaaagtccctggtagcaatagccctgttagcacaagaagcagataagctaactcttagacaaaacctaaacataaagtccccctatgctgtggtgattttaataaataccaaaggacaccattagctaatgaatgctagactagctagataccaaagcttgctctgtgnaacatccccgcataaccattggaagtttgcaacacctaaaccccgccaccttcctcccggtgtcagagagcccagttaaacataactngtgtagaggtattggactcagtttattcctatgtggggcctaaccaccnagaccatcctttaaacatcagtagactgggagctgtaacatggatggggagcagctttcaccaacccctgcaaagtgactctgggangaagacgacaagccctggttccagtcacacccggaagctga

SEQ ID NO: 272054 - DNA, 396 bp, Homo Sapiens
gactccagctctaccaccaaagggattctcttcgtgaaggagtacgtgaatgctagtgaagtgtcttctgggaagccagtatctgcacgctatagcaacgtcagcagcattgaggactcattcgccatggagaagaagcctccatgtggcagcactccatactctgagaggacaactggagggatctgtacttactgcaaccgtgagatccgagactgtccaaagattaccctagaacatcttggtatctgctgccatgaatattgctttaagtgtgggatttgcagtaaaccgatgggcgatctcctggatcagatcttcattcaccgtgacaccattcactgtgggaaatgctatgagaagctcttctagcgaccccccacgccgagtcctatg

SEQ ID NO: 272055 - DNA, 385 bp, Homo Sapiens
  misc_feature (48)..(109): n is a, c, g, or t
aaggttttggcccacattagcccaggttgggtcttggaactccctgannnnnnnnnnnnnnnnnnnnnnnnnnnnnnnnnnnnnnnnnnnnnnnnnnnnnnnnnnnnnncacccacacccagacaaatacagtaaattcctaagtggccacccagagaataccccacagcatcctgcaggataatggcagtagggacaatggcccaggatgcatgtgctgaaggtgaatgtcttttcttaagcattggataaaactttttaacactcaaaacctgccccagaacacaccttggatgctacaatcaatgtagaaactctttcctcaatcttttccaactgtaacaatgaaaagattgaggaaagagtttctacattggaaaaaaaa

SEQ ID NO: 272056 - DNA, 385 bp, Homo Sapiens
  misc_feature (36)..(36): n is a, c, g, or t
  misc_feature (155)..(155): n is a, c, g, or t
  misc_feature (169)..(169): n is a, c, g, or t
  misc_feature (253)..(253): n is a, c, g, or t
gccgccttgaactgaaggaactttcccctttccgtnccggccgaaaggtcctggtgagtcccaatgggggagtggaaattcgttcccggtgaatctctcggtcgctcccgtcgtacgaactgctacagctgctcaagctgtcaacaggagatctnccccctcgtggccncgtgtgttgtgggtatctcgaaggggtggtggtacggtccccaactgactgagggcagatggtggcatgttatgtaggtgtttntgttgccagccagttactgaaccaaggtgaagagcgctggcggtgttaaacccagacagagatgacaggtctgcactactcagagagtactcggtaccatatgttgttgaaatggctgatggatatcctccc

SEQ ID NO: 272057 - DNA, 429 bp, Homo Sapiens
  misc_feature (271)..(271): n is a, c, g, or t
  misc_feature (376)..(376): n is a, c, g, or t
  misc_feature (381)..(381): n is a, c, g, or t
  misc_feature (389)..(389): n is a, c, g, or t
  misc_feature (396)..(396): n is a, c, g, or t
  misc_feature (408)..(408): n is a, c, g, or t
gctggggcccacactgtgagaaatgtccccttctaggcacagctgcttttaaggaaatctgtcttggtggaatgggttatacggtttctggcgttcatagacgcaggccaatccatcaccatgtaggtaaaggacctgtatttgtcaagccaaagaacactcaacctgttgctaaaagtactcatcctccacctctcccagccaaggaagagccagtgggaggccctgaccttctcccggggaacacgggcacagggagtggcggacaganaggtgggcaactggcaccccctggaaaagggaaattacctttcatttgggatccaaggaggaaaaccaaactttgaggcctgggttcaacatgggccaaaacctnttttnttactttnaaaattnccaaattttggnccttttttgggtgggttgcac

SEQ ID NO: 272058 - DNA, 579 bp, Homo Sapiens
acccacaaaattgggcacccttccccacccttggaaacactttgggttccccctttgggaacccccctctggccgagacacgggggggtgccaatcaagaaacccccgcgggttaactggacacccctaaaaccctctcaaaaggtcttaatttttccagaggcgcaaaaaacccgctaaactttaagggggccattcagagatttcaaaccccttttggaaactctttttggggaaacaattgcaatttgcttttttgggaaagtttaggttcttttgactttgggttaactgtgaaccggaaacttttggaaagacccggggcacatgtcagctaaatgaggatgtttgagttgccaaggatcagggcctccctttaagatttgctggtgagattttcctactgagttggtactagaggaatcaaataggtgagatcaatggagtagtaaaaggctatttaagtaagtcatgagttcagagcaagttcaaccagaaactccacatttatacaaaccacgcatatacatatgcaaacttttctggtcaagcaaagccattttcaagtgacttataaga

SEQ ID NO: 272059 - DNA, 364 bp, Homo Sapiens
  misc_feature (300)..(300): n is a, c, g, or t
cacagccctgggaacacactcttgagccaaacttggttgaagactaggtcttccctggcaagttccggaagaatggacttactgacttttatcaactcttctcactgccaaggccaacagcatctgaggtatagctttttgggagtacctgctttcttgcctcctgggaggatattttctgtcctggggcttcatggcccctctcttccctgttacacattgctgtgcttcagagcctttgcagctgcaacctagttgaatccacatagggttccttccacacggtgggaaggatcttgntgctttcactcacaggaccagggagtttttcaatcaggaggtgggtttttgttcccttcagggc

SEQ ID NO: 272060 - DNA, 359 bp, Homo Sapiens
  misc_feature (226)..(226): n is a, c, g, or t
  misc_feature (282)..(282): n is a, c, g, or t
  misc_feature (311)..(311): n is a, c, g, or t
tccaacaacacagcaaccgtgatttccacagcgcctccagcttcctcagcagtcacgtccccctctctgagtccctccccttctgcctcagcctccacctccgaggcatccagtgccagtgagaccagcacaacacagaccacctccactcctttgtcctcccctcttgggaccagccaggtgatggtgacagcatcaggtttgcaaacagcaggcagctgctgcnctttcaagggagctgcacagttgccagcaaatggccagtctttgctggccatgggnttggcttgcagggatttaaacccaaggcntgatgggcacccttcacagttttgcgggctgggaggttgcctttattt

SEQ ID NO: 272061 - DNA, 546 bp, Homo Sapiens
  misc_feature (248)..(248): n is a, c, g, or t
  misc_feature (365)..(365): n is a, c, g, or t
  misc_feature (379)..(379): n is a, c, g, or t
  misc_feature (441)..(441): n is a, c, g, or t
  misc_feature (446)..(446): n is a, c, g, or t
  misc_feature (452)..(452): n is a, c, g, or t
  misc_feature (461)..(461): n is a, c, g, or t
  misc_feature (484)..(484): n is a, c, g, or t
  misc_feature (493)..(493): n is a, c, g, or t
  misc_feature (514)..(514): n is a, c, g, or t
gaatctaataagagcagcacagtttgacacatgttaaatggttaataaatatggcactttaccttggaaaagacctgaagtgtgcctgtagaagtgggcataggaagggttgcagctcatgaattaaggtgaagctgtggaaggagagtcagctggaatcagagggtgagttctaatcccagggactgggtaagtgtgactcagtacttgcagtgaacggaggctgctcactcgtgttctgtgtgttnccgatgctggggtgtggttttccacattttcacctaggcgttgctcctgggatgagacccatgcgttaacaaaatttgtggaaatttgcgtttctgctccatattcccttgtagttncttgctccatattncattattttaattttcccgggggaccaagtttgttgttttttcccccaaccaaatgttgaanatccnaaattngaccttttnaaaagacacctttttgggtgggnagaatgatnggcccattttaccccatttantttcttacccccccggaaaaacccctttgtaa

SEQ ID NO: 272062 - DNA, 341 bp, Homo Sapiens
gcccaccaggacacaaagggcatatctggattggtctcctggccccattttggtctatggttatcttatgtaaaatacagataccctgcatttttcctctgccccatttgtctatatcaccttatataaaaaaatgcagagtcactgagccggacaaaggcatgaacgactatttttccctacccccgctcttacatgaaaattgtgtacttctgaatatcctgccctttcccctttaaatttggagccctcagaatcatcttcagagaaaggcatagacctgtctcccgggcatacatccttaactgtggcaaataaacctcctaaaatgataaaaaaaa

SEQ ID NO: 272063 - DNA, 480 bp, Homo Sapiens
  misc_feature (353)..(386): n is a, c, g, or t
ttttttttgaaattgtaaggtttcaaggattctagataaatctctgcctctggaagggtcaatctgaaataaccagatttcagattgtgacacctacaaaatatggaaatgaacatattatctctgtgccaggcccacagccaggcctgcatgccactcactcatcctgcaagtagttggagagcccactctgtaccagacaccatgccaagtgctgggcatacaagagtgaaaaagacacacaagccacctgctctcctaggtgcagttccaagaaatcagtttgggagaaatggctgtgaacccctaacagttgaaatttcaaaggaattgtaactcagcatcaaattaannnnnnnnnnnnnnnnnnnnnnnnnnnnnnnnnnctctaatctcacattttgcacatcataaataatcatcatgtaaagagttcaccagtaaagcaccaaaaggtgcatcgtagtcaaaaaatgtcag

SEQ ID NO: 272064 - DNA, 497 bp, Homo Sapiens
cctgggcaaggtaccccctggcagtgaccaagtaccgggagtcggagctgtgcagcagcagcatctaccaccagaacgacccttgcaacccgcccgtggtctttgagcagtttcttcacaacaacgagaacattgaaaatgaggacctggtggcctgggtgacggtgggcttcctgcacatcccccactcagaggacattcccaacacagccacacctgggaactccgtgggcttcctgctccggccattcaacttcttcccagaggacccctccctggcatccagagacactgtgatcgtgtggcctcgggacaacggccccaactacgtccagcgctggatccctgaggacagggactgctcgatgcctcccccttttagctacaatgggacctatagacctgtgtgaccagcccccagttcctcccccagttcctcccaggaagcccaggagcctcactggggcagacaataaaccctcagagcctcaaaaaaa

SEQ ID NO: 272065 - DNA, 443 bp, Homo Sapiens
gaaatttatactacctgtgtggccagaaattcacaagccaagagatcaaaataaaagtattcctcagctagggatactcctggggcagcaggcagaagcaaaggcaaatttctctggcaagaaataccttcaacctagactacataggattctcacagatcaagtaccactgaagataagctcacagcccgcaattataaaacatgtgacaaaacaatctaccatgaagagtaagcagttagacatgaaattagtcctcagcaatttcagataatagagtcagctaaaagaaactacagacacatgtttaaaatgattaaagacaaaataagaaattttaaaataagaatctaccatatgaaagaatggacaggtttgagatagaatcaaatggaaattttagaaatgaaaaatacggtttctaaacacaaaaacaggtttct

SEQ ID NO: 272066 - DNA, 422 bp, Homo Sapiens
  misc_feature (42)..(42): n is a, c, g, or t
  misc_feature (130)..(130): n is a, c, g, or t
  misc_feature (185)..(185): n is a, c, g, or t
  misc_feature (232)..(232): n is a, c, g, or t
  misc_feature (305)..(305): n is a, c, g, or t
aaaaagtgtaaaattattgagaagagttcaacaaaaaatggntaaattccccctaagactgtggaaaattgtacctaaaatcccacgtctgagtgtgataaaccctggacggttattcaagtcttaccantcatacattttgcttgaggcccaatgtgtgatccattcccctgcccccaacaccnaccccaggggccgagcccactcctccatgtggggtccctaggggacnagctctctgcaaacaccccgagcacactgatgtgcctgtcttccccagggaagcaggagttccagctcaaaanccgcgggccacgggagcacatcctgaacttggggtggtgacgaaacatggctgtgctgtccaccggcttggagatctggtggatgttagtgtaaaccagaaaatttaaatctatcaa

SEQ ID NO: 272067 - DNA, 568 bp, Homo Sapiens
acctgatgactgctaaggggtggaacttgaaccagttgcagttcccacccagtattcatttctgcatcacattactacacgcccggaaacgagtagctatacaattcctaaaggacattcgagaatctgtcactcaaatcatgaagaatcctaaagcgaagaccacaggaatgggtgccatctatggcatggcccagacaactgttgacaggaatatggttgcagaattgtcctcagtcttcttggacagcttgtacagcaccgacactgtcacccagggcagccagatgaatggttctccaaaaccccactgaacttggaccctttctagtctcaaggggattccagccttcagaaggttcttgggatatggaacaggccgtgcacaactttgacatctggtcttgctccatagagcacaactcaagatagaccatgagacagcttgagcctcaggattcttgttcttcctcttatcttccttttgtggtttttaatttgaagaccccagagaattccattacataatgattttgcccttgttataaatgttaccctaggaaaaaaa

SEQ ID NO: 272068 - DNA, 489 bp, Homo Sapiens
  misc_feature (391)..(391): n is a, c, g, or t
ttagattgaagaaaacataaccgtttaattctcagaaacaaatgcaagcctcggtccaagtcttccttcccaaacctttgtcatttagggattgagaagctgagttgggtgaaaggttgaatagaaaacaaaaaggaaagctagaaacacgctgagctcatggagatgcagcttcttctgtagctcctaaagcccagctgaggtatcatctaatgagaattctctctatgccaggcactgcgctaagatttcacatcattaaccaatgtgagttttaggcaaccccgaagcaggcagtctgttcatcccaattgcagctgaggaaacagggtgagtgaggccaagcagctggccccaaggtcccctgcctgggtaagtgggcacagcctgncagccctgccagggtgggtcctgcttaaccaagccggcgcttttcttgtcaccatgccgtattcgccttcccgtactatcaaaatgtacttatccaat

SEQ ID NO: 272069 - DNA, 619 bp, Homo Sapiens
  misc_feature (28)..(28): n is a, c, g, or t
gaacaaaattactaactaaatccaaaangatgttcttagactaagtgattctttgcgcactgtctcacctcaggaatgagccatgcagctgcgttaaggcagcggctgtgttggaagcatgttatgacgctgcaccgagagcccagcccgttaccatgaggtcctcgtggtacttcactaattaactctctttggatcagatccagaaaaagaccagccctaaacttaatttcactagtaggaaaggttgttgtaaagaagttccattgtagtttgattttcttaacggggcctttgaaattaaactcttctgtagtcatgattttccaggtaaaagtaagagtgttagttcagctatgcttgaggaaccttagaaacaaaaattaaaccccaggctttttacttacctttttcatatgtcttttcttaaagtgtgtgtatgtttgtgtgtgggggtgtttaaatgaataataatataaatttaatgaacaaagaaaattgatggctgggtgtgggtgcacgcctataatccgagcactttgagaggcagaggtggaagaattgcttaaggccagaagtttgctactatgggcaacatagtgaaatccatctctattta

SEQ ID NO: 272070 - DNA, 480 bp, Homo Sapiens
  misc_feature (15)..(15): n is a, c, g, or t
  misc_feature (41)..(41): n is a, c, g, or t
  misc_feature (57)..(57): n is a, c, g, or t
  misc_feature (67)..(67): n is a, c, g, or t
  misc_feature (72)..(72): n is a, c, g, or t
  misc_feature (97)..(97): n is a, c, g, or t
  misc_feature (112)..(112): n is a, c, g, or t
  misc_feature (122)..(122): n is a, c, g, or t
  misc_feature (132)..(132): n is a, c, g, or t
aattccgaaccgccnagacataaacacacccctccctgggnaacctcacgcctcccntaaacacaancctantttccaaagaaaaacccctaagaanttaaatggccccatnggaaaattanttaaaatccngatttgggaaaaataggtgacttcctgaagtttgttgaggagaaaataaccctttaaaaaaccgtgagcatttcccaacaaggactaatcttgactggctaccgaggaggaaaacacacacacatatgctacgcacgcacatgcatgcacgccccaagtgctttagatcaaatgtggggattacgttcccaagggatgggttatgagtacatacctcaaaagagaaatccaaacacagaaaaacagccccagttaatactctggacacataagtacacttattccccttcttcacatgcacccgggagtgtatacaattgcatagttgactttttttcccggaaaaaa

SEQ ID NO: 272071 - DNA, 485 bp, Homo Sapiens
  misc_feature (424)..(424): n is a, c, g, or t
  misc_feature (430)..(430): n is a, c, g, or t
  misc_feature (452)..(452): n is a, c, g, or t
  misc_feature (459)..(459): n is a, c, g, or t
atttcggcacagctgcccctgtatcctcccgtcattcttcgagtagctcagacttgttctgactccctgtagcttcctacagaagccagaaccactcaggccccacccgtcatcttctctgtgactgcaggctgggatctgtctgtcctctgctctcttccctcagtagagggtttttatggagtcacagaacaaaaatggttccatgccttccctttgccggtggggtggtagtgagggagtctggactgtgagggagtctgggactgtggggggccccagggaaagggagctgccttcaccctctcttccccaggggagcagcagaaggcccaggagcgtcagggagttatgggcaaggtctgggaggagctgcggttacgcgcttaacagggggacccagggggccaaaggaggccctttncccagncggtttaacaaccccaggtggnccgccanttgggggttcagagttagaacagcac

SEQ ID NO: 272072 - DNA, 542 bp, Homo Sapiens
  misc_feature (152)..(152): n is a, c, g, or t
ataaatctttcttgttttaaggctccaacaaattggtggtcacttgttacagcaaccacaggaaatgtatacagcttctgatacttctgaaaacctcacacagccaaagggtaacatccttggtataagaggctcactccttactcaccaanccaggcaaggaaggctcaatcctttggtgttagagagatagatgttgggttttcaaatttcaacatagagaaatcaagtcatttgcaatgcttttgaagaaaagtactgtgtataccctacgagcctgcactccttatgtgtgagactgatgaccattggttggcttattatccattccactaagtgacaaaatcccactgactattcaaatccaggctcctggcatgcctgtaccttagaatcacaaccagctgcaattccaggatggagttcaaactaattgtgggggcatgtgcttcttacatgactgctagattgttcccagatggggaaggttgccctgataagcaacttaaatgaaaataataaatgtattgtttggcctcttt

SEQ ID NO: 272073 - DNA, 397 bp, Homo Sapiens
  misc_feature (50)..(50): n is a, c, g, or t
  misc_feature (64)..(114): n is a, c, g, or t
  misc_feature (330)..(330): n is a, c, g, or t
aggaaaaaaagaggacttgcagaagaaaaagggattaaaacacttgaagnattccagaaggcannnnnnnnnnnnnnnnnnnnnnnnnnnnnnnnnnnnnnnnnnnnnnnnnnnttttttgcattgaagccctgctggggggcaggcccctgggtccccttccccttctgatccctgttgtccctgagtcacaagcttatcccctgtccttggaacccattggttcctaagcagcactggagaatctgagacagctggaagaccagagcaccccattcagcccctctaaatttgtatgtggtaaagctggggccaagagagggcagctgnttgctcaaggccagccatagtaggaggtctaaaacttgtgtcaaccagcgtgctggctggattattt

SEQ ID NO: 272074 - DNA, 382 bp, Homo Sapiens
  misc_feature (139)..(139): n is a, c, g, or t
aattaaagtttttattatattttatgccacaatggtataaatttattaaaatttaattttcaagccttatagaaccattgataaagatttgtcattagaaaaaccccctgagttgattgttatacattaccataacccnttccattggtggattagtgaaatatgttaatagggtgacccatgaatccccaaagaatccaaaactggcctacagcaaacagagggtccaaaaggatatggaacctatgccatgatcccagcaaaacactcaatatctgttttccccggaatgttaaaagacaaagaagaaaacttggggaacactagatgcatatagttctggttctttaagaataaaaatatggccgggcccggtgctcat

SEQ ID NO: 272075 - DNA, 505 bp, Homo Sapiens
  misc_feature (49)..(49): n is a, c, g, or t
  misc_feature (51)..(51): n is a, c, g, or t
ttcccatcgttcacgttcagcagacaagctcttcagaagagcagtgctncnggtttacctaaaaggaaaaccgaacaagatgctcagggatgaggcctttcaggatttataccgaatcctgcaaatcggttcatccacattatgtgcagggttttgggtgggttagaaacgtgcccaagttgttcacagtcccagaggagatgagacccagatcatacataactaatgaccacacacgactcagaatctcagcggggcagaagctggggtacggagcgaggccctcaggcaggcagagcaaaacaggtctgggagctgctgggtggggggattcaacggctgaaaaagtgtccagtttgtatcaatctatcctaatttaacaacacttaggtgactacttcagtgtgtattattttccagggggaaaaagtcctcccggggccttacagatgtttaaagaggcgaatttcacccgagggccagcatggtccatgcagcgtttttt

SEQ ID NO: 272076 - DNA, 219 bp, Homo Sapiens
  misc_feature (30)..(30): n is a, c, g, or t
  misc_feature (57)..(57): n is a, c, g, or t
  misc_feature (124)..(124): n is a, c, g, or t
ccccatgcccatgtacatttttattatatnggtaatgtgtgtatagaaagtctgtantcccaatgttcgtaaatgaaactatgtatattatgcagaaacagtctgttccccctcatcttgcaantcctttgggggatgcagattgtagggaagatgatgtttagtttggccttgaaattatgatatccctcccagggctgttttcaaatacaatataaa

SEQ ID NO: 272077 - DNA, 406 bp, Homo Sapiens
  misc_feature (156)..(156): n is a, c, g, or t
  misc_feature (248)..(248): n is a, c, g, or t
  misc_feature (331)..(331): n is a, c, g, or t
  misc_feature (356)..(356): n is a, c, g, or t
  misc_feature (362)..(362): n is a, c, g, or t
  misc_feature (382)..(382): n is a, c, g, or t
aactcacacacaatggaaagacatgccaagatatcgatgaatgtctggagcagaatgtgcactgtggacccaatcgcatgtgcttcaacatgagaggaagctaccagtgcatcgatacaccctgtccacccaactaccaacgggatccctgtttcnagggttctgcctcaagaactgtccacccaatgatttggaatgtgccttgagcccatatgccttggaatacaaactcgtctccctcccatttnggaatagccaccaatcaagatttaatccggctggttgcatacacacagggtgggagtgatggcatcccgggacaactttcctncatgggtaggttgagggaacagatngtttcntttttgcctttgaggggatngaaaaccttgaaaggagtgggtgt

SEQ ID NO: 272078 - DNA, 115 bp, Homo Sapiens
gtgtattgtatgtttttcgatttgaggctactgtgaggcttgcaaatactgtcttataacccattattttaaactgatgacaacgctgattgcataaacaaacatgcaaaaagaa

SEQ ID NO: 272079 - DNA, 386 bp, Homo Sapiens
  misc_feature (330)..(330): n is a, c, g, or t
aacatgttacagattcagaatatccaaactgtatggtctcgtggggatggatgggacctaccagttgaaaataagaagtgggtgaaatagatgttagctacctggggagcacagctggttcgtctctcacagcaggaaattactgagctctttgttaatatgaaattagttccctgttaggtattttgggaacctaccttagggtcaaatgaccaaaattaggcttgtaaaatacaaaataggtgtttaatgcatctttggaataaatgaactcccccatatattttaaaaaatttctgcaacatcccccacctcctgatccggattctnacttttttcttttcccttaccattatctaggcttgagccttgtttttggttggcat

SEQ ID NO: 272080 - DNA, 460 bp, Homo Sapiens
  misc_feature (377)..(377): n is a, c, g, or t
attgagggaataacttaatttaaaaaaggaacacacacaaacactccacattcaaaaccggagagaacatcagtcacttctgtttataagctgggcacacatttgggaagccagtgaaatggagagaatgcttgttcattgacattgactttcttgtccacgtggggatgccacctccacctggacgtccagcagagagggatgtggcggaaatgtagcgagacttggactggagtcgggtgtccggccagcaggggatgtccgcgctgggcctcccttgcgcctgcttagccggagggaatggtgcttgcggggtggagccgggagggaggagggcctgtttggcctctttcagctcagcctgagccaaagctggntccccagactcttggggccccagtgaccctccttaccttgtccttagatgcttaacatttttgtttggttttcttataaaaat

SEQ ID NO: 272081 - DNA, 410 bp, Homo Sapiens
  misc_feature (38)..(38): n is a, c, g, or t
  misc_feature (45)..(45): n is a, c, g, or t
gcccagaaacccgaggcaacaaacagacgatgcccccnatccccnagaagttcccagcaactcgaacacgccatactccattcaccagcttgctcctctcgtcgtgacatgccccgggactttttgaacaggaggtgtgaacttaagcagctggggctgggcagggcaccccttcttccatgagcactaagtaggtatccagaatgagaaagatggatctcttatccacaatattaagaactgcggtgggaggggagcccaggtttaggtctccctgggaggacgtacaagccagtctgtggtgggaattgtcagctaatgtctccacaagaaaaacattttggctaaattatccactgcgagaaccccaaagtagactggaaaatgaaaatgaaatcaagtactgatct

SEQ ID NO: 272082 - DNA, 643 bp, Homo Sapiens
  misc_feature (41)..(41): n is a, c, g, or t
  misc_feature (73)..(127): n is a, c, g, or t
  misc_feature (268)..(268): n is a, c, g, or t
  misc_feature (476)..(476): n is a, c, g, or t
  misc_feature (629)..(629): n is a, c, g, or t
gagatgagctcttgctatgctgcccaggctggagtgcaggnctcgtcacaggtgtgatcacagtgcactgcannnnnnnnnnnnnnnnnnnnnnnnnnnnnnnnnnnnnnnnnnnnnnnnnnnnnnnactataggtatatgccactgtgcctagctcataggagatgtaactcttaagggaagaacagggttgggtggcactggctcagcagaccagaaacccaacctggcagtgaaaaagccaagaaacagattcatgctacggaanctctggaaaggcttaggatttggaggccccaactacattcgaaagggaggctgaaaatagggggatggacttgagtattgtgcaacatattattttcatttgtccaaatgaaaataaatgaatttaaaaatgtgtccaaactgtaaagggttgtacacaggtaaagacttattctttcatagggttattagattggttcaccagaganatgtggtaggtactaaatccagacctcaacaaaatatttgacattgtctttcattgtaccctttaggaaaggtttgaaaatatcagttagagactgaggtaattaagtgggttagggacttgctgaatgattgtacctagggatgcagaactnactagtggattgat

SEQ ID NO: 272083 - DNA, 415 bp, Homo Sapiens
  misc_feature (44)..(44): n is a, c, g, or t
  misc_feature (66)..(66): n is a, c, g, or t
aactggggtggctgtggaactccagggccaacccttccccccanctccccaatgaagaagccccanccacagacttgtgggggattctgcaactcttgccagaaaatttggtgaaggtccagaaaatcgcctccctgggcacctcccattgtttcaaatgctgcagtgtcggtaggaggttttgtttttctgttcggccacagcaacaatggtttgcaaatcatctgttggccggaaatggcgtacaaacctttggcctgttggtgatctaacagcaagcagcaaccttggttcttggtccgatggttcctccagatttccagccctggaagagccctgtttcttggttcggacgatgaatttcctctccacggcacaagctcgagctctggaatcttcttcacttgtcttcatt

SEQ ID NO: 272084 - DNA, 449 bp, Homo Sapiens
  misc_feature (45)..(45): n is a, c, g, or t
  misc_feature (78)..(78): n is a, c, g, or t
  misc_feature (101)..(101): n is a, c, g, or t
  misc_feature (147)..(147): n is a, c, g, or t
  misc_feature (185)..(185): n is a, c, g, or t
gcttgggcgttgtgggccctccttagggcagccctgtttccaaantgcccatgtggaccccggtgccagctgggaaancttggggactcctccgtcctgantgcgtgtccctctgaaagcagtgaaagtctgtgccctatgcccgancgcgcctaagaaagtctccccttcccagctgttcccanttctctcccacccacccagcgtaactggcaagttaccaaggttgttcctgaaacagcagtgatcatgacttctcctttccagagttttgggtccttctgaattaatggtccttttcgaacaacggcttgcctttacagtgaactgtgattctctcgaagccaatgctttcctgtctgtatttgatgcaggattaaacacttcccagagaggattctagtctggtaaataaccacagtgtaggaactatctaactggcaaaaaaa

SEQ ID NO: 272085 - DNA, 497 bp, Homo Sapiens
  misc_feature (322)..(322): n is a, c, g, or t
  misc_feature (422)..(422): n is a, c, g, or t
  misc_feature (439)..(439): n is a, c, g, or t
  misc_feature (462)..(462): n is a, c, g, or t
  misc_feature (484)..(484): n is a, c, g, or t
ctaatcatgtgtcaaagtgtgggaagaacttttatttattgttttaataaattgtcagtataaccatttttacttgaaaatattataatttttcaacgtaaacaaattgtttctctaagttgaaaattttatgatggaataaaagtatttttcctcaaaacacatagaaattttacaacaatattttagagttaactaaatgtttctttagtagtttagtcacttaaaaagtgatatgattatgaaaatacttaaactttgtcttttaacctatttctaataatgctattggggataatttcatatttttatacctgatccntttctcccaaactttagggtaaaaccataccttcctggtaaccccctgccccaccaaacctggaggtcccccatttaccttctggaatggctggtagggnttggtaaagggttggcntgggatttccggttattaaattnaaggtttttaattatattttanggcccctgggggg

SEQ ID NO: 272086 - DNA, 621 bp, Homo Sapiens
  misc_feature (483)..(483): n is a, c, g, or t
  misc_feature (539)..(539): n is a, c, g, or t
  misc_feature (557)..(557): n is a, c, g, or t
  misc_feature (564)..(564): n is a, c, g, or t
  misc_feature (586)..(586): n is a, c, g, or t
gtacccattaaccatttccacctctactcagccccccactactcttcccagcctctggtaaccatccttctactctccatctttatgaattcaattgttttaatttctagctcccacaaataagtgagaacatctgatgtttgtctttctatgcctggcttatttcacttagcataatgatagatactttctttgtcaccttcccttacgtcattaccatcatcactaccccaggttctcataacagatacaggtatcaaatttctgcacacactataagaaacgtaaatatcctatattatgtgttttccaatcacttgatcagtgttaattcaaatagtggctcagggtccatggtgtctcaattaagagatagtagacacacctcaaaactagattcccaagtcttcaggatgaactccaaatgccttagcctgggtattccagaccctcccagtgtggatccaacctaggctcttttancttgggtcctgctgctccccacaccagcctctgcttactccacatggcaggctgancagagggtcctcactcantcccggnatggctctggacgggttctccngcttggaacggtcttccccggttcctttatactca

SEQ ID NO: 272087 - DNA, 370 bp, Homo Sapiens
  misc_feature (22)..(22): n is a, c, g, or t
  misc_feature (319)..(319): n is a, c, g, or t
  misc_feature (338)..(338): n is a, c, g, or t
tttttgaagctggaagaaactntacagaaaagaggcccattttgcagatatggagaccaaggtccagagggacaggggccttgctgtctagggcacctttgatgggagaatccgtaggcttgatgttgaggtccttcggtttgtctttctgccttttcattgcaactccagggggagagggaccctctggcctcacccttggctctgacctcagtgcggtcagtaaagtctgcctttccctctaactttcacctctttctccccactgcctacgtgcctgccctctgcccagtgaaagtggggagcatcagaagggagntgtgcccccaacccccatntgaggggacagatcagccaaaagcctcaaagt

SEQ ID NO: 272088 - DNA, 504 bp, Homo Sapiens
aaatattctcccctaccccaccctccccatccctcctcagaggcactgggccggggactggagcctgtggtgaggtccttccccttcaaagcctgtcgggggcagccactaaatggccccaagatccccatggactcaagggattccatgtggcatcccttcccgtgctgcagaggctgggaaacttaaccacatttcccagactctcttgcagctagtgtttctgatggcatggaaatcctgccattgaatgcaaacgcacaagactagaatttggaactgagtttcgtggggagagaggcagggcatggagcatccaagcatccattttgctgtgtggatggtggtagagtgcaggcctaatgctggagctggcagttgtaatggtggcttctgaattccacagcttcttgatggaggcaggagccctggcatcttagcccagttcagcagcgttttaggcagctttcctggatgctcagacacttagtaataatatgcttg

SEQ ID NO: 272089 - DNA, 429 bp, Homo Sapiens
ttcttgggcattcttgctggtctgcagtggagtccaaaaacttaaatttcagaaactgaaagcaggattcctcaatattatgtacacttaaaaactccacacatttgcacacttcatccacattctctttacttaaaatcagtttagcagtgtaggcaaactgaattaaaggttcaaatcctttaactgtcacctcttctggaagagtaatgttcagctctccatcagcctggcctacgattcttgagtggaagtaactgctgcatgccgccagcacggaccggtgagcgcggaaccgcggtccctccaccaaaggatgggtgacatcgcacagcaccatctttcttccgctgggtcattaaggctgagaaaacatgggtctatgcacagaagatcataggcaaaaaacgagttctcactcagagacat

SEQ ID NO: 272090 - DNA, 442 bp, Homo Sapiens
  misc_feature (20)..(20): n is a, c, g, or t
  misc_feature (25)..(25): n is a, c, g, or t
  misc_feature (66)..(66): n is a, c, g, or t
  misc_feature (70)..(70): n is a, c, g, or t
  misc_feature (131)..(131): n is a, c, g, or t
ccccccaccagtgggtaaanccccnccaccctggaagaattcccacccaccaggaaccccccaccncctnccggccacccttggaaggaaaataggaaggaccaagcccctccaaacccccctaaattttncgggtatttattaaatcctgtgagtggtttaaggagcggtcagtgtgtataaagtgtgtttgaacattatgccaaatatcaagatgtgaaggactaattcaggatgcaaaaacgttattggggggttgtaaatatcaactattcaacagtttaggatgcaattacgagtgtaaactgtgtgccttatttacactttattgtctcccgcttctcagatagttttgatgtgttgtacagtggaatatcttagatactttttggaaagtatttacataagttatatcacaattaaaatgttgaatttaaaaaaa

SEQ ID NO: 272091 - DNA, 470 bp, Homo Sapiens
  misc_feature (122)..(122): n is a, c, g, or t
  misc_feature (126)..(126): n is a, c, g, or t
tgagactgcatagggctcggcgtgggggtgggaggggagctctgaaagcatctttgccagtcccctctggaccaagtcccacctgcagagtccccagactttggctgcagatgcagtagaancagntgtagaatgaaagccagaccttgggttagttacttcaccaggtgcaaagcccttcttcacctctgacctggcagcagcactggggaggtgggcagggtggggtttattgttctcattttataggtgagaaaactgagtctcaggaaggggcagtgatttgctcaaggtcacacatccattcaggcagagcagggacgaagaggtcagatatttggggggagtcacactggggcactgttctctatccaagcccaagaggccgagacaaagcccaagtctttgaggggtggctttgggccccactctcaccctacttgtacccccgggtcccctgtactcaggac

SEQ ID NO: 272092 - DNA, 755 bp, Homo Sapiens
  misc_feature (487)..(683): n is a, c, g, or t
ttgattcaggctgagagctcaggtgttccctcagaatctctgaatccttcaggaaacgagaaatgtttgctcttcctcctaagaggaagtgactcaccaaatttgtactaaccttagttaggctgggtagtacttcttcccctcaattgtggagagtcattctttccgtgtttatatcctttacttagtaaaatgtgggcatggctcttgtgggccgagagagactgatgggcctcctctgaggttaacaaaaaattttaaaacacacggcccactgtctccatttgttaatattgtcattttggcctctgtaaattttaagtgggttcaaacttaatgtgtttcttaaacaatttggaaagttttaaaaacattttgtccctttatttctctgttaatgggcttttgaaaactatggctatcccttgcttttaacttaaaaacactttcttttgaaaacttttatggctgggtgcagtggctcagnnnnnnnnnnnnnnnnnnnnnnnnnnnnnnnnnnnnnnnnnnnnnnnnnnnnnnnnnnnnnnnnnnnnnnnnnnnnnnnnnnnnnnnnnnnnnnnnnnnnnnnnnnnnnnnnnnnnnnnnnnnnnnnnnnnnnnnnnnnnnnnnnnnnnnnnnnnnnnnnnnnnnnnnnnnnnnnnnnnnnnnnnnnnnnnnnnnnnccctgagcccaggaagttaaggctgcagtgagttgtgatcatgcttgggtgaaagaacaagaccccatctca

SEQ ID NO: 272093 - DNA, 633 bp, Homo Sapiens
ttcggcacggccacaaccttctaattaaacagaaagaacaaagtctaagtagagtgggccaaatggatgaagtattattgtgagatatgagcacctgctttatctacaacagggctccaggagcctcttacattccttagggaagaatagcccatactgggccctaaggcaaatccacaagtagagctacagctcaatcaggacaggcattcccccgctccccgatcgatctctgtaatgggtagcagatggcgatggttccctggattactagagaagggtttcttttttatttattcgtatttcgtctgttgggttttgtactatttaaagaaaccaccttcagtaggacagattttgcagtccaggggaaaaattcagaatatgggccatcccaagtatagatgaaacattgttggaattctcctcaccctggctgtatttttaaaattcagtaaatacgctgtgttcctctcaaagcctttcttaagtgtgcaagtaaaagagagctgtttttctatggatatgatctgacctctcgtaggacacttagcactttccactatgtgctgtgcttatgtagatgacttctctctccttctggaaaacagaaaccatgtgtcagcttcaaaa

SEQ ID NO: 272094 - DNA, 444 bp, Homo Sapiens
  misc_feature (14)..(14): n is a, c, g, or t
  misc_feature (23)..(23): n is a, c, g, or t
  misc_feature (42)..(42): n is a, c, g, or t
  misc_feature (59)..(59): n is a, c, g, or t
  misc_feature (407)..(407): n is a, c, g, or t
cttgcctgcccagnaacaagggnccagtgaaattttaagggnaggaggcacaatctagnaactcgaacagcaagggtccaaccatgaaaaagttaggtatgaaatattgttaacccctagagccaagaattttttcaaaaatataggatagatagcccaataaaatactaaattactctatttggaatactaataaacccagaaacaaaaagtagtgaaacaaaaacaaaatcacagggacaaacagaagaaataaaatggtacacctaaatccaaccacatcaataattatatcaaatgttaacggtctaagccagaaggtgcgtggcaaacttcttctgtaaagaaccagatagtacatattttaggctttgcgggccatacagtctgtatactctgcctcaaanttaccataggcaatatataaatgagtgggtatggctg

SEQ ID NO: 272095 - DNA, 441 bp, Homo Sapiens
  misc_feature (242)..(242): n is a, c, g, or t
  misc_feature (331)..(331): n is a, c, g, or t
ttcgtattaacttctaagactccagtcagtctttaaagcataaatatgtgccacgtctctttatcacagtgacaggagacagacaaattcctaggtagacaaggacagatccctggtgaaactccgccttcaagccaaggaatagtttaaagcctgaaaatcaagctgccagtttcagatagaatccatgaccagagtgagaacttccatccccatcttatccactttctctctcgactggnttccttctgaatggatgccttttaaccagtcaaatgggtgctttttcccaagcccacccatagaccaaacagcatgcacttccccattntaagcccataaaaaaccctggggctcagccttacagatgggcttcctatttttgagtcttttcttgatgctgagggctttctttctgtcacttaataaaattctactttg

SEQ ID NO: 272096 - DNA, 701 bp, Homo Sapiens
ataagccagaactttcctagccatcctagcatgtttgtgccttgtaagatattcccagttacatcctttaatttgccaaagggcagaaaaagaatttggtaagttaactttcccacatgcacaaatttaactgctgttttggtattccacacaggggccagattggatggaagggcaagagggctgctgagggagatcactgcaagtgaacggcaaaatctagtctgatggctcagactaaaaaacttggcctgccaataagagggagcagtgcttccagtgaaaatgtgaggcagtgcctggctttccctgctatactccaccctcctccactccctggactgcctgccaagaaagagaagggtgagcaatagagaaggaagtgaatcactagcacttcacaagtgctgctgcagaggcctgccatagagagctggctgagacctaggtgctctcctgctgatctgagagggcagaaaaataaataaatagaaatgtcaaaaagaggacagcagcagtgtagggaagggaggcagagaggaacaaccccgggcaggaggagtgtgggtcaaatgtgagaaccaataccctccttccctagctaaagttgttcccccatcagcctcagtttccaccatctctgaggcattcacaggaggaataactggtgtgttaaaatccaccaaccacttatatacagg

SEQ ID NO: 272097 - DNA, 387 bp, Homo Sapiens
  misc_feature (11)..(11): n is a, c, g, or t
  misc_feature (143)..(143): n is a, c, g, or t
  misc_feature (290)..(290): n is a, c, g, or t
acaactccccntcctacagataaagaaaatggaggcctccagaatcctggggcaagaagtattttggccaaaggtccccgtagcacgtggtgttgtgggatttgaacccaaggcctgtcctgtgttgcaagagcccacagctnctggatcccactatattaaaatgaccctcctactggcctttccagaaaagcaccccctatgtcccaaggcactgtgctttagatgcctacctcactgtgtctgttgacaacattttaaggaaagtgttgttatttatatcttacagnatttgggaactgaagtttgtgggggtaagtggcttgctgcaagttccacaaggcggagaagccagatttcaactctggtcagtctgattccacccgt

SEQ ID NO: 272098 - DNA, 819 bp, Homo Sapiens
  misc_feature (259)..(259): n is a, c, g, or t
  misc_feature (291)..(291): n is a, c, g, or t
gcagctagtcttccctattgacaggtgaaaaagcaggtccacagctgttgagtgactttcccaaggccacacagaccacaaatcctggctccaagtccagggcgtttccagtaagcactgtccaaatcagtcatggaggtccctgagtgacaaaaatatgcgggaccccttctttccccctcccagttcccgcagctaggctgagtgttaagaggaaggtgccatacaggttcagcaccctgggtcagcgcccagcctncccttaaagccgctgggaggaggcctttgggnagccagctcaggtcagtgtctgctgcttccttacccaggatggcccactcttggggacagacaggcatcctgagaggagggggcctggacctaggtgtcttgccacccaatacagagccctgccctctccctctccttcagaaggaagtatgggagcagttccatcctcaaggtttcttggttcccaggacagaaatttgagtgagaagcatgtgaagagagggatgcccaggggcccttagccatggtggccttggacaagtttggctttccccatctgtaaaatgtagataaggatggacccacctccccaagatcctgcctatctgtgagagtccatgactaagtgggccatgggctggactgagttcagtgctcccccaacctgccctcctcctctcccccacagagcttcccaatttacatgtaaaccttgggcatcaaagtgacagctgatagcccaggtttgcccacaaatgtgctctgactggcgtgcatgttattaaatttgataagatgcatgatggc

SEQ ID NO: 272099 - DNA, 755 bp, Homo Sapiens
  misc_feature (23)..(23): n is a, c, g, or t
  misc_feature (25)..(25): n is a, c, g, or t
  misc_feature (121)..(121): n is a, c, g, or t
  misc_feature (312)..(312): n is a, c, g, or t
  misc_feature (478)..(602): n is a, c, g, or t
cgtggaactaggcgaggcgcttnanctatttatttacagacttcataagcatctattctaaaattactcactaccaattttacaaggcaaaactctatactgtcctcacagctttagtganaaacaactttaaaaggggaaaaatgaaaactagaccacaaagggttggaaaaatcttgcagaaccagctctaccacttaaggttgtttgccgctctgtaatccacatcgagctaattgtaagatttccctgtaaattcagactcttgaggttttcacaagaaataatctgagaagagtccctagcttcccntcatcccattaatttctagacaagagttttacaaaaggccagaaaagaaacagccttgactgggagtatcgcagattcctaagggaaagaaatgccctgctttgagcctggagataaatagcaccaccccctctttaaaactaaacattagggaatgtctcatgcnnnnnnnnnnnnnnnnnnnnnnnnnnnnnnnnnnnnnnnnnnnnnnnnnnnnnnnnnnnnnnnnnnnnnnnnnnnnnnnnnnnnnnnnnnnnnnnnnnnnnnnnnnnnnnnnnnnnnnnnnnnnnttagcccggtgtggtgggtgcaagagcctgtagtcctagatactcaggagtctgaggcgggaggattgcttatgcccagaaggttgaggctgcagtgagccaggatggtgccactgtacaacggtctgggtgacaaagggagatgctgtcttt

SEQ ID NO: 272100 - DNA, 625 bp, Homo Sapiens
  misc_feature (56)..(108): n is a, c, g, or t
  misc_feature (124)..(132): n is a, c, g, or t
  misc_feature (136)..(206): n is a, c, g, or t
  misc_feature (273)..(273): n is a, c, g, or t
  misc_feature (286)..(286): n is a, c, g, or t
  misc_feature (365)..(365): n is a, c, g, or t
gagtacagtggcccaatcatagctcacttgtagccttaaactcctgggcccaaacnnnnnnnnnnnnnnnnnnnnnnnnnnnnnnnnnnnnnnnnnnnnnnnnnnnnnttcccagctaatgggnnnnnnnnnaaannnnnnnnnnnnnnnnnnnnnnnnnnnnnnnnnnnnnnnnnnnnnnnnnnnnnnnnnnnnnnnnnnnnnnncaccttagcctccaaaattgctagaattacaggcatgagccactgtgcccgggaccagaaacttgcntttaattaaaggnacctcagaactcaaccttccatagtactgacctcagtctgttaaatatggtatttattgtattaatgtctatgtacttncaaaatgttgtaagtggcatgagatctgagggtctgtctccctttgctcaccactatatctccagcatccatcaaaatttaagaatccctcagatgtttaacacatgaatttctatacctcagaagttacctgatcacagtatggttagtacaatggctaaattggagtcaaagtgatttggttttaaagtctgaagtactcaatacaattctgtaaggactaaatgatacaatgtccataacatgcttaggatagtttc

SEQ ID NO: 272101 - DNA, 695 bp, Homo Sapiens
aagactgcatagggctcggcgtggagcgagcagtcacaggtgggtgaatgggacaggaagttgggtatgggctggggcttggttttcaagactggggaggagtttgtagaaggtgctatggggccaggctccttggccacagtggccaccagctctagagcagggcctcttaggaagagctcctcctctgggagctgtggaggacaggggacctgggcctgctgcttccccttctgcaggtggaccttcttcacagagtccaggtgctgagtcaccccaccaaactctgtgcaagactcaagcaagaacagaacctgctgcaggtccgactgacagagatcaatgtcattgcgggccagctccagctcgcccttcagcaccaggaacagggcacactggcgtggtatctgcagctttgttgtaagttttagggcctccaagcaaaaggccttggcttcactcacactacccaggcggcccaggtggcagaccagcttctctgagcagctcagcacctctgaaagaacctgccatttttgtaccagattttcaccatagtccaaaaacgatgtctccacagctgctttctgagttgagagaatgtcactgcccatcagcaggaggatgatgcttcggaggagcttatgggagtctatgagagctatctcaggtgtctgccaccttgggcacagagc

SEQ ID NO: 272102 - DNA, 605 bp, Homo Sapiens
  misc_feature (53)..(92): n is a, c, g, or t
gtaagggcaaaataatacccctttctctatgtatctctgtatgcacacgcacnnnnnnnnnnnnnnnnnnnnnnnnnnnnnnnnnnnnnnnncattcatgtaatcaccacttctcgatgtctatttcaaatcaaggctcctgagtagggggtgaagtgagccagcttgcacctcaggctaacacataggactttgctcagccatgtcccctgggatacaggggcacaccaggaccaagtggcagacctgtgggctttcagcctcgggggccagggcatgcctgccaccccctgacaaaaacaggttccacagtgctacccttgcttcctgccccttgaggtgggccaggctggctccctggctatgcagggatctctggtcccccaggagaccttgggggccaggcaggtaaggatcaggggtgataggggagagcaattactttgttcactgtatgcacccgcgggggcctgggagtccccatttgcaggtgggtaggcctccagcccacaccacccagacctaggcttccctcttctcaggatccaccacagggttaggggacaggaagcctgttctattctcaataaatcttacaaaattcc

SEQ ID NO: 272103 - DNA, 456 bp, Homo Sapiens
  misc_feature (49)..(49): n is a, c, g, or t
  misc_feature (65)..(65): n is a, c, g, or t
gccaatgcctcaggggggtacaaaagggcctcaggcggggtcacccccngggaaaatgcccaagnggaataaaaaccccaacatcaaagtcgggcttcccatgcatccccctacccagcgggtgagtgtgggctgggcaaccctcgactcccctggtgctctttgcagagttggggcagtgaaattacccttttgcttcaaggcttcaccctagatgggtacaataaaaaagaacaatgggctttcaagcaagcagacaaaatcccactttccaccactgactagctgtgtgaccttggacaaagtgacctaatttttctgagcctgtttctcatttgtaaatggtgataatacctacctcatagggttgttgtgaggattaaaatgaggaaatgaatgtaaagcacttagtacagtatatgaaataatgggtattcaataaatgatagtttctac

SEQ ID NO: 272104 - DNA, 370 bp, Homo Sapiens
  misc_feature (44)..(44): n is a, c, g, or t
tagtgaacatcctatgggtaaagccccaggatgctgcctcaacntccctacccatgccgtggggcagcgcccctccccaccccccaaacaaagaataatcccagcctcaaaatgttaattaagtgccccaggttgagaaactctggattaagtaaatagggcatatattgatttttggctctgagcttgccatgtctgtggtgttaagatcaagtccctgtagtgtggaggaaaaagtgttgagaataacaagactgggggctctagttctggatccagcatgtgattttgggcaaatgatctaacctctgcaagcctcagtttcttcatttgttaaaaatgggcgtgggttgggtgcagtggctcacac

SEQ ID NO: 272105 - DNA, 241 bp, Homo Sapiens
  misc_feature (79)..(79): n is a, c, g, or t
  misc_feature (84)..(84): n is a, c, g, or t
ggaagccaaatccagaatgggccaagtgacatgtcaccaagttaaggtgaaggagggagagcccaggtgtggttggggnaggcntgagagtgggggtgagatgacaatagagaaagcagagctttctccccagagttgcaggatttcaggtatactgtcccctctggcttatggtgttgccccttctttcttcttcaaatacccctgacaaagggatcaatcctacagagtttattaataa

SEQ ID NO: 272106 - DNA, 392 bp, Homo Sapiens
caggtctggagctcagtaatcctgtggcttctacctcactctgaccaccttgttttctcattctgcttctcttcctcagaaaaggtttattttgtgtttaagccccagcaaagtctttttggttctttctttttatatattatttatagttcctccatatttggagtagagaaagtgctcagagtatgaatttaccaaactattttgagcagaagtttaatgtaaacttttgaagagtaaaagattcatcaaaactcttataaagctaaaacaaccatttttaattttaaattcgcatagcatataaattatcctcaacaaccttttatcctaaaacaacaaaagaatcttacatggacacattcgggtgatggtaaaagaatttaaaataa

SEQ ID NO: 272107 - DNA, 159 bp, Homo Sapiens
  misc_feature (98)..(98): n is a, c, g, or t
ggcattagatttaagtcccaccccagcaatttaaaatttcctcactcggtcagacacagtggctcaagcctgtaaccccagcactttggaggcccaancgggaggaactgcctgaggcccaggagttcgggactagcttgggcaacatggtgagattct

SEQ ID NO: 272108 - DNA, 485 bp, Homo Sapiens
  misc_feature (431)..(431): n is a, c, g, or t
tttaaatcccaagatggattaaaatcctatgcaatttcccctgacctagagctatcccagcattctcaaagctgcatgactcaaaggaagacatcccctggagctcttcttactaatcatagttaacatttattgagcacgtatcacattatctcatttatcatcacaaaaaccctacgaaatctatttgttacagatgagaacacttggcttagagaatctatgtcacttgccctaagtttataggataaaaataggataagcaggggtttgaatccagatctctctctatccagagcccatgcttttaatcacaggcatcacttctagggtctgggattttaaccgtgtgtacaggatttcaatttcatttcaaggttaggggaaaacgctggggggtgcttatttgtcatcattgctgtgattagcanagtgagaatagagacaggagttggaaatttccctgcccttagaactctgaaaga

SEQ ID NO: 272109 - DNA, 370 bp, Homo Sapiens
  misc_feature (15)..(15): n is a, c, g, or t
  misc_feature (24)..(24): n is a, c, g, or t
  misc_feature (37)..(37): n is a, c, g, or t
  misc_feature (76)..(76): n is a, c, g, or t
  misc_feature (90)..(90): n is a, c, g, or t
ttcctcactgtatanccttagcanccctcagcatacncctttttttccttaagtggagaacctttcacccttttcnccttaaaggacacncttcatgacttcctctttggcacatcaaaattgctaacatgactactcttgcattttgggtccattattaagttaaataaggattgttacttgaacataagcactgtggtacccaacagttgatctgataatcaagatggctactaagtgactaactggtaggtagtgtatgtatacagttacagcatggataagctggacaaagggatgaatcacatcctaggtgggatggagtgggacagcatgagatttcatcacactactcagactagtgagcact

SEQ ID NO: 272110 - DNA, 445 bp, Homo Sapiens
  misc_feature (18)..(18): n is a, c, g, or t
  misc_feature (114)..(114): n is a, c, g, or t
aagatacttttatcctantccgggtccaaaagttaatttatggaagaaaaaaggaaaacatttgggaaaagaatcaagaaaatcggaggaaaaaatggccccgggtggaggttnaagtactgtggcaaaagtctggttccttactcacccaaactcaatttccctctccctaggcacatagttaactcccattaccccaggttcctttgtggttaggcaaagtcatgtgactgagttacaaacaatggaatgtgggcagaaatgcaatgtgcctttcccagccatggcccttgaaaatgtgcctgaaaaaggcacaatccttcatgcttcttacccctttgtcagcaactttggaaaccgtacattgaagctggaggagctacaaaatggaaggaggctgggttcttggaagagaactgtcttgcccaacagaaacaccaatttt

SEQ ID NO: 272111 - DNA, 473 bp, Homo Sapiens
  misc_feature (20)..(20): n is a, c, g, or t
  misc_feature (53)..(53): n is a, c, g, or t
  misc_feature (65)..(65): n is a, c, g, or t
cggaacattcactttttgcntccggtagtaaggcccatcatgtccctcacctnctcccaattgcncccttcctaaggtcctctggattcctaaaaccccaagtctaccccttgtgaagaggccagaccgggcaagtagaaaaggtctaggactgaacatcagacttgggtcccagttcctagttctactgctaaacatgtgaccttcattaagtcatttaatatttctaaatctgttttctgacctgaaataggaaagccttccctggctaccttgcagaattgctataaggatgtgaaagcactttgaaaaagtataagtggtagagaaatatgtgtgtataattatatgtttacaaaaagatatatcaaatgacaaaattttagaaatagagaatatatctgtgttaccaggagctagagatggggaagggggttgtgggaggagaaaattgctataaaattgctataaaa

SEQ ID NO: 272112 - DNA, 436 bp, Homo Sapiens
  misc_feature (26)..(26): n is a, c, g, or t
  misc_feature (138)..(138): n is a, c, g, or t
  misc_feature (379)..(379): n is a, c, g, or t
  misc_feature (396)..(396): n is a, c, g, or t
  misc_feature (408)..(408): n is a, c, g, or t
tgcccagggtcggcgcgcgcggctgntctcagaactcatgcagctgttcccgcgagcctgtttgaggacgcgctgccgcccatcgtgctgaggagccaggtgtacagccttgtgcctgacaggaccgtggccgaccgnagctgaaggagcttcaagagcagggggagatcagaatcgtccagctgggcttcgacttggatgcccatggaattatcttcactgaggactacaggaccagagtcctcaaggcctgtgatggccaaccgtatgctggggcagtgcagaaatttctagcttcagtacttccagcctgtgggggaccttagtttccagcaggaccaaatggacacagacctttggctttcaggggattcagaantcacgcatttggttgantgttgggattcntcaccttccgagatgttggggagttggt

SEQ ID NO: 272113 - DNA, 235 bp, Homo Sapiens
  misc_feature (30)..(30): n is a, c, g, or t
  misc_feature (44)..(44): n is a, c, g, or t
  misc_feature (50)..(50): n is a, c, g, or t
  misc_feature (68)..(68): n is a, c, g, or t
  misc_feature (123)..(123): n is a, c, g, or t
  misc_feature (136)..(136): n is a, c, g, or t
acccaatcccttgaacccaaggtgcccttnaacccaaaaggaanccccgnaacctgcgcacctgcaanaccttcaacctgtggctcccctcgcctgtgccacaaaccccggccgtatactccnaggattcccacangggcctggcctggggccacagagtcatcaaacaacaggcccttttcttcctccaaatcagcttaagaaaagaaactggcactgggcacggtgcttatgc

SEQ ID NO: 272114 - DNA, 454 bp, Homo Sapiens
  misc_feature (202)..(216): n is a, c, g, or t
aaacaaacttacagagcagctaaaaactggtacaaatctagaagcttaagttatagtaatgatttccttcttgaagaggagggttaaaataattgaagaatagcgagccatgttttagctttagtgaatatttccaaaatctagcagtatggtttatgctcactttttcaggaggaatccagatacttcttgattcaggccnnnnnnnnnnnnnnnctggctcatgcttcctgccacttcttttcttcatcagcgcctgtaaatagacactgggggatgaagacagagggaaattaaagtttttcatattttctctgttgttagtaggttgaagggagggtgtgtgacagggctgttaaaagccatgcagctttaaggctggaatttcaagctagcctactgtgtgtgtggtcaaatgtgggacatgatgtgtctcatccagggcttgactgct

SEQ ID NO: 272115 - DNA, 458 bp, Homo Sapiens
cgcacaactaaatcagaatccttggagctggatctgaaaaaaatacggttgaaagtcgtgcaggtgattacaatgtgtaggcaaaccagaaaaccatggctttaaccagcagcttttgttagaaatgatttctccaatgaatgtagaaacgtttgctgctgaattgtgacctttccattttacctgcttttcctgcaaagtatattttgcagacccaggcagtgctgctcgctctgttcctggttcacccagtgccgtgtgtgctcagtgcatcctgtgcacgggtcactgtgtgccctggcctgggtgagcatcattcttcggggagaaccttgatgaaaacaaagctgcattccaaaaagttaaaaccgtgctacttactgtactgaggtaaaaattaaaagacctaggggactcttccaaaagttaaaacgtaaataaatatcttgtaacattaa

SEQ ID NO: 272116 - DNA, 473 bp, Homo Sapiens
  misc_feature (17)..(17): n is a, c, g, or t
  misc_feature (39)..(39): n is a, c, g, or t
  misc_feature (102)..(102): n is a, c, g, or t
gaatttccatatttggncaaaacctaagccttccataangggaggggagaaataaggatcccttttaaggaccaaggcaaatgcctaagagtattttggttncccccccagccttgcctttaccaagatgtcttgaagggagtgctagatatagaaaggaaagcctgtgttacccaacccatcacaaaaacacatttaagaaccgtagactagtaatgctataaagcagcaacacaatcaagtctgtgtgataaccagctaacaacatgatgatgaaatcagacctgcacataccaatattaaccttgaatgcaaaccaggctgaaagccctaattaaaaggcacagaatgacagcttggataaagaagcaagatcgaactgtatcctctctacaggactcatctcacatgcaatgacactcataggctataagtaaagggatggagaaaaattgcccaagcaaatggaaaac

SEQ ID NO: 272117 - DNA, 457 bp, Homo Sapiens
  misc_feature (25)..(25): n is a, c, g, or t
  misc_feature (47)..(47): n is a, c, g, or t
  misc_feature (59)..(59): n is a, c, g, or t
ccataaataccaaagcagaggttgnactcccccccaatccccgagtnaacccccagtcngcaataaacacccatgttaaaaggtgccagatagaagacttggcctcaaaaaggcttggagatgagggaaagattgggaatataatgatggttttgtctgttcccttaaactaaagtgcctcctatgtatattcttttcctatttgtagcaggataaatttggtctggctcagttttggaactgtattttgaaaatggctttgtcttacagtttaaggaatagacaggtggagggaaagtcacataaaggagcaagtttgtgtagctgtccctcttgccccttttaatcatcctcctttgatatggccatcctggtgggcctcctttgccatttccatttttggtttctttccctgaaaactgtgtgcaggtaattccatgtgccattgttgaaaaga

SEQ ID NO: 272118 - DNA, 502 bp, Homo Sapiens
  misc_feature (41)..(41): n is a, c, g, or t
  misc_feature (57)..(57): n is a, c, g, or t
  misc_feature (79)..(79): n is a, c, g, or t
  misc_feature (90)..(90): n is a, c, g, or t
  misc_feature (99)..(99): n is a, c, g, or t
  misc_feature (197)..(197): n is a, c, g, or t
  misc_feature (271)..(271): n is a, c, g, or t
aacctacagaacctacggtggggatcccccaccaataatangaaccataaaaaaaanggagtaataatactgtgttccngggccaacccngtcccccanacccccagaaaattaggttgccagctgaaagtagctgcctattcccctgaagaatagggacctgttctggacagaataagaacacactggaaataacnagtgttaactatacagataccctcttgtttcccagacccgactataaacaattcaaaggcagaaactttgtgcntctactttttgattctctcacatgcatagcagttataaacacatggtaggtgtgtaaatatttactcaatggatgaggtcagcacagtagaaaaaaatgagaaagttaaaacaccacagaatcatgggattttagagctaggaaggtccttagagatattgtttcaagtacctttagtataattgaacaaactgaggcataaaaattaaccagcttgcctgtctaacatac

SEQ ID NO: 272119 - DNA, 663 bp, Homo Sapiens
  misc_feature (22)..(22): n is a, c, g, or t
  misc_feature (33)..(33): n is a, c, g, or t
  misc_feature (74)..(75): n is a, c, g, or t
gcaagatggcggcggcgtggcntgaagaggcgngcggcccctgcaggtagtggcgcgcggcttccgcgaccagnnccccggagactctgggctgcgggtgggaactggagcgcagagtccgcggccggcacggaaaggagaagacagactgctgctttggacctgttggtaatgatggcctgagctaaacatctaactagaagggatacccttccatttcaaagaacagaatgctaaggaagctgtggcaagtgattgggagttgtgcttcaaaaatttcagaaattcagcagtattttatctgccaaacaataagctctttacttgattgcaccatgagaaagctgctaatgagacttgttgagcacaaaaatgggacttgaagaaccaaaagccattgttttcaaatgaagaacactgaacagttttaagcctcgatgctttttaatcaccactgagcttttcctcataacatcagaatggcaagcaggcgaaaatcaacaacaccttgcatggtccttgccagtgaacaagatccagaccttgagttgatatcagatttggatgaaggtcctcctgtgcttacacctgtagaaaacaccagagcagagagtatctcaagtgatgaagaggttcatgaatctgtggattcagacaatcagc

SEQ ID NO: 272120 - DNA, 452 bp, Homo Sapiens
  misc_feature (410)..(410): n is a, c, g, or t
gtatatatacaacccacaaaacatacatactatacatagtttgtaacaacatgaagtcatactgtcttaaaatgatgcactcacagacagacactatcctggctgaaataaatcctattgtcatcaggctgctagcttttgagagtcttgactcaggttagctacttatattctgcctactcttcacccttctttaacgtcttggcagttctttcagaaccaccctccgcaatccagacagatttgtttcccaggatcacttgattggactttggaaacaagaaagagcatgcagagggagcaggcaattcttagccactgtccctcacacctgccctatacgtgtgatgtgctctgtcctgttggccacatttagtgttagaaagcagttattcaaagctctgtccctncctaccccccttgggcttttctgtaggagcaccaaaagtgat

SEQ ID NO: 272121 - DNA, 560 bp, Homo Sapiens
  misc_feature (11)..(11): n is a, c, g, or t
  misc_feature (32)..(32): n is a, c, g, or t
  misc_feature (38)..(38): n is a, c, g, or t
  misc_feature (49)..(49): n is a, c, g, or t
gggtcttgtanggatttcaacttccacttccntcccantccccaaaaangccaaaaagaagaacaatatgtacggttggacaagcagtggatttgaaagtatgtctccccataaaagaaactgtgtcctcccagacaaaaaccgcagatgggcacctcccgtctcaggatcccagaaaacaccccagggccctgctgctgggttccttcccgatgaaccctggtaagaggagggaagagcttttgtatatctacacttgcaaatactaaagccacttcccagttcaaaggctaccggagaagatcctctcttaatgggaagggagagagctctctgactgccttggaaaggattgaacataatggagaaagaaagcagtaattgacatttcctgcagagtctgtggcaagagggaaagtaaccatctatgctgaaatgatctgtctagttcccattctctgttcaacctcagtgtttcaaaagttcctaataaataaactcatttgagttgaacctacttttatgtagaaataaataagtttctccatcattcagataga

SEQ ID NO: 272122 - DNA, 537 bp, Homo Sapiens
tgtttgtttgttttttttagttcagcaacaagtaacagaaactacgcagaagagtaacagcagacgatacgatggactggaaagcaaacagcctgaagaaaagggttaagtagcaaatgcaaagcagtagaaagggaaaaggaaagagcttatgagaaagctttcaagcagagtttaaagtctggcatatgactagagagagaaagagcataagaaaaatccaagatgacgctgacgtttctggctctgagtaaatgagtgtacaacagtgcaatatggaagtaaggagatataattgagagtgagagagctgagctgaaaagagactaagttttgtgtaggacgagttatctgtaggacagattgcttatggggccgccagatggaaatgtgagtgcaaacctcaggtccagagacaccagtttaatgacatcggttttctcaaagttatctctgactctattccagtttgttaactttccttttttaagagtagtgccctaaactgagcaacgagaagaaaaatgtcgccttcct

SEQ ID NO: 272123 - DNA, 635 bp, Homo Sapiens
ttagcccatgctgtcatttgcaatcacctgtgaaacctatgaaaactatacctgcccaggctcagcttggagattctgattcagcgtgctcaggcggggctggacatccatgtttgggaagagttgcgcgggtgatttcgatgcgtatatgaccctggttgaaaactgctaacctggcaaatgcccgccagtctcacaaagtccagccaaaatgttacggcctctgagaagccttctgtgagtgatgagcaatccccatggcaatatttattgagcactgacaaagtgcccaggacctgtgtcaggcacaggagtacatgttctttgccccagactgagaaaacaggcaatatgtatgaaaaatgctaatgatagaataaaagtggggtactatggggagccccatgggggagataccttaccctgtcagggatgtgatggggaagtcagggaaggcttcctggaggaggggccatcttagctgcatactgaaggataaagaggtgttaaccagccttgggtgggtggagaagagagttccaggtaagtactcgggcatgacagattagaggggatgaagttcatgcaggcttaagcatgaggtccaaagaagtgggagatgctacatgaggcta

SEQ ID NO: 272124 - DNA, 549 bp, Homo Sapiens
  misc_feature (501)..(501): n is a, c, g, or t
cctctcccgactgccccttctgtccaagagggtcaccctgacccgccccaccttgccactggtctttgtactccaagcctgacaggtcccagccacactgctactcgccctcgaaggggctatgagcaaggtaggagggagctggtctcctttcttcggccccacccaggccctgagcaccccccacccctgtgaggccccaggccttaagatcctggaggggtcatgggtttgcgacttgagcagagcggaggaacagggcactggaaggccgacgagctcagcatgcgactcggtgacggaccaggaatcgcagggccggtgtactttttgtggttgtcattggtgtgttgttgcacattccaggacgtcagtattttaacaggttctaagtgcctttctatcgtagcttatgttttcctcctcttggctccacttgctgttagcatagagttttaaaaaaagagataagctaatgactataacaatatattcctccantgggagaggaagtttataaagaaacaataaaagtgagttgcaaagata

SEQ ID NO: 272125 - DNA, 438 bp, Homo Sapiens
ctgtcctctgtcccacacttacatcatctagctgcctcagagaagcccacctaaattgctgttattgatgacaaaagctacattcagtcttagtacaggtagcgtgttcagatagtaagcttcatcagctgccatgctgtcagagaaccacatgagacagctcagcattcaccgtgagctgaacttcattcaggcttcttcaagccagcttagccaggaggcgaatgtgagatgagtttctcatgtactgagagtttttgtgtgttaaaaattatagcatgatgcaaacaaaaaatgcattgacttattttcatgactggatgtcgttgtgctttgagggtaatgggcaggcaattgctttctcttattgctgttggattaaaaaggtgccggctacaggtattgacttgataatctcaccaggtattcgtgcagagc

SEQ ID NO: 272126 - DNA, 384 bp, Homo Sapiens
gaggacctatacctttgggatatacatgtttaagcaaaattaaccctggcaggggagatacattgagaagggttgattgaagcagtaagagattggaagggggaaagacaaactcagaggctctggccaccatgcatggaggaaatgaggaagattactgctgtaaaattcagtgaaaaaaatccatgtgctactaggaaaagcatggacttcaaaatcagaaaaattggagttgaatcccagcccaacaactcataaactctgtgacttcaagcaaggtacccaacttccttaaacctcattttctcaacttataaaatggatgtgaaatcagcatacataattgttataaagactaaattataaaggtttttaaatgcttaa

SEQ ID NO: 272127 - DNA, 452 bp, Homo Sapiens
  misc_feature (21)..(21): n is a, c, g, or t
  misc_feature (28)..(28): n is a, c, g, or t
  misc_feature (52)..(52): n is a, c, g, or t
  misc_feature (104)..(104): n is a, c, g, or t
  misc_feature (114)..(114): n is a, c, g, or t
gaaagacctatttggtgaaanagtttgnccatccctgcgaaatgctggctgnaaaagctcgggaggggcgctgtgtgtacatcacccccccagggaggcccccnggcagagcanggtatgaccgtggcgctgtgtccatggtgaatttcccccaagaagcatttccatcctgtgattcccgtatgaaaggctttcctaagccctgaaatttgcagggtcatttccctcagtttgtgtattaaagaaaagctgccccagccaagcgtgagctatcacaccctggccccagaagtgtttcaacatggaaattttccttagcccttctgtggttgtcatggcttaatgtgtgtctttccagaactttgaatgtttgcatacttgtggatgtacctttcaaatatgtttgtcttgtgtatcatatataaaatggtattgtgttcattgctctaaaa

SEQ ID NO: 272128 - DNA, 360 bp, Homo Sapiens
  misc_feature (14)..(14): n is a, c, g, or t
  misc_feature (59)..(59): n is a, c, g, or t
  misc_feature (67)..(67): n is a, c, g, or t
  misc_feature (106)..(238): n is a, c, g, or t
cccggactcaaganccttcccaacttagcccctctagtaggaactaacagcctgtgccnactgtaantggctaaatttttaatttattttatttttgccagaaatnnnnnnnnnnnnnnnnnnnnnnnnnnnnnnnnnnnnnnnnnnnnnnnnnnnnnnnnnnnnnnnnnnnnnnnnnnnnnnnnnnnnnnnnnnnnnnnnnnnnnnnnnnnnnnnnnnnnnnnnnnnnnnnnnnnnnttgttatgaaagttttcatttcttttgggtaaattaaataccttgtagtggaattgcctaactcatagggcagatatgtgtttactttttaagaaactgatggcccaggcatggtggctcat

SEQ ID NO: 272129 - DNA, 506 bp, Homo Sapiens
  misc_feature (16)..(16): n is a, c, g, or t
  misc_feature (38)..(38): n is a, c, g, or t
  misc_feature (51)..(51): n is a, c, g, or t
  misc_feature (81)..(81): n is a, c, g, or t
  misc_feature (105)..(105): n is a, c, g, or t
  misc_feature (307)..(308): n is a, c, g, or t
ggacccaatccccggngaacccccaggggcccagtgtncatcctgaaaacnaaaaacctgaaacctagccccgggtatgcntcaacacgagatatcccaagcaanctgcagtttataccatataacagaagacaattcaacaatgagaaaaaggaataaacctgctgacacacacaataacacagataactctcagaaacaatgctaaattaaagaagcccagacacagaaaagtatatacctatatgattcccatttttatgaagtatagaagaagtcaaagtaatctttactgcaaaacaaaaannaaatcagaagaatgactgcctctaatagaagaaaatggtgtgtgaaattagctgaaaaggtgtgaaggagatttctgagttggtaataatggtctgtatttttacaagaatttgcattaaataggtgtgtgcatttgtcaaaactcaccagcggtacacttcagatctgtgcatttcattgcatgcaaatttaatctt

SEQ ID NO: 272130 - DNA, 790 bp, Homo Sapiens
ttttaaagactagtcaagtgcaatagtaagggaggaaagactagaacgagactgttcgatccgtaactgactgtgaacaatcaactgagctaactcactacctttggacgagcatcaatgcttttctggagtcaatacacagagaggcttttctcatcaacaactgaaaacaccttggttagaagctagatttactagagtgaaccagagaggtagcatggtatatggagtgacccagacctcagagtaagacagccccagattcagctcccatatcagcctctcatttcctacatgctttcgtgtaaggaacagaagtaattcatgagaagtacttagtgcctggctgaatcatgagcacacaataaacagcagctcttgcaaggatcaacttgactcaccaaccaatgagagagagctaaggcaggcaaaggcacaggagaaggccaaaaacctcactgggcgaatacttaactgggtctcagggagccctcacgattcagaatgtttcataagtccgtcagactgtggtctacccaccataaaacacagaactcaaagtgatatgagcataatgccttaaatctcctaaaagatatgctagttttatcagaagacttccttctctactaataataaatattttcttaaaaaagacagcaaaattttgagtgacaaataactaaaataactattccatactgctgatgaggatctttagtcaaatgtaggtttccatcaacagaggttgatcttatatctgggcatgcttgctcaatcctagttttag

SEQ ID NO: 272131 - DNA, 205 bp, Homo Sapiens
ctttacaacatgagtgacaaagcagacaggagctcagggatgctacctgcatcattaaggaatgatgagactttacctcttggctttcctctagcgctgattatgcaatgagcaaacagcagggactacatacatgatgagagaattaaacacaagggcaagggtctgcagaaacaggaagaaaaagaagaaaggaagagaggag

SEQ ID NO: 272132 - DNA, 395 bp, Homo Sapiens
agagagcaacgtcttgctgctcttggaatatctggctataaactagtccaaagtccaggaacacttattttcccttatttgggccaatgtttgttcacaggtagccagcctccctcccccagttcaagcacttcattcaagggtgggtgtggtttctaatcacagctctccaggagaggaggaataagaaaagcaaaaaggctgtttaacatgataaagggggagggcgcatgggtgaggggctggagcaaataagtgttggaaatttacttattagaagtatatccatttcagtccttacatttaaaaaggagccccctttagcaactgtcgctaagtattgtccagagggagtgggtttatacttttaccaaaattataacacaagttcctta

SEQ ID NO: 272133 - DNA, 636 bp, Homo Sapiens
tcagtgagacttattcatcagatgggggctcttagtgggtgagatttcacacagatggatgggagtctgctggaaggaaaaattcagagcattgaaggttctgcctgtgtgagtgtttgttgggtgaatgaggggactgagtaggaaggagggcaggcaatgaggctttaaagggaagaaggtaggaaatttgaactcatctttcctagtgcttactctcagcccattccctggtttgtggacctgaccccacactgctttttccagcaccactgtctgtgtgagtccattcacttcaataccagagccacctctttgtttcctatttactaagaagccataccagcatgagatctccttgatagtgttaaatcccactgtggaaagattgaaaaatatctcccagccttaccagaggttacgatctagtgtggaggcaaaagacattgagaagaaaaaagcaggtgcctcctcctggctctcctgttaggttaacataatcataattcccctttgaaatgtctcccacatttgccctttaacttcctattgccatgataagcatttaggttattacctaaataacttgttacctcatgccttgattatctaaataaattcttagatggcaaaaaa

SEQ ID NO: 272134 - DNA, 538 bp, Homo Sapiens
  misc_feature (241)..(241): n is a, c, g, or t
  misc_feature (286)..(286): n is a, c, g, or t
ttccttccttttcaccttccccaagacagcttacttgcaagtgcgctcgacacggggtccccctgcactgtattggaggcctttccagcggcctacaaaggcacgcgcccttttgccagtgccaacagcgtgctggacccccatcctcttctacttcacccagaagaagttccgccggcgaccacatgagctcctacagaaactcacagccaaatggcagaggcaggggtcgctgagtccntccaggccctgggcagccttcatatttgccattgtgtccggggcnacccaggagccccaccaaccccaaaccatgcggagaattagagttcagctcagctgggcatggagttaagatccctcacaggacccagaagctcaccaaaaactatttcttcagccccttctctggcccagaccctgtgggcatggagatggacagacctgggcctggctcttgagaggtcccagtcagccatggagagctggggaaaccacattaaggtgctcacaaaaatacagtgtgacgtgtactgtc

SEQ ID NO: 272135 - DNA, 481 bp, Homo Sapiens
  misc_feature (408)..(408): n is a, c, g, or t
agacaagtcagagataaaacagtgactgggtcgaagggcattctgggcgcagggaacagtacctaccacagaaggagctgagtagactggagcaagagcaagcctcttcacatggctggggactagggcacgtggctgtcgttaagggcggccataaatgaagctggaaagtgggcttggaccaggtatcaagggccttgaaggctgtgcaaggagtttttgttttcgttcagtagggtcttgacagtcaagattaagcaaccgcaaacttttaacctctttcgccatcttctgtctctttcctcacaggattaaatttgtttcaccaaaacagtttttgaagggcccatttctttgatccacaggtatttattgcaggttggatgcttcccccgcatttacattccntgaacacgaggttttaggggagcccttacaatgttgggaaagctacacggccacagaccccaaggcaatacgg

SEQ ID NO: 272136 - DNA, 295 bp, Homo Sapiens
  misc_feature (64)..(64): n is a, c, g, or t
gcagcaggaagccgatgacagtgagagccatgccatagggcatatagtgggtggccagggcagncgggctgaggtcatagcagacagtgcggttacgctggatgcctgtgccattgtcccaattccatggctgcccaggtgggtttcctatgttcagggaggcaggggctcactgaggaccgcacccatctcctcagcctgaactccgccttccaaagccatggttcttctggcagaggtcttgttatccaagagttagcaagtgcctcgcttgcagtccgtgcaatgctggagc

SEQ ID NO: 272137 - DNA, 510 bp, Homo Sapiens
aagaatgtgtctctggtagccaattgatccaaaagagatctgacattttcagatgtggaaccaaggccagccaagcccagccaagcccagcatagatccgatccgccaaagcccaaatgtcttacagatgtataaacctggaataaatgttgcctttataccttagtttggggtggtttacctacacagcattattatggctatgctgacctagcacacctatgttacccaacacattggaaaaaacagaatatgcacataatttttctgaaaaatattttggcaaaatagtcccaagaagaagtagaaaatctgaacaaataaattaacacaaaagaaaaattaatgccaagttctgccaccaccaaatgacatgttctactatgtcttcaaaaagacagattattcttgtcctatataaactattacagaacaggaaaaatggtgagaaatgatccaattcatttttttaaaaaggtagcataacattggtagcaatgccagactaga

SEQ ID NO: 272138 - DNA, 330 bp, Homo Sapiens
gcctgttagattgttccagagtctgcatggcactcctgaagaagggagtgtgacctgcagtcacccaggagatgagggttaggtgtgcccagccctccagacccggcctttctggttaacccctgcatgccaagctgcctgctgccccaggtcctcacctcaggcctttgaaggggcagcttctggaagttgttttctcctctgcttggagagtttgcccttgtctgtcttggaaagtgtgggcagccacagatgcccccaaatcagagctcacagtgagtgagcccctaagcttcagtctgcaataaagaatgcattggtttcatctgc

SEQ ID NO: 272139 - DNA, 488 bp, Homo Sapiens
  misc_feature (19)..(19): n is a, c, g, or t
  misc_feature (160)..(160): n is a, c, g, or t
  misc_feature (210)..(210): n is a, c, g, or t
tgtccgaatgccccttggngcctttaagggcaaagaaaccctaggcctcagaaagcacagcagcgcccatctttcccgtttccaggggttgtgatgaaggcccaaggaaaaacatttaaccttaacctattttacccaacgtataaaagtttaagtcaantggggtgtgcgaaaaaaccctttttaatcacttttaaatttgcactttantttttttccttcccatgcttgttctctggacatttggggatgtgagtgttagagctggtgagagaggagtcaggcggccttcccaccgatggtcctggcctccacctgccctctcttccctgcctgatcaccgctttccaatttgcccttcagagaacttaagtcaaggagagttgaaattcacaggccagggcacatcttttatttatttcattatgttggccaacagaacttgattgtaaataataataaagaaatctgttatatacttttcaaaa

SEQ ID NO: 272140 - DNA, 377 bp, Homo Sapiens
tgcttgatagacactggaaagcagaataatgcttaactaccttttttttgctgcttattttataaattaatctttgttaagagatttctgacatcatcagcatcacatcatatgtttcctttcagcggcatctggaggtagcagaagtagcagcagcccactggtggtagtgtctgtgaagtctcccaatcagagtctccgccttggcttgtccagattagcacgagttaaacctttgcatccaaatgccactagcacctgacgtgtggtacaaggaggaatgtttggttggggagaattcacagctttacaagggtgttttatatttgatttgtgtttatatttgagggcaggtattgttaatataaagggaatcc

SEQ ID NO: 272141 - DNA, 405 bp, Homo Sapiens
  misc_feature (37)..(37): n is a, c, g, or t
  misc_feature (88)..(88): n is a, c, g, or t
  misc_feature (121)..(121): n is a, c, g, or t
gaaaaaatgcggctcaactggaaactggcaacaacanaagaagcttcctagggaggggttaaaaagtcccttgaacatagggtccccnggttgtagtttaacaaatatctgcccttcaccnacccctttttaattgccctacccaaggcaaccagtggctgagtttcctgactccctcgcctcactttccttcacccacagtatacccaatcttcctaaattctcaaagctttgataatttgtaatatcatataccaagaggactccctgtgctccatagatatatttatccaacattttgcctcctattgtctgccctcctatatcccaaatttgaagggtaacattcaagtttcctggcaatgttatccttctcaaaaagaaatccagtcctatagtttgttt

SEQ ID NO: 272142 - DNA, 464 bp, Homo Sapiens
  misc_feature (51)..(51): n is a, c, g, or t
  misc_feature (64)..(64): n is a, c, g, or t
  misc_feature (137)..(137): n is a, c, g, or t
gcagaaaagagaaataaacagaatggatctattaggaaattgcaagcaacnggaaaaaactgcnatgtatgtaagtgtaaaaggaagtcgttagaagactctacagacaaattaacataatttatgttttacaaggntcatacattctacatatagcttctgtgtactatgaagtgttcaatgttatacggagcagaagaagaatggaagccaggaaagatcacttaggacccacttaggaagcctacaataaccccaaggaaaaactggtagttaaaccccaaggtaataataatggtggatgtgaagaacagtagtcagatgtggatatattttgaaggtagagcattgcctgatacgtatatgagatgcggggtatgaaaggagtcaagaataacacaacagggtgtcatttcctgagataggaacactaagggaggaccacactgaaagagggagaatga

SEQ ID NO: 272143 - DNA, 772 bp, Homo Sapiens
  misc_feature (66)..(66): n is a, c, g, or t
  misc_feature (101)..(101): n is a, c, g, or t
  misc_feature (166)..(166): n is a, c, g, or t
  misc_feature (597)..(597): n is a, c, g, or t
  misc_feature (657)..(657): n is a, c, g, or t
  misc_feature (722)..(722): n is a, c, g, or t
  misc_feature (729)..(729): n is a, c, g, or t
  misc_feature (744)..(744): n is a, c, g, or t
tgtggcccaaaacccggaaggaacgccccccggaaagccctgttttgggcccccctcaaagaccgngggtttttccctggccctttaaacaagccctgtantttttttgccggaaaaccggaacagaatggatatatcaaaaactgaaagtaaataagacttttantgtgaaggtttccagcctaatctggctaggagctgggctgtatttaatgtttgcccataattgtaggtactggaggcttcagtttcctctagtttccttgtttttatttactttttcttctgttgtttttgggtttcctaagagctcctttaaacagcttgtgtcttgcagctctctcagttgtaatccactgttattttatccctggagccctgtttatatggtggtaaggtgttgggaagggggaggggaattgttttttaatctttatgattaaatctcagttttttttagtgggtctgaatccctgggctgtgactttcagaaatgagacaagaaggctaaggaagggctagaatcctctatttgcctttcccccaggtcacataagggcctgttgaattagttttccttacagggcaggccttttnttgtgaacactctgctacgtatttccaaattttaccttccctctactcctaccagaaaanggagggaattttttcttgcatcttcaccataagaaccttttggaattttctgggaagttaggaanttttgtngggggtaaacccaangaaattgcagggaaacccccactaagac

SEQ ID NO: 272144 - DNA, 419 bp, Homo Sapiens
  misc_feature (265)..(265): n is a, c, g, or t
  misc_feature (390)..(390): n is a, c, g, or t
attcggcacagggagcagagggcaagtgagcacggcagtaagaagttgaaaaccattaattgtccgtccagaggaggcggatccaacaacattctgggcaaaggggatggtgtgtgcaaaagccggaggtgtgagaatatagcatagtagacattcatcattcctttctcatgcactggagtgtctgtgcagccagggtcctcccatttcattcattgattcattcacctgtttatttcaccaaatagttaccaagtgctgggcncctctgggaatggggaaaaaacaaacagcattgttcctgcctcagagagttgcacagcctgtttagggaaatttgcagggacagaggcagttgagtttccttgggtgagggggcacacagggcantttggggaacctggggaacagagggacct

SEQ ID NO: 272145 - DNA, 192 bp, Homo Sapiens
  misc_feature (145)..(145): n is a, c, g, or t
  misc_feature (151)..(151): n is a, c, g, or t
gagacctttaatatctctcccagctctgagattcgttctaggcttccattctgactgctaggcatttgaggtcagtcccccttattgggacaatacggcagggatgaggttcaaagtcctgcccagagaccattcccacatgaanccaaancctctgagaaagagactatgaggaggggccaggcgcggtgc

SEQ ID NO: 272146 - DNA, 136 bp, Homo Sapiens
atataaatttaagagttgtcatcatatatgatgatattatatatcttagatggtactgaaagtcaggagactggatgagatcacggaaatgagtatagattaaaaagagttcaagggacccaggtgcagtgctcat

SEQ ID NO: 272147 - DNA, 250 bp, Homo Sapiens
gcacctcctttctggcaccatcacattctccagcttcatcttgtagattctttgtcccagtcctagaatcaggcattcctttaaggagctttggttccctttcttggggagtagtattgagaaaccaagatctgggtgtgtcttttttaaaaaataggtatttgtcttggggaaaaaaatagctttcctgtgttagatttaaatagtttatcctcaaagtcattttatttttgagagaaaagtaatttat

SEQ ID NO: 272148 - DNA, 548 bp, Homo Sapiens
  misc_feature (162)..(162): n is a, c, g, or t
  misc_feature (170)..(170): n is a, c, g, or t
  misc_feature (254)..(254): n is a, c, g, or t
  misc_feature (317)..(317): n is a, c, g, or t
  misc_feature (343)..(343): n is a, c, g, or t
  misc_feature (457)..(457): n is a, c, g, or t
  misc_feature (530)..(530): n is a, c, g, or t
aaaaaagttgaaatatgaactggcaacctgctgaatacaaccgaaggggcctcctgtcctccgtggaaaattcaaacttcactaacctaacttcccccttccttccctcttctgaggaatcatctcccactcttctgcaaaaggccttgtttttcgaggtancgctggangggtgcccgagatgaagaggtgccgagggatgactcagacctacagccgctgaattcattttcttccggttttctcagaactcntgggcggttttccaagagaggattatgtgctggtgacttggaaaggtctagggctcctccccnactggctcagcgagagggtatgtctnaaggacccatactgttctggcctgcactgaaggcaggggtcataagcgtcagcctggcaacagccccagggaccagcttggcccttgtcaggctcagaacttctccagcagtcntgcagccatggctgtggagatgaggtcagggctcgagccgggcagctgtctctgaggatggttgctgagtggntccgcagggctgctgctg

SEQ ID NO: 272149 - DNA, 441 bp, Homo Sapiens
  misc_feature (63)..(181): n is a, c, g, or t
  misc_feature (384)..(384): n is a, c, g, or t
  misc_feature (389)..(389): n is a, c, g, or t
  misc_feature (418)..(418): n is a, c, g, or t
  misc_feature (423)..(423): n is a, c, g, or t
gctcaagtgatcctcctgctttagctcccgaatagctaaaactataggcattcgtcaccatannnnnnnnnnnnnnnnnnnnnnnnnnnnnnnnnnnnnnnnnnnnnnnnnnnnnnnnnnnnnnnnnnnnnnnnnnnnnnnnnnnnnnnnnnnnnnnnnnnnnnnnnnnnnnnnnnnnnnnctgagccactgtgcctagcctcacagatctttaaattgtcttactaagttgtaggggttctctataatttagctacaaatcctctgtcatatatgtattacaagtattttctccaagtctatgggcttaccttttcatttttcttaactgtctttcttaggaaaagggtttaacttttgatggaacatctaatttatcagggnttttntaaatggctttaatgctttggtgtgaccntaggnaaacctttggcctaccct

SEQ ID NO: 272150 - DNA, 423 bp, Homo Sapiens
cctcccctggctgtgtttaaatccaccctcctagggaatacccaaggatcctcactaagacttttggcctttttaataaccacaatgtatgtccttatggagaagattgtacactttgctctatttagaaagaataaatatgaagccaatagttttaggttttatgcccctggacttcatatttttctgatttctgttttgagattaaattctcatgtaaatagaaaaatacttattatttctcatcaggccaagtttgttatcagcttgagtttttgaagatgaagcacaaacttttgattttatctttgtcatcatcagcgccactcattgtctctcagtatggcctggacttgcccctgcatttaccctcatcctgctgagccatctccaatgcactgcgcaattccatcagtgattcgg

SEQ ID NO: 272151 - DNA, 619 bp, Homo Sapiens
ccatctgtttccttccctgaataaactccccccttcccactgagaaaactgaaaacagtcaacgaaaggtgctccttccagaagcagccccgcctctgtgtgtggcatttcaactacaaacgcatccgccaggaaaatgctccagttgatttccattcagggctggataactttatgaccgctaattatatctgcagccacacatggagataggcataaaaatagccttttgtcctttcattaaaggaacctcttcaaatattaacttagcaatctcctccacaaccccccagaggtagtaggcgggtagcaaagttttcatattctgattttacagagtaagatactggggatgcaggggaggctggtgctgtggctttctccaggcgaagactataccttcaaacaccaagtggctgataaagactggtgttcttgaagtcaccccttttattccacaagacagaccccaagttttgagggcacggtctatgtgtaaggcctcgggtcctagaaagacgagtgacggacatggtgttagagcccaatacatatttcctgttgtggaaaatgtcttatccatgcacccctttaagtgacataaacacaagacgtttgt

SEQ ID NO: 272152 - DNA, 418 bp, Homo Sapiens
  misc_feature (23)..(23): n is a, c, g, or t
gaaagtcccagccttcccaagcnggaaactggtgtctcccttgaacagagcttcaatcccaattatgcccccagaacactggatttttctatcactacctcccctttgtttcagagacagtatcccatgaccttctgttcatgcggtggaggaagaaattgcttcccagaaaagcttagcccactccattctactagataaaggaaaaacaaaaagcccactcccactctgacaagccgattactgtcctatggagaagcaaaatgcctcccttaggactatgggaatagccaacaaggtacagtatgttcaaacctttaaccatgactctgccaagagcagctatgtatgtgaatacaatctcctcatctgggcagtcaaatatgcataactgaaagtacaaacctccataaggtcc

SEQ ID NO: 272153 - DNA, 427 bp, Homo Sapiens
  misc_feature (341)..(376): n is a, c, g, or t
tatttccgcaaagcataaaagcaccgtaaatacctcagggttaccgcatgttgagctgaatgagcttctccctttgtgcagggtgggaaagcagtgcccactctccgcttcacagatgccccctgcccaagatgtcagtgatgctgccgtcagtgaacctcgaggactgctctcagtctctgagtctcagcacaatgcaggaggacatggagtcttcgggggcagataccttctgaacgggaagagacagccagcacagtgtttatgccactggttttaaagtcattttaccttggcttaaaaccctctctcagactgtttggtttttgagcatattctgnnnnnnnnnnnnnnnnnnnnnnnnnnnnnnnnnnnngcataatttgggtatttaaagtttttaaataaaataagtataagtcaaaaa

SEQ ID NO: 272154 - DNA, 276 bp, Homo Sapiens
  misc_feature (93)..(105): n is a, c, g, or t
caaaattaaagtatttcttttgatattaatttttattattttcttgaagttggttgtgtaatgtaaatggcttcagtcttctgtaaaattgcnnnnnnnnnnnnnaaatgcagtccttctatggctaagacgtcttcaagatccttgtacactgtttatatgtgcaataaaatgcatggccagctgacagtatcgtcagtggacagaatgtatatagtgcaaatatccttccttttattatttaacagccattaaaaccttggatttgtacaaaaa

SEQ ID NO: 272155 - DNA, 575 bp, Homo Sapiens
aaactcctaggttcaagggatcctcccacttcagcctccggagtagctgggacctagtgtgtgcctccatgcctggctaagtttttaaaaattgttttagagaaagggtctcactatgctgctcaggttcccgaccatttttattagttgcctagtgtgtattctttcagggtttctatatgcagattctttctgtccctctctaatagccaacaggcaggctccctgtaaacatgacaaagccactccaattttgctggccaaaaggaaaagtgtcccgggcacaagggctgagttaatggagagcaagtggtaattatctgctctattagatccctcttcctccagcccaatttcatgggaggcttggtttataaaacactggctgtctgactaaacctcaacaacagattaaccataaatgcattcctggaatttacgttcttcccgcctcagtgttgtgtaaaattatcagggaacaccagacccacaggggtcaggacaggaagcagcatcaactccgattctgttagggcagcataacatttcatttaacacagataaacgcatcttca

SEQ ID NO: 272156 - DNA, 459 bp, Homo Sapiens
  misc_feature (295)..(295): n is a, c, g, or t
  misc_feature (313)..(313): n is a, c, g, or t
gtagagatcatatgggtagccagaacttccaccctggtccagtgataacagagactatatgtgaggtttcagtggaggtcagacgccaagtagaaaacctggacttctatctctacctggttagtaaggcagcatcacctgcctcctccgcttacatcccccgacaactttccttgccgtggtggtgtcagagaaagccagctaaaatagaaggttaaaataaggtcgtagagttttataatataaaaatgtccagtttcaataaagtatcactcaacataccaggaaagaaccnaggaaaaactcaagaacnaaaaaccttcaaaacaattaaaaagatacaatgaatagatgtcaaactcaagatgacagagatgttaaaattatttggaaaaaatttaaagcagccatagtaaaattattcagtggacaattacaaacacaccatgaaatacaatg

SEQ ID NO: 272157 - DNA, 506 bp, Homo Sapiens
gaaaattatattaaacctcaaatttgggggtttgatttggaagacattagcaagtaatttggaataagttcccatccccaacctaacttggatcctgtagtccaagtaatagtcatggtctatcattcagttacttgtgctaggcactgtgttagatattaggtataaatattaacagaaggcagggagtgaagcccccaggcatagccagtcatgttgccctggaacacaaagaggtgtccaatctcctgcaggaagaggagctgctgccattctgggaacctcaagcttagttcagaggaaacatctatgaggagaagacccaaccaccttcaacttagaagaagcaaaagagttctgtggacccctctgtagagagggaggggcatgtgattcaagaggccacctggatatttcagttgaagtttatctttaaggctcgctgcttctctgctgtcatttataagttcattcaataaatactgagcactttctatgtaaaaaaa

SEQ ID NO: 272158 - DNA, 457 bp, Homo Sapiens
  misc_feature (19)..(19): n is a, c, g, or t
tgcagcatcccatagcacnccgcccttgccccatcaccctgtgggctacatgcaggaccacggcatgggcctgctccccagaggcacctgtttggggtcttcttgaggcttgtgctttcacagctctctttgaagcagatgtcttggtgaactcggtagactcttttatacctgttgtcacaagaaagctttgtaaaaccagacagtgaagcaaaatgttgccaactgcttaacctaggctatgtgaacccacagtaaacctgaaggtgtttgagggaaaaactgctattttctgaatgaaacgtgacctcctattgatgtattaaaatgtctaacataaaggtcatgtgatttgtaataaatttattgcggtacagtaatatgcataaaataaacccattttaatgtgcattctgatgagcactgacaaaggatatggtactaaaaataaaatgtg

SEQ ID NO: 272159 - DNA, 704 bp, Homo Sapiens
  misc_feature (602)..(649): n is a, c, g, or t
aggagagctactttcagtggtacctagagaggtagcaaaaagggggaagactgcctcacctccttacaggagcacaacaaacaacttagagatactaactgataactctctagtgctttatctctcttaaagaaatcttcagaattgcttacatcccccttggttcttcccccacctccaggtacatccccagcttactccgacctctctgaacttcctggaccagatctgtatcctctgcctgcatgctctagcctaccatcttcctctccttgtctgctactcactcaacagaaggcaacagggtggtctacttctacaactccgtctcctgatgatttccacaacagtctcccctggcagcctttcatctggaagaagtggaaaagggggaacctgtaggaacatctctcatgatcacaccatatagggaatgaccagtaacagctgccaatcagattaatcaaacatggaaaaaaaagatgaggttgcaattgggggaataggatgcaattttccaggaggtaagagtgataaagcaacaataatcttatcctacataatgcctacgttactaaaacaacccttgtggtaagttgtcnnnnnnnnnnnnnnnnnnnnnnnnnnnnnnnnnnnnnnnnnnnnnnnnaggtggatactcactctgtcactccagcctagttgacagaaagagactctgcctc

SEQ ID NO: 272160 - DNA, 503 bp, Homo Sapiens
  misc_feature (490)..(490): n is a, c, g, or t
gctgataaaggtaactgccatctccaatgcagtgtaactacttggtgccagcatgcatcgtggtgctcatctttctggccttccagcagagggcatatgtgcccctgccaacctgcctgctctcctgctgttgctactactgtatgggtgaggcccccagtccctcagggcctattcttactgaccccttactgccttccacattaatgctgctgagatagaactctgcagtgactcccaaggagaggatatggaggtctgaggtgatgccgtgtgtgatccaattcagtggtgtgccaaggtggccttaaaagctcatcttatcctgactcatattagtagagttctaagggcagcccatgcctgttaatttccagtaacttttggggagggccgaggcagggagggattgctttgtgggccagggagtttttgaggacccagcctgggggaaaccataggaggagaccccacctttttaaaaaagganaggaaaggaggag

SEQ ID NO: 272161 - DNA, 498 bp, Homo Sapiens
  misc_feature (13)..(13): n is a, c, g, or t
  misc_feature (99)..(99): n is a, c, g, or t
aactgaatgaaanaacccttgggccttaaagtaaacatttgtggtaccctgaaaaaaactccttgtgggcctgtggtaatggtggaacacggggaaaanaatccatctgccctggaaaaaaggggagggaaagaaatgggaaaggaatgctgtcttgtaaccctgggtgcccagctcagccacagtaaaacagagcacccaggattattcctaaggtttccaactcccaggccctggctccctggacagaatctctggacctacccacagcccagggaaactcagtgcccttaagggatggacacaagctaatcaaattaatgatttaagacagtctgttatttggcttggagattgggtggtgagtctcgaacatcgcatgcaaatgcagtgcaactggaatactttggatttctgtatcatcccctattcctataatgagactgattattcatgggaaatggtcaaaggacgccttctgggtagggaagataattt

SEQ ID NO: 272162 - DNA, 276 bp, Homo Sapiens
tgacatttcctgcagagaaagtctgtaaggaaccctgactccaggctgtttctcgttaaggtgctgtgcttcctgttttgttcattatagttttgaaagattcatattatagccaattttcccagaaaagtttagtttataataacctagaatcagcaatttatttctagttaaaatgttactgccttccacagtctcactgggagagggtctggatcatttctcctcaggaaatcactgccttgagctgaaatatactggaatcctgctacttcc

SEQ ID NO: 272163 - DNA, 424 bp, Homo Sapiens
gatgaacaagagttctgcatacacgtacaccctttatatttaacatatatttatatagtgcttaccactgtcacatatcattctaaaccctttataattacaaattcatttaattgagaagagacatgatatctttcccccaattaaaaagatctaaaatgattttccaatctgtaggaataaacttggtttaaagtttgagaagagaaccaaacttgtgtgtgatctaaacattaaaagttaaatcccctcgacattctctttccctaccttgcctacctactactatattgaggagggaaaatgttgggtaggaaggaggatttacaaaggctttgggcctctccctacagtcctcatggacaacttggcatgctttttgggtgaaataaaaaataggtcggccgggctttttggggaggtg

SEQ ID NO: 272164 - DNA, 517 bp, Homo Sapiens
gtccacacagtctgtcaactgggtttatgagcacgtgctataggttaagcaggatcctgacacagagcaatgaggaaagcaaagccctctccccttaaggtgcctacaatttagtgaagacaaaaataagcagacacatacatgcatatgaaggcacgcagtaacaagcactatggagaaaaatgagacaggcaaagaggaccaacagtgcctgggctgctctgggaagtcttcactttgaactctgccttacgctgagttgtggatgacaaggcttctccttttcatggaaaattatctcctggagtctcaagccctttctttgctatcaggaaggccaaatgaaccagcaagtgtcagcatcatcggaatagaacagaaaactaaaagagtgaggctttttgcccccgggattccagctcacggcccccagtggaacatccatgtcaatctgacaattgtaggaattcaggggacacaggccggcactgctcttttctggttttattttatttgg

SEQ ID NO: 272165 - DNA, 431 bp, Homo Sapiens
  misc_feature (359)..(367): n is a, c, g, or t
ctgtctcataaaaaataaataaataaaatctcaagactcctcagagctctaccccaaggcagtgggggagaccaagccttggcctcaccctggctctgtcctacccacaagggccttacttgcacacatgtgacatcaccgccttcacattccccagcaagcacctgcccctgtgctctctctcagtggccatgcaaccatcaggagaatatcacccagggaagaggaaaacacaaaccctgggaagtggaggtggggctgttcaggctgagaattacagggtcctggggtacttggggcagactccagggtggggcaaatgcctttgggtccagcagattcctttacaccatgctttnnnnnnnnntggtattcacaacttagagggaatttccagaggagggccttttaaagctccagggttcaagggt

SEQ ID NO: 272166 - DNA, 109 bp, Homo Sapiens
tttaacacagacttctgactctcaggccctttacatgtaatgattaacctcaactgaggctgttcagttgtattaggttaatagaaataagtgtagctgtatctgaaaa

SEQ ID NO: 272167 - DNA, 572 bp, Homo Sapiens
atcttgaaaagtaatacagtgagtgcgagtattatttcttgccagcgggtggaagatgaatgattttgtcacagttttactgcttgatgagcagtgtcctgagggtcaggcttaagtctgtgtcactatgctgctcattactcttgagctaaataagggctgattggatctaaattgcctagcacatgggccacagatgagctcagtgagcaggggatgacctgctattcagtctgggagtaaccccggtgtgcaaatgcagcattagaacactgtggggagaatgagaggctaccggctgctgccagcaaaagaaatcgaaatgttaaaaactctttgatgctgtgatgttagaatttgaaatgtaggaagtgacaggttgatggtacttatcagctttggctggattagagaacagtgtcatcttgcttatataatgaccagagaatgaagtcagcagctaactactgtgcagagcagagccgctgctggttgcacagccagtcaatgctggcttctactggcagttttctggaaactagtaaatattttaaagaaaaatctccctggtg

SEQ ID NO: 272168 - DNA, 767 bp, Homo Sapiens
gagagttcatattaaaaaacagaattcttcttggaactctttaaagaaatgagaagctttgaaaacatcaggccctccatcctactaggcaaccttggactagagcaaagccctctgctctttggccaggcacataccctctcctcgacacaccccactcagctcgcttgaaccctgcaggctactgagcttgcatcacctaatcttcaaaacttgcctccataccacaccacaatacactggcgcctagaaatccagggtaaagaaccttttaggatcattcccccagggtgcctcatttctgggtagaaaaatgaggtcctagcatagtagctctttcactgtttcacttcctaagtgaacttgcagaattgatgccaagaacagttttccctccattttctagtgtggagcacttgtcttttttgttgtccccatctgagcaacccagaatgatttataaacagcctttctgtttttatctctgcttccctgtggcataattgcagcctaagtggcagggcacagcagttacaccgtgagtcaaggaacagaaccaggagagggacccttgtcagccctttaacttctggctttatccgggttccagcactctccagctatcctctgttatgtgtgactggaatccattcttattgacaatggagacagcagtggggggattggctattggatcagataaggttttacctctacatggaatttgagtccaaaggtaaatatattaaacatatagataagaagaa

SEQ ID NO: 272169 - DNA, 446 bp, Homo Sapiens
  misc_feature (29)..(29): n is a, c, g, or t
  misc_feature (37)..(37): n is a, c, g, or t
  misc_feature (42)..(42): n is a, c, g, or t
  misc_feature (61)..(61): n is a, c, g, or t
  misc_feature (68)..(68): n is a, c, g, or t
  misc_feature (105)..(105): n is a, c, g, or t
cccccggatccccctcctaaccaccctgncccccccnagtancctccccttccctagtccncctgccntcctgtgggggttaatcccccaaaacaaaagcccccnggtcccaggctgttgaggcctgaggggtagggaagtgtatccaacagggtataccagaatagtcactggtcttgggctaaatggtgaccttcaagtgtagtggctgcatagtcaaaaatgaattagatgagtacaaaagtgacgaaatgaaagaatgtcaagaatggaccacaaagacagtgttttatgacctaaagattaagatttatccatttgtgtacaattgtggactatataaaataaaacaagactttgacctcagtggataagaagtatttggatgtactaatcaatatttttggtctgggtcagtggtgggttcatctgtgtttgttgtattt

SEQ ID NO: 272170 - DNA, 196 bp, Homo Sapiens
attttaaataatttaatcatttcaacaccaaggattttgtttttaaatagtttaaattaggtctttaccctttaagtgtctttaaggcaatgattcacccattcatttattcacttaagaaatatttattgagcatctactctgtgccatctactattctagtatttaaggtactaaggaaacattgaacaaaatg

SEQ ID NO: 272171 - DNA, 399 bp, Homo Sapiens
  misc_feature (331)..(331): n is a, c, g, or t
ttggggatcttgctatgttgcccaggctgctctcctgggctcaagggatgctcccactcagcctcccttgtagctggaactacaagtgtacactgtgccatgcttgatttgcctttttaactaagggaagagagtgagtaggcaaattgcctaggtgctctgtttatcagttttctccgctataagacaaggcattggcttaaatgatccctaagatctcagcaagctctcaactcctgtaaatctatgttttcttcccaataatgttaacatgtaggattttccccttttcatattctctaaatcttctttaatgtggaatgtttttccnttttaatataaacatttaaaaggaaaagccaagacgaaattggaaacatttaatcctctctcaagtcc

SEQ ID NO: 272172 - DNA, 509 bp, Homo Sapiens
tgtacataagttgaaggctttgagttaaaagactataggaattagatgagtgggggctatggagaacagagagaatttagagtgtggacaagtgttctatgagcagagactgggactagccaaaacgtgatgatgggcagctagcttggaaagaatgcttacaacgtgaaaattatatatttataaaaggccattacttctgttaaagaacaatagaccccagtgaaaagaaaggaaattgaaaaatagagaaaatgtggagaaaactagaatctctatagacagcgtcaatgcagcatcaattatatgaaccacttttgagcacaaagaactattgttttgaccttggaggcaatttggtcttcattaggtttagctgtaggatagttgatgttcattattccctataacgcttgtgatggcaaaaccttcacaaatttatatgatctaggtatgttttcaatccttacaacccaaataaccgatcataactctcactatgtcatttg

SEQ ID NO: 272173 - DNA, 473 bp, Homo Sapiens
tatcggcacagctggaaaacaaacacaaacactgggttctccctccaccacagtaaactatgccatgtcagatacagagatagagatttaaaagggcctcaaattcttcacagctcatcttatcaaggatagcacctgtctctccacccctgaatctaggtgggccttttttgaccaatagaatgtggcaaacatggtgttaggtgagttctggggcctaggcagcccctcactcttcctcttggcacagtgcaggcaagacagacagacgagagctcatgagagagacacgcaactgggcagttcagcaccagagccccgacacctgttcaatggaggccgttccagaccctccgcccacccaagcctcctgggtgggttgcagcgacctggagttgaattccaagggagcccagcgcaaacagccttgtccccagcccagcccaaaccaaagttttttgagcaaagaagcg

SEQ ID NO: 272174 - DNA, 895 bp, Homo Sapiens
  misc_feature (865)..(865): n is a, c, g, or t
tgcacaccaactgctttgagatcacggtagagctgggctgtgtgaagttcccccccgaggaggccctgtacacactctggcagcacaacaaggagtcactcctgaatttcgtggagacggtgcaccggggcatcaaaggtgtggtgacagataaattcggcaagccagtcaaaaacgcccggatctcagtcaaaggcattcgccacgacatcaccacagccccagatggtgactactggagactgctgcccccaggtatccacattgtcattgcccaagcccctggctacgccaaagtcatcaagaaagtcatcatccccgcccggatgaagagggctggccgtgtggacttcatttctgcaactctctggggatgggacccaagaactttaatcaagggcttgcgaaggactgggccccaagaacccctgggaagtgccagcttctttgggggaggccacggagcccgacccgctccgggcgcgcaggcaaccctcggccgacgggagtaagccctggtggtggtcctacttcacatcgctgacaacccacaggcaagcctgctgttcagtactaacccggcccgagaccggaagaatgtgaaccgagccgtctcgattcggctctggtctgatttgttcaaggatccaaagcggtcgtttatagtgtttgtcaaaaagagaaaagtcttaatacgcgcactatcgctgtgaggagttattggagcggggttaacgggggaaattgtcccgtaagttggaccattcgtgtatagagggcgggacggccgaatcgtgagcggcttaatcggtgtttgcggtatcccggtttctctttgggctaaagtgtgtttccacaagggggngtttcgtgaggaaatgtggagacaatggct

SEQ ID NO: 272175 - DNA, 398 bp, Homo Sapiens
  misc_feature (288)..(296): n is a, c, g, or t
ttcggcacagctggggatggggtggtctgtgaatatgtgacatttctgcagttcagtatccgaagtttctcttgggggtaggggctcctgggcggccagatgaatgggtccctgggaacccagacctcagatgaggacttaatgtcttcttcctctcaagccaaattcgcctccacccactccctctgaagaactgggcatttgcaaagtaaccactggagtcatctaatggccctccccctccccaggtttcccacagctttcaggggacagtaggcaagaggacannnnnnnnnaccacctcagtggaacacaccattctccccccctcaacagcacacttagtgcaggcaagacttgacccttgaccccgttcccagcccttccctaccttggga

SEQ ID NO: 272176 - DNA, 578 bp, Homo Sapiens
  misc_feature (70)..(70): n is a, c, g, or t
  misc_feature (113)..(113): n is a, c, g, or t
gaatgtaagtcctccacctatggttgcccccgggctggatcctccaaaactccatggggcctccaaatgnatccctccctacctccagcccgccccaaagtgcctggccattnataggcatgagcctactgtgcctggcccctgaaactctgttatgcagcaaatgactatactgatacatgcctacagaatgacgaacttagaaaacattatgctaagtaaaagaagccagtcacaaaagatcatatattgtataattccatttatatccaatgtccaacataggcaaatctagagacagagagggtagatgagtgggtgccaggggctggaagaagtgaggaatgaggagttctattaataagtatggggtttcttatgggggtgataaatatcttctaaaataagatagtggtaatggtttctccctctgtgaatatactaaaaaacaccaaatagtacactttaagaaagggtaattttgaaagtggagtgagggaataaaggaaagaaatctcagaaaataagcagccatgtttctgaacacttccaaatacgagagagagctaagaaccata

SEQ ID NO: 272177 - DNA, 663 bp, Homo Sapiens
ggtttctgaatccctgtttggggccaaactgaccctggctgtacaggcagcctctctggcacaggccgcatctgaggcaggaggcacagagccctcaggcaggggacacagccactgccgggccccatgggccaaggcgaccaggggaggagggacagttggctccctgggaggaggagcaggggctggcaatccccaaagttccctcctttaaaaacacgggtctagaaatgccttctcgggcacacagtacagagtgcagctaagaaggtccgactcgttttctgttaaagtatgttctagtgggaaggggaggagcttgcactccacatcacgtgtttactgaaaaagccctgtggaagatttcccatttggcatctgtgtagcagcatcttgggttaacaagagcaaggaccagggaggtgggcgacgacactctgtgagcttaggcgctgggtcggggaggagggctggctggcagaccccaggctggaatgacaggatgaagtcaacttgcctcttgccaatgataaaccatgggttttaaattcattaacattcattttggtgataaaaattccttagggtgggagcaaaatcacattcccaagcaaatgttaaatcttcctgagggaaaggggtacagttaaacattaaattctc

SEQ ID NO: 272178 - DNA, 442 bp, Homo Sapiens
  misc_feature (40)..(40): n is a, c, g, or t
gcaacgagtctgcgaggccgaatggaagccagctggtgcnaggggagagagcaagagagtctggcagaaggtgcacctggagaaggaagtagaggccaggccagcatatgcttacaaaatttgaagaccacaaccactctccaaatacaaatgcagcaagtgatttgaagatcatagaaatgataatacaggcaaaaaatgcaagaaatctcccctgccaaattattcaactatgtatgacttctgccttttcacagcgccaatttgccatgctatgcgtttcatctttgcatcattttcaatactgggatgtattaaattgtgttaaagactttcagagttctaatttcattttatgcattttttgcaaatttgattccatgaaagtggcattatcacatcatcgactgtgtgtaatcattgtgtgtgcatataaaaatgg

SEQ ID NO: 272179 - DNA, 502 bp, Homo Sapiens
  misc_feature (98)..(98): n is a, c, g, or t
gctcggcgtgggcctggcagggtggagacttgatgctggcaggaggggcgttagaatcctcacctacctaagcctgtggtggagcaaacagccctgcnggactcaatgcgtgtaacccttggattttcacccaacagttctgcaagtctctttcctcaaataaaccatcccccatctgcataatatggaagctaagtagatcgcccacaaagaaaagagaacaatcctgtataaaatgaggaagccagactaaataattccaaagtgtctttagggcaaatgcaggaccagaattacagcatacttgaagatgggatccttctagacccactccttctgcttgtctggaaagcccaggcctgccagcatcagcggcgacatttcaattctgccagtttgatcagaccacgtggattttctctctccaatacaccagctgataatgaagagacaaatgttagctaaggcagccctggtcaatcccaaagtccttagatgcaaa

SEQ ID NO: 272180 - DNA, 365 bp, Homo Sapiens
  misc_feature (259)..(259): n is a, c, g, or t
tcggcacagcttgaacattgaccaccacacactccctggcacgctcttctcaccctcaacttctgccacctctccctgggcaatactgccagcctttccctaatctcagagctgcagccctgccctgtcactcacctcaaacctgccatgtccctggggctactgaaattccaggcagtgggtgaagaggacgaggaggatgaggagggggagagcctgggactctgtgaaggcactgacagccaagctgcagctgcanacttcggcggccctcatattttgggagtgggacagcccagggtccagagccagggcctgggccaaggggccccaagccaaactggggaccagggggacctgggggg

SEQ ID NO: 272181 - DNA, 394 bp, Homo Sapiens
aacgtagtgctagccccatgcccctactcggccagtgagcacatcccagctctctggccactgaaaatggctcagggatgggcacatgacccaaatcaggccattgagtggcagctctgcaacttctagcagtgtcatcaaggaaaagagactctcattagagttgcagagctggtagaataaagttgagagctgtgaggggccccttttgcctcggtaaaaagcgaaatggtctccaccgagaaaactgcagatcgaattctgaccacctggacccagctcctgttagacccaatctataagccacccaacttccttttcttccttaagccagattgagtagggttttctgttacctaaaactgaacatgtcttggtgaataagggaataata

SEQ ID NO: 272182 - DNA, 345 bp, Homo Sapiens
  misc_feature (34)..(34): n is a, c, g, or t
  misc_feature (94)..(94): n is a, c, g, or t
  misc_feature (148)..(148): n is a, c, g, or t
ccctattgcagtcctcgaaaaagtgcttcaggancttgaacgtacttgtctagactttcctatcccaaaagctctgctcttgtctacagctganctgggtgcaaagggttttaacagccattgagtggaaagcttgctcaactttaanttttcagtcagaattttgtaagctgaaccagttgaaatgaccacagtgttggctattgtttctgctcttgtcagccctcttgaatcggcagaaacaagatgaatttttttccccgtaaattgatgtggagggcatgatgttcaacatcatctcaacccttcctgaaacaatttatccagctggtcatcatggttcat

SEQ ID NO: 272183 - DNA, 455 bp, Homo Sapiens
aaggcagtcaaatttagcacagggggattatatgccaactttagtgacactaatgttaataagttctggtaacccactaccatcagaccaacgtagttagtttttgaagaatcctaaagccatgctgtatggtggggaaaaattaatttagcttatgacaaagcattatccttcaagcctctgaataatcagcctcttgctttacaaacacttcttgtgtctgacagctctgccatgcctttagcaatagctatcatttactgaccacagtcattcattcattcagtattcattttagcacttagtgggcacctgctctgtgccaggggaccatcctaggtgctgggggatacagcagtgaacaaaccaaacaaaaccctctttaggcaccacactggatgattctatttcactgagacctcacaatgtatctgcatgtaggtattattatctcc

SEQ ID NO: 272184 - DNA, 478 bp, Homo Sapiens
atactagggtaagtgaaagctcaaattccagtttgctttatggatctgacaaaacttcgccaaagtcaccctgcaccaagcctgactctccagcccagctgagctttgtgttctcaacttgggaggtgggtggcaggtggtctggagtagggagctctatttacgcctgggtagagacttctaagctgctctgtgtctcagggtttctgtggtggataatcgaaaacaagactgagtcctaagcacatttcctgcacaaaaaatggcctctcactgctatggtcaggaatcaatgagcatcatcccaaatttggaatcctctaacccccgcctcaagagacacataggctctttaaactttgggatttcccaaggctggatcagatgaaagtttcttcagtttgtagactccagaggctatgtcattcctaaatgttaaggacacaactaccaacccacgccgagccctatgcagtct

SEQ ID NO: 272185 - DNA, 439 bp, Homo Sapiens
  misc_feature (15)..(15): n is a, c, g, or t
  misc_feature (22)..(22): n is a, c, g, or t
  misc_feature (118)..(118): n is a, c, g, or t
  misc_feature (336)..(336): n is a, c, g, or t
  misc_feature (376)..(384): n is a, c, g, or t
tgacagaacctattnccattangggtaaccggggaataaatgggtcactggagtaggaatagaagtgcaagctggaaaggcaaaaatgagaaagaaaaaggcaggccctttgtgtccnaccgttttcagtgctgtgtgatcatattgtccctcacagcaaaaaagaatgcaagggcataatgttagctgtgaacatgccagggttgcattcacattccctgggtacccagtgctgatggggtgtgcccacgtggggacatgtccttggcgtgcttcctcagagtggcttttcctccattaatacatatatgagtactgaagaattaatttgcatangcgctttgcagtggtttcagaggcagatctgagaagattnnnnnnnnntctcaatgtatcagctttttttaaaggacattactagaaaattaaacagtattta

SEQ ID NO: 272186 - DNA, 300 bp, Homo Sapiens
aaatggtggaatgtctctcagcacagttgcggcttcctcaaaccctgaaagcatctgtgtttattatactcgggtgtcactcactgttgatgtctgcacctacgtttccacctcctccccctccttcagccagcctatgataacactaaagattattaatgttggttttgtatctcgttaaagacagaattgtcacttgtagtatttctgtagcattcagcgctgctgtggctaacaccactgtgtatgtttcatcattgctctgaaggtcaaaagcctcattttattttgctggtttga

SEQ ID NO: 272187 - DNA, 963 bp, Homo Sapiens
aacatgtggaccaggaatatgggacccctgaaaacaatatctgcgttggtgttctctaaatattttcaggcatgtctctttcttctgatattttatttctatttaatgtttaagtattttactataattaggtaactttccatttcctggttattgtaccaattaccgtaacgttattaatatattaaattaacatgatgttttccaaaatgtaaattaaactgagagcagaagtgacaaagccctgacataaaacagtgaagcagtgctcttgtttttaccacacaaaggccaattgttttaatctgctgacccacccatgggtgtaaaataagaaacattcactaaatcaagagccacatgcaaactgccaggagctctgctctgctcagggaagataccacatcctagagagcatttgtaagtagtgatttaaatttatggaaatctgcattcattttatagtgtatctggttttggtagaggccagataggttaagtggataggcatataaaaagactaccatcccctgcaactttcaagtgttttgtcatggtagtgatcaattccattccttggagaatgtgattattatttttcaatcattgttgccagtggaggagaatttcacaggcttccccttggttctgctctaataatgtccctgactctacaggtcaggaagaaagtgagagtcctgccagctgccatgtgtgtccattacacattcaagaagaggcaataacggcaaactgattagatccaccttgggatggacatgagtcaaaactctaggtagcatctgaccttcaaaactccctctgcaggctgggtatgatggctcatgcccgcagtccccgcacttttggaggcggaggtgggaatatctcttgaggcccagagttgcagaccaccttgggctacacagtgacagcctgtctgtacaaaaactaaaaaccaaa

SEQ ID NO: 272188 - DNA, 310 bp, Homo Sapiens
aagctgcattaaactccaatgtatatgaaaggggcatttttataattgtaagttataatgtaaaacttttcctaatgtaaagttagtcaagggtacaatgaggtgttttaaccagaaaatcgtaatcagaatattctagattgccattgtagtcgttcagtgtttcaacatctgaataaattctgtgtcattgtttagctgtcacagtgtgaaaaacgttttgattcacaaagacaagtacctaaaaagaggtaacagtttttgacagcttaccttgcacactctgaataatgttcatttaaattgatac

SEQ ID NO: 272189 - DNA, 848 bp, Homo Sapiens
  misc_feature (705)..(717): n is a, c, g, or t
ttttttttcatgtttatatttcaaaataaataacacagctttccataaattggtgttgcaacagtagcagctaagattcctaacagatctaagccctgttataaaacattctttagcaatgtagcagatgctatcttagagttacaacccagcgtttttcaacagtgagctctgtgtagtcaggccattctgtaagtttttctactgtgatacttgctatataggttggtaacaaatacaagcataagcaaaaccaaggccagctttgctggcacccaggtcatatggaacctggcccagtgccatgccatctgcctctgctcctgtcctgaccctccctcctcaagctctgaccacttcttgaagtgagttcccaaacagctctgctctctgcaaccttggcggccacaggaaaaggccagtgattttatgaacacagaaaggattggcttctaggatataactttatgggtcacaggagagttttcaaagactttcccaccccttccttgaaaaccaacacagtggtagaagtattcagttcatcaaacagttcaggttcttctcctagacacctggtaggattacacttccctacccctttgaagttacaggctttaactcatgaaacatgagcagaaacagaatgtgttgctttgggtaggaggcttttagccatcactgcttaatttatcaatgtgcaannnnnnnnnnnnngcttctggcactatgattagcacaagatgggggcagctgcatcagctcaggcccacaaataaccacaatgagtagctcttgccaactcgcaaaggacataagatatgaggaagaaatcaaccttgattgtt

SEQ ID NO: 272190 - DNA, 492 bp, Homo Sapiens
  misc_feature (36)..(36): n is a, c, g, or t
  misc_feature (317)..(317): n is a, c, g, or t
  misc_feature (327)..(385): n is a, c, g, or t
  misc_feature (444)..(444): n is a, c, g, or t
  misc_feature (460)..(460): n is a, c, g, or t
tttgacacatgaatcagaatggaagacatatttccngtctgctctgactccagaagaacttgcattgttgcctaggatgctaatccccgaaaaaaagtaacaagtgcaattgtagcccccactcccttactctacaccgtgtatcagaggtccatcattacgttctcattcatataggaagagagtctaagacatgttcatacagaaagaggggtctacacctaatataggaccctctaccacatacaaacatttgccttgcaaggctgggggggcctgctttccacctaattaaatacacggttagggcctgtggngttcaaggcnnnnnnnnnnnnnnnnnnnnnnnnnnnnnnnnnnnnnnnnnnnnnnnnnnnnnnnnnnntgaaggaggcttttttggaaaagggccatcttagggggaggggaggagaggggaaaagnttcatggaggacatgntctttcttggggggggaaaaaaatttcttaac

SEQ ID NO: 272191 - DNA, 613 bp, Homo Sapiens
ctcttacagggaggaataaacaggctagaaaaaaactaacgtggaggagaggagcaggtgacgttaatgggacagctgagcagggaatgtccttcctggtggctagtcaattttcaggaggggaaaaggagggactattccacagtccagtgctggctcaggctgaaggtggatcaaagtccagtggcttacggggaagggagaagcataaaattgggtcaagttaaagggcattttgtccagattagtctatgggtacaaatagttcaactaattattttgaggcaaagaatgggatttggagggtctgagtctggctttatcataggtaaatgaaggtgttactcacagttctagtggttctttgcaataagccatttcctgaaatgtaacaagaaggagggatttcttaactgtcactgttttccagaagcacagggctcaagtaaaggttaatactgtagtcagtggccatgtaccacataagcaggagacagggagacaagttggggagtgttttccatgtcatactactacctctctacatttagcatgtcctcaatgggactattcttgctggcatttgtgtataggggaattacaagtataagga

SEQ ID NO: 272192 - DNA, 410 bp, Homo Sapiens
gtttggtgacgctgtaaccattccacgccagtgacctctgctgggtcacagccactcaggaggggaagggtcaggatgagaggctgcagcctcgacacttggcgcggcctgatactgaaatagcgtctactcgtgcactgaataaaaacagaaaccttgatcattttaatccctgattagattttatcactctctgctaagacaatatagtctggagtataagtgggaaagcttgatttaaatactgtgaactctaataatgtggaaaatatttttcaactttaattttctgaagtataaattatttatgtaaattcattgtttttgcatatttcttaggacatgcatctttaagctttatcattgcccatatgtacagaaagagaataaagacatatgtttatggatgg

SEQ ID NO: 272193 - DNA, 483 bp, Homo Sapiens
acatgggggatgattttggcactttttcaaagaatttgtttctgtgtatctgaatttgcacctactctgtaacctaactgcgatttataaaatgaaacaatctcttctaatttggcacttgataggtgctttgactttaaaaggcaagtgtatttttctgtcacgaatatcttgtcattctaaaataagtaaaaacaatggattgatgaaacttcttcactgcttttttctttgtgtataacaaatacattgatattttactggcataaaatgtgtattttagttgagtctttaaattattgctcagtgtattttgtttattttaagccattattacttcctttatgttggatttggatagtttagattgtaagcttctaaagggcaaataatacatcttttcaactgtggtcttgactagcagtcccaaacctttttgacaccaaggaccagtttcatggaagaaaatttttccatggacag

SEQ ID NO: 272194 - DNA, 530 bp, Homo Sapiens
  misc_feature (385)..(385): n is a, c, g, or t
  misc_feature (403)..(403): n is a, c, g, or t
  misc_feature (411)..(411): n is a, c, g, or t
ttattttctttagtaacaagtttttgtttttatagttcctggtacacagcaaagtttatcacgaaagataaaaatccttttaaacaaatccaacaggaaattcttgaggcaccttctcatataaaacacaagatgaatgcaattatcaatccatctgagaaaagttttcaatctaaatgaacatcattttttccatttaagtatattttacagaactttaataaggcaagacaaatttgtgaaaaaagatgtagatacaaaaatgatggtaactaataatttatattaaaaaaccccaaagggataacagtggagatgggacagctcaaacaatgcctttttttaacctaaacagaattgtgcaccagctgaagataacaaacancttctagactctcacagnttggggtnttttttttaacatctttatatacatgggtttaaatatatcaggaatggcaactagaactgcacactctttcggggaaaaaagtcaattttgggcattttgtgcctctaatagtaaaaag

SEQ ID NO: 272195 - DNA, 625 bp, Homo Sapiens
gattctacttttagaaattcagacctagatagatttgcatttggataacaaatccctacctatagccatgtggaagcagcttgtcactgtattttaactgtgtaacaattattgaaggcgaaaatagaagttgggtcatctttgaacacctaccttttatcaataatatttttagactgttcttcagtatctgagtcagagtttattgtaatttgttatttacaccaaggtggcatcttagtctaccttcagtgagacttgcgtttcaggggaggggcgtatgtgcatcctcggtctcagttatgtaaacggtctgatctgtaaaatagtggtagcacatgccatgtgggatagttggtggagatgatagatggagttaagcacagggcccagcctgtcagcagtagctactattattgttgcccatttcccctgcaactgaggtgagaggttttcctgagtttgaagctgactggcccacagttaaacgtaacagaccagtttttcagggtgtcagccaacctctattagtgttcttaagtacagtttctgttataaaagttcagattattccttgaaaatttggatctacctcccattattatgagtaatacatgcttatagt

SEQ ID NO: 272196 - DNA, 235 bp, Homo Sapiens
  misc_feature (75)..(75): n is a, c, g, or t
  misc_feature (186)..(186): n is a, c, g, or t
tcttcccgcgccaccctccaacccccgaaatgtttctgtttctaatcccagcctgggcaggaatgtggcttcccngccaggggccaaggagctattttggggtctcgtttgcccagggagggcttggctccaccactttcctcccccagcctttgggcagcaggtcacccctgttcaggctctganggtgccccctcctggtcctgtcctcaccaccccttccccacctcctggg

SEQ ID NO: 272197 - DNA, 426 bp, Homo Sapiens
  misc_feature (17)..(17): n is a, c, g, or t
ttgcctttaaaaacttngaacaacgaaatctccaactctgaagctgaacccctttcaacacgtgaagacttgtaagggaagcagcttccttcacaaaaccatctttgcccctggggaaagaactgtgcctcaagggcagtgctactgctgtgctaactcactgggcagggggaggagagaacagagaagtgcatggtctcacccaagcctctgctcaagcagccccaggaccctgctggggcgagcattccttttagaaaagaaaacccatcagcaggtatgaagccctcagggtctggtatcaaaggtgggtggattgcaccttggcctcttatgtcattaggaaaggggtttcataaggtcccagagcccaggacaaatccatggacaaataatggtgagatgggggaaggcggagagaagaag

SEQ ID NO: 272198 - DNA, 579 bp, Homo Sapiens
agagctagcaccatgagcttcaataccctggttatgttgagggtggcaacgtgctcagcctcgggtagcacatccaactgtcccagcctcccttgcagctagaagtaaccatgtggcacggttctggccaataatacagacaagtagcttactggaggagagggcgcaaggaaatgtttgcctgccctctccttgactttctcctttaaacataagttttctaacaacagccatcttgaaaatacaaggcaaaaaatagaagggaaaggcctaaagaatcacaaagacaccacccctaacatctaccagctgctgaacccatgctggcagccacgcactgccacacttctttattgagccaaataaactaccacttgccaatggcactgctgtatggattttgttacatgtagccaaaggcagctgaactgacacccagaaggacagagtggctggagtagagacagtggcagacagggctgggttacacaggagctaagatcaggttaaggagtttgtattttatcttgggaaccaaacagaggagccactgaattaatcattaggaaaatgcaaaac

SEQ ID NO: 272199 - DNA, 544 bp, Homo Sapiens
  misc_feature (91)..(91): n is a, c, g, or t
  misc_feature (93)..(93): n is a, c, g, or t
gtattaacaagactaaccatgatggatggactgctccagtccccccacctgcacaaaatttgggggccccccagactggcccggacacgantngctaatagcccttgtggctcagccttctcccccacccactgccaagtacaatgacaccttcctctgaaacatcagtgttaccctcatccctgtccccagcatgtgactggtcactcctggggagagactcccggcccctgccacaagagccccagggtctgcagtgtgcccctcagttgagtgggcagggcgggggtggtccagccctcgcaaggcccccaccccagcttgcccttgctattgtctgtggttttggaagagtgttaaaattatgggaaggcccttcaggtttcctccctgttcccgcaggacctgtttatttattattaaaagtttcctgtttttttcaggggggtttgttccctttgggaggagatggatgtaggaggactgtgtgtgtaatttgttgggtttaagggagttccgtttttccccagaggaggagttgaag

SEQ ID NO: 272200 - DNA, 434 bp, Homo Sapiens
  misc_feature (352)..(352): n is a, c, g, or t
  misc_feature (398)..(398): n is a, c, g, or t
  misc_feature (410)..(410): n is a, c, g, or t
ttccataaacataagtcaaactccacacagcccaagtgaactgcatctgaattggtaaaactgttttaaaaagtataatttacccaatctcttttctctatctcattaatattgtctatgactacatgaaccaccatatatttaaacattttatctcgagcttattataaaataccttgtacaaaccaaatatgttcatgggtgtactgattttgaggatgatgatatgattgccaaatcgacttgaaacagtgttctgcataaagacacctaaggggactaatctgacaagtgtctcaaaagcaggacagaggaaaccatggaatatggcattaaatgccctaggtggggnaaaaaaataggttaccttatggtggccccggtgaccggatggggcnatttttaggggntccccagtttagggggaaggggcc

SEQ ID NO: 272201 - DNA, 431 bp, Homo Sapiens
agcaaaacctgataattaaaaatccccaaattataggatccatatttacccttaccatttaattggtgcctaagggcctttgtattatttaatttatttagccctgcagaagtatgcctctgaggagataaacatgacccatttatagaggtcacaggctagcgagtccctggatctactgattaatctcgctctgtctttgcagccctgagaggataagtgctttccaaagcagaggagcagtaaaggctgagcccgggaggcagaaacaacattggtccatgcaccataaaatgtaagcgccatgaaagaagacactgttatattcacttctccattcccagcacctaaaaaagccactaaaacatgataaaggtcaggaaatatgtgaggaaggaaggaactcacagagggagatgggtttggaaaaa

SEQ ID NO: 272202 - DNA, 482 bp, Homo Sapiens
  misc_feature (344)..(344): n is a, c, g, or t
tgattcaaacaagtataattctcaagttatcacaaaatttcccacaaaaatttacaatcagcaaaatagtttccttatttctcatgtatcattttcatataattccatggtttcactaatattatatgttacaataagcctccattagtccctcaaaacgatgatataaataagtctgtacaacctagcatagaataaaaaactgaaaccaagattcccaacgtttttcatagcagccgggcacactttggggaccccaacgaggaaccctctcggcagcagccaggagctgttcaccttccagaagcagggcctgtggcagcctaacagggagaggccacggngcccaaaaacgcaacacgtctcaaggcaaacccgagggaggaacttggtctgggaggaagagagaactcgctcctcaaccaccccagacactggagtgtcaggaaagcactgagctgttggggcacactgcccagccc

SEQ ID NO: 272203 - DNA, 434 bp, Homo Sapiens
  misc_feature (45)..(45): n is a, c, g, or t
attgagtccatgtgccccacctgtggatttattgcctttgacccnagaaagtagtgcatttcaattggccagtctcctgggttacagcccacacttcccaccgtgccgtccattgttggggtggagcactggaactgacagtcctgctgttactgtgagaagtgggaacatggtggtctcctaagtgaggggagactagagagatgagcaagagggaatttccacatgtgtgatagagaatgagatagtgaaaagacctttttattgtaattgggtttcagaaactctgagatacctttaatttaagcttcattgaaataacttcagtagggaggtctgaattaagtcttttctcaactaacaggagttacattatgttttatagggttcagggaaaaggatccaataaaaggtgagaaaagtatggagaaaag

SEQ ID NO: 272204 - DNA, 559 bp, Homo Sapiens
  misc_feature (24)..(24): n is a, c, g, or t
  misc_feature (94)..(94): n is a, c, g, or t
acaatacctgtacccacctttggnatctggagctgaataacttcttttggattttaccaggctcataggtggaagaaacttaccttgagtctcnaaatgagactttggacttttgaagttaatgctggaacgagttgacccttgggggactattgggaagagatgattatattttgcagtgagatttaggtgcccaggggcagaatgataatagtttttatgtttgtctcctccaaatcccgtgttgagatgtaatccccaatgttggagatagggcttggtgggaggtgtttgggtcatgggggcagatctctcatgaatgccttcgtgccctccctgcagtaatgagttcatgtgagatctggttgcttaaaagaggctggcatctctgcctctctgtcttgctgtttttcttgacgtgtgacatgttggcttccctttgccttgcaccatgattttaagcttcttgaggctctcaccaaagcagatgctggcactgtgctttgtgtgcagcctgcagaactgggagccaaataaacctcttttgtttggaaattaa

SEQ ID NO: 272205 - DNA, 444 bp, Homo Sapiens
  misc_feature (46)..(46): n is a, c, g, or t
  misc_feature (59)..(59): n is a, c, g, or t
  misc_feature (93)..(93): n is a, c, g, or t
  misc_feature (120)..(120): n is a, c, g, or t
  misc_feature (138)..(138): n is a, c, g, or t
ttggttcaggcccccaaacctggattgggggccagggggttaaaanccctttccctggnccccttctggggtaaggcccggaaaccccttggncccttaatcctttaggaggaaaattancccctcctctggttaggngggatttccggattcatttcttctgccctggctcccccactctgcatttttttagtcaaatactgtctggacttttgtgagccaataacctccctcctcaccttattcccctctcttcccctcccctgtgatcacacaaagagcagagagccctcaaaagcctgggtttctgggttttgtattttaaagagaggatgaaatacttgctgtacttcaaaacataaaaccgatctgttaaaactttcccaaaagaaactgattggcatcagcatagggggaataagaaaagtaagagaaattgagatt

SEQ ID NO: 272206 - DNA, 478 bp, Homo Sapiens
ctctttctattaccagcgatttccccccatctcagtttctcaggaagttctgttcgcagaattatctcctgaatcctcacctggagatagaaattgcttctctgtggccatttcttccccctctaattcttataaaaaaactcagtgatctctgtgcatcaaatattaaactgaagctcaacagatcatgattctggcttgtcttctctctccggccttgtgggttaacaggtttgcaacatttgcagagaagacaccaaattctcaggagggcagagtttccaaaggtactggtcactcttgctctcttctcctgctcaaaattcagcactagagagtgttacaccattgcacctgcagaggagttcatctgactctagggactacagaggagagagatggacaaactaacaggcattcagaaaatgactaccacaatggggaagaaaatgaaagtcaaaccaaataagcaatggtc

SEQ ID NO: 272207 - DNA, 468 bp, Homo Sapiens
acacagatggcacctgtggccagagcacctcaggaccctccccacccaccaaatgcctctgccttgatggagaaggaaaaggctggcaaggtgggttccagggactgtacctgtaggaaacagaaaagagaagaaagaagcactctgctggcgggaatactcttggtcacctcaaatttaagtcgggaaattctgctgcttgaaacttcagccctgaacctttgtccaccattcctttaaattctccaacccaaagtattcttcttttcttagtttcagaagtactggcatcacacgcaggttaccttggcgtgtgtccctgtggtaccctggcagagaagagaccaagcttgtttccctgctggccaaagtcagtaggagaggatgcacagtttgctatttgctttagagacagggactgtataaacaagcctaacattggtgcaaagattgcctcttgaattaaaa

SEQ ID NO: 272208 - DNA, 754 bp, Homo Sapiens
  misc_feature (110)..(110): n is a, c, g, or t
gtgcatcagaatcttaacaatgaggggctaagacacaaattcctgccctcctccctgccgcccccctccagagtttcagattcataggtctcggttgggtctgagaattngcattcccaagcaagttaacaggtgatgctgatgtttctcaggggataacgggcaaatggtgaaaccagaaagttttgtttctagatatgagatcccattgtctttgccaatgaagctgtgctgtaactccatcttaacaagtaaccccaaattatacccacctgaaagacctttgtgggttgtggaaaacctggaagatggctgagagacagtaccctcgaagtagttctgaggagattgttctgcttgtattcccatgcagcgacatcactgcctgacttccttatgtgtgtctgatttgaggcagttctctaggaaccagttcctggtgctgcaagtgccactggcagcttcccagggcttccagaaccctagtggcatggtgggaactcctggtcctcacccgacctctccacagcccctggacctgtaagggttcttccaggctacatggaattagatttccacttttccttggtgaatggtgatgctgattatttggaagctttagcaccaaagtttgaaattcccctaagtgaatggttttggcgatccccctcctttagttatactattggctttctctcatgttcatttaggttgccaaatcttctgtataatcctcatcccccatcaaaaaaga

SEQ ID NO: 272209 - DNA, 336 bp, Homo Sapiens
  misc_feature (119)..(119): n is a, c, g, or t
  misc_feature (250)..(250): n is a, c, g, or t
  misc_feature (276)..(276): n is a, c, g, or t
  misc_feature (286)..(286): n is a, c, g, or t
  misc_feature (292)..(292): n is a, c, g, or t
  misc_feature (299)..(299): n is a, c, g, or t
taccttaccattgtgcctgttatgttcaaaaatacattttgaaaagttcttaaaataattgctctaaattgaaatgtcaaaacctgaatattctacatgtgtcttgggtgatgtccttntaagctaatcctataatacactaaggtacatttaattgtggaaatgtcatttcacaaggctatgtaaggcatccctcgaggcctgcattttaatgtctagttttcaattttatggcacctaaaatatcccnatggtggaggatattagggatggggntattatcccngggatntctcacnggcccggttggggccccggggatcttagggttttcca

SEQ ID NO: 272210 - DNA, 303 bp, Homo Sapiens
  misc_feature (275)..(275): n is a, c, g, or t
  misc_feature (292)..(292): n is a, c, g, or t
gaaaaccacggaagctgaaggtcttgggtgttggtgcggaagtcgttaccttttgtcgtctttttacactaggtttttgttttaagttagtttgagaaataagagcagtcaccatagttagttagctttgcggcccaagccaatgaccgaggccatcacctgtgctctggggtttgtccctggggaaatgtcttttcatccttacctgccaccgtgtgcattgcaaagagggacaaaaggggctctcttgggaagggctctaaagttttccggtnatgaggctaccctgttnttttttaagac

SEQ ID NO: 272211 - DNA, 585 bp, Homo Sapiens
  misc_feature (34)..(34): n is a, c, g, or t
  misc_feature (390)..(390): n is a, c, g, or t
  misc_feature (416)..(434): n is a, c, g, or t
ctaaataatgacctatatgaagctgcctgatttnccaaaacaaagaaattcccatcttacccaaattcttggagttgatgttgactgtggaattctaatgtgcttgggctcttagggtatgactggtttcccctggtgctgctgggacgggactggccccccaggaccctctgtaagtaaatcactgtaaacgtgtcttcatttactctagccaaaaggcctggcttctgataggaaactggtaagaaactcttcatgaaaacacatcactaatattcgctattactctcctggtctgaagtcagcttttctgaaccattaaggtatttcatcacaagttatattttataatatcagtttaagaggcttttattcatgtgaacaccaagntcctttcaggggcatggtctttttgnnnnnnnnnnnnnnnnnnncgaacagttttagccacatatcagatatttctatatctaattatcctttatggctaacattctgcctccattgttaaggtataattgttcctgaatttaaaggtggtttggcctctaatttaattctgattcagactctcctgtcaggact

SEQ ID NO: 272212 - DNA, 410 bp, Homo Sapiens
  misc_feature (348)..(348): n is a, c, g, or t
  misc_feature (374)..(374): n is a, c, g, or t
  misc_feature (389)..(389): n is a, c, g, or t
aagtcatcaagaatagtttaattatgtctacagtattcagttacaaagcgttctgactaaaatgtaaagtgtctagccctgcagtgatcagcttcactcagctactccgtgtggcttccatctcttctccccacagatgcagtcagtggcagatgtgacacaaggtgcagagtactgcccttgcactgggaccaacctgctgtaaggcttcatctgggccagagcctgggtcctccagctgatcactgttggatgcagcactcaaggggcgatggttttcatcactaggcaggcaaaaaatgaggctctctgggacctcatagggctttgggcagcatctaccagggnttgggacccaatccaagtctgcagcngtgtcaggcaggggnatcaggccaggggtcgggcat

SEQ ID NO: 272213 - DNA, 388 bp, Homo Sapiens
  misc_feature (285)..(285): n is a, c, g, or t
  misc_feature (315)..(315): n is a, c, g, or t
  misc_feature (366)..(366): n is a, c, g, or t
cagtttaacagccatccatctttatccaccagactagattccccagtgtccagagaaaaggttgttcgcattttcattatgctatagggacctgctataggaggcgggcaggcataggggcaaggcagaggcaatgaacagacactggctggtctcactggcttatatagtatgttagctggactttctgggcaaaaatcaaaggtctcaactcagatcttacacatacatgcaacatacagccaagtccatagtcctgtgacttgccaggggtcatccatccantcaccccttcccactgggctgggaatcatntcatcccccgggaaacctcagccctggaaccagccctgaggtcccaatttnccaccctggattttaggagaag

SEQ ID NO: 272214 - DNA, 420 bp, Homo Sapiens
  misc_feature (22)..(22): n is a, c, g, or t
  misc_feature (78)..(78): n is a, c, g, or t
ccctgaagcatctctcccctgnaacccttccctgaaaagacaagacccaagtgatcactgtgtgaaattaaaagcccnatttcccctagaaactcactccttctcttgaaagcttttaggaagactaagagataaagccatcccacccaagagataaagcccaggaaaagtgtctgtccccagtgcaagtgtgtgagggttgttagtggtgggggatgggcatccttcattctttcagcccaggggactgcacgtccgtggagtgaacaccccagaggtgggcagggaccaagtccagcatgggagacaggacccctgggtcaaaggctgttcttaggtaagcttcgtgacaaacatggcatttgagctgggtcttgagtggagccaggagaaaacaggaattttgaaaattcctgaggg

SEQ ID NO: 272215 - DNA, 417 bp, Homo Sapiens
tattgaagaccttgcatagttcaaataacgtgaaaagtattgatggtcaaaaatattttgtgtaggaatcaatgccaccaaaatgttagtgataaccgtacaaacaaattgaaacaaaactgagacaggattcagataattctgacaaataaagaaaaagcagccacaacactgaccccccaacatgttcttaataccctttggggctgtttctagaaaaggcatatttcaccctgaatgctaaatttagttctctactctgttagtttagacctgccttccatcaaaatattgttgtcaaagatttatgtaacttgtgatttgagccttgtatgaaattctttcaagttttgattactaaacagttatgtgtcattaatctctccattgaaaattaaaatggcacaagaagcaaaa

SEQ ID NO: 272216 - DNA, 469 bp, Homo Sapiens
aactctagctgcttggcaactctcctagatcacagctttgggaaagaaatgtatctccctgatgaaaaatgagctaacagagatcccattgatggcccactcaccaactctgtacgagtccatggatttcaccctacacaagaaattcaaccaaattgatttcctgaacagagaaaaaagagagggggaagttggggaaagtaagccaggtatgtttgctcagacgtaaaagataccacagtgcaagcagaataacatttcatctgaccacacgaagcacagtgtttaaaatgcataatgaagctttcttccttactgcctgctcctcgcagggggttataaataagctcctagaatgccacgggtttctgtattagaaaaagcaactcactgtgtattatcagttaacttgaagaaaaggtcacaacagaaataatagttctaaaaaataactttgctttctagctgt

SEQ ID NO: 272217 - DNA, 332 bp, Homo Sapiens
gaaaagccagaccttgtgcccttgttttgaacaccgactgggaagatggggcttaggtaacagccaaacctggctgtcagctgtgtgggagccaccaccctctctgggaagagttcctgcttctgtatggcaagcataaatcaagctcagtctgggttatggagaagttgaaaattgttttgttcctcattagtttataattgtatgaaatacgattttaatgaaaacttttcagaattcacgtttgtgtagatatttcagagaaccatttttactttacatcctaaaactgccttttcctatggttttgtcaataaaacactatgatgttg

SEQ ID NO: 272218 - DNA, 410 bp, Homo Sapiens
agaggctgctgctgcattacaggaggttgcaatgacggctcaaacagttttatggggtcttgggtctgaaggtagtagggctgtttcacaggcataattttccctaatgggccttgaacctgagggggattccacagctgtttggaggcatctgctgcttgatactaaaaaagagacgcctgtcataaaggtgaggataaaatggcaatattacttataatgaatgctaaagaatcacagaatgaacttggggtgttttccaaccaacaaaactctaggcaaggcagcagtttcctttaccttttgggctattcaatactcagagctttttggaaacagattatgggcaccacactcatattttcttttaattcaactatttaagaggtttaatgaatgaatgaatatat

SEQ ID NO: 272219 - DNA, 381 bp, Homo Sapiens
gtagggatagttacaaatgcatccatcttaattattttccaataggcttgtaaatccttatccgatggaaggagaaaggagacaagatgtggaagaattgacatgtatccccacccataaaatggtagaagatgagttttcaatgagtagtcatagttgaaattttacaaccaaagctcccatttgattgtaatcttgccaaaatataatggatgtataaatgaacttggggtataagcaataatatccactagtgttgttatcagctactgtaaccaagtggctggttcatttggttgatgctgattatggcctttaaccatggtggtttgttgtgtgttttttatttcacaaaaagccaataaaattgtttagctataa

SEQ ID NO: 272220 - DNA, 312 bp, Homo Sapiens
tgcatactttcaaacaactttcctacaggaggaaaagtctgacagattttcaatgaagctgatatctggaagagcctctacaaagcacaagtcctttgagaaagccggcttaatcttcaacaacacaacataatgtagtggcattcgtccagatactgtgaatgaaggctcattctggctggaacacaagcatcacctgccagtcattctcagacataagacagacagcctagggaggccacattgggatccatacagattttggaaaagaaattgggtctatccaacatattcagtgtaggtctaggtctt

SEQ ID NO: 272221 - DNA, 236 bp, Homo Sapiens
atgagccactgcacctggctgaaaatgttttttaatgcaaaaaagctttacatttttgcagaatctaatctatttttaaattttgttactagtgcttttggtgtcaaatctaacaatccattgtcaaatctgagggaaatgcagatctacttctatgtttgcttctaaggaattttgcaatcttaccccttacattgagggcccttggggtatggaggttaattattatatatgga

SEQ ID NO: 272222 - DNA, 231 bp, Homo Sapiens
gatttcaagatgcattttaattatttacataaattaattggttatctattttcttgaagtgtatttcaaagtcctacaaaacttaattgttgacctccttaaaatgtagttgagtatacttaaatttcctttgccaatctgaagtaaaactttaaattcaaaccctcaaagcaggtctttgcccttcctctaggaggttgggtcacggaattctgttttacgtcccttcat

SEQ ID NO: 272223 - DNA, 396 bp, Homo Sapiens
  misc_feature (15)..(15): n is a, c, g, or t
tgaaaaaaagacttnccctctcttgtccccaaacacaaaaaaaagcaagcccaagatctgatgccccatatcactgcctccctctgacttgggctacaggagtttcctgaaggaaaccaaattttacatctctgtcacattccagatcaccttagaggccacgctcccaagattagttatcaccctggcagtatgaatacttccctaaggcctcccatccatggaggggaagagtgggaaccagctgttacactcagcatctactgagcactgatgggacgcctgcctgggccatgtgctgtggggccaaatggacatcactccctaacttcttgagatctgtctcctctgtggattcacgcatgtatcaacctcattaaactatgccaaacttta

SEQ ID NO: 272224 - DNA, 509 bp, Homo Sapiens
  misc_feature (18)..(18): n is a, c, g, or t
  misc_feature (129)..(129): n is a, c, g, or t
tccctcccccctggccanaaatacctccccctaaaagacctccttgaaatcgccccccagggttttgggtgaaccccaagtaccatcctggaaagttgacctttaaccagaaagaaccgtcctaccccncccctgccctgtaccgaggcctttgtttaaagaacctgtttaattaaagataaaattgtccaaagtaaaagcaccctcaattccattgacctttcctagcccatccttccctttgattagcctaacaaactgtcagggcagcattatttcatgctgcttcccagagccctctgggagctatatacattgtaaatgcaggccctagctttggaacgaggaattgggagattcccaggagtcagggtagagaatttctgagcaaatcggagatattttaggggtgtggaggaggggaagggaggaatgggccaccatatttggccttacaggaattaaggagacttcctgtaatatttctttccaataaatattgcttttta

SEQ ID NO: 272225 - DNA, 478 bp, Homo Sapiens
  misc_feature (26)..(26): n is a, c, g, or t
  misc_feature (31)..(31): n is a, c, g, or t
  misc_feature (36)..(36): n is a, c, g, or t
  misc_feature (50)..(50): n is a, c, g, or t
  misc_feature (58)..(58): n is a, c, g, or t
  misc_feature (137)..(137): n is a, c, g, or t
aaaccctggtccccaaaaccaaaagntggancctanccctacgggaaaanatggaacngggaaactgtggaacaattgaaaaaaaaggcccctctccccaaaaagcaccctgccgaagggttgggtgacctgaaaantctgggcaagcggggaatcaggggcagcctgaagacccaccccaggcatcactgtgtctgaaaatcccatgggcagctattttgtggtcttgagcagtcatggagcccttgaccccatggtcccccgtcttcccacttctgtcacacactctttgcctttattcaggttggaatatgttaggtaggagacagattctaggctttaatgatttgccactcactagcctcatgactctggagaggttgtgtgacgtcactgtgcctttggtatataagttaggctgagttaatgaccttctctgaaaaataaactccaaaatcatgtgactcaacagaaataa

SEQ ID NO: 272226 - DNA, 493 bp, Homo Sapiens
  misc_feature (33)..(33): n is a, c, g, or t
aaaactaaaagcaaactgaagggtgcaaaacanagccatgaagcccaacttgcccccaagaactactccccaatctgccttccttccccgtcccccgtgaaaagtggccccctgaaaagggattgtaacctgtatcccccaccccaaatcctcagggtagaaattgggatctgtgtcccccaccccaagtctcaggtagacttgtaatcccccagtgttggaggaggggcccagtgggaggtgattggatcatgggggtggatttctcccttactgttctcatgatagtgagtgagttctcatgagatctggttttttgagtgtgtggcccctccccctctccttttgctctcttcctctttctccggccatgtaagatatgcctccttctccttcaccttccaccatgattgtcagtttcctgagcctcccagccatgcttcctgtatagctgcgggactgtgagtcaattaaacctctttattcattaaaa

SEQ ID NO: 272227 - DNA, 391 bp, Homo Sapiens
tcctgtaattaccttagggaagacccaaatgggcacccagagataagactccccttagatcccccaccttagatcacccaccctttcctcagggggtaataaagtcatcttccttggaatgtagcaatctataaccaatcaaagcactgtaacatacgcactggtcttgtatggaaaatgttgtaatcctgctaaaattcctctctctttgcctgtggaagtgaaaccttaacttctccagtttggaatgctcaccccatgcctttggagtcaatgcttactgggtggctattctcaaactttgcactcaaagaaactctatacttagtcttattttctgaatctcattatttaaggttgacataataaacaactaatagtaacatataaa

SEQ ID NO: 272228 - DNA, 436 bp, Homo Sapiens
  misc_feature (290)..(290): n is a, c, g, or t
  misc_feature (380)..(380): n is a, c, g, or t
  misc_feature (386)..(386): n is a, c, g, or t
  misc_feature (406)..(406): n is a, c, g, or t
atggactctgcctgaggtcaatctatgtgatgtgttgcttttttgtacctttttagagctttgaaatcagatgtatttagctttgaatcttggttctgtcatttaatagaactcaggcaagactcagttttctcctcttaaaaggggaggatggtatctacctcctatggctggtgtgaaaatgaaatgagggtgaaatacagaaagcctccgggctcagtgtctggtctggagcacagtgagcaatcagtaatgacacacagattgctctccctcccagccacggcccnactgtctcattattggtaccatttgttttccatatcttctaacttcagttccctctgttcagggtttcactaggggtggccatccccagnttaggnttggggagggagtctggtcnttctccattcctaaaatgctggaccccttt

SEQ ID NO: 272229 - DNA, 583 bp, Homo Sapiens
cagtatgttaaaaaaaaggataccggtcccccacaacactgctgttttcttccccagaacacagggctggtgcaattactggtaggggactctgaaaacaccgtggcgccgcgtctgctcaatggagggtgggctggccccagctcaggccacacttcccatgatggctgtcatgccagggaagctgccaaaccccatgcccactacacaatctcatttaatcctcaaaagagccccatgaggcagaaatgacctctatcacacagaagaggtaggttacccacctaccagggcactgcgctcagagagacagagcgaggagtctcagcgcagttggacctggggcgccaaatccatcctctctccagctgggttcctgtctgttttcattgcatgaattttcagattacttttgagagggataaatcatctattccttttccctccatcatcacatcatctccatcttcagtcagttttaaggtatttagcttgggccaaacctacactggtctgagtagaaataccaaaagataaaacaaagggctagaggatattgcacaccctcgggaacggggctgta

SEQ ID NO: 272230 - DNA, 451 bp, Homo Sapiens
  misc_feature (211)..(211): n is a, c, g, or t
  misc_feature (213)..(213): n is a, c, g, or t
  misc_feature (430)..(430): n is a, c, g, or t
tgggcactctgttgtagagaaaacagggacttcaattcttttccattcatcaaaatgtgctgggcaagtttgggtgagaaatcagagtcctgactggagatgatgctatctatggaaggtattgctctgagaacatagacctggtgttcatttccttcccagggtggcttaaatccatgcagaaacccggggccccaggcagaagcctgtngngggtgacatcttggcctgtccatgctgccactgaagctgccattgcccaggccagccagcataggaagtcctactgtccagcaagattgcatactcctccagtcccttgtgctgaaggttccaaagtggggaggagaagggccttgcatttcaccatgaatctctattcctatgggtgggggaacaaagcgtgggatatgacctgatgcctggggtnttctcctaccttattacaact

SEQ ID NO: 272231 - DNA, 288 bp, Homo Sapiens
  misc_feature (231)..(231): n is a, c, g, or t
  misc_feature (233)..(234): n is a, c, g, or t
  misc_feature (256)..(256): n is a, c, g, or t
tcaactatctgcctatccatgtgaaacatataaaactttagaatggtggttctgaatgctgactgtgcactgtggagttctttaaaaacagatccccaggctccacaccagagggtcctgacttgggtctcgggtgagcttaggcttgaagctgtggctgatgttttttaggagccgtaggtgcatataaagcacagtctcaggaatcggctttgggaatacagtttaaanannaaaacactatatttttcaaagntatatatttttttaaatatttatattccttct

SEQ ID NO: 272232 - DNA, 486 bp, Homo Sapiens
ggccttgcccagctgaggcagatgcaccctgagtgtgagggcgggcaaattgaccctgttccctcccatgtgcccctgttccctaccccacctgaagggtaaccttccattaagttcccctaccctgttccctacccaccgtgaagggtagccttcattaagagaaagtgcagtcgagggtagatagaaacagcctctcagaaatggctctcatgcggattcggcttgctgctcgtattgtgggcgagccttggagactgagggaaggtgagtacttgtgagttcctaggcagagtgagtaccctgcgttgaatgtagaattttcctattaagagcagaacaaaacaggtttttagattagcactctgacgtgggctggaaatgcccggcaaatatttaccctagatgtaaaacactcacaaagtcaaatgttgtttggaaaaccctaaaatagaaaatttttactcagggttttatatttggtcc

SEQ ID NO: 272233 - DNA, 481 bp, Homo Sapiens
  misc_feature (30)..(30): n is a, c, g, or t
  misc_feature (120)..(281): n is a, c, g, or t
atacctttgaacccctgtcactggaaaaancagtatgttaataagtaactgggcctcctttgggaaaaatggaaaatgccaggccaatgttagaaccactggtaccacacacctaattcnnnnnnnnnnnnnnnnnnnnnnnnnnnnnnnnnnnnnnnnnnnnnnnnnnnnnnnnnnnnnnnnnnnnnnnnnnnnnnnnnnnnnnnnnnnnnnnnnnnnnnnnnnnnnnnnnnnnnnnnnnnnnnnnnnnnnnnnnnnnnnnnnnnnnnnnnnnnnnnnnngtaaatagctgtgtggcataatttcaggtagtgataagtgctgtgaaggataaagcaaagaaaggggcagggatggctctttggagagactacttagggatggctttcaggaagaggtggcatttgagcaggggcccgagggattgatgtgacttgtgataaaagaaaaacttcagacgaattaaatttaaagaagttta

SEQ ID NO: 272234 - DNA, 531 bp, Homo Sapiens
  misc_feature (145)..(145): n is a, c, g, or t
  misc_feature (511)..(511): n is a, c, g, or t
gcctccagaagaaggaatatgactaaagcatggatgagagactaaagcatggatgagagacatatagtccctgaaaatcttctcaagtgaataacgactaaatttagatgcccttctacccactccatcggcagctgtgccgganacttcattcacgactgaagcatggtagatgagcagattcgcccacttataaaactgtttccagggacatgaacttcaacaccatacctctacacagagctatgctaaaccttccagagagataggtctttccttttcttgggaagcaggctaaacaagcttttgatgtcactcatgataatggggaaattctttgcatttggcccagattccttctgatgcagtttaagtccatttcctcctattttgcattcctgaagacacatcgaattttactaaagtaacaacgtgttctaagctccttaagaaatagagatataacttaattactagtatgaaggaactatttagaaaaactgccaggtantaaattaaagtttcccaaca

SEQ ID NO: 272235 - DNA, 316 bp, Homo Sapiens
ggtaaaaagccctcatgagtgtggaatctgtaaaaaaggcatttaaacacaaacatcatttgattgaacacatgcgattacattctggagaaaagccctatcaatgtgacaaatgtggaaagcgcttctcacactctgggtcttattctcaacacatgaatcatcgctactcctactgtaagagagaagcggaagaacgtgacagcacagagcaggaaagagcagggcctgaaatcctctcgaatgagacgtgggtgccagggcgtctccctcacagggcgactcggacgagagagagagtttgacaagggaagag

SEQ ID NO: 272236 - DNA, 440 bp, Homo Sapiens
  misc_feature (63)..(63): n is a, c, g, or t
  misc_feature (111)..(111): n is a, c, g, or t
agacgaagaatcctggagtgagagagacccgggttccccattcccaacttccccctcacttgnctgtgagactttgggcaaagttccgttgggcttgtcctgagcctcagntttccctccttggtaaaaatggataataaaaatcctctgcaccactgagttgcagcagtattaatgtcatactttatacagcatgcctagtgcctgccccagtgcagatgctcaggaaatatcgtccttacttaggagcactcctgtcaatgaaaacaggacctcttgccaaagagaaatattttgtgattagtgcttgctcctgtccctgcccccatgagcaagtgtcctccctttctcctcctgcattgttgaggacacgtttcttgatacaaatttaactacagccactaaatcagaaattcccacccaaagtcataccataagca

SEQ ID NO: 272237 - DNA, 196 bp, Homo Sapiens
  misc_feature (88)..(88): n is a, c, g, or t
  misc_feature (149)..(149): n is a, c, g, or t
  misc_feature (172)..(172): n is a, c, g, or t
ggccatgttgaccagggctggtctcaaactcctgaccgatccgcccgcctcccaaagtgctgggactacagggcatgaaccactgcgnccggcccattccttcaagtctttattgaggcagctgcttattgcgctggggggcctgcgtnggatgcttggtgccaggggtttngggcaagagcttgcttcctttgtt

SEQ ID NO: 272238 - DNA, 235 bp, Homo Sapiens
gaaatgaacagtatataatctaatctctttaattttatgtacatgaatataatgtatgtcaactttgtacatgagatacatatagtatttaaacattttactcaacaaacaagaatttacaatagcaatataactgactagagggctatcaacttaataatacttagattagatctgtactttaataggaaaagaatttaatagtttacaatcatagaaacactgacatttaaaa

SEQ ID NO: 272239 - DNA, 182 bp, Homo Sapiens
atgagctaacacactcagcctcttttcttttttaattgagggtttaaccatttaatcaagtgcacatatttacagtgtacaatctgataagtctgacatatgtatacaccaatgaaaccatcaccacaatcaaggtaggtgaatatacccctccccttccaaaagtttcctcaggggcatca

SEQ ID NO: 272240 - DNA, 526 bp, Homo Sapiens
aaagcaagagcatgcccttagcagtccacaagaagccacaagagcccaccctgctgtcaaaacccccagagaaagaggaaccccaagaaccctgcccagatgccttgtgaaattccaccctgttgccttccccccgggactgaaggccagaaagtgactccccgaaattcctctttcctggacctcagaaggaaacccaaagcaattgatgacacccgcatccccatacctaaaaggcagggctgtcctcggtggtggccttggtggttgttatcttctctcctagagtagaatgtgtacactgggactgaattctggcaactcttgaggttttgagacttggcagaacctgacatcaaaaatctcagaatggtagacatgtgaggagtggagtacaccagagagccccactacttttttcctgccccttttgccaacctttttggcattcccagccaacacacacacaaaaaaacatagctgaaaggtatatcatttttctgtaatttgagatttggattgtgaa

SEQ ID NO: 272241 - DNA, 453 bp, Homo Sapiens
caattccatccctcctttcctgcggacacacacctggcccctggcccctgccctgtgtgtctggaggaggggcactggggaggctgtggagcagagagaagaggccggatacattgaggatggcacctggcaagccaggcttccttcctcaaaggccagactgctttcctcagtgttacttactaaagctctctttttatactgttaaaaagatatataaagttcgtataaacaggcttgagaccactttgatgtaaaagctgtcatagtagtttttctcacagtggcacaattcatttgattgatggaatattcagtgacgccatgtatgccctatcgcttttttctcatccatctttatgctataactcatactgatttaagaaatgatttctccttttggcaaagcgaccccattcaatatggttataataaaagactaatgtcaaactg

SEQ ID NO: 272242 - DNA, 458 bp, Homo Sapiens
agtgagcatggggattcccatcaaggggcctggcacctgtgctagttacgtagttcgctgtcacgcgctcactcctgaccacatgcacgttccctagatgcagactgctttgaactttaaagctgtacaatttggttatgtttgtgctgacttaaaaatatattttaatgaggaaaaaataatggagaaccctgggaaggacctggttcttttgcttctcggggaactgtaagccctcgcgttctgggaatcgctctctgctgctctttcctggaagctaagcctgtctccaccgcccgaggcctgcgccgggtgtcccgccgcagttgcgtttgctttggaccttgcgtgcgggggagggggtgtcggtccgagcccgctcctttctgtacacctaggctgcgcgccccgcttgtgtctgaggtcgtgtatgtcaaaaataaagccgctagaaacgg

SEQ ID NO: 272243 - DNA, 334 bp, Homo Sapiens
  misc_feature (245)..(245): n is a, c, g, or t
  misc_feature (307)..(307): n is a, c, g, or t
  misc_feature (322)..(322): n is a, c, g, or t
gatgaggaggtgcagactagttgagccctgggttcccacttgtctttcctctctcttacctccacctcttttctttttcatttcctactgtctccaaggtaattgatggtgggaccagaaagaggatggagtaaaaaccattggagggaagagtgaactgggctatcagattgtatgtgagctgagaagaatacacactcttcagtgtctgcgattattatctaacggtgatatgtcatcacctnattgcatatgtgttatacccccccaagaccgggcgcgttcttctctgccttattcccctcgngtttcaagactccanccagtatggggt

SEQ ID NO: 272244 - DNA, 538 bp, Homo Sapiens
  misc_feature (15)..(15): n is a, c, g, or t
  misc_feature (45)..(45): n is a, c, g, or t
  misc_feature (56)..(56): n is a, c, g, or t
  misc_feature (71)..(71): n is a, c, g, or t
  misc_feature (95)..(95): n is a, c, g, or t
  misc_feature (199)..(199): n is a, c, g, or t
  misc_feature (290)..(290): n is a, c, g, or t
cccaggggcagggangccttcccaagcctgcaggcaaacaggaanacttgaccctnaaaaaagcccctccnggtctttgggattaggaaaaggcntatggttaagcatagcttaaagagcaacctcaagagacttggagcccctactaaagtgactgacccactgtttaagagtgtcctagtatctgatgttcatttantccccatgttcttgtgtgtcacagttcagccagttttggtttatgcctagagctacttccaaggaactagactaattagctataataggcnccagcgatgcttcttattgatcttaatagtatgcccctccttcccctgtcctttcatttctctatccaagtagcagtcaggttcttggtgtgatgggactgaaagaattccagtcagccagagccttggcagctctgaagctaaccttagcatctaagtgtcgatcttgaattccctgaaaaaatttctataggaaatgaagcttccctggtcccctcctttctggccattgtcatccatttcccagt

SEQ ID NO: 272245 - DNA, 357 bp, Homo Sapiens
  misc_feature (20)..(20): n is a, c, g, or t
  misc_feature (27)..(27): n is a, c, g, or t
  misc_feature (57)..(57): n is a, c, g, or t
  misc_feature (80)..(80): n is a, c, g, or t
  misc_feature (105)..(105): n is a, c, g, or t
  misc_feature (110)..(110): n is a, c, g, or t
  misc_feature (143)..(143): n is a, c, g, or t
  misc_feature (289)..(289): n is a, c, g, or t
  misc_feature (306)..(306): n is a, c, g, or t
ccgaatcctccctcttgtgnaggccangcctcacccccttcccctgccgtcaccccngggacctcatcgtcccagacccntgtcatgacagtggtgcctccccangccantgcagacgcccccgccagtgcccccccagccanaaccccctccccaccttgcttttgagctgtcccgcctttctgaaccaaaccaatgtatttcttaaatgtatttgattgctgcctcatgcctccctaaaatatataaaacccaactgcgccccaaccaccttgggcacatgttctcnggacctcccaagagctntgtcatggctgtggtcacatcatatttggctgagaataaatctcttcaaat

SEQ ID NO: 272246 - DNA, 426 bp, Homo Sapiens
cctaatttagcctataagcccttcagcaagacccatcctcctatggcctgcatcctctctccctataggtttgacaaagattcaccctatgagtttggatgaagacaggctaggtatggcccctcaataagaatttattcctgactgggagatttaaaactgtaaatgcttgccgggcgtggtggcttcattagtgtcaaagccaaagcatattctctgtcagcttttcaaaaaaacacgcagtaaagagagattcctaccaggaaaactttgatgggtgtttttcaagtgtcatctcacagcagaagatgccccaagtggtcaaaccttgccaacagcttcaaaaaaaggtaactagggatttaactttacgggtgcattttgatgtttccctttgtgtcatatctgatgataaaagaaccttaa

SEQ ID NO: 272247 - DNA, 245 bp, Homo Sapiens
  misc_feature (41)..(41): n is a, c, g, or t
  misc_feature (213)..(213): n is a, c, g, or t
aggctcctttctgcctccatggctatccatccacccccaanagaccccgttcctccagcctgcgtgcccctaaccctggcttttcccatctccccagcataaccaaatcttactaaactcatcctaggctgggcatggtgactcacgcctgtaatcccccagcaatttgggaggcaaaggtgggagaatcgcgtgagcccaggatgttccagnccaggctgggtcacatgacaaagccccatctc

SEQ ID NO: 272248 - DNA, 507 bp, Homo Sapiens
  misc_feature (466)..(466): n is a, c, g, or t
  misc_feature (478)..(478): n is a, c, g, or t
  misc_feature (490)..(490): n is a, c, g, or t
ttgtgtggcatgtctgcagcactgagtcttctcagtttggtttatctgggaatgtgtttatttcaccttcatttctgaataatgttttaactgattcagaactcttggttgataacttcttcttcctctgagcattttaagtatgggtatatcttggagatattcagttccagaccaccacaataaagcaaataactcaatagtcacatgaaattttggtttcctagtgcatataagagttttatttataccatactgggagtcttttaaatgtgcactggcattatgtttaaaaacaatggtacatatcttaattttaaaaagactttacaaggtaaaacttgcctagaggatccatctgaggcccttcagccaaggtccattaatctttttgcagaaggggggggtcttgccccggaggttgttggggtggttggactgaccaggggtgggtgggtgctgaggnagggggtggccntgggccatttcnttaaaatagggcaccgg

SEQ ID NO: 272249 - DNA, 468 bp, Homo Sapiens
accagcattgcctcatcgaagggaaggaatgacagatgaggaggccttggtgccctatagcaagcccagtttcccatctccaggtggccacagctcatcaggaacagcttcttctaagggatccactggacctaggaaaaccgaggtgttgagagcaggccaccagcgcaatgccagcgaccttcttgacataggatatatgggctccaacagtcaaggacagtttacaggtgaattatagtaaatgagaggagacatacaaagctgctctgaaggaccatcaggtccggactcatggaagtgatgactctaaacagtgcaatgaacaatttatttatgtactattaaaagaactgtaaatgcaatgtaaagacacacagccacacatatcccacagatattttcattgtgttcttctcttaagtacaccacccaccttaactctttcttgtcaggagtatataaaaa

SEQ ID NO: 272250 - DNA, 461 bp, Homo Sapiens
  misc_feature (12)..(12): n is a, c, g, or t
  misc_feature (37)..(37): n is a, c, g, or t
  misc_feature (285)..(285): n is a, c, g, or t
  misc_feature (445)..(445): n is a, c, g, or t
ttaaattaaganaaaaaaaataagtgaggtacctttnagttgaccttataatggttagtgaggttatcagtggttctcaaactccagcgtacacgaggatggtcttgtgcttgttaatacacagatgactaggcccacctgcggagttcctgttggagtctaggcctgagaatattcatttctaacaagttcccaggtgaccctgaggctcttggactggggaacatgctttgagaagcactgccatctatttcagcagcatctactgcttagcacctgccaggnttcttggacaccctctctctaatcttcatgtgggacaccagggtcccctggggaggaacagactaaaataacttgcctaagatcaaaacaagacagtggagaggagaggtcaggcctgtctctctccagagccctgcagcaacatgagagctgccctctnacacatttttacaaaa

SEQ ID NO: 272251 - DNA, 402 bp, Homo Sapiens
  misc_feature (152)..(152): n is a, c, g, or t
gaaaaccaacccaggagatctaaacttggaatgaaccttctgacttgcccaagttggggtgaagaactgggcctttatagcccctacatcaaccagtcattgaatgtggactttccccaggaaaggaaaggcccatgacccttggctgaaanaatctccttcgctgagacagctcatgaagaaggtgggcagcagagggctgtctgtcaacagagccccccagcagctagaggaattaatccttcagttttgaagagggacctgagaagtgcatcatgtcatccacgatggcctaaggtgccctttccctggtttatctaacaaacatctactcacatttcaagactcagctcagggccgggcgcggtggctcaagcctgtaattccagcctttgggaggct

SEQ ID NO: 272252 - DNA, 448 bp, Homo Sapiens
  misc_feature (176)..(176): n is a, c, g, or t
tttgggtgtttagagactgtaaatgcatattcacaaagttatctgatagggccttggaggagaaggtccagttttaaaaaatgacagtttgtgtttaataaatgaaggcatgagaggaagtaagtagcaagttgaaggacagggtagttgagatggaaacaccttccaaaaccccnggttatagatgtactgtttggatgtagcatagtcttgagtctagcgtccacaaagaattattcaaatgatatttagaagaattataactattacattgaatggagtcccttggatattttgatagtaaaattaatagccataaagtcctagacttcttatttgaagttaaaatttcttatttgaaaagttgaaatttatgagctttgaagattgctaaattaaataatttatagctccaaaaacaaaaatatacttgtatatgtcacagaga

SEQ ID NO: 272253 - DNA, 526 bp, Homo Sapiens
  misc_feature (19)..(19): n is a, c, g, or t
  misc_feature (31)..(31): n is a, c, g, or t
  misc_feature (38)..(38): n is a, c, g, or t
  misc_feature (78)..(97): n is a, c, g, or t
  misc_feature (100)..(100): n is a, c, g, or t
  misc_feature (133)..(133): n is a, c, g, or t
  misc_feature (143)..(143): n is a, c, g, or t
  misc_feature (148)..(148): n is a, c, g, or t
  misc_feature (173)..(173): n is a, c, g, or t
cacggggaaagatttggancccccagaaagnttggagncccaccccgggcaaccataggggagaccccccatcctttnnnnnnnnnnnnnnnnnnnnttnagccggagtgtaagtggtgccttgccctgtagnccctagcctnccccngggaggcctgaccatggggtagganccccttaagtccccaggaggtccaaggctgcagtgagtccatgatggggccactgcactcccagcctgggtgaccagagccgagatattcctgtcctcaaaaacaagcaaaacctatgaaaaaaaagtcaacatttccttgaaataccttcctcatatttggtagaggagggagatatattgggataaaggacataggaagataggattttattataatattaatttctgtagttattcaacacaaattaatttttattgagcatttgctattagggcagtcactgggcttttacgtcagaatatagagattaattcctttccttaaggatctaatcatacaatggatgttta

SEQ ID NO: 272254 - DNA, 340 bp, Homo Sapiens
aaaaaaagctgtgtgaaagagcatcctactgagctgggccctggtgctgttttagagacagaaaagcagtaagagccattcagagtgtggtggagagacacatattacaaaaggcgattctatttctggacgtgatcaacagcaggagacagcaaggtctgacctataatagagattttcacatgtgttttatcagttactgcttctaatactcatccctgtttttccacatgaggaaacagagttctggggttccatggctggtgagaggaggcgctagagtctgagcccacatgctccccgctcccaagccaggcctctgactgtaacatcagcaacc

SEQ ID NO: 272255 - DNA, 506 bp, Homo Sapiens
  misc_feature (18)..(18): n is a, c, g, or t
  misc_feature (93)..(93): n is a, c, g, or t
  misc_feature (100)..(100): n is a, c, g, or t
  misc_feature (280)..(280): n is a, c, g, or t
  misc_feature (427)..(427): n is a, c, g, or t
gaccctgaagagactggnaataaaggacagagatggggtttggggcacagagcaaccccatgccaactccctaccctgtgatgcagaaatatnaaggggnattcagcccaccctaatattttcctgggaaagtggaaaaagacatatgtaactgtgggtaaagactcatgggtcactttaggctatatgtgttttatgctgcagcactagaacataggagcagcttaaataatcagatttatcatctcacataaaatgtcagtccctaagtaggacagcnccaggggaggggtggttggtttaactaagatatgtccccaggtcagaatcaggcaccttggttttttccctctttctatgctgccattctctccccatgaccacaagtacctttcttggctgcaagatgattgccatagctctaggnattgcatgctcatacaccaatcgacaaaggcaggagtagcatagtttcttgttttgtgcctttttaaaagtttaaaaag

SEQ ID NO: 272256 - DNA, 432 bp, Homo Sapiens
  misc_feature (21)..(22): n is a, c, g, or t
  misc_feature (193)..(193): n is a, c, g, or t
  misc_feature (275)..(275): n is a, c, g, or t
  misc_feature (326)..(326): n is a, c, g, or t
  misc_feature (335)..(335): n is a, c, g, or t
  misc_feature (382)..(382): n is a, c, g, or t
tttttttcatgagtggcaganntttaatgggggcaggtgagaggagatcctggaggcgggagcgcctggcacccaagccacagcaggagaccataggggacgctccagttttagggtgtggagtgaggcattgtgaattgccaagaagacaagctaagctccttcaccagggcttgacgggcctgggagggcnatccagtgagcaggggccagccctcaggatcccaatgcaagaggtggcagtgaggtcaggtcagctcaggaagggaagtttngcaagagcccccattgacagccctttggggctttggcagccaccataactnggcagggtnagggatgcacatagggcccagggggagaaagcacgttaagggcgccntggggcctattaagttgggcttttacccccagggggcaaaagggttgctt

SEQ ID NO: 272257 - DNA, 431 bp, Homo Sapiens
  misc_feature (393)..(393): n is a, c, g, or t
catattcctattctcagagtccatctgttaagttttttaatcggtggcatatctgggaccccaggccatgcaaaattccacaaagtacccttctttgtccattgtagaatgaagtgatctctatctcctctctgcaaaagagagctgtttgggggagctcctgatccttggaaagagaaaatgcagatggcagaaagagaccatcctccttctttggatctttgcttggtttctataggtactgccttttccataggggcagactaggaatgacacaagtaatgtaaccatcaatggaacaactgaggcaacagcgtgtgggatactttcatggaaaggtttaaaagaggttaggctcaagtgggggacctaccatggtaaattcagtgtttntaggagtcagggccattttctagggaaattctaggggt

SEQ ID NO: 272258 - DNA, 444 bp, Homo Sapiens
gggattggttcaagttgggtattgcccctgcatgaatcacacgggaatgagtctggcctctccttggggactctaaaagctggctaggtccattaccatgagagtcccttaggattaacaggccttttgtttgcctgaaatattcttcaaattctgagtcttaaaattctaataactcttaaggcaaagtactagtagcatctgtctgtgaacacttaacctgatttctctcactcagaagcaattattcctgcccaattatatagtatactagttgtaactatttagcatataggttttctgaattatatgataatgtttatatatcttaaaagataattttcataaaaaggtaagatcatgactcatacagatataaaaatgaacatgcattaaacatttaattcatgagggaaataagtagatgtttcaactggttccaag

SEQ ID NO: 272259 - DNA, 416 bp, Homo Sapiens
  misc_feature (355)..(355): n is a, c, g, or t
  misc_feature (362)..(362): n is a, c, g, or t
  misc_feature (372)..(373): n is a, c, g, or t
  misc_feature (377)..(377): n is a, c, g, or t
tcaagaaggtctggtctgacatcatctccgtggtgattaagacggtcatcgcgctgactccagagctcaaagtcttctaccagtcagacatccccacggggagccgggccccacgtgcttccaggtaaccattgccagttccccagcctgcgtttcccagccttgaccggcctcaagagggctctctggcctcgtgtaggatgagtgatcggggtgggatggccagaggaggggacagtgttggtggtgctgtgggcttgggtgttaaacctgggcccaacttccaagctttctgtttgctccctgtgtgatttggggcaagctacttcccctctgttacctgtaaaatgaaatnaagaatncctatcttannaggntcttggaagaattaaagtgagataactaattgtaaaaaa

SEQ ID NO: 272260 - DNA, 385 bp, Homo Sapiens
  misc_feature (23)..(23): n is a, c, g, or t
  misc_feature (40)..(40): n is a, c, g, or t
  misc_feature (67)..(171): n is a, c, g, or t
agccctccctgaaatagctgggnactaacaggtgtgtgcnacccaggcccagcctaatttgtaaaannnnnnnnnnnnnnnnnnnnnnnnnnnnnnnnnnnnnnnnnnnnnnnnnnnnnnnnnnnnnnnnnnnnnnnnnnnnnnnnnnnnnnnnnnnnnnnnnnnnnnnnnccgtgcccagcctaaaaaaggtgtcttaatacacacaatacatcaaatgaaaagggaaaggctttgctagtgttcaacagggttttgactcacttgttttccctgatctcatcttaaaagttgaggtctgtctttttttgagcaatgctataagccacaatatactggtgtgaccataatacattttctggaaaaccaagcaggttagatgact

SEQ ID NO: 272261 - DNA, 401 bp, Homo Sapiens
  misc_feature (306)..(306): n is a, c, g, or t
gtttctaatttttagtagagatgaggtcttgccatgttgcccagggtggtcttgaactcctgagctcaagcaatcctccctgcttgggctcccaaagtgttggaattacaggtgtgagccaacccttctcttcccactttatacatttctgaattgaaaattccagtgatttgtcgaaacaataccgtttccattaatcatatttgttttactaagctaagacaaatgcataagccacatccctaaatcctattttaacttttacacaggaataaatttttccatcattggtccctaacttaagcnttcctaaatgtcagctgatcttcacaattaccatattttatagataataaattgtgctcagatggatcaaaacagcacaattcaacaccacaagg

SEQ ID NO: 272262 - DNA, 301 bp, Homo Sapiens
gtgtgatcttgattataccaacctattccatttacaattagtatgaaggtattagcctaagtatttaaaaatactatataaggtaaaggaaatttttctttttctaaatatgtctaagttcccccatctagtttctgttttgcttttctgagttgcaacatgtaagattattataataattttcagtttccctttcccttgaagagacttctgcagtcgagctttgtggttttcaaagtaacttcaaaagcaatacataaaggttgacttctcgtaacattgtctcaacatcattcaggtt

SEQ ID NO: 272263 - DNA, 411 bp, Homo Sapiens
  misc_feature (334)..(334): n is a, c, g, or t
  misc_feature (382)..(382): n is a, c, g, or t
acacacggcaagaggatgagggtggtgcacgagaccaggaaccacctgcgcctggttggctgttctgtggctgcctgtaacacagaagcccaggggtccaggagagtctcagcaagctcctggaagagctatctcaccagctccttcaggaccgagcaaagggggctcaggcctcgccgcctcccatagctccttaccccagccctacacgaaaggacctgcttctccacatgcaagagctctgcaagggggatgaagctgctggcatcttgacctcctgggacaacaaccgcattcattcgaacgggctaaataagagttcccaggcaccttncttgattgttttgaggttccatggggggcaacattgagggcattcctnaaaggcatttagaatttattttccaaaca

SEQ ID NO: 272264 - DNA, 292 bp, Homo Sapiens
  misc_feature (193)..(193): n is a, c, g, or t
  misc_feature (200)..(200): n is a, c, g, or t
gccccctcccctgaaacgtggcccactgccctctgctgagtcaacaagagacgagggactccccctttggtccccaaggtcacaggctcaagttggggaggcggtggaatggggcccgtgaaagccccagggtcagagcactctagtgatggggtggaggactcttccagggcccaaggtttgggctggctgntgccgcnggcctggggccctggacatcttaagagaggcctcgggtacttaaccgagctgcaggagggagacccgagctttgtaacaaagcaggcctctc

SEQ ID NO: 272265 - DNA, 300 bp, Homo Sapiens
  misc_feature (28)..(28): n is a, c, g, or t
  misc_feature (37)..(37): n is a, c, g, or t
  misc_feature (79)..(79): n is a, c, g, or t
aaccagtaggaaaggttccccatccaanacgaccaanacctgccccccagaatccaaattagggctgggaaaaatttancctacctttgggaggcagcccttgtgtaaaaggaatcaatgtcccagttgtgcccaaattggtctgcatggtcaatgtcaacacaccaacaaaggttcctggaagttcctttaggatagcccatgggagtcattaggggatggagcaggccactgaagcttagctgatgctttactaatagaaaagcattatacaactaaaataaattgatgtgtgtgtgt

SEQ ID NO: 272266 - DNA, 333 bp, Homo Sapiens
  misc_feature (29)..(29): n is a, c, g, or t
aggggaaaaattggtagggatatagaaanattgcacagcaaaattaacaacttccctataatggatatgtatagaatattgcacccaattaatataaaaaattattttcaaatacacgattcatttatgaaagttgacccctggtaggtgctaaagacagccccaacacatttcagggaccaatatcataagggccacattctctgattacagcctcattgagttagatctcaggaccaaatgatagcaaaatagctgcacgctaaaaagtaaaaatcttataaactatgtgttaaagaagaaatgataatggacattagaaaacatttagaa

SEQ ID NO: 272267 - DNA, 330 bp, Homo Sapiens
ggaaaattgggcacggcaaatttaaccaacctcccctataatgggatatgtatagaatattggcacccccaattaatataaaaaaattattttccaaatacacgattcatttatgaaaagttgaccccctggtaggtgcctaaagacagccccccaacacatttcagggacccaatatcataagggcccacattctctgattacagccctcattgagttagatctcaggaccaaatgatagcaaaatagctgcacgctaaaaagtaaaaatcttataaactatgtgttaaagaagaaatgataatggacattagaaaacatttagaaata

SEQ ID NO: 272268 - DNA, 511 bp, Homo Sapiens
  misc_feature (492)..(492): n is a, c, g, or t
gtaaaattactctgagcagagaagtgagaaccatgcagaatctctttcctgaggagtacaacttctaccctcgctcatggattctgcctgacgagttccagctctttgttgctcaggttcaaatggtgaaagacgatgacccctcctggaagcccacttttatcgtgaaacctgatggtggttgtcagggtgatggaatctacctcattaaagaccccagtgacatccgcctgggcagggaccctccagagcaggccagcggtggtccagggagtacatctgcaaacctctccttattcgacaagctcaagtttgatatttcgtctgtatgtcttactcaagtccttagaccccttagagatttatatagccaaagacggactctctaggttttgtaccgagccatatcaggagcccacccccaaaaacctggcaccgcatctttatgcacttaaccaactatttcactgaacatccacagcgggcaacttnatccactcggacagtgcgg

SEQ ID NO: 272269 - DNA, 346 bp, Homo Sapiens
  misc_feature (24)..(24): n is a, c, g, or t
  misc_feature (34)..(34): n is a, c, g, or t
  misc_feature (278)..(278): n is a, c, g, or t
tgttccccaaaaagcccaaaaagnccgggccctncccctggttggcaaggatgaaatgccctaatgaaaacacagaggctaaaaaggagaagatgggcccatgccctgctgctgcctgctcatacataggtacttgggtagactctgaacctgcccccagcctacagcccccaacatgaaaagtggactggtcagaggcaggcatggctgtgcagaagtctcaccccaagaggacacatacatgatatgcatatctcacatatgcatgcctggcaagnaggctgggcccagaagtcctgaaggcagggaaaaggtcaggtcagaaggtacatcaagaaacggcctg

SEQ ID NO: 272270 - DNA, 423 bp, Homo Sapiens
  misc_feature (69)..(116): n is a, c, g, or t
aaagtgaagggggggtctcccctatttgggccccaggctggtctcaaactccctgggctcaagcaatcnnnnnnnnnnnnnnnnnnnnnnnnnnnnnnnnnnnnnnnnnnnnnnnncacccacgtccagccccacatcaagtttcctcaaacctatagtacaatatatccatttgtcttttggattatttgagaagcacaaaatgccatcatccagattagattgtgaaataatttgcacaatacccaattttataagaacatggcaacttaaaccataaaactattttagtgaaagcaatccaaaattgagttttttgcatttagatatctttctacttcaaaccagggggaagatatggggagggcttaccaatatttttaacacattttaattactttacaggtcaatttaaaattaggg

SEQ ID NO: 272271 - DNA, 311 bp, Homo Sapiens
  misc_feature (97)..(97): n is a, c, g, or t
  misc_feature (140)..(140): n is a, c, g, or t
ggctggtgtagaatagccagtagtgtagtgcggtgtgcttttacgtgatggcgggtgggcagcgggcggcgggtccgcgcagccgtctgtccttganctgcccgcggcggcccgtgttgtgttttgtgctgtgtccacgngctaaggcgaccccctcccccgtactgacttctcctataagcgcttctcttcgcatagtcacgtagctcccaccccaccctcctcctgtgtctcacgcaagttttatactctaatatttatatggctttttttcttcgacaaaaaaataataaaaccgtttctttttgaaa

SEQ ID NO: 272272 - DNA, 504 bp, Homo Sapiens
  misc_feature (147)..(147): n is a, c, g, or t
  misc_feature (169)..(169): n is a, c, g, or t
gacagaccgcggagtcatctctgaagaccccaggtgtgccactaaatgggggaaagttaggcaggtccggtgggaaggggagaccccaggagaacagcggcttcctcagaggattcacaaacacaccaaagtcagacttttggcttntttgaaaccagtaactggaaanaagacactgcccggacctgaaggattgcacaactccgggaaagtcacctcattcccactgataacagaaccaagcgtcagaaggctttcaacagcccggaactcagctaaaatctgcagacctcagaaccgccagcagcacgaggacagagtcggggaggtgtagctggacaacagctcatgaggcagaagagctgtgtcacaggtgtcagctgagcacaagccctgtctgaggccgtggtgactggcgacagccgggcagtggagggccttggaagctgaagggtggtcttggcatggactctggtccttggggtgcaggctcttgggtcccca

SEQ ID NO: 272273 - DNA, 399 bp, Homo Sapiens
  misc_feature (57)..(57): n is a, c, g, or t
tccgtgggcattcaccaccctcgtggcaaaagggcacagctgatgactacctttggnccccctgattcaagagaagattaaaggttctggcagaagccgggctttctgagaccaatttttcagaaatgacagaatccactgattacctctacaaggacccaaagcagcagaagatctacgacctattccagaagtcctttgagaaagaaggaagtgatatggagctcctggaagcagcagagtcctttgacccaggaagtgcttcaggaacatctggaagtagttcccagaacatgggagacaccctggatgaaagctcattgacagccagtccacagaagaaaacggagatttgaattttttgataactgggacagctttacgtctcccctgtaaaag

SEQ ID NO: 272274 - DNA, 372 bp, Homo Sapiens
ctttatgacttaagtttaatttaaatttttttcccacagggagttacagcatacagataattaaccgcaggttatcatatgccagctatttctctaaatactttgcatgtattaccttatttaatcgttaaaacaactttactgttattccccctttaccaacagggaacactaaggctaagagttacagagctagtacatgcagaagccatgactcaaacacaggtagactcaaattcagaatccttgtgcttaattgctacctgatactgcttctttgtagagcaagcagattatttaagcaatcgaagtgatttgtcttagcgggctttattattctgacgaaaacggtttactaggacatacacatta

SEQ ID NO: 272275 - DNA, 490 bp, Homo Sapiens
  misc_feature (11)..(11): n is a, c, g, or t
  misc_feature (38)..(38): n is a, c, g, or t
  misc_feature (80)..(80): n is a, c, g, or t
  misc_feature (91)..(91): n is a, c, g, or t
  misc_feature (104)..(104): n is a, c, g, or t
  misc_feature (119)..(119): n is a, c, g, or t
  misc_feature (144)..(144): n is a, c, g, or t
aaaagaggggncaccccgtatccaaaatggtcccggangaaaaaccatccctggggatggaaaaaaatggttggccctgngaccccctggngcctttggaaagnccagacaaaccccgngaatccaacctggcacaaaaaaagnggggaccacagtgaacatataaaccacagcccccaatcaaacaggagcagatcccctcatggtgcctggtttattatatatatttaatccctgcttgacactttaccccaagggagatgggtccccttttatcagttgaatgttagcagcgttatttcagagtgtggtgactggttagagaaactcatgtactcaaccagccacagtttcaaacaaaatttttatgtgcaaaggacagcaaccttcttgtatgttaaaccaccagtacgctttgtacatctgtgataacgcctgttttatattcaaatgaacaaataaaagcttttatttttgttgctctgaaaaa

SEQ ID NO: 272276 - DNA, 369 bp, Homo Sapiens
  misc_feature (29)..(29): n is a, c, g, or t
  misc_feature (60)..(60): n is a, c, g, or t
  misc_feature (66)..(160): n is a, c, g, or t
  misc_feature (318)..(318): n is a, c, g, or t
  misc_feature (320)..(320): n is a, c, g, or t
  misc_feature (334)..(334): n is a, c, g, or t
  misc_feature (347)..(347): n is a, c, g, or t
aaaatttgggcccatgtggaaattttttnatttatttaatttctttaatagagatggacntgaccnnnnnnnnnnnnnnnnnnnnnnnnnnnnnnnnnnnnnnnnnnnnnnnnnnnnnnnnnnnnnnnnnnnnnnnnnnnnnnnnnnnnnnnnnnnnnnntaccacatggaatttaagaagacacagagatagccaagtagcactgtccagcgagcagtgggaaacggggaactacagctaaagaggggcagggtctgggttagatcatgagctggaagagtcatgtcaagtagtccctggttgcatggcatttcctncnatcccaaccccctnctttgcccggganccccccactgctccccaaaaca

SEQ ID NO: 272277 - DNA, 404 bp, Homo Sapiens
  misc_feature (319)..(319): n is a, c, g, or t
  misc_feature (380)..(380): n is a, c, g, or t
aaggttgccaagagggtgatcctgttgtcgggcacaccagccatgtcccggcccgcagagctctacacgcagatcatcgcagtcaagccaactttcttcccccagtttcatgcctttggacttcgctactgtgatgccaaacggatgccttgggggtgggactactcaggttcctccaacctgggagagctgaagctcctgctgggagggaagcagtcatgctgcgggcgccttcaagtccgacgtcctttcccagctgcctgccaagcagcgcaagatagtgggtgattgccccagggacggattcaattgccagggnccagagcttgccctggggtgcttgcagccaagggaaattgaccaccaagggacaaaatttnaacagcagcaggaaaggttgcctt

SEQ ID NO: 272278 - DNA, 462 bp, Homo Sapiens
  misc_feature (23)..(23): n is a, c, g, or t
  misc_feature (58)..(58): n is a, c, g, or t
  misc_feature (71)..(71): n is a, c, g, or t
  misc_feature (79)..(79): n is a, c, g, or t
  misc_feature (100)..(100): n is a, c, g, or t
  misc_feature (111)..(111): n is a, c, g, or t
  misc_feature (120)..(120): n is a, c, g, or t
  misc_feature (126)..(126): n is a, c, g, or t
  misc_feature (157)..(157): n is a, c, g, or t
  misc_feature (195)..(195): n is a, c, g, or t
agggagaagagaaaaaggcccanatgggggtaattgcccccctaaacccccggggttncctggccccctangggggttncaggagcctaagaagccctcngggttcctccnctggtcccnccctgnaatgggtttcctttcctcctacctgcctaanttttgccccccagtaaaactgtgcctatcctagtttanccttagggtaatttgggaatacccctagaaggccactgtataaacctgcatgtagtaaattgaggtctatgtttctgtaatggatggaaagaaaagcaacaaaacaaataactaattttgttaaatctgattttaattcttctttttaaaaaaagcaaatggcatgatattttggcagactttttgacagcacccacatttgatttgatgagatgtgtgctcctatttgagttatgtccaaagggcagacagatggaagggtttcac

SEQ ID NO: 272279 - DNA, 172 bp, Homo Sapiens
  misc_feature (15)..(15): n is a, c, g, or t
gtgaggggggttctntgaacatagcagaggaggtttaataggataagtcagctacatttttaatgttatcaacttatcattaatgtgtatacattagcgccctactgaaaggaagtaccagtctttgggcaaaacttaagagattccttgaggaacctacggcctgaacctt

SEQ ID NO: 272280 - DNA, 362 bp, Homo Sapiens
  misc_feature (44)..(44): n is a, c, g, or t
  misc_feature (55)..(55): n is a, c, g, or t
  misc_feature (63)..(63): n is a, c, g, or t
  misc_feature (77)..(77): n is a, c, g, or t
  misc_feature (87)..(87): n is a, c, g, or t
  misc_feature (103)..(103): n is a, c, g, or t
  misc_feature (155)..(155): n is a, c, g, or t
  misc_feature (312)..(312): n is a, c, g, or t
  misc_feature (318)..(318): n is a, c, g, or t
gctccgtgatggggcttaagttgcattaatcacctagaagttanatggcccagantcttaagnctctgctgggactnaagtgcatcnccaggggctgcttttnaaattacttactgtcaaaggaattgccttgttccagatccctgaggttctgnactgtgattcacctgttagggttgcttaagacttcacacagcatctttatcttccagggacactagcagcattggatctgctgagacacaaggccggacagcaagacagtttgcattcccagcagggtcttgctgcagagcactgtcttgctagggntccacntcaaattggtagctttccataccacccaataaatgtgttgaagc

SEQ ID NO: 272281 - DNA, 466 bp, Homo Sapiens
  misc_feature (23)..(23): n is a, c, g, or t
  misc_feature (51)..(51): n is a, c, g, or t
  misc_feature (64)..(64): n is a, c, g, or t
  misc_feature (76)..(76): n is a, c, g, or t
  misc_feature (95)..(95): n is a, c, g, or t
  misc_feature (115)..(115): n is a, c, g, or t
  misc_feature (121)..(121): n is a, c, g, or t
agaacatcccagaaacagcagancgagggccagagccagaaaaatgaaaanaagtggagacacntatggatacatnggtgcaaaaaaagcccacngtgccgatactgggcttganatgacnttgaggggacagcagattaatacttaatgagggttaaaccctgacccagtctttcctacagtgacaggcccacactgcatgaatggggagaacccaatgaatcccattgtcctctgccctattttccctgtgcacagtcacattcccctccttaggaatcttccccttccaccctttacattaaacaagggaacactgaatctttcaagggaattacacgtttgggttaatgtttcagtatatcattttcatactgtaaattattttgtaagagagatttactgctatcccaggatgttcggacttggtgcccctgtgcatttggaaatcaataaactattactg

SEQ ID NO: 272282 - DNA, 259 bp, Homo Sapiens
accccctctgtccgcatcaagaggtatgaggaatgcaagagggacctttggcatgcatctctccccagaggagatctctcccccagtagtgctggtcaccctccggcatctgtgactctacctcaaggaccacatttccccaaaggaaccctggccccaggcaccctgcctcctgctctgtttggggatcaagaactgtaaaatttatgtatcataggtgcacctgagccccacagaaagttgtgcataaaaatgacct

SEQ ID NO: 272283 - DNA, 473 bp, Homo Sapiens
catgagaagccagacactgaggccagctcaaactcagggaaaggcagtgagactcacacctttgaagggaagggcaccaaggagccacattctacctgctttggccacgttgtctggcttctccagcctcagtctctttggccatgacaccataacgatgggaggggtgagttaatagacaccaaacagaactgctgtagcaactgccaaatgccttgcacagaggaggagtgtggggtgcccatgatattactctgcaagtgacattgccttctagggctttaatctcccagaaagccagagatggaatatctcagtgcttctgagcctttattttcagccctacccgcaacagcattctgcagcttgatctataatggggtgcaccacaccctctcagcctggtcagggatgggggccaaggactccctgtacctgtctcatctggagacgaaactcacctgggactaacc

SEQ ID NO: 272284 - DNA, 320 bp, Homo Sapiens
  misc_feature (27)..(27): n is a, c, g, or t
  misc_feature (99)..(99): n is a, c, g, or t
caagtgtttcaaataaagaagtttatngatgagatggttaccattgaccccttaatttctgccccgtttgaaacacctaagggagtccaaccattgtcnatgcccctttgggaatggtggtgatttccccagggccttggttaactattactccctagccccaaatcccctggtgagctcccactagctgcagaggccacccatttgcaaagagcagatatgcagaagatcccctggccagcctcctcatacctaccttcattgctatgtggagacaatagaatcattaaaagttatgggctggacatggtggctaacac

SEQ ID NO: 272285 - DNA, 127 bp, Homo Sapiens
aatgcagatataagaactggtactgaagcagccatcttgtgaccataaggaagaagccaagaacatcagaaccagtggcctagcattgcacagtcatctaaacacacctctggacttgttattatgt

SEQ ID NO: 272286 - DNA, 428 bp, Homo Sapiens
gggcccgtcatcaacggccgctgctgcctggaggagaaggtgtgttccctgctggagccactgggcctccagtgcaccttcatcaacgacttcttcacctaccacatcaggcatggggagtgcactgcgcaccaacgtgcgcagaaagcccttctccttcaagtggtggaacatggtgccctgagcccatcttccctggcggcctctccctcctggccagatgtcgctgggtcctctgcagtgtggcaagcaagagctcttgtgaatattgtggcttccctgggggcgccagccctcccagcagtggcttgctttcttctcctgtgatgtcccagtttcccactctgaagatcccaacatggtcctagcactgcacactcagttctgctctaagaagctgcaataaagtttttttaagtcactttgta

SEQ ID NO: 272287 - DNA, 466 bp, Homo Sapiens
  misc_feature (19)..(19): n is a, c, g, or t
atagtgagctatgtttgtnccaccgtacctcagccctgggcgacagaatggaaccctgtcttgaaaaaaaagaggggggaaatgtggacacagacatgcacaacgagaagatcatataaagacctagagaggatatggctgtctacaagccaaggagagaggcctcagaagaaacaacccagcagatacccttgatgttgcacttcttgcctcccagaactgtgaggaaataaatctctgttgtttaagccaacccagtctgtgatactttgttacagcagccctagcaaaccaagagtgagccaccttggaagtagatcctgcagtcccagtcaaagcttcggatgactgaaactttggccaattatctgactgccatcagagaacccaagccagaactacccagctaagctacttctaaattcctgacccacagaaactatgtgaattaataaatgtttcttct

SEQ ID NO: 272288 - DNA, 404 bp, Homo Sapiens
  misc_feature (21)..(21): n is a, c, g, or t
  misc_feature (31)..(31): n is a, c, g, or t
  misc_feature (44)..(44): n is a, c, g, or t
  misc_feature (95)..(95): n is a, c, g, or t
  misc_feature (119)..(119): n is a, c, g, or t
  misc_feature (379)..(379): n is a, c, g, or t
agcaaagcaagcaaagaaagnaagtactagnagttaagtgtccnaattggacatcaagggaaagtgggtggacagtgaacagagggagtctgaanagagggagtcaaaaatgggctccnaaagtctctgacctgggtgaaatcatggaacttctgcctgtaccattaataactcctttctctgagagctgtctcctcactcacagggaaggtcctctgtcctgttcgtactgggtccccattgtttttgcagcctggccctccctccctttctgggaatggaccctcccctcctgggaagcatccattgctccctcatctctccacggctgttgtggaggtcactgtgtaaactgcacagcctttgtctagggacgccnggcccaagatgggtcaatcggaact

SEQ ID NO: 272289 - DNA, 417 bp, Homo Sapiens
  misc_feature (24)..(24): n is a, c, g, or t
  misc_feature (52)..(52): n is a, c, g, or t
  misc_feature (292)..(307): n is a, c, g, or t
caggtccacccaaaaggcctgggncatccccaagtttccccccaccttaatnagaacaccccctggaggagggctggagtgccaatttcccttccagggctgtcactttgaactcagtgcccttaggagcctaatgaccctttgcctagggaattgcctccttccctgtaagcaagtaccctaagcccccaactatatggtgacacttgtaattagggctgacagaaatctttgaagtagtacgcaagataatgaaggggctgctttgagttttccttagctctcaaatatnnnnnnnnnnnnnnnngacatgtatgtatgtatatacatatacacacatatcacacttgtcctttatatataggtacacactcccccgacacacacactaaaaccaggaatcagtaagagagtcca

SEQ ID NO: 272290 - DNA, 460 bp, Homo Sapiens
  misc_feature (370)..(370): n is a, c, g, or t
  misc_feature (401)..(401): n is a, c, g, or t
  misc_feature (410)..(410): n is a, c, g, or t
  misc_feature (426)..(426): n is a, c, g, or t
  misc_feature (436)..(436): n is a, c, g, or t
  misc_feature (444)..(444): n is a, c, g, or t
gccaaatagaaatttagatgtcttgtcggggctgattaacagaaaaagtaattatcaatcagttcacaggaaattatcattagctgtcttactgatactggttctctgtgagcgatcctctttataatttgtagagatgatttatttctaaaggaatggcaatgtgaataaaggtttctatatgttttagttgagaagagccctaggagatcagctgtgtgtctcttgttttataattgtggaaaattgagggctcttgggaagggcacatgatttgcccagggtcagtggccaagcccaaggattaggaggagtgggctcttctctttttctgggtggaactttccttactggcatttggacattcccntgtttttgtggattaaccaggagtccaggcntcccggtanttgtaggctgtccccntttcagccgntagggctnccctgggggaggccaa

SEQ ID NO: 272291 - DNA, 393 bp, Homo Sapiens
  misc_feature (334)..(334): n is a, c, g, or t
  misc_feature (367)..(367): n is a, c, g, or t
gccaaggctattgctattaacaaatgagaaaatctatagaattgccatggaaaccctattggagaaacacaggtttccatgtcaacccctgtccaggataccgctacaaaatgccctataagcaaaaacttctgaaaccacaatgttttctgactaatggaattaggagactgcgacttttgtccattgttcttagggcaaggcatttgggggcccttccaaggaagtagtctgaatatctgttataaggaaagaaaatgatacagtgtctaaaggcccttgactgaaaaatttgttttttgataaatatgtttttatctaaaggctctttgtncaggaaatccttccttggggtttatggcttccnggacttttctggatatgtttcctatt

SEQ ID NO: 272292 - DNA, 648 bp, Homo Sapiens
  misc_feature (139)..(139): n is a, c, g, or t
  misc_feature (145)..(145): n is a, c, g, or t
  misc_feature (290)..(290): n is a, c, g, or t
  misc_feature (404)..(404): n is a, c, g, or t
  misc_feature (568)..(568): n is a, c, g, or t
  misc_feature (587)..(587): n is a, c, g, or t
  misc_feature (590)..(590): n is a, c, g, or t
  misc_feature (598)..(598): n is a, c, g, or t
  misc_feature (602)..(602): n is a, c, g, or t
  misc_feature (613)..(613): n is a, c, g, or t
  misc_feature (628)..(628): n is a, c, g, or t
  misc_feature (638)..(638): n is a, c, g, or t
gaatctggagttctggttggcttgtgaggacttcaagaaggtcaagtcacagtccaagatggcatccaaggccaagaagatctttgctgaatacatcgcgatccaggcatgcaaggaggtcaacctggactcctacacncggganacaccaaggacaacctgcagaggtcacgcgcgcgctgcttcgacctggcacagaatcgcatcttcgggctcatggaaaaggactcgtaccctcgctttctccgttctgacctctacctggaccttattaaccagaagaagatgangtcccccgctttagggcccactggagtcgagctcagctttcacaccaggcgggctgggtcccctgcccacctgcctccctgccccctgtgacggagggggaaagcaagcccagnaggctgtgtctctggacagacggatagacatacggaagcgaggcctggaccaagagaggcccaggctacttgaggagtagaaggatgggccccgtgggtccccacttgccccggtaacgagggggccccaagaccctgggcaggttcaggggccttggcaaagnccaaattcttgggagcttnttnttccttgncttncggagaccggnaggttttcggttttnaccaagtttntttaaaagaa

SEQ ID NO: 272293 - DNA, 521 bp, Homo Sapiens
  misc_feature (151)..(151): n is a, c, g, or t
  misc_feature (444)..(456): n is a, c, g, or t
aaacttgcgaattataggtttcggagctagcattatttctctcatactcaagagtgtttttccccctctgcctttggttctctgccagccaaggctgcatcctggagttcggccagccgccagtccccacttccttgccattcacaccatnagggctggtggcagctggccacggagacggacaggagcaccccatttgtaagaggttgaccacagaataatgtagccagcctgctggacccccgcagccagcctagggcaccttttgtatacttcctcatcattctttgtattcacaacagcatttcttcttgcacatcaagaccccaagagcctagccagggaagcaagaattcttttcctttctgaaattcttagggcaacagtaaattataaaccaaggctgagtaggaagatatgtttgtgtaaccttctatgtgtttnnnnnnnnnnnnnggtagatgaagatgaattaaagagcaagcacaaaaaaagagaagagacaccgaaagcacaggtga

SEQ ID NO: 272294 - DNA, 445 bp, Homo Sapiens
aaaaacagacatagtctcactgttgtccagattggagtacagtgacacaatcatagctcactgcagcctcaaactaatgggatcaagtgatcctcctgcctcagcctcccaagtagctaagcctactggatgcactactatgcccagctcacacagaaggtttctgagtaatctgttgctctttttccctacaatttgtcttccatataactcaaactgacaaggctatggcttacataaagaaatatattataaatcaacaacactcatgataagtttacataagacatgagaatacacctgaatcaccaaccgggaaaaatgattgaagagcttgaaattaagcctaagtgtaagtctctgttaagcttacaacattacaatagttaaatcgaaggttagaaagaaaatggtagacattgctccttttcctgtacttaccacc

SEQ ID NO: 272295 - DNA, 295 bp, Homo Sapiens
attcagtcaaccaataaaccagccaacctaccaaacagccaacctaactatgctaacaaaccaaccaactgacaacaaatagtcaaacaatttaacttctaaccagccaacctaccaaatagtcaaccatctaacaaatcagccaaacagcaaagcaatcgagccaatggaacagccagataaccactcaactaactgtgttctctagccagccaaccatccaaataaccagccagccaaccatccaaataaccagtcatccaaccatccaaataaccaagccgagccctatgca

SEQ ID NO: 272296 - DNA, 406 bp, Homo Sapiens
  misc_feature (11)..(11): n is a, c, g, or t
  misc_feature (44)..(44): n is a, c, g, or t
  misc_feature (54)..(54): n is a, c, g, or t
  misc_feature (66)..(66): n is a, c, g, or t
  misc_feature (80)..(80): n is a, c, g, or t
cctggaggaanttggataggcatttgggacaaggacactggttncccaatcccnacctatatggancccagaactcctanccctacagtcaggctactgggacaacctgcttacacacagcaaatggggatgtctgtggatatgtcatccttatcagaacacctacttcccaatttgcctcaactggcaggctttccggtgacagttccagctcatccagttgcacagcagcacacaaattaccatcagcagcctctcctttagaaacaaatcaagcattttcttgaaagccttcataagtgtattattcagtccttgtgataccaacctgaaaatattaaaacttttttccctctcaactcaaaaggaccatgaataaataaagcacaaaaacctctcttattct

SEQ ID NO: 272297 - DNA, 411 bp, Homo Sapiens
  misc_feature (46)..(46): n is a, c, g, or t
  misc_feature (70)..(70): n is a, c, g, or t
  misc_feature (95)..(95): n is a, c, g, or t
  misc_feature (101)..(101): n is a, c, g, or t
  misc_feature (119)..(119): n is a, c, g, or t
  misc_feature (190)..(190): n is a, c, g, or t
atgcttcaaggtctcggttaacctaggtcaaagtgtccttgggcanaagtctgagttaggctgcagaaanacctgctacctccccccaggttcanactganagctgccgggcctgggtncagcacagccagtgctcaccttcatgccgtcagcgcctcggtaacacggccgtgcagcccctggtaagganacttgtagatggtgggaagctcctccctgcaatgaagagcatgcatggagccccggccccgacaggcagggcgagcctcgcgttgcaggcatcacctctcacaacgaagcttcttcttccatccgggcttgggtcccggcttcttccgaattcttggttcttcagacttcttggcttctttgctttcactcttcttaccagagactctgaaaaaaagaggt

SEQ ID NO: 272298 - DNA, 334 bp, Homo Sapiens
  misc_feature (241)..(241): n is a, c, g, or t
  misc_feature (314)..(314): n is a, c, g, or t
gacatagctaaagctattgaattatcgctgcaagaacagaaacagcaacacacagaaacaaaatccttatatccatcttcagaaattcagttaaataataaggttgcacggaaagtgagagctttatatgattttgaagctgttgaggacaatgaactcacctttaaacatgggtgaaataattattgttttgggatgacagtgatgccaattggtgggaaaggagaaaatcacagagggntagggacttttcccatccaattttgttaacaactaattttaaacataggggactgagggcggcggctgtgggnccaaattggattgttatttg

SEQ ID NO: 272299 - DNA, 290 bp, Homo Sapiens
tttcgcgcacggaggagaaaatccccttcaacattcctggggatatatatctaatagtcccatatattgtgaaacttccctattgacgataaagagggctggggaaggctacaagttctctttgtaaagaatccttttctggtcaagtttcttcttcatcactcatgccacttactccattctggaccctccttcagtcaaatgttcctgtgcttcaacctccattacccttgggaaatgccaccacccccacctccacctccagaatcacctccaccccctcctccacc

SEQ ID NO: 272300 - DNA, 475 bp, Homo Sapiens
  misc_feature (393)..(393): n is a, c, g, or t
  misc_feature (420)..(420): n is a, c, g, or t
  misc_feature (428)..(428): n is a, c, g, or t
  misc_feature (434)..(434): n is a, c, g, or t
  misc_feature (444)..(444): n is a, c, g, or t
  misc_feature (449)..(449): n is a, c, g, or t
  misc_feature (461)..(461): n is a, c, g, or t
aataccaccctcactgggctccatgaggtctcggcccaaaaccctactaactgttggatatgcctccccctgaacttcaggccatatgtttcaatccctgtacctgaacaatggaacaacttcagcacagaaataaacaccacttccgttttagtaggacctcttgtttccaatctgggaaataacccatacctcaaacctcacctgtgtaaaatttaggcaatacttacatacacaaccaactcccaatggcattcaggtgggggtaactccttcccacacaaatagtcttgccttaccctcagggaatatttttttgtctgtggggtaccttcaggcctattcgttgtttggatgggctctttcaggaatctatggtggttttcctcttcnttctttgggtggccccctttgggaccnttttacantgggancagggttttnttacngttttggtcatnttttaggggccccg

SEQ ID NO: 272301 - DNA, 345 bp, Homo Sapiens
  misc_feature (19)..(19): n is a, c, g, or t
  misc_feature (36)..(36): n is a, c, g, or t
  misc_feature (74)..(74): n is a, c, g, or t
  misc_feature (109)..(126): n is a, c, g, or t
ggataagggtgaggggaanacttgagcccccagganggtaggggtgaagtgaacccatggatcatggccactgnactccggcctgggtgacaaagggagactctgtccnnnnnnnnnnnnnnnnnntaagtcgccagctctctcctttataaacagtctttagactggtttgtatcatgccccttgatgtaccagagatatgtttaaccaacctagttttgttgattctgacaatctcacacacatttaagaatttaccatttttcaggcacttttcaatgttaaaaaaaattaaatccaattattgaaaatcagtttgacaaacaacccccacgccagtaccca

SEQ ID NO: 272302 - DNA, 246 bp, Homo Sapiens
  misc_feature (38)..(38): n is a, c, g, or t
  misc_feature (51)..(51): n is a, c, g, or t
  misc_feature (101)..(101): n is a, c, g, or t
atggacttggagcctgtactttggaaagaggcctttgnaaaaacaaataantcctgtgtgaattttccttgtagcgtgccttcatgaaaatatctacttancccaggtttgcaaatgtacatgttcatttgaatgtaaatcaccatttcttggaaccccacgttttttcttaaaaattattctgaattaaatgtatatttctttagccttccctacacagtactaataaaagacttttctttctaa

SEQ ID NO: 272303 - DNA, 329 bp, Homo Sapiens
  misc_feature (230)..(230): n is a, c, g, or t
  misc_feature (309)..(309): n is a, c, g, or t
  misc_feature (318)..(318): n is a, c, g, or t
taggatatcagctcttcaaacccagtctgatctcttggctggaacaagaagagtctaggacagtgcagagaggtgatttccaagcttcagaatggaaagtgcaacttaaaaccaaagagttagcccttcagcaggatgttttgggggagccaacctccagtgggattcaaatgatagggaagccacaacggaggggaggtcagtgatgtttaagcatgtgggagatgttntccagttgaacactcatgcctttaaggacacatgttgaggacttcaaattagttgaggaacacattttgagtgtttatnctgttattngggagttagga

SEQ ID NO: 272304 - DNA, 378 bp, Homo Sapiens
  misc_feature (54)..(54): n is a, c, g, or t
ccctcatgaaaagatcagtgccctccccccaggtgagtgaattctcgctcttangttgccttgagagtgaggtgtttgaaagaatctggcttccttggtttctctgtctcttccttcttctctcaccatgtgatcgcttgcacatgcctgctccctttccaatttccaccatgagccagagcatgaagccctaccaggtgtacctgctaaatattaaactttccagccaccagactcaggagacaaatctctttatcttttatggcaacactaaatggacaaaggcagatgcatcaagagaaaaaaaacagatgatcctactacatgctgtctataagagacccaccttagatccaaagacagaaatagattgaaagt

SEQ ID NO: 272305 - DNA, 289 bp, Homo Sapiens
  misc_feature (11)..(11): n is a, c, g, or t
  misc_feature (90)..(98): n is a, c, g, or t
ccccccccggnccaaacccttctgccgccaccctccttgtttgtttcatagctcctctgtaaaacgcggagcttgtttgtgccctcctannnnnnnnnattaatttaataagtcctgccctcctattatttattgtgtttactatctattgctgtaaagttttgtatattttgtaaacttttttccccaaatagtagatgtctaaaatcattgtacatctgattcttttatattccattgttcagcacaaagtgtggtttttatttagaataaaaaaatgtaatttgaa

SEQ ID NO: 272306 - DNA, 532 bp, Homo Sapiens
  misc_feature (511)..(511): n is a, c, g, or t
aatacttttgaggggccaccatgttccaggaaccgcagacacagaatccaactcttcagtggcttcccaacacacacaggtaaaggcagaacttcttgaaaggactccaaaccctgggaagatctggctctgctctttctctggccttctcggctccagccaccctgacagctgccagtctctggggtccaccgtgcccctcccgccacagcccacacatgcccttcgccgctcattctgcttttcttcctctccctgcctggtgtgcgctgcctgtcctccaggtctcgctgcaatctgctttatcctcctatgcctctctgtgcaatcttgccacattgcacagtgcttgagttagcgcaataatgtcattgaagtctttaactctagcctgactctaaggccagggttcacctaatctccccatagcctggcccctagtcaaagccccataaagagttgttgaaagaatgaagagacatcagtgagcaaaatagatgctgccttggcnaagtgacactgtcacaaacag

SEQ ID NO: 272307 - DNA, 448 bp, Homo Sapiens
  misc_feature (49)..(58): n is a, c, g, or t
aaccagcacattgcctggtatatactgccaggtaggcattcaataagcnnnnnnnnnnaataggcaatttataacactgggaaaatttcatttcagtgaaatgataatcatgtttttggaaacactgaaatgaaatttcaccttacttcaccttataaattgtacctcattctcaccttgttacaggtagttagataggcatgagcagggcaggagagagctctccccctaaccactaggaatatcaggtgaggtttgacaattatcacactgccccctctaaaaatgataatttggcagcccattcagggcgccagagcgaggccatttcctgatgatccacagctactaacattaaagtgttagttgaatgcagatgccagggagaaaaaacttcctggtcatgctcactaagagacaaaatggcgaaatatgaccttccgggtat

SEQ ID NO: 272308 - DNA, 321 bp, Homo Sapiens
cccataactatttaaaatattaaaaccattcttagctcacaggccatacaaaaacaggtggcatgtagatttgctgaccctagggcaagactacgtcatgaaaaaacggtacacaaaattacatatggtgcttgttttgtggtattggaattgttggggtttttttctctattctctgagttaggattaggatttgtattttccaaattacctacagtaagtacgttttacttttatagctaaaaaccctttattaaaaaatgaaactatacatatttatatatactgaaatacatctatatattttagtatagttatggc

SEQ ID NO: 272309 - DNA, 456 bp, Homo Sapiens
  misc_feature (283)..(283): n is a, c, g, or t
atttacaatatcatttcaacattaatataaaaattactaacgagatattttatattgtcctttcatactaagtatttaaaatccaatgtgaattttccactcatgacccaggccatctcaatttggactagccacatttcaaatggcccctgctttggactgtgcaggactacacagtagcctaccagggtgattaggcaccaacatgaacttttttaacccttgaaatttgtggaattaaattaaatggaatttaattttactgatgagagaacaatgaggnaaccgctgggccctccaaatcactgcccaccccaccctcccttctcagagggagtgcaaaggggcagtgttacatgctgttggaagtttaggagacatgaagcatagaaaatcatttcctctaaatgttgccttttaggttattaaataccctgacagcaacctgactgaatt

SEQ ID NO: 272310 - DNA, 423 bp, Homo Sapiens
agtaatttattaatataaatttattcggtatgaacattttagctctgcttgattagatgaaacaggcacacatgctttagctgagaaattccattttctggttctatgtaaagcaacatctaaagcagcagagaggggaaacagttatattttcaaaaatagttaagccagactgtttcctagagatacttcatttatttttcattttcagatactactggctatttttggtagggctacacattaatactgaccagtttagccttcctgactgttaaactattccacaatgaacctgccttcacactgcagacattgtggagatcctttaacatacacatattctaaaatatatgctcaaagtaaaaagatccaaattcacaagagtatgaaatatttataaaaaaatcatgcatcagactg

SEQ ID NO: 272311 - DNA, 344 bp, Homo Sapiens
  misc_feature (56)..(56): n is a, c, g, or t
  misc_feature (58)..(58): n is a, c, g, or t
  misc_feature (253)..(253): n is a, c, g, or t
  misc_feature (259)..(259): n is a, c, g, or t
  misc_feature (291)..(291): n is a, c, g, or t
  misc_feature (304)..(304): n is a, c, g, or t
  misc_feature (309)..(309): n is a, c, g, or t
  misc_feature (321)..(321): n is a, c, g, or t
  misc_feature (330)..(330): n is a, c, g, or t
tgactaaggcacagcgagggtgggcaggcatgctttggcaatggggccccttgggntngttggcatggacggctgcaaggggtgtggatgtgagctcagcacctttggaggtgggtggaggcaaggagagaaagaagtctcagggctcccaaggacacaggagaaggtgcttgcaaaacaggcagattaaggaaagccaacaggttaacccagaaaagagatgaggaaaaaaggaaggagtggaaaaagaganacaggncttgggttgcggcattcaacaacctgttcctnccagcttactttnggagngcttagggccangagaattcnctttgaacccaggg

SEQ ID NO: 272312 - DNA, 417 bp, Homo Sapiens
gagacagaatcttgctctgtcccccaggccagagcccactgggacaacctcagctgactgcaacctctgcttcccaggttcaagtgattctccggcctcagcctcctgacactgttctactcttcctgttcatgtccatcaactacgctactcactgacctaccctatcccataccctactgacttccaattttgatttccctatttttatcattctctcagtcgctcagttccaaacttcagaatcacctctggttcctccccttcccacagcataatcactaaaccttgtgtactcttctctcatgtatctaccatacccacccccttatcacttgcaggttgtcaccactcacttcaattgcactccctgcctccagtccttcccctactgcttcaggcagttggcactcagat

SEQ ID NO: 272313 - DNA, 298 bp, Homo Sapiens
tccagaaaattataagcttatatacttcttctcatctcctcttagttatatggaattttcccattgtcttctaccaaaatttaatccttcagaattcccagttttcccacatggttaaatggaatgttcaacatttttgtgtgttatgcctcactagacccataatcaaccaaaatagacatttatgatagacttaaagttctctcgttttaagtaaacacacactaatttttttaacaatctaaacttctaaaatattcactaaggtgttttaccttggaaaataggactatccaaa

SEQ ID NO: 272314 - DNA, 235 bp, Homo Sapiens
  misc_feature (180)..(180): n is a, c, g, or t
  misc_feature (208)..(208): n is a, c, g, or t
gccagtccctccagaaaggcccagctatggaactgttcaaagggtccacagccctggggagtatagagcttataccatggtcagtggggaaataaaggcagcttgcagcattccacgaagaattgctaagtattttaggtgtgatataatggaacaatgaaggagcatggcctaaaacangcagtggaagggaggggcatgcaaaaanaaatgggtttcaaattacaaaattagg

SEQ ID NO: 272315 - DNA, 573 bp, Homo Sapiens
  misc_feature (509)..(509): n is a, c, g, or t
  misc_feature (538)..(538): n is a, c, g, or t
  misc_feature (547)..(547): n is a, c, g, or t
tgttccccacttgcctagagggatccctctggggtagcgacagacaatcccagaaacacgcataatacatttccgtccagcccggggcagtctgactgtcggtgccctcccaggaacggggaaggcctccgtctgtgtgaaagggcacagcacatcccaggtgcaccctccccaagtactcccaccccgcctactgtccatgcggcctcactgggggcaatcagccttcaccagcaaagcagagatgagagcgtgggaactgtgttctttcctccctgccctctactgatttcagcccagcccctggcctagatccttaggtcccttttcctcccgagtttggctggcacgagagctagcccagcacatgaagcaggtgatgttaagtcacaaggtgctgcttttcagatccactatgcaagaggggagggtggggccacgtgaaaaggcagctctagacatcaaaccagtcctggggggagggggagtgggaaccggggcacaactanggaacaatgcaacaatttcccacaggaantggtacttnaaacaagaccaggcaggggtttcaga

SEQ ID NO: 272316 - DNA, 321 bp, Homo Sapiens
tctgtgaccaaacggttcaactccgctgcactgtatccaataagagtcttcaagtcacagacaaacttgtacacaaatctcttgccttgaactttacaaatcatgtccccatcgtaataatatcttaatgcacgactgagtttctcatagttcatcgtaggcttatttttacgctgtccccatttctgtgcaaccagttcaggctgatttagcttaaattcaccttcatcaccaacccaagaaatgcagtctcgagcgtccttatcagtaagaagttctagcaaaaactgccatagttggatttggccattgtttcctgtt

SEQ ID NO: 272317 - DNA, 234 bp, Homo Sapiens
  misc_feature (31)..(31): n is a, c, g, or t
  misc_feature (42)..(42): n is a, c, g, or t
agtcctgacactttaaacaaccctcaggtgnatgctggatgnctgttggatacatgaaccacactttcagtagccaagaataaagcatttttaagtctttcagctaaatattctccacctgcatcaactgctagtgagtaatgttatacaagataacccattaaaattgtcccatatttagtgtaagatgacctagctaagttaaattgtcatgacagagtatggaatcattat

SEQ ID NO: 272318 - DNA, 396 bp, Homo Sapiens
  misc_feature (41)..(41): n is a, c, g, or t
  misc_feature (85)..(85): n is a, c, g, or t
  misc_feature (376)..(376): n is a, c, g, or t
  misc_feature (381)..(381): n is a, c, g, or t
gttggccaaggctggtctcaaactgacctcaaagtgatccncccacctcaagccttccaaaagtattgggattacaaggcgtacnccacacctgaccaactctataattttaagactgaaactagttttccaccctactgaaggcccagacctataactgggatactttttaacctatacaataaaatttgagttttatatctacatgatttgggtgagatgtcaatttacagtagattcttaaaatcctaaaggagtcagtgtcctcaatccatgtgtaaattagggagagcgctcaggctatactgtttgtgattgtctccgttcatctggaaggtacctttggggcagggtaggtgctggtctccattttccnggggnggggaaaattgaggg

SEQ ID NO: 272319 - DNA, 492 bp, Homo Sapiens
  misc_feature (99)..(189): n is a, c, g, or t
  misc_feature (197)..(197): n is a, c, g, or t
  misc_feature (200)..(200): n is a, c, g, or t
gttcaagcgaccctcccacttaagcctcctgagtagctgggaccaaaggtttgtgccaccatgcctggcaattttttaaagaaatcttttgtagagacnnnnnnnnnnnnnnnnnnnnnnnnnnnnnnnnnnnnnnnnnnnnnnnnnnnnnnnnnnnnnnnnnnnnnnnnnnnnnnnnnnnnnnnnnnntgcgggcncgntaggaatcctgggcattttcaaagcaatcaggctctgattcctttcttgatgtatgccagaaataaggactgcccgtgcattctaaggagatggtggggaggttacaaattacgaagcaggctaaacgaagaagagatgaaaaagtgaaaaggtagatctccagcagttgtgacacaacatataataggaaatctccaaatggtgacaatagttagaaggcagaattcaagttcacgggaaactttccacaggaattatggggtaacaagatagaggggaaactgactctac

SEQ ID NO: 272320 - DNA, 375 bp, Homo Sapiens
tgacgactcttcgtggcccaggctccatttctaaagtccagctcccttctgcttgatgagaagatttagttactcgtcataccttggtgtccagtaaggtgaccctcatagaagtgaacggtagctgtttgaacaccgtatgaacaagcttatgccatagggcagttacttcaaagggaataggggtgactcttgggtgggtatgaaaagttgatccccgccatacctacaggaatggggagaaatgcattgaagaattagaagagctaaagggacatgaattgatagtacactttgcgtggtagtacaaaagttaaaaggcactccagggcagttcttagaatatcagaaaaaaacttggttcaggtatttgct

SEQ ID NO: 272321 - DNA, 423 bp, Homo Sapiens
  misc_feature (357)..(357): n is a, c, g, or t
  misc_feature (364)..(364): n is a, c, g, or t
  misc_feature (402)..(402): n is a, c, g, or t
cgctgagtaaatcttatggggcgacatatttgattagattcggggtcagtgggtgaggggacatactccagtcattacaatctgaggacagcgctgagcactaacagatgtgacaacttataacacaggtacttcctccttcactgcactttatccaaaaatagacatcttcagaggttctttaccttttagccttaaaggatttgagaagctttagaaaacaaattatgatatcaggtctagatttattttgctattaaagtctcacattctgtacaagtattttattattgtttgtctagggtctctgaaattaggaagggacaggaaggaaaacctatttattataaaattttnaaaggtntggaatttggcccggggcgtgtttgggcacgcaccccnttaggtccccggctactcggg

SEQ ID NO: 272322 - DNA, 408 bp, Homo Sapiens
  misc_feature (345)..(345): n is a, c, g, or t
  misc_feature (359)..(359): n is a, c, g, or t
  misc_feature (375)..(375): n is a, c, g, or t
  misc_feature (381)..(381): n is a, c, g, or t
aaaacaccagaaacccctctgtgtagggcagaggttcttaagcagtgaggggcacctgcaggatctgttccagcagacagctggccccaaatcctggctttctgggtcaagagggctgggtggggcccaggagctgcctctcgaacaagttccagggaggctgctgaggtggggcctgcccttcagaagcccgggtctgggtgggagagactgggagagtcctgagtgactcgtctgcatttgcagcacctgtctgaagagaggcattggagattagagctttcttctctccctacaaccccatcctctttctgagcatttcccagctgcacgtggctgtgaggnaacacgggggcctncagtattttcagggantggctnttattcaatgtgttttctctttttagc

SEQ ID NO: 272323 - DNA, 410 bp, Homo Sapiens
  misc_feature (37)..(37): n is a, c, g, or t
  misc_feature (97)..(97): n is a, c, g, or t
  misc_feature (321)..(329): n is a, c, g, or t
tgagaagtgacgggcacactgggttggcataagatanccctaaaatccacgctggaaccttgggcaaggaagaatgtgagcaagagtagagagagtnccctggagttcatgtcagtgaagccaagtcaccatatcatatttttgaatgaactctgagtcagttgaaatagggtaccatctaggtcagtttaagaagagtcagctcagagaaagcaaagcataagggaaaatgtcacgtaaactagaatcagggaacaaaatcctctccttgtggaaatatcccatgcagtttgttgatacaacttagtatcttattgcctnnnnnnnnntttcttatcattgtttcaaaaaagcaaaatcatggaaaatttttgttgtccaggcaaataaaaggtcattttaatttaaaa

SEQ ID NO: 272324 - DNA, 366 bp, Homo Sapiens
ttacttctgaaagaggaaatctattgttagggaaaaaaattacacaacaaatgaaggtaattttaaactcctttgccttagagcttggtagaggatcagtattccaggaacctgaaatacactgaaactctgaattatctgaggcttttaaggggaatatatggcacaaattagccaaaacaaaataattgggaaatccccttataaattccctctttattaaaatcttactataaattgaagttttctaggtccaagataatgtccattaattttctacaatatctgaaaaagtttccacaataggacataaactagttcactggagttttctacaataaagatataatctgcacgtgaccctga

SEQ ID NO: 272325 - DNA, 370 bp, Homo Sapiens
  misc_feature (245)..(245): n is a, c, g, or t
  misc_feature (349)..(349): n is a, c, g, or t
  misc_feature (359)..(359): n is a, c, g, or t
ggacaaagatagctgataatgcaaataacttcaggtgccggcagttggaagttggcccaatgtgcagaatgttctgttcaggggcatgtgggcttggctaacagatctgttatagccctaatatcatactgttgttggtttttcaatcaatgcacaaagttggaaagatatagagctgaccctgaacaacaggggtatgaaccagtgtggggtctacttatatgcaaattgttttcaatatatanagttggccctcccatatcagtggggttcccccaacttgaaacccaagaatagggtggggaaaataccagttttcttgggggatgccgaatggggccatatcccncagggtcccnccaggggccca

SEQ ID NO: 272326 - DNA, 423 bp, Homo Sapiens
  misc_feature (105)..(105): n is a, c, g, or t
  misc_feature (133)..(133): n is a, c, g, or t
  misc_feature (376)..(376): n is a, c, g, or t
  misc_feature (413)..(413): n is a, c, g, or t
gtgcatacggatttacttaaagcagacatgtcagaacaggaaggggagaactcggtcttctggagaagtggtcctttccactctgacaaatcagcaatggacttnccattcaagtttctgttttgggaggaancggaggagcagggttaagagatgagctgtggcaaaagtgggaggagacgccctcatatggaaggagtggacagctgacctgtgggcagcacggccttcttttgaagtctcacttcttcagggggttgtaaccggaaccaaacacactctctctttctagtcatcttacatggagaaggaaattactctcccacaacttcagcactaatcatttaaatgtttccaagaaatttccaagaaaatncttagtcaattctgagaagttcttccacatacccaanaaatctctgg

SEQ ID NO: 272327 - DNA, 402 bp, Homo Sapiens
  misc_feature (18)..(18): n is a, c, g, or t
  misc_feature (36)..(36): n is a, c, g, or t
  misc_feature (51)..(51): n is a, c, g, or t
  misc_feature (100)..(100): n is a, c, g, or t
aaagcatgccaggtttanccgtgtcctgaagtgatnagcacggggctgccnggaagtttatagaagtgagcagaaagatggatcctgagaactttaaccntcctgtattttccttatgctttccctgagtgcatttgtggaactcacagtggttgaggtcttcatggagccggtgatgctttagtaaaagaagtacaaactcaagatacctatgagagccaggtaggcaacaaatgagtgaagcaggcctagtgtaggacaatagggagtggcggagactgcagtaaattggagcatgttggccaaaaaaacagagctatctgaaaatcagattcagactaccagccaccttcccactgcagaccaaaattgtatatctaattgtgtttcagactgctaaat

SEQ ID NO: 272328 - DNA, 415 bp, Homo Sapiens
  misc_feature (333)..(333): n is a, c, g, or t
  misc_feature (379)..(379): n is a, c, g, or t
  misc_feature (384)..(384): n is a, c, g, or t
  misc_feature (394)..(394): n is a, c, g, or t
tttaagatattctgaaacagaattatactaattatggggtttttaaagttgaactctttttggcttaaacacaaatttattatcttatagttctggaggtcagaagtcctaaactagtcttacggtgctaaaagcaaggtgtctgcagggctttgttccttctgaggcggtaggggagaatgtttcctccttagcttgtggcctctgcttccatcttcaaagcacatcattccagcctctgcttccgttgtcacattgccttctctgactctgaccctttttcctccctcttattaaggaccctttcaattacattaggcccacctgggatantccagggaaaattctccacatcttccaaggtccttaaattttggtncacancttaccaatnactgtttttgttggcctaagg

SEQ ID NO: 272329 - DNA, 468 bp, Homo Sapiens
  misc_feature (13)..(13): n is a, c, g, or t
  misc_feature (31)..(31): n is a, c, g, or t
accccgggagggngggaatagagggaagcantgtgccatccataaggcaaaaggccagtgggagtttaggtaaggaaaactcccccaggattttgggagcccttaatcctcaaatgcccatccagttccagcaatcccagtgtttccattttgaagaaacatgaatcctaaggggtttaacttcctgtgaggtcaaaaacagtgagatttatccctgtacccccattccccagtagcactggaagactttcacaagcttgtagaggaaatagtatccttcatggaatcttagactcttgaagggccctttaaaggttgcctaacccttgctactcaaagtgtcttttttggcccagcagcgtcagcatcacctgggttcttgttagaaatgcagaatctcagccccgccctagacctactgtaccagaatcagcattaacaagatccacgccgagccctatgcagtct

SEQ ID NO: 272330 - DNA, 462 bp, Homo Sapiens
  misc_feature (147)..(147): n is a, c, g, or t
  misc_feature (392)..(392): n is a, c, g, or t
  misc_feature (407)..(407): n is a, c, g, or t
  misc_feature (421)..(421): n is a, c, g, or t
  misc_feature (427)..(427): n is a, c, g, or t
ggcacgagtggccttatattcaaggaaaatctagcatcaagattacgaggcatcacctctcaatcaggtctgggaggtatcttggggcattgctcttctgaacacctgcagaggcttcctcaggtgagtgtgggagcccggaaggtngggcctccctaaccactctgcctgcacatgaattctccaaagcagtgggcccccatctgtttcaattacacatgcctgtcagcaaaaacttcgtgagatgcactctctctgtgtgtttattaatttatttaaagcatatatcccttttacttttgtactactatattagggcacattataaaaagtattacaggcataggaaactttaaaatggaattaaggacaccaaaatatttattaaaacngggggttctgggccnttttctcttctggnactccncgagggggggaccctgggggcacctcccggggagg

SEQ ID NO: 272331 - DNA, 432 bp, Homo Sapiens
  misc_feature (25)..(25): n is a, c, g, or t
  misc_feature (33)..(33): n is a, c, g, or t
  misc_feature (379)..(379): n is a, c, g, or t
ggtctgaaaaggtttggatgtgtgncccctccnaaaacctcaaggttaaaaaaggtgaatccccaaggttggaaggtggggctttccaggttagccaactcttttatcgtctagttctctggttccccttaaacctcttttattagcaattgctgtatcctgaggaggtcccaggcaagccccatcccagtgattcacatggcaaggaactgaggcctgcccagtgtaagtgagtctggaaatggatcttctgagccaggcaaaaagcgagctgcaaagtgcgttctttaaccccagctgggccttcagatgattgcaaccccagaaaatagcttgattagcagactcatgggattctgagctggactcattctgcttnagccacttccacactcttgaccccacagaaactgcagcaatatatgagcctcc

SEQ ID NO: 272332 - DNA, 412 bp, Homo Sapiens
  misc_feature (37)..(37): n is a, c, g, or t
  misc_feature (51)..(51): n is a, c, g, or t
  misc_feature (111)..(111): n is a, c, g, or t
  misc_feature (140)..(140): n is a, c, g, or t
  misc_feature (198)..(198): n is a, c, g, or t
  misc_feature (225)..(225): n is a, c, g, or t
ccccaaaaaggatggcagcaggtattgggtcctgaanccttctggcggganccctgaggctgcggacaaagccctttcatctgaggactttcatctgtgcatatccacggncccccaggggagttccctgctggacccanactctctggcagaggagggtgaagttccctcccatgcaggagcacggcatggcgggancggggctgcagagtatcccgaagggtngccggggcagcgggaggtggctggacccatcgcatctaaaactggccccaggacacttggtgtatgcgtgacttggctgtggctgtcttttttaatccttgtgtaaagcagcaaaaaagacctaaagggaattgtaatttggttataattcaggatttggaaataaatttattatttgtaaaattta

SEQ ID NO: 272333 - DNA, 471 bp, Homo Sapiens
  misc_feature (44)..(44): n is a, c, g, or t
ccctccagtactcacaagccagggccctatgggatctgttcacnggactcatgcttatggcagctgagcacatctgtcctgtatgtctgccagcagccacgtccctctcactcctgtgacggacagccttgactatatttagaaattcccatttctgattgcatttcactgctgaatggtcctagaatcctttattgcccttgtcccatcacaagagacagccagccacagccacttttatctcaacaacatactgaatactgacagaacaaacaggcaagttgtagattcaccaggatttatacatatttgattttttattaccaatcgaaaaataaattccatatatcgtttagcaaatatcattgttttgtgacaaaagacacaagagtcataacaacaaaactccccgagagtcaaactcataacgccaaaataaatcacaaaaatatacaaattaaaatattatgc

SEQ ID NO: 272334 - DNA, 410 bp, Homo Sapiens
  misc_feature (386)..(386): n is a, c, g, or t
aacttttgtcctttgtccattgttacagtacaacttgcaagcacggggagaaaacctaggtgaaaactcaaatctctatggtcaatttggcctacatcatataaaggcactggggtttgcagggtgtctaggaagggagggttcacgagaacaaaaggtactccctgcccttgcaaactcgcgaagatgtggtgtgggaaactgggcacgagagcactcagctgtaactcacccacagcctcacagtgcaggaggtgggtggggtgagagggtaaagaccagcatgcttggtgagggccttgctggggatgggagcctagaagggtctgcacaaccaaatgctgagatttaatatcactcagaaccatgcaaaccaaagggaatgnaagggggaaagaattccaagaaat

SEQ ID NO: 272335 - DNA, 593 bp, Homo Sapiens
  misc_feature (274)..(274): n is a, c, g, or t
ccgcagctaacatcaaaagcactggtatgggctgtctaactggaacctgagttggtctttgtaattacgattcttttgggtttattttgccagttcattatccacccccctgaaatcaggcctcccaaatttagcaggtgctggggaggaccccagggagtggcttgtgggggctagctggtgaaactaccctttcctttctgttctatgagtgtgatggtgtttgagaaaaatggggctatggttccaggcgcacttcacatgtgcaaagatnggagaaagcactcacctgcacatttaggctcagaatattgattgaaacattttgaaatatcaaaaataaaatgttatttttaaagtttctctgagatttcgcttaagttttggtagataatcttaaattttagtgacctcagtttgggaattcagtaagccaaatattgtatccttattattagttatatagaactatgccttagactttgttagaaacttctgcttcagcttgactgactcattttccatttctggttgtacaaaatgaactgacactttaaatgctgtggccacctttaaataaagtacaatgtgac

SEQ ID NO: 272336 - DNA, 456 bp, Homo Sapiens
  misc_feature (91)..(235): n is a, c, g, or t
gcaaatacccctggtaacccatttatggaggctgccacagaaatgctagttggaaattttcctccttcagtctatcatgaatttctttttnnnnnnnnnnnnnnnnnnnnnnnnnnnnnnnnnnnnnnnnnnnnnnnnnnnnnnnnnnnnnnnnnnnnnnnnnnnnnnnnnnnnnnnnnnnnnnnnnnnnnnnnnnnnnnnnnnnnnnnnnnnnnnnnnnnnnnnnnnnnnnnnngtaccgtgattattagttcaaggttctctttcactggggtaaagaccttaagagagcagtttttgggctttatattctcaatttcccgcacagtgcctagcacatagcaaggactcaacaaatttcattgaatgaatgaaaaaacatagtttaccaaatgtcagtgtactcaaactcttttaactgctagctatagaaatccaattaagactcacttgggt

SEQ ID NO: 272337 - DNA, 164 bp, Homo Sapiens
aatgcttgaaattatacctaataattccatagtccctaaaaagaaaatttgagtgaatatttgatagtagcttaccctcttaaagtttacagacctcaggccaggctgattctcattaggcccaggcatgctggctcaggcctgtaatctcagtgctttgggaa

SEQ ID NO: 272338 - DNA, 449 bp, Homo Sapiens
  misc_feature (34)..(34): n is a, c, g, or t
  misc_feature (76)..(76): n is a, c, g, or t
  misc_feature (94)..(94): n is a, c, g, or t
  misc_feature (99)..(99): n is a, c, g, or t
gggattccaaagaagccaattaatccattttttncccctcattgacacagaagaccaaaggccaaaccacagaagnctttttaaaaggctcctnggaantttggtaatataatacatcccaatacattatagagacaaatgtaaaatggaatttccctaaataatatattcaaattttaagggagttttgttttctttcatggagatggctggaataaacaatatagccattgtttatcattaaatgtccatttaattcattggccgtggatttaaagaccacacttctgaaagaaacctcagtgcaagtcctcaccactggctgggattcctggagccctggctgcagtttctaggctgaggcagggagggagggaggatgcaataacaaggaaggatgtgggacaacaggagactgcttggtttttaataaatgcatttctgaccaa

SEQ ID NO: 272339 - DNA, 694 bp, Homo Sapiens
aactattaggactatatgtcaagtaatgtgcaaaacaaagacagttcctgccctgatggagcttgtagatcagaagggaagatgagcattaagtaattatatagattaatgtacaactgtgatgagtgcaacaaaagagaggttcatggcactatcaaacatgcaatggacggattttgtttttgcctataaactcttgccatagaaagcttgaaaatcagtccagggggacagcattaatcaccatgttctttccttatccctgtcttccccaaaattcatgtgttgaaacttaacaagaggtgggaactttaggatgtgattaagtcgtgagggcacagctcttatagatggggtcacggtccttctaaaagggcttgagggagtggttttgtttccttccatcccttccgccacatgaggacacagtcttcgttccctctggaggactcagcaacaacacaccatcttggaagcagagagcagtcctcaccagacacggaatctgccagtgccttgatcttggacttaccagcctccatacctgtgagaaataaatttctattgtctataagttacccagactgtggtattttcttctggcagcacaaatggacacccagaaaatgatgcatgcatcttctgactcctttgattccaaaatacaaaatattagaataaagttatggaagtc

SEQ ID NO: 272340 - DNA, 461 bp, Homo Sapiens
  misc_feature (23)..(23): n is a, c, g, or t
  misc_feature (29)..(29): n is a, c, g, or t
  misc_feature (34)..(34): n is a, c, g, or t
  misc_feature (49)..(49): n is a, c, g, or t
  misc_feature (67)..(67): n is a, c, g, or t
  misc_feature (97)..(97): n is a, c, g, or t
aagcctagctctgtggcaagctnaagccngggcnatgcttcccttcctnaagctggaagcagggaantttgggttggctagggatccctgggcgaanctcaggccgggctactccctttctctcccctcctccaaccaggccactgaagtcctttgtgccccgaaccccagccccagccggggtctgtgggtggggcagcactcccttctggttcttagttgccatggaccttaccctctggcaggactcctgctgtcctctcctgcagggtggatggcaaaatgggaccagcacagctcctgatacaatgaaccctgggctctaatcccagccctgccatgtataagctgtgtgacctcaagtatgtgaactcatctctctgtgcctgtttactccctaacatgcaactaacagtagtactctaccctaagagctgttgtgaggctttcctcaccttttt

SEQ ID NO: 272341 - DNA, 301 bp, Homo Sapiens
  misc_feature (15)..(15): n is a, c, g, or t
  misc_feature (44)..(44): n is a, c, g, or t
  misc_feature (61)..(61): n is a, c, g, or t
aaaaaaatttaaaanaataaaaatccctgcggggcaaatatatngcagggttctttgggcngggacttgagacccacccagcatctgtggcattcctgcatggcctgtgccccaataatatgtgggcaggggcattaccagaatcagtgtataaaggaaattgtgtgcctcatttggagttcgcttgtcaatgtcagtgatgacctatcacttgatcttagccaaaagactgaaaagcaataatgatgactatcactattcagagctgtgctgcccaatacgtagccattcatgaattcaa

SEQ ID NO: 272342 - DNA, 398 bp, Homo Sapiens
  misc_feature (207)..(207): n is a, c, g, or t
  misc_feature (255)..(255): n is a, c, g, or t
  misc_feature (275)..(275): n is a, c, g, or t
  misc_feature (346)..(346): n is a, c, g, or t
  misc_feature (363)..(363): n is a, c, g, or t
  misc_feature (381)..(381): n is a, c, g, or t
aaccggatgtctcagactgtaagcgaaggacaaatttgtgagatttggggtctatgaactcttcagagagtatgatgaatggaattttcttcacattgactacgaggctgaagtccaagcacttaaggacgaacacaattccatcccgtaatccattagtcacagcctcatcactgacaagcctccactgtgtagagagccagcggnccttgtcatattgcagggtggggcccgcactgaggtaccgttctaggnaggccttgggggtcatgccngttggtgatgcagaaggccagggtgctgcaggatgctctcccatgctgtgggtagttctgctgccggggtnatgcgcaggtacttctnggagagccctgggccatnggaggggaaaattgcct

SEQ ID NO: 272343 - DNA, 409 bp, Homo Sapiens
tacaccatccccccttggtgctgtcttcaggatagtgaattctcatgatatctagttgtataaaagtgtatggcctctcccacctctctctcttcctcctgttccagccatgtgaagtgctggtttcccctttgccttccaccttgattgtaagttccctgaggcctccccagaagctgatgctgccatgcttcctatacagcctacagaaccatgagccaattaaacctcttttctttataaattacccagactcaggtatttctttatagaagtgcaagaatggactagtacgggtgtctacatgagaaattactctttctgttttattacatctttctttctcaggttttgtccttcacctaaaagtaattaaagctgattagtttcaaaataaattatgtacttg

SEQ ID NO: 272344 - DNA, 1104 bp, Homo Sapiens
  misc_feature (158)..(158): n is a, c, g, or t
  misc_feature (165)..(165): n is a, c, g, or t
  misc_feature (175)..(175): n is a, c, g, or t
  misc_feature (205)..(205): n is a, c, g, or t
  misc_feature (237)..(237): n is a, c, g, or t
  misc_feature (239)..(239): n is a, c, g, or t
  misc_feature (241)..(241): n is a, c, g, or t
  misc_feature (261)..(261): n is a, c, g, or t
  misc_feature (272)..(272): n is a, c, g, or t
taacgcccacttcctttaacaagtgaaacaagtaaaaaataaacaaatgaaagaaaaggggagacaggaagaaggggggaaagaagacaaggagggcaggaaagaagaggagagacgcactcccatgctcagagccccatggccacacagggtccctncccaggngacgcggccnctcaggagcacggaggcttctcaccaactncgtcagggaaacacccgggccccctggggaangntnaaactttttttctttaaatnaatcttataangtaaaaacactgttacaaggggaaaagaaagccccactttatgtatttggttgcccatggttttaggagcatctaatctaatttcaactgaactcctaatgaactagtcatgcacagatgagtctgcttcagcccctgtctcctccattccaggggcttctggaaatgggcctcttctacatacagtttaaagcagagctgggtggactgttagaggtaggttacaggaggaataaagacccatcttcagaggaggtctcagcaccacgacatgggagcacctctcaggacaaacgataacttgagcggcattaacgctgaaacgaagcaccccttgcagcgtctgtcgctggtgcctgcagatggcctgcgctgcacttgggtcatgccgcacccaacaggagtcagaaggtgactcgccactatggccgtctactcacatgcaacagtccatgcagagggcagctgggggtgtgcattcggaggctttgggatagaaagcaggggaataacactaagggcaggggacaagagtcagcagagaacacgccagggagccacaagggaaaactgcttaagaaaacactgaagacttaagaaactttagtgacttgaaaccactggagttcacaacactaaaatacaggtttaggactgaagtgtctttttgtgcatgaagtattaagagtccctgaatataatttgaattaaataagaagagctcctatttgtaggttaatacatgtaaattattgtatatttttgctatatacggagatatactggaactactgcggagttacattacatcttaagcagtttcactcgtgcc

SEQ ID NO: 272345 - DNA, 392 bp, Homo Sapiens
aaaattacatagtacagagttctagccttccttttctcttgctcccaggagaaaataaaaatagtttctaccatcttctttctcattcaaattaagagtgactgcagacctgcatgaatgttccaagggacttgcaaaaccacctctataactgctacttctatatttgtgaaactctggcgtttgtcaaaaaccgttttaagcaccagtagtcagctaagggggctgagtggatccctgtgttgaagctgcagagggcagccgtccattctagcacttggagctttgcgttccaaccacccaatctaaccccaacatactcaagatatttttaaagccctgtgaaggggaaaacactgaaaaacaatttgccaatttgtaagtttttgtgt

SEQ ID NO: 272346 - DNA, 283 bp, Homo Sapiens
  misc_feature (273)..(273): n is a, c, g, or t
attgtgttggacctcagatttccagatacaaactgttattcaacctcactgactcataccccaacagtcattatcattggtccaagcttgggcctcttttatctcattcatctctacatttctttactggttaatttatcagtaaactaatcatattaaagtaaatatctacctatctaaaacgcttatgaacaaaatcccaaaacccttgagaacaagatgacttaagtatccctaacaccagtctataaagtcatttaccatggttttttncattaatcat

SEQ ID NO: 272347 - DNA, 542 bp, Homo Sapiens
  misc_feature (472)..(496): n is a, c, g, or t
ttaggctggtggatttcatggagcatgtgaaaggagaagccatcctgggcgaggattttcacttctcttgttgaggcttttcaggaataggaatgctgatttccttagcacctcattctaaaggtattcccttgatgggtaagccccatgagaattcctacttttggttaatttctgattctttcaggtatagagagggcaaccgctcagaagcagccctaggggaaaaaaatatccttgtactttttggaatgaacatctttatacatagtgaaactcagttatggcactacttattacttggatttgaatgggtccccagaagtaatatttgataaatgccttgctaaataccatacaaagctcatgtggtagttcttttacccacattagcctaacatgttctactgtttataataataactcacaacccaatttctccagcctgggcgacagagcgagatccgtctcnnnnnnnnnnnnnnnnnnnnnnnnnttagcagaggagttacatcatttctgaagaagcagattttacttag

SEQ ID NO: 272348 - DNA, 412 bp, Homo Sapiens
  misc_feature (273)..(273): n is a, c, g, or t
ttggtttcccaagcaagaaatgacactttcactgtcagtctttctaggagtctggcagaatccaggaccgggattacccttatttatgaagcgaccttagactaacagtggctctctgggtctccagacaattggccagggactctaaaaaccagaaacaaagttgagagaactccatgctggtggagaaaaacagctggcctttatcaccagaatgtgccccatagaagcagcaaagcagcaagcgacgttcttaaacaagggcctgtggcntccgtcaagatctggaggaatcatctacgactcactgctgagtgagagggctaggcagtgtctttaaggtcctgccagctttaacattgtatgctttttcttttgttcaatctctcaccacaactggaagtgttgcctc

SEQ ID NO: 272349 - DNA, 475 bp, Homo Sapiens
actacacaggagaaagtttgcagtaacttagcagaaaacattattttaatcaccagtgtatgttctcctgctccctggacaaatccatcagcagcggcaacactgaccaggtcccagattggggccgctgcggtggatgtgaatccattgaaactaggggtctccagtgctcctgactcctcacagctctgttcctatgacaaggatggtcagcaaagccagcaaccttgaagggggaccttcttctaatctcctccctgcctgctgagagagtgtacagaagcagccacttgtcagctgcgatgaatccaatgataattacataaatcattaacaatacttgatatttgcccatcacatttctcatttcaaagtgctcataaaattgtatctcatgggtgcactgccggcacaacagaattccaaggaaggattacgggctaagtaaataaaagctggaggctgctttaaagcc

SEQ ID NO: 272350 - DNA, 277 bp, Homo Sapiens
  misc_feature (162)..(162): n is a, c, g, or t
  misc_feature (211)..(211): n is a, c, g, or t
ggttaacaggtctcaagtgtggctggcttcgagcaagtcttgatcccaggggttcctggtgtcattgtaaccacccaacggttcaatcttgcccgctgcccagacagtggattcatcaagacaaaggaattggcaataaagagtttaattcacacagagctnggctaaacaggagaccagagttttatgtattacttaaagcagtctcctngaaaattcagagactggggatttttaaagggataatttggggggagtaggagaccaggggagcggg

SEQ ID NO: 272351 - DNA, 401 bp, Homo Sapiens
  misc_feature (28)..(28): n is a, c, g, or t
  misc_feature (36)..(36): n is a, c, g, or t
  misc_feature (91)..(91): n is a, c, g, or t
attacctccctaatccacggtggaaggngatttgcntttggttaaccaaaaaattgccagctattgtccagctttccatttttttaccgangaaccttaaattagtcccctattaggaatagggttgctactcatctttttttaaaaaccgaatttcatcatttatctaaagagaaaatatgcagaataactggtcttgttaagagtgcaatattatatttttatgtaaaaataaaaattaatttggggggattatttattcagcatgaaacctaatatgtatatgtttgaaatacttcataatgtgcatgttgtagcaaacatttctgtaaattatcacaagctctgttacctttatatacactgcctcttcaatttggaaataaatttcataaaaataa

SEQ ID NO: 272352 - DNA, 555 bp, Homo Sapiens
  misc_feature (469)..(469): n is a, c, g, or t
  misc_feature (503)..(503): n is a, c, g, or t
  misc_feature (510)..(510): n is a, c, g, or t
  misc_feature (521)..(521): n is a, c, g, or t
  misc_feature (534)..(534): n is a, c, g, or t
tggtcttgatttcttgacctcgtgttctgcccgcctctacctcccccagcatcacttttatagctttctgtgcctcttcctctgggccttggtgtatgaagccacttgcctttctctgttgggaagcgagcagaatcagattgctactcatgatgcagtccgggcagggcatactgtcacctttgcctgtggacacagttgtcaggataggggagaagccctttaggtccgtcttcttgacacagccctcctacctgggttacgctggtgctttcgcttggtttagacaaccaaggacactttgaggaattatgctgtcctcagaatgtctgatgaaaagaacagattcacttttttgacacaatgcccattagccatctttgggcaagtgttttctgatcaaaaggttcccccatgcctgcctctaaggaaaagtaaaactttttttcagaattaaatcctccaaatngggattactggagtaggcctttgggaaccaattncccattnaaggccttaantccaggacttggnaaatggggtcaacggctcaag

SEQ ID NO: 272353 - DNA, 436 bp, Homo Sapiens
  misc_feature (291)..(291): n is a, c, g, or t
gtcctgaccagcctccttgatgaggcgcttggccttggtttcagagaaagatgatatctcgtagaagtggtagtgctcctttgaatgtgtgaagctgcggaatgagacagacttcaagtagataacccagggaagagagggctggacacaagatgggcttggatttctggagaaggtggaaaagaagatggaattgaaccctcagcagtctgagagagaagaagataatggccatccaacctaaacctctgcccactgcctccccactgtattctccctcctgccttcacntgccgggacaagagaagggactcaggcttggaaataggagcctgggccacaatctgacaacagatagacggacaaaacagcgggcacgtcacaacctgggggtgggaatgggaataaaggcggtctgcatgtactgctgggaaaa

SEQ ID NO: 272354 - DNA, 452 bp, Homo Sapiens
  misc_feature (247)..(247): n is a, c, g, or t
acggggtcagggctggagggcacaggaagagggcagctccccaggctggctggcaccccaagggaagagctggtctccctcagaagccccttcctcccacagacttctgatcatctccctcttctcccctcctttcacacccgaggctcctgctctcctgtgcctccgaggcccccagctggaagtgccttgttgcctctgccctttgaagtcggaacaattcctagcacctgtcggaaggtcaagncaaaggcaaattcaaggccagactgtgacaaacccaggctgaggcctgccccatgaagagctgagccccctgaaacccctgccccttgttggtacattccagaggcgcaggggcctgggggatatgaagctagggaagcccctgcttcgattccccactgcccttgtcctggatccaacaccaaataaaaagaaacaagtgaagt

SEQ ID NO: 272355 - DNA, 443 bp, Homo Sapiens
  misc_feature (146)..(146): n is a, c, g, or t
  misc_feature (149)..(149): n is a, c, g, or t
  misc_feature (162)..(162): n is a, c, g, or t
  misc_feature (167)..(224): n is a, c, g, or t
  misc_feature (233)..(233): n is a, c, g, or t
  misc_feature (259)..(365): n is a, c, g, or t
  misc_feature (381)..(381): n is a, c, g, or t
  misc_feature (422)..(422): n is a, c, g, or t
aagaagaaataaaacatgcctttatttgcagataacaatcacatacatagaaaatcctaagggatttacaaaaaaagctgctaaaactaataaggagatttaacagtattgcaggacacaaagcatttctgtatcctaacaaagantanttaaaaactggantttannnnnnnnnnnnnnnnnnnnnnnnnnnnnnnnnnnnnnnnnnnnnnnnnnnnnnnnnngtagctggnttaaaggccacactgccacacccatnnnnnnnnnnnnnnnnnnnnnnnnnnnnnnnnnnnnnnnnnnnnnnnnnnnnnnnnnnnnnnnnnnnnnnnnnnnnnnnnnnnnnnnnnnnnnnnnnnnnnnnnnnnggtgtgagcgcccccngcctgggccaggcatccttaatttttttaaagaactgtgtntttcaccttctgggctatgtt

SEQ ID NO: 272356 - DNA, 647 bp, Homo Sapiens
  misc_feature (35)..(35): n is a, c, g, or t
catcagcctacctccctcctggctgctggcagatngtcgccagcattaccttccactgcctttctccctgggaagcagcacagctgagactgggcaccaggccacctctgttgggacccacaggaaagagtgtggcagcaactgcatggctgacctttctatcttctctaggctcaggtactgctcctccatgcccatggttgggcgtggggagaagaagctctcatacgccttcccactccctctggtttataggacttcactccctagccaacaggagaggaggcctcctggggtttccccagggcagtaggtcaaacgacctcatcacaagtcttccttcctcttcaagcgtttcatgttgaacacagctctctccgctcccttgtgatttctgagggtcaccactgccagcctcaggcaacatagagagcctcctgttctttctatgcttggtctgactgagcctaaagttgagaaaatgggtggccaaggccagtgccagtgtcttggggcccctttggctctccctcactctctgaggctccagctggtcctgggacatgcagccaggactgtgagtctgggcacgtccaaggcctgcaccttcaagaagtggaataaatgtggcctttgcttctatttaa

SEQ ID NO: 272357 - DNA, 310 bp, Homo Sapiens
  misc_feature (293)..(293): n is a, c, g, or t
aacagtgtgagccactgcaccaggcctttatggtgtgtctaaatggcacttccttagagacctttccgatcacctgaagtacatgcccaacagaccatcccaattattctctacctcattctattgtctatttccttgtaggttttatcatgaggtactattttgtctttttatatcctccctcacctcgaacgaaattcgacttccaagagggcaagaaccttatttgcctttattcctgacatgtagctgagtgactagcctcggctacgtgtcagtgggagctcaacagnaactgggtaaatgaata

SEQ ID NO: 272358 - DNA, 208 bp, Homo Sapiens
gaaagaaagaaaaaaatacaattaacaagcctcttttgtaaaagggtttcctttctatgtataaaatcgtggtggtcccttgtttttacatgttcatgctgtgtaattttgagatgttactgagatatgttctgaacataatgtgcatttttttctgtacagatgaaatgggagaatttaataaagagtttgcaggtttttacttgtt

SEQ ID NO: 272359 - DNA, 459 bp, Homo Sapiens
  misc_feature (430)..(430): n is a, c, g, or t
  misc_feature (444)..(444): n is a, c, g, or t
tgcggtcacagtcacagcagcctcgacctcctgggctcaagcaatcctctctacctcagcttctggagtagctgggagcacagtcaccaagcccagggctaatttttatagagatgaggttttgccatgttgcccaggctcaaatcactcttaaagagtaatgatttctcatccttatgacacacagaagaatttgaccaagattctcggaggttgccaaatcattcctggcaaaagcaggagtatcaaaggaaatgtcaccgatttggacacataaattctgacaactttaaaaataagtcaaatttcaattagaatacagactttaacagaagaaagatacacaggcatcagttataaatggagggaactaaggcctgaaaaagctttattttatatagaaattgccaaagttttagtcttgaagcanaaagaaaaagaaanagaaaatgaagacca

SEQ ID NO: 272360 - DNA, 689 bp, Homo Sapiens
  misc_feature (328)..(371): n is a, c, g, or t
catgtagcctaggtgtgtagtagactatatactgtctaggttgtgtaaatatatgatgtttacagaatgaaatcacctaatgatgcatttctcagaacatatcatcatcgttaagtgacacatgaatgtacatgttattaatacctcatacaatgtaaatgctatgtaaatagttgttatactgtattgttgagggaccaatgtcaagaaaaacagttgacacattcagtacagtcacaagcatccattttttgaaaatattttcgatttgcagtcggttcaatccatggatacagagctcacagatacggagggccaactgtattgnnnnnnnnnnnnnnnnnnnnnnnnnnnnnnnnnnnnnnnnnnnngcttcaagactaaaactttggcaatttctatataaaataaagctttttcaggccttagttccctcatttataactgatgcctgtgtatctttcttctgttaaagtctgtattctaattgaaatttgacttatttttaaagttgtcagaatttatgtgtccaaatcggtgacatttcccttgatactcctgccttttgccaggaatgattgggcaacctccgagaatcctgggtcaaattcttctgtgtgtcataaggatgagaaatcattactccttaagagtgatttgagcctgggcaacatggcaaacctcatccc

SEQ ID NO: 272361 - DNA, 274 bp, Homo Sapiens
ccagggccctgatgaaagatctggcccttccctctggaaggggatgtgggagcccttgatgcccactgacctcatctgtattacttgttgccctaaaactcagaactaaaagagatcttaaagatcatctaactaccttattttgcaggtgagaaacatgctaggactatgtgagtgactgggttcagggttccacagctagtaggggtggagtaacgggtgtgtccagtcagtgcagtggttcatgcctataattttaacactttgggagcca

SEQ ID NO: 272362 - DNA, 531 bp, Homo Sapiens
  misc_feature (451)..(451): n is a, c, g, or t
  misc_feature (486)..(486): n is a, c, g, or t
  misc_feature (501)..(501): n is a, c, g, or t
cttgcacccggccctttgtagtgtttttaactaaagaatttgtagagttgcccaggccaggaagcctggtggctctaaagggtaatagaccttgtcagtaacagataaggagtggtaagaggacattactcatattgaagatgaagaccagactttgctgcttcacaggccatgcgctgggttgggccacttcagctccactccattcgttttcctttcctaacttgacaatcagctcactcaccctcccttagtgcctccagtgcctactcctgtcactccaatgtcaacccattgggagttgaggcctgtcactccaatgtcaacccgtggggctgttactttgcgtcatatgatgctgtgaggaggccttgctgggaatgtcctagggaatccctagtagcagtggctattagtcttctagaaaagaactattgctggctgccttgtncacaatgccccaccttcttggggcaaagtgggcangcaattggcgcttcnatgaaggggggcttttgcaattccttaagc

SEQ ID NO: 272363 - DNA, 780 bp, Homo Sapiens
  misc_feature (482)..(482): n is a, c, g, or t
gtcaatccaggactacaaacacctgtgccaagacctgagcttctgccaggacctgtcatcctccctccattcggacagctcctacccaccggatgcgggcctgtctgacgacgaggagcctcccgatgccagcctgcctcctgacccgccaccccttactgtgccccagacgcacaatgcccgtgaccagtggctgcaggatgccttccacatcagcctctgaagggctggggggcagggggcatgcacccatggcaaaaggctcagaaactccccctccggcaagccctcagacttcggagcctgcgccttcccccctaccgcctcacctcacaggagggccaggcatgtattcctcagaggcgaaactgccaaactctttctcctgtcttgggttggctggcactggggcgggcatctagggtacagcctctgctcaatggcactgggcctccaagttcttccacatgtgtgcacccccnagcttggccaaccctcaagcgttgcggtggggcccgaagcatcttcccgttccgcttggcgtctctgggattgggatgagtgcctggctcccatctcctcctcaccttttgttgctatcggcagctgctggctcaggggcatcccaactccgggctctgggttcctactccctggaagggctccaggacccgtcccaataaccacccacggccaagggagcaaggccccgtgctggatatttaaatttaggggccggtctccagggcgcgtagataaataaatacactcagcgtcaaa

SEQ ID NO: 272364 - DNA, 367 bp, Homo Sapiens
atgttcccaggtggtggaggaggctccactggcagagaagcaacgtcaagctgaagacattggggtgcgatggctggccaggacagcttgtctcctcgtcgcacacggaacgctggatttcactctgtgacccagccagcggtctcatctcacagccacaagtttcagcaggaaggagcccacgggtgcctgcctgacctacgagggcccgcaccgttttgccctcctaacattttgtatttgaagtgcttgtcacagtccacaaaataaccactcagaatctgttactattttgtttatatgttgtatcaagtgaatgttaataagtcatctaatgtgtatgctttagttataaatcttggaaaaa

SEQ ID NO: 272365 - DNA, 413 bp, Homo Sapiens
  misc_feature (108)..(108): n is a, c, g, or t
  misc_feature (143)..(143): n is a, c, g, or t
  misc_feature (179)..(179): n is a, c, g, or t
  misc_feature (259)..(259): n is a, c, g, or t
  misc_feature (272)..(272): n is a, c, g, or t
  misc_feature (281)..(281): n is a, c, g, or t
  misc_feature (315)..(315): n is a, c, g, or t
  misc_feature (322)..(322): n is a, c, g, or t
  misc_feature (332)..(332): n is a, c, g, or t
  misc_feature (342)..(342): n is a, c, g, or t
cttatagacctaagggtcaaagaattctacacgtggtctaaaatgaatgacgtgtgaaacaccagcccgccagagaagcatcttgctgcagctccccagcaagactgncctgtcaactgagcagaccgctccattaacaaaanggcggctcagattcagcatcacatgaccttcttctngtgagcaagccaggaattcagtctggagaaacactaagaagttaacccaagaaagttattagagagcaactcttggggangctggggacagtnaatttgagngaagcagggtgtcagagtctgacctcagcctcgntctgtgnattttagggngagtcttcantgaagtgacagtcacagttaagtttttaaagttaaaaaatacactttcagggttgcatgtgctcctgggct

SEQ ID NO: 272366 - DNA, 400 bp, Homo Sapiens
  misc_feature (365)..(365): n is a, c, g, or t
agaagtgggaatcctgaatcatatagcatttctaattcttctgaggaacttccatactgtttttcaaaacagctgcaccattttacacccctagtaacagtacataagggttccaatttctccacatcctcaccaacactatttttttcaaatggccattctaacagttgtgagataatacctcgttgtaattttgcatctctctattagtgatgttgagcatcccttcacgtacctgttggtcatttgtgtgtcttctttggagaaatatctattaaagtcctttgcccattatttaatcaggtctttatatgggatttttttcttctattaaggttgggagcctcggttttggtattttggantaacccccttaggcaaatatggggggttggaaaaa

SEQ ID NO: 272367 - DNA, 300 bp, Homo Sapiens
  misc_feature (107)..(230): n is a, c, g, or t
  misc_feature (236)..(236): n is a, c, g, or t
  misc_feature (270)..(270): n is a, c, g, or t
  misc_feature (279)..(279): n is a, c, g, or t
  misc_feature (286)..(286): n is a, c, g, or t
gttagagatggggtctcactctgttactcaagctggagtgcagcagtgtgacagtaactcacattgacttggattcttgggctcacgtgatcctcccacctcagccnnnnnnnnnnnnnnnnnnnnnnnnnnnnnnnnnnnnnnnnnnnnnnnnnnnnnnnnnnnnnnnnnnnnnnnnnnnnnnnnnnnnnnnnnnnnnnnnnnnnnnnnnnnnnnnnnnnnnnnnnnnntaaaantcaaaaacaatgtacacacttttaactttaaaantgttctttncttgccnaaaaccgggtacca

SEQ ID NO: 272368 - DNA, 419 bp, Homo Sapiens
  misc_feature (345)..(345): n is a, c, g, or t
  misc_feature (369)..(379): n is a, c, g, or t
attcattaccttaaaacttgattgacatatttcaaagatataggaaaggtaaatgatttcaagaaaatccgtgtatttctaccatgcagatgtaataaatgttagcatttggctatatttccttcagacacacatatgcatgtaattgcaaatgttagatacatttgaagtttgctttgttacctgtttgaccctgtcccgttcctccctccccagagtccccagaggtaaccactagagggggcataatatagcatgtgtttttatatttttaatacaaatatattttttaaaagcgctacaaaatattgttttatatatgtggggagccagcttcccggaggnccccaggtggatcccggggcctcnnnnnnnnnnncatggccccaggtataggccttctcctgcatttttacagg

SEQ ID NO: 272369 - DNA, 213 bp, Homo Sapiens
  misc_feature (93)..(93): n is a, c, g, or t
agtgtttcagtatcacagtaaatacttgttttactgagaacagaaaataatccagaaaaggaaaaggaccagccctctctagattgctggaantgtatggatgtgttggggttggtttagtgatctcttccttgacaccctagcaaagatgcttttgtggagtgcaaacctttcataaatatactttccaggctgggtgcagtggctcaagct

SEQ ID NO: 272370 - DNA, 546 bp, Homo Sapiens
cgataataaaagcgagttggtgtaaattattctattgtgtcacattttagaagggaaagacataaaagaatgtatccttagtactggttcttaaacagcccataaaaacccattggcctgaagcttatatctcaggcctatgcccatcttatagtcttggaagacaaaaggctggtagagacagtcttcagtggcttcagtgatgctctgtagaggccagggtgtcttgagtgctgtaactcccaagcactgggctagcctgacttctgtatctccctaccaccacccccttaaaaaaataaggtaacagcaaatctatagtaaaaccatgtctgcatagaacgtgttcaaatcctctgttttcattaaatgtaaaagatgctgtctccattaagttgaatatttggaattggagaagccattgattattattttgagtttctgtaatgttttatagaaaagtaagatgcttattcagaatttaagaatgaaggcaactgaaatatgcattgttgtagttatttatatttcaaactaaaaataagc

SEQ ID NO: 272371 - DNA, 398 bp, Homo Sapiens
gcacaaaacattctaaacactagtgaagcctgtttcgttgaactaattctggctctggaaatgtttttgttttatagttatttacgatttcgtttgtttggattcaagcttagtttgttaatatgtataatttagcatctattacactcatgtaaatatggagtaagtattgtaaactatttcattgcggggattgtgggtgttatacatacatttaggactgcaattttttggtattttttgtattgtaaaataacagctaatttaagcaggaacaagagaactaagggaggtctgtgcattttaaacacaaatgtgaagaacttgtatataaacaaaagtaaatactataatacaaacttccttctgaaataaaagtagatctggtaaaaatgtga

SEQ ID NO: 272372 - DNA, 377 bp, Homo Sapiens
  misc_feature (17)..(17): n is a, c, g, or t
  misc_feature (49)..(49): n is a, c, g, or t
cccaacttcaagataanccctactccctacaacggagcgctgattgaanagtactccccactgtgtgaaccccagagctgctcaggtttcgtcttgcccctgctttaacagccccactttcctcatgcagacaggagctgtggtagttaattagccctcacaagctggataattaattttcagtaagtggctcagtcttccaactttaaaggggtttaatgaaatcttagaggtaaatgaaatgcttaaaatctgtgcccatttaatagaattctctatcaataggtacctgcctctagcccatctccatggggtccttttgtcctttgactcaacaagtcacacaagaatctctggtggagtgagtctctgtctcc

SEQ ID NO: 272373 - DNA, 252 bp, Homo Sapiens
  misc_feature (15)..(15): n is a, c, g, or t
  misc_feature (23)..(23): n is a, c, g, or t
  misc_feature (33)..(33): n is a, c, g, or t
  misc_feature (48)..(48): n is a, c, g, or t
  misc_feature (53)..(53): n is a, c, g, or t
gataccagcatcatntcccaacnaaatgtagcntcacttttgcttacncgtgntctggtcctcagaatgccccacacaagcacacgcaggtgaacgttccacagcagcatcaataatagtcaaaaagtgaaaaacaactcaaatgttcatcagcatgtgaatggctcaaaacaacatgatgtataattcaaaggactcttatttggcaataaacaagaaaagaagctcatctgggctgggtgtggtgcctca

SEQ ID NO: 272374 - DNA, 601 bp, Homo Sapiens
aagcccttatgaaaataaacaaaatgaagggattatgacaggtattaccaaaaacaccaaaaggaacaaaggggcctgcgttaaaacctaattgctaatgcttcacaactaggagagcatgccgtcttgatgtttaaaaaacccagggtctccacccttcctttgatttgtgcaattctgtcttccacagttccggagccttcagtgaggggtagctacatgccccatgcctgccctttctttccttctttgctcactttactatgggtgtattttaatcttgtataaaaatatgcatgaatgagtcatgcacatgtatacgttatgtatttgacaagtggtggtgaaacaaaatcaaaacagatttgatttgtgtttttgaaatgtcagtacattttgtgccactaacactgtgatgtataaaagagctgtttgaatgccttttaatgttgtgttttgtactctggaatcatatggaaaaagtttgatttgtaatttcaatacatattttaaatgtattgtgtcttacgtagtttgtccccccctttagcagggattcctttttaaagctattttggctggaatacaggtgacttttgta

SEQ ID NO: 272375 - DNA, 374 bp, Homo Sapiens
  misc_feature (181)..(181): n is a, c, g, or t
ccttggggcccactgtccttcctagaaacccagcccatccatgctgtaagtaagccccaaaagttaatatgtaagagggtcccatgtaggtgttctggatgaataaccccaagctgagttcctcagctgacagcccagcatccaaccatcaggtatgcgaagtaaacgaggcttctgttgnattgcagttgccagcccatagaatcttcccaggatctttcggtcctccagctaagacctcagacaccatggaagacagaaaagctgctgtgccctttctgaatgcctgacccacagaaactgtgaccataaaaaaatggttggtttttttatggcactaagtttgggattgttatatagcaaaagcaactgga

SEQ ID NO: 272376 - DNA, 196 bp, Homo Sapiens
tcagctaagtcaagagatgatgtcttaaaagcaggacaaaagaagattattacctcttttgttcttgaaaaagatattgcaaacactggataccatgtttagtaagtacattgaggtatagttgactgtgcatatttagaatgtacggtttaataagtattgacgtgtgcacatgtgcatgacccgtgaatacgcc

SEQ ID NO: 272377 - DNA, 178 bp, Homo Sapiens
  misc_feature (42)..(42): n is a, c, g, or t
  misc_feature (54)..(54): n is a, c, g, or t
cctcctataaagcactgggagtacaggcatttttgctcattnatctatgttgtnttttttacttgtcagtttttagatattacattttttgaatactaatgatctgttatgtatgttccaattatcttttttagtctggtttgtcttcatattttggttatgaaatcctgtgccgaat

SEQ ID NO: 272378 - DNA, 466 bp, Homo Sapiens
  misc_feature (24)..(24): n is a, c, g, or t
  misc_feature (46)..(46): n is a, c, g, or t
  misc_feature (74)..(74): n is a, c, g, or t
  misc_feature (81)..(81): n is a, c, g, or t
aggtttcacccatgttgccccaangctgggtctccttaactccctnagtttcaagcggatctgccctccctcancctcccnaaaaatgcctgggaattacaggtgtaagccaacccacatctggcctaatttccaaattttaaaaagggaacaatctgaagagactagcacaatcgaaaagccattccttgagtacagatgttaaaaggccactcacaaacacgtacaaaaaacagaaggcatagttaaaaaaaagagtggtggctctaacctaaaagaaaagtaacagcccataatgaggcaaggcttgttaataaagctaaggataacaagaagggttttgtgagaactgtctagaccttggaaggctggggcggaaggattgcttgagaccacgggttcaaaaccagcctaagcaacactgcaagccctcgtctctaccaaaattaaaaaatcagccaggtgt

SEQ ID NO: 272379 - DNA, 404 bp, Homo Sapiens
  misc_feature (73)..(73): n is a, c, g, or t
  misc_feature (91)..(91): n is a, c, g, or t
ccctccccaaatgcctgggatttaccggttgtaaggccccaccccactcctggcctatttccaaatttaaaanggggaaacaatcctgaangagacctagccacaaccgaaaagccattccttgaagtacagatgttaaaaggcccactcacaaacacgtacaaaaaacagaaggccatagttaaaaaaaagagtggtggctcctaaccctaaaagaaaagtaacagccccataatgaggcaaggcttgttaataaagctaaggataacaagaagggttttgtgagaactgtctagaccttggaaggctggggcggaaggattgcttgagaccacgggttcaaaaccagcctaagcaacatgcaagccctcgtctctaccaaaattaaaaaatcagccaggtgt

SEQ ID NO: 272380 - DNA, 301 bp, Homo Sapiens
tttaaaggaagcctagtatacaactactgtataacataaaattattttcctgtgtctattcaccgtaatgattctagttatatttttaaaggcactgcttagcacaaatatagcacaaaagaaatctaccttttcacatcactatttcagagctagcagctggcactcactgtggcttggcatcttctttaaaggccttccaacatttgcattagcctttcagagaccagggcctttcatactcagcactgttgcaaaatgtcttactcactagtactcaaagaaggccccagtttcccca

SEQ ID NO: 272381 - DNA, 291 bp, Homo Sapiens
tgttttataagacagaatccctgactcccaggaatttatggtgtggaagaagaccaaagggatcaaaagttcaaaagcaaatggggttccactcccaggtaatgatgtcacctgatgaacatgtagaaggtcctttatatttctctcgggttattaactattcttgatacagcatcatatccaacaaaatgtaggcttcacttttgcttacacgtgttctgttctcaggaatgcccacacaaggcacacgcaggtgaacgttcacagcaggcatcaataatagtcaaaaag

SEQ ID NO: 272382 - DNA, 910 bp, Homo Sapiens
  misc_feature (12)..(12): n is a, c, g, or t
  misc_feature (732)..(732): n is a, c, g, or t
ttcggcacaganattatcatgggatagtttccttgaaactggaggatgacagtttcccaactcacaaaaggaaggccaaagtatccatcattagtcagccacaaaagacaatcaaagtggcagaactgctcaagcagataaggtggaatccacaactgactcacacttccccagacaggaccagttgccctcatttccaaagaactgcactctggaattaaagggactcttccattttgaagaaggcatccagaagctgtatcagtgcaatgggatcgcctgggaaagcctgggagtccccaaaccaaggatgtgggaagacaaatcctgttccagccgggtggccaccagcactcaggctactgtcacatcttgatcaccagagcagaaaggccacctggaatgcggctgccccaagcttgcagggaaccaatacctgggcaaccttgtaactgtattctccaggcagcacatgcggtggctctggggacattggtgggagaaagtccttttggataggtttgaacgaccaagtgcatgctggccactgggagtggatcggtggtgaacctgttgccttcacccaatgggagaagagggccctctcccacgctccaagcttggaaagagctgtgttttggttcaaagacaagggaaatggcaaacaaaagactgtaggagagccaaacctcataattatgtgtgttccagaaaactctaaatataacagancctacagggggccacctggagtatgtcacctatttattcacaggatctgtgaatattgctccatagaaaacaaattgttatgattgagtgggtatacctttgtgattctgtctagtgaaaatgggacatttttaatagtgccagaaagattgataaataaatattttttacaagataa

SEQ ID NO: 272383 - DNA, 328 bp, Homo Sapiens
gggtatatatgaccataacttagaaaaattgttcaccaattaaaagtggtgtagacaacagtttctaatacacttttcctggcttctgtaataactcaagtctcagtctgagtgacggtccattgacacttctctgatttcctccaaaaagtaataaataaaggcttacttccaaagctagctaaaaaactaacctcctgaactaaatttgcctttcagtgaaggttggttagggtaacaaaggccaatgacactgaagtagttactggaatttggataggtagcacaggaaatccaggtggaatgccactttagaatcccatacaca

SEQ ID NO: 272384 - DNA, 431 bp, Homo Sapiens
ctataatcacatccctgttagcccttcctgagatcacaccaaatgtccttgatgggaattgtaaacaacccttacttctggtttctaatgatattccaggaaaggagcctaactagagtcagtgatatgccaactccacctttgccttccaccatgtttggaagctccctgaggcctcaccaggagcagatgctcgtcccatgcttcctataagcctgcagaactgtgagccataataaactgtgaattataaattgcctttatagcaatgcaaatggaccagtacagatgggatgctgggaagacagttgtttccaccttcagtaaagtccgtggaacacagttgtgactatattctaggccagccaagatgcttgtactcagaaaggagtggtctcaggaccataagaaagtgaaaaaataaaaataag

SEQ ID NO: 272385 - DNA, 440 bp, Homo Sapiens
  misc_feature (22)..(22): n is a, c, g, or t
  misc_feature (32)..(32): n is a, c, g, or t
aaaatttggccctcgaaggccnaagaaattcngcacgaagcccccaactgcccctggatgagggcactgtgcggagtatggtcactgaggaattcaatggcagcgattgggagaaggccatgaaagagcacaagaccatcaagaacatgtctaaagagtgagcttctgcctctcctgccctgaaaaggaggaatgattggggccagcaactttgctctccctgccgtgcctcggtggtgctcctgaatgtggctgacctgggctgctggttccgtggactagggtcatcttgatctctgcagtttgctccagctaccagtttctttaggcagctctttgtcctccctctgcccagattttgatgtagtctaattgacatccttctcttcccaacttttgtgtgatcttttaggaaaaaaaataaatatttttaaaattaa

SEQ ID NO: 272386 - DNA, 436 bp, Homo Sapiens
  misc_feature (254)..(254): n is a, c, g, or t
  misc_feature (370)..(370): n is a, c, g, or t
ttcggcacagatttaaataggaatgtttccttcaggaccaaatctctggagaagctatgtacatgtatttatttttttaagttgaaaagtatgcgagtactggatccatattattaataactttggcccacctgttctttctcccagaagcagccccagttggaatcagcccctagagcgaggagtcacctggggaagcttgttacatgcagattctgattctgtgtgtctgggaaggcacctgaggactctgncatttcagataaactcctaatgtgttaaacatggcattgggccacattttgaggaaggcaaggccctgggggggaaactgtggcacgtagtttcggaaaacctttggatggggttnaacttctttcatgttttcaaatgtggaaaaggacaggagtttttaaatgagcttgcccaaaagcca

SEQ ID NO: 272387 - DNA, 214 bp, Homo Sapiens
ttgagccaccgcacctgggcagaggcgggtaaattttgattttactttttcatatagcaggggctgccatctcttatcccccaaccccatgacagggcagctgtgggggactgcagtttccccatttccttcgttgcagcttgctgggacctgggggtccaggcaataagggaccttgtctttccaaaagttcaggagttgtggggttcttgat

SEQ ID NO: 272388 - DNA, 402 bp, Homo Sapiens
  misc_feature (29)..(29): n is a, c, g, or t
  misc_feature (37)..(37): n is a, c, g, or t
ttccctgaaaaaccggggaacccccccgnccgggganaaagtgggaaataccgtagcacatcggggtacagttccacatgaacaagtccgtatttccagttccaaacgtgttggcgccttttccatccaaatttggataagaatatgcctgttttcctactatgttcataatgaaatgaatggggaagaaaagggactagcctttctctagggaggtagttttgtgcatggctttgcttttatcagttttaatactaggctgaaaagccaaaatgaaaaattttttattatttttatttctatgcatttagagtttcaacatggaaattctaaatcctatactgatacattttaaggaagaaatacacaattgcacctttgtataatctttatacatacaat

SEQ ID NO: 272389 - DNA, 571 bp, Homo Sapiens
  misc_feature (377)..(428): n is a, c, g, or t
  misc_feature (526)..(526): n is a, c, g, or t
tttttttaaaatttaatgagataacttaatgaacattgttggtcatcttaaaagaattacggttagcaataaaaatccagcaaaggcaaccacataggctattttcattgtctaaaatgtgttaactatatacagaatataaatccctagaatacagtattaagtggaaaatttttctttatatatttgtattttaataaaataacagcaatatctttcttaaacatgcatttttccacctaacagtatccatttagttaatataaaatttatttaggtagaaacaccaaaacaaagatacgaccaatacacttgtggaatacaattaagatagctcttcacattaaactgcagggaccatctttgtttttcagatnnnnnnnnnnnnnnnnnnnnnnnnnnnnnnnnnnnnnnnnnnnnnnnnnnnncgctaagtacaatctgttttgcacatacagtcaaaatccagacaagtttgcaaaggtacataagttggatataggctttctggctgacttcatggggngtccactgatgactaggagtaaatcttcatatccatagaaaactg

SEQ ID NO: 272390 - DNA, 445 bp, Homo Sapiens
  misc_feature (400)..(400): n is a, c, g, or t
taatgtgagacagttgtatgatggtacagatagtgccagtatatgcaacgaagaaagttcaggtttcaccaaaattttgcaaaatttcggggtttaaaaatctgtttatcgcagaagtcacattgactgtctcacatttactcttcctcgtgtcctgatcctgctgacttgtccacatgggcaactacgaagctggcacaactatacttctttgttcactttgggtcaccaccatttgttctgctgttggggctgcccatgtgtagggcagggtttcacggaaaatatcagggttccctaaggcaacatggaactgggggagggctcagagagggggatttcccctaggttcacttgactttacttgagggggatttgacttcaaggatttcccaggggncactagggacaggaaggcagttcggggggaaaggggattcatttt

SEQ ID NO: 272391 - DNA, 614 bp, Homo Sapiens
cccaagaaaaatagctttaatgtgagacagttgtatgatggtacagatagtgccagtatatgcaacgaagaaagttcaggtttcaccaaaattttgcaaaatttcggggtttaaaaatctgtttatcgcagaagtcacattgactgtctcacatttactcttcctcgtgtcctgatcctgctgacttgtccacatgggcaactacgaagctggcacaactatacttctttgttccactttggtccacccacccatttgttcctgctgttgggctgccccatgtgtaggccaggtttcacgaaaatatcaggttccctaagcaacatgaactgggaggctcagagagggatttccctagtcactgacttactgagggattgactcaagattcccaggcactagacagaagcagtcgggaaaggaatcatttcctgattgcctgtgggggaaaaagaaacttttggatagaacagtctggatggactctaacacagtaaaaagtgaaggcagtgcattcttcagaagggcggcagatggggcaccacgcatccccacagaggggcctgtctgcgggccttgcaggagttgccaggctccccaaaatctcctcctgc

SEQ ID NO: 272392 - DNA, 430 bp, Homo Sapiens
  misc_feature (18)..(18): n is a, c, g, or t
  misc_feature (98)..(98): n is a, c, g, or t
aacatccgcagcttttgncagcccccctgcttgctgggtgcaggccttttaagccccctagattgcccttaagagactgaaaaatatacgcttttaanagggccggggttttaggttcatttgactgtaataaagacttcaatgccgtttttaatgtttgactgctgacatctttcaagactcacctttcccttctcccttatgctgcacatctgggcaagctgatggaagcatgggtgcctcctcctttggccccagcaggaagttcaaatcacgcaagccctggcatgcatgcaggaagcttcaccccagcctcacactctaagacggataaaagccaaaccaattaagccgtttctcgaccctcctgggagcctgccctatctccctggaaagtctcagtatgtgagtaataaacctttttataccc

SEQ ID NO: 272393 - DNA, 420 bp, Homo Sapiens
  misc_feature (69)..(69): n is a, c, g, or t
  misc_feature (113)..(113): n is a, c, g, or t
  misc_feature (175)..(175): n is a, c, g, or t
ggatacctgggcatgtggtgaaatcctcccctgatggtatggttaaaataaactcctccccccctcatnacccctttgggtagggaaagcccattaggatggaaaaggagaancccaatacaagctaaaaagcatgcgacgtctgtcccccccagccccaaacagcccttggttncatcagtttcctgcagtaggagataggctgctgagaggtgagtcaagaggcagtctccattggatgtcccccactccccgcagaatggcgtttccagagttaggcggtgtggttgccgtgctcaagcccatgctgatttgtacactacatgtctaacctacctcaaatctcagtcattaaaattagcatgctttagacatatatttaaaaagtaactatgcacagctctttatcccccccttgct

SEQ ID NO: 272394 - DNA, 427 bp, Homo Sapiens
  misc_feature (296)..(296): n is a, c, g, or t
  misc_feature (310)..(310): n is a, c, g, or t
  misc_feature (375)..(375): n is a, c, g, or t
  misc_feature (381)..(381): n is a, c, g, or t
  misc_feature (387)..(387): n is a, c, g, or t
  misc_feature (402)..(402): n is a, c, g, or t
  misc_feature (415)..(415): n is a, c, g, or t
gagcttatcaggacttagaattattcagaactcagatttataggaaaacctctgaccttcagtttgacaagctaaaggaagcagagtctttaatgagcatgctaattttctagttttgaggaaaaattgggtcctttaaatgctattttgcttatcgcatcagtacttttatgcaggtctcatttgactccgtgcttagggtaggatgcgggggtgccttgaaaacttcattttaaatgatcttaaggcaaggaaatacaatattttacggaaacatttgggaggaatgtggaccntctgtatggacccntggggaaggccccagggttgggctgtttgggttttggggaagggttccccgagttgttaaccccngggggnggattnctggatactttgggncatgttgttggantctttccccgga

SEQ ID NO: 272395 - DNA, 751 bp, Homo Sapiens
  misc_feature (28)..(28): n is a, c, g, or t
  misc_feature (41)..(41): n is a, c, g, or t
  misc_feature (47)..(47): n is a, c, g, or t
  misc_feature (75)..(75): n is a, c, g, or t
  misc_feature (91)..(91): n is a, c, g, or t
  misc_feature (445)..(445): n is a, c, g, or t
  misc_feature (447)..(447): n is a, c, g, or t
  misc_feature (459)..(459): n is a, c, g, or t
  misc_feature (474)..(474): n is a, c, g, or t
aaaaccccgtcaagttggggttcaaggnccttggcctgaanccccangggtgcccctaaagaaaggaagcaagtnaactcccgtttccaanagaaagagcccgtaaagaaacatcctaaacccactgaactcaaccaatccctaaaaggaacaggctggggaagagggccctggtggagggggccgaaggttccccagcctagtggtacccacttgggaagggggaccccaggcagagactaatcgccttcatttggtttctcttcagctgcaggaactcagagggcaggttctaagaggaatcacctgttggctggcatcttcccccttcaatctctcttgatattctgatcctttaatcccaatgagacaagtgaaggcagttttgttaatctaaaggggtaagcaagactagcctgcacaagctacaagtgaagggcgcttntnacgttagagttncttttggcacagctntctgccccctgggaaagcagcccagactcggatggggcagagataggagtgggagggtcagatcattaaatcagatttaaaaaactccaacaggactgggaatctagcctcctcagacctgcgatgatgttccttgctcttgagatctgttcacctgtcccagagaactaagacattcaactaagaaaaacagactccacaactttggcaatctgggagggggaagccagtgggtgggcctgaaatactgacatgaaacacgtcataaacaacagta

SEQ ID NO: 272396 - DNA, 489 bp, Homo Sapiens
  misc_feature (212)..(314): n is a, c, g, or t
gccaactgtttgataccagattcatgctaactgcataaaatgaatttggatgatttttctaccttctgggacagtttaaataactttaaatatttcatgttgaaattttaaaacaatccacttgtaaaacacctggacttgcagccattttaaaaaagaattctttgataattttataaaagactgtaggctaggcacattggttcatgctnnnnnnnnnnnnnnnnnnnnnnnnnnnnnnnnnnnnnnnnnnnnnnnnnnnnnnnnnnnnnnnnnnnnnnnnnnnnnnnnnnnnnnnnnnnnnnnnnnnnnnntaaataaataaataaaagactgcaacggtttgctagtgcagatttcttaagccaattttggatcttttcctagagaacagtccatttcattcagattttcaaatttattagaacatgaccgtaaagaacttataatttttaaacttctttatcctaaatatttttgttcacattc

SEQ ID NO: 272397 - DNA, 530 bp, Homo Sapiens
  misc_feature (32)..(32): n is a, c, g, or t
  misc_feature (100)..(100): n is a, c, g, or t
  misc_feature (203)..(203): n is a, c, g, or t
gctatgttgccagactggtctcaagccatccncctgccttggcacccaaagtgttgggattacaggtgtgagccaccacgtctggccaaggaccagattnttaatattcttttccacaatgtatctggtacatagtagttgcttaatatgttggctaaacaaagagtggagaatccagtaaagggtggatcagagtgaggtgnagattaatttgggaaagcctagaagtgattcttgagcctgatttgaaggtggtgctagctgtggattaatagagggagaagggcatctcagagagaggattgccaacatgccttaattttatcagattctagagttccttatgattacctcagcatgttgctagactagcattattatccaaaattttaattattaaccaactttaatcttactttctaacaaattgtttgcttttactactgatagccttttcaaaaaactttaactagttttattccttaccataattgtttcaaagaacataatgatatgatcctttatcttcc

SEQ ID NO: 272398 - DNA, 413 bp, Homo Sapiens
  misc_feature (217)..(217): n is a, c, g, or t
tagctctgaactcaaaatatatccttgctaagatgatatatctgttattttactgctccttagtaaaattactgcaaaacttagtggcttgaaacaaccaccatttacttgcacatgattcagtgggtgtgcatattaagctgggctcacctgtgtggttcttctgctagtcttgtgtgggctcactgctttgggttgcagccagttggtggctggngtcagctttgttgtccagaatgacctcaccctcaagtctggtggttagtgctgttggttgagcctctgcctccatgtgctcttttgtccagcttactttctatgggcatctcagcaggcaaggaatgggaagctggcaaggccacgtttatgttggtcaaagggaaggggccagcgcagatttcacaaggtgggga

SEQ ID NO: 272399 - DNA, 595 bp, Homo Sapiens
  misc_feature (529)..(529): n is a, c, g, or t
cagtgtgtgcgatggtacctgtggcaagagcgagggcagtcccagtgagaactctcaagacctcttcccccttgcctttaaccttttctgcagtgatctaagaagccagattcatctgcacaaatacgtggtggtctactttagagagattgatacaaaagacgattacaatgctctcagtgtctgccccaagtaccacctcatgaaggatgccactgctttctgtgcagaacttctccatgtcaagcagcaggtgtcagcaggaaaaagatcacaagcctgccacgatggctgctgctccttgtagcccacccatgagaagcaagagaccttaaaggcttcctatcccaccaattacagggaaaaaacgtgtgatgatcctgaagcttactatgcagcctacaaacagccttagtaattaaaacattttataccaataaaattttcaaatattgctaactaatgtagcattaactaacgattggaaactacatttacaacttcaaagctgttttatacatagaaatcnaattacagctttaattgaaaactgtaaccgattttgataatgcaacaataaagcatcttcagccaa

SEQ ID NO: 272400 - DNA, 484 bp, Homo Sapiens
  misc_feature (334)..(370): n is a, c, g, or t
catccaaatcaaggctgtatttatcgtcactgattgacatgggaacagaatatttaaaacaaacagggtccaccgtggaaatgtggctgaaacacagaactgagcaaagcaagtggctcgacggctgaccccaaaggctgggaatcccggcaggacacagcccagacatcggggaacacaaaaggccgcaaggggggcagggcatgggggggctcatgtgggtgagggcaaaacccaaactgagaggaggccaggccaagggcgggaagcgcggacgaccacaccgaggtgacgctgatgcctcaggcggaagaaaacacacagcagtgatttnnnnnnnnnnnnnnnnnnnnnnnnnnnnnnnnnnnnnaaaatcagcctttagactcttgcacttctatacctccaccgatctggtctacagattccaagaacactgcaccatccacacaaacgtccacagcatcgcccttgcggctggagc

SEQ ID NO: 272401 - DNA, 312 bp, Homo Sapiens
  misc_feature (36)..(36): n is a, c, g, or t
aataaatcccagaaggaatggtggggaaccaagggngttaataggggataggaaggtaggaccccctatgaattagccacattaaaaaaacataaatgataaaattaaaacattatttaaaatgtaaatgtataacattacaaaatatgaaaggctataggcactaatatggagatctttaaagttataaagacatttaatgttcaagtttaggccaaataaatgtgaaaatctgagaaaaataggtgattttttaaaggaaaatacaaaccaccaaacttgaagcacagttagaaaacttgtataaatcat

SEQ ID NO: 272402 - DNA, 444 bp, Homo Sapiens
  misc_feature (31)..(31): n is a, c, g, or t
  misc_feature (61)..(61): n is a, c, g, or t
  misc_feature (83)..(83): n is a, c, g, or t
  misc_feature (96)..(96): n is a, c, g, or t
  misc_feature (100)..(100): n is a, c, g, or t
ccatagagaccaaagtaggaatgggtgggtncccccagaccgccgggaggggaggggggangaaagggggaggttaattaaanggggtggtaagangttncccggttaccaccagggatgccaaagtggccctgaagatgggatgggtccgtgatgggttgcacagcaatgtgaatttaatggacactgaagtgtacacttaaaagtcattaaaatgctaaattttgtatgtgttttacaattttaaaaatggaaaaaaagtaagaccaaaagcaacacctctccagaatgtgtgttatataccaaattttgacgtatgtgagattgctgactatattttacttatcaatttgaaattatattgtttttatgttgacactccatataagccattattttgaaaaaaacattttccttattaaaagattggaaaaaaattcacaa

SEQ ID NO: 272403 - DNA, 471 bp, Homo Sapiens
  misc_feature (318)..(318): n is a, c, g, or t
  misc_feature (355)..(355): n is a, c, g, or t
  misc_feature (381)..(381): n is a, c, g, or t
tttcggcacagcaaataacttaatgatttaaacatattgcttcccacataattcactgtattgacaggaaggttgtagttttgtcgatcataaacaccgttttgagattaatgctacatggtgttttaatttgggttccaccaaaagaagaccctgagacaaggatttgtttggttccaaatagttcatttaagaatgttgaagaagtagggaaagagacagggaagggacaaaagttaataaggcgtgctttaataagtagtattaccacactggggcaactgggtcattcagtcttcggctggaactccctctggntaggatttacattggaggattatggcctctgggattngttcccctttgaggggcttaaggacnttttactaacctctttggccctttcactgggtttggaagttttccgggggattaactcccggggttttcctggctgttcccgtcggccag

SEQ ID NO: 272404 - DNA, 475 bp, Homo Sapiens
  misc_feature (396)..(396): n is a, c, g, or t
  misc_feature (407)..(407): n is a, c, g, or t
  misc_feature (425)..(425): n is a, c, g, or t
  misc_feature (442)..(442): n is a, c, g, or t
tttcggcacagctcgctaactctgctggggaaagacttgctaattttcttttaattgcataagagcagagccctacagcaaattgaacatgtggtgactacatgaaatatatgatagaatatggtcctactttgattgagttaatcacaggtctgacaaatatacaaaattaaaataagccacattttttagtacttaatctcttgattctgttgctttttactgtttgctgggatagtcttacgttgtttttagggaacctatgggttcttcaggtgcttaatttgttgggatataggacaggcagtttgctattcgtgactctaatggggtgtgtaattcccctttcttgtatgccattgggcctttccagtataggtttaccatatggggacntgggagggggnccccccccgggtaggggncagccggctgctccttngtccacttgccggccgtgtttgccaggggggcc

SEQ ID NO: 272405 - DNA, 231 bp, Homo Sapiens
aaagtgctaagattacaggtggcagccaccaatgcctggccaagaaggaaactttaaaacaggtgtcaaggacagcaaggatttgaataattagcttagtacacagagggctcactacatatctaaatttgcaccgaacagaggataaaattatgttgtttctgaaacacttttaaaaatcgatcatgtaccagaccacaaagaaaaatatggaactctttaaaagtagga

SEQ ID NO: 272406 - DNA, 506 bp, Homo Sapiens
  misc_feature (484)..(484): n is a, c, g, or t
ttggggactactctgcctactacagctgggtggaggagaagaaaacaacccaggggcctggtgagaagcagcatatcctttgaaatctgtatatagagagagttataggtaaaattgacataacaaaatgaagagctttcaagtgaaccattcaggggcatttagtacattcacagcactgtgctcccatcacctccatgtcatttcaaaacattttgatcaccccagacagaaaccccatggcatggaaagtgttcacatttccccactctcccttcccctcagctcctgggcaaccacacattgctttctgtgtctataagatttgcctgttcctgggcagcttatataaatggaaatcaccagaacatataagctttttgtgtcagacttcctttcacttaagccgtaatgttttcaagattcatccacatgatagtatatattagtggtttcattcgtttttaatgggtggagtaaatantcccatcatatggataagacac

SEQ ID NO: 272407 - DNA, 554 bp, Homo Sapiens
  misc_feature (17)..(17): n is a, c, g, or t
  misc_feature (112)..(112): n is a, c, g, or t
  misc_feature (169)..(169): n is a, c, g, or t
  misc_feature (258)..(258): n is a, c, g, or t
  misc_feature (428)..(440): n is a, c, g, or t
cctcaatttatctactnctcaactcactatgttggaaaacaccaatacaggagtaaggaaattttcgctcttatttttagctctactaaaaacgaactctccatttctcttncaggatggtgataagacttgatatctcctgattctttcaatttgtacaatcgatganctcggcgtctctccactcccatgaacaactcagcctgggtttatgactttccttcaggaaatgcttgcccagcccagcggggggcaatngggaggtaaggagactcaaattaatctagagttgggcttggcaagagtggatgctggggaagggacaaaagggtaagggggaccagttagttcataaaagcattgttgaaacaagtaggtttgagctgccggggggtgcaaatgaggcaagaagagactcaaaggaggcnnnnnnnnnnnnngaaagttggggggaggagggaataggatctgagaaatttctaacgttaggaaaaatgacatggtcttctcaatggagactttccccaagaacccagtaccaacctgtgccgaag

SEQ ID NO: 272408 - DNA, 320 bp, Homo Sapiens
  misc_feature (52)..(52): n is a, c, g, or t
gctaagggatgagaaccccgggctctgcctcaagaatgatttcgggtggganccagtctccagagacagcccctcgagtctctttggacttggagatcctctttcaaggaataagccaatggtctcattttgtcttctggtctctgcctcaagaatgatttcgagtgggaccagtctccagagacagcccctcgagtctctttggacttggagatcctctttcaaggaataagccaatggtctcattttgtcctctggtctccctgttctaccccatttttttaaaaaattagtcgctggccagacatggtggctcacac

SEQ ID NO: 272409 - DNA, 518 bp, Homo Sapiens
aaagggctctctcaagttctgaaaagagaatctgccaccagatcgaatttcgacccctgagcttgttcggacgtatggtccaaattcagattaaggtggtcacccaacccgagatgtcaggaaaggccttctgcagagaaaatgtccccccacccgccatctgcagaacaggtgtgtgccacacggcagccttcccgaaacatagtatggattttaaaaatgtgtttatttttgtttctcaaccactttataacgtattttttaatttattttgtaatgtcttgttttgaagtattgctgctatccttgttatccttcccactgtttttatcactgatttattttgtgaaagttgtacactaatgttctatgtcaaaatcaaaagtatttaatgaaatactagttctatttaatgtggttatggaaccagctggaaacacaaaacaaacagtgattgtacacgcaggctgggccgcaggaggtcaggttcattttgttacatatgcaataaactcacg

SEQ ID NO: 272410 - DNA, 535 bp, Homo Sapiens
tcttaaaacttcttaaggaaaatatttaggatacctaaaaagaaacaacaatcaaagtagcatttgatttttcatatgcaatgggcttgctagaaggtaacagagcaatgtctacaaattctgaagggaaatcatttgcaatctcttatacaagtgtgaaggcatagtaaagacacatttagaggttcaaggatttggatttatttggtgcaccaccacccctgttatgcacattttctgaaaaattccttgaagatatactctggcaaaatgaaaactgaattcaagaaagagggagacaatagattcaaaaattatagaattaacccagaagaacaatggaaaggaatactagtaggacagttgtgcagctgacctaataagcaattagaacaagaaatcagagggctcataaaaaataacctaaagaagaaaaaagcattaaccatatcctatgagtaagaagctgacatgctggtataagacacttctaagaaacaagaaaagcaaggtatgagacacttctcagaaatta

SEQ ID NO: 272411 - DNA, 357 bp, Homo Sapiens
  misc_feature (176)..(176): n is a, c, g, or t
  misc_feature (228)..(228): n is a, c, g, or t
  misc_feature (232)..(232): n is a, c, g, or t
  misc_feature (328)..(328): n is a, c, g, or t
gaataactcaagtcacctgtactggaaatcagtttgctgaaattaatcaacgattcttgaagttgaagaaaagttgttctctctacaggaggttccagccttggaagaggagtgtggcccttcctggaatccctctggacacaccctcctagcatcctctaggaaagatgcggcantccaaagggaagcccaagaaggagacctccaaggacaagaaggagcaggaanaagnccatgcaggaggcccggcagcagattcactacagtggtactgcccacgctggccgtggtcgtgctcttgatcgtggtgtttgtgtacgtggccacncgccccaccatcaccgagtgagccccgca

SEQ ID NO: 272412 - DNA, 363 bp, Homo Sapiens
  misc_feature (65)..(65): n is a, c, g, or t
  misc_feature (323)..(323): n is a, c, g, or t
gcgtctgaggggacatcgccaaggactgactgagacacgatgccgagacctcaagccctgaggcnaggtcccaaaacccttacagtgaagatgtttactcattgcccccacctctggtccacactagaaagaagctcgccccacctccacctgtgagatccgtgaattctcggaatgggcaggggaagccttgcactaggttgcagagaagcatcctccacatcctgtgttcagaaaccctgggtctccgtgggcactttgttaacttcaccgtgctgtcttcttggtctgtgtgttgtttctttcaaggccagttttagggntttcagggccgagccaggggtttcacaattcaggaagagg

SEQ ID NO: 272413 - DNA, 459 bp, Homo Sapiens
  misc_feature (31)..(31): n is a, c, g, or t
  misc_feature (62)..(85): n is a, c, g, or t
  misc_feature (124)..(124): n is a, c, g, or t
caagatcgggcccatgcactcccaacccccnggggacaaaagtgaaaacccccgcctcaacnnnnnnnnnnnnnnnnnnnnnnnngaagtaaaggactgtatgtcctcaacacccttggcaaanccctccccgtgtctggtgtgaatggaggggattaattccctcatcctctccctgagttcaagtcttctgtaatgtagcatgctggggcctctggagcacttcactgcacactaacgaatgtgaggatggaaaaggaaaatcttatcttagtgaaactgtggaaatagtttagacctcgggctcccctaacaggcccctagacgatgctttgggaaccgtggtggtagaactctctctcccagactcactctgccctgacccctcttattggtgagaaacaggcatgtgtaactcttctttttcctttgaggaataaaagatatttgtacttttta

SEQ ID NO: 272414 - DNA, 291 bp, Homo Sapiens
  misc_feature (27)..(27): n is a, c, g, or t
  misc_feature (188)..(188): n is a, c, g, or t
  misc_feature (190)..(190): n is a, c, g, or t
aaagtagtaatgtgaactgaattgcantaagagtgtgtggcctttgttgtgatatactatgtattttcttatatgcatgagccaaactgttgcatcataatttagcactgatgtctgcttttattttgatcatctttgtccacccttattagttcttggctgttaaccgtagatagatcttgtaaaantnccagacctttggttgctgcattccccttggttcgattccacgcaaggagccacaagtgagaactccactgtccttagaagaaagggcatttttacttttgc

SEQ ID NO: 272415 - DNA, 292 bp, Homo Sapiens
  misc_feature (19)..(19): n is a, c, g, or t
  misc_feature (83)..(83): n is a, c, g, or t
  misc_feature (91)..(91): n is a, c, g, or t
aaaacccaaagttatccgnctggaatccataatacatgagttcctaatacacccctggtagatagaattatcctagttcttanacttttanttgttgttgagatggagtttcactccagcctggcaaaatactggtggccaggcatggtggctcatgcctgtaattctagcactttgggaggctgaggtaggtgggtagcttgagtccagcctgggcaacataagtgaaaccctgtctctaccaaaaatacaaaaattagctgggtgtggtggtgtgtgcggtagttccagc

SEQ ID NO: 272416 - DNA, 416 bp, Homo Sapiens
  misc_feature (26)..(26): n is a, c, g, or t
  misc_feature (40)..(40): n is a, c, g, or t
  misc_feature (56)..(56): n is a, c, g, or t
  misc_feature (70)..(70): n is a, c, g, or t
  misc_feature (122)..(259): n is a, c, g, or t
  misc_feature (340)..(340): n is a, c, g, or t
cctggccccacggcaaccccggcccnctccaggttccaantgaatcctcccgcccncagccctccctgantaaactgggaataacaggcacgcacaaccatgccccggcctaatttaaagannnnnnnnnnnnnnnnnnnnnnnnnnnnnnnnnnnnnnnnnnnnnnnnnnnnnnnnnnnnnnnnnnnnnnnnnnnnnnnnnnnnnnnnnnnnnnnnnnnnnnnnnnnnnnnnnnnnnnnnnnnnnnnnnnnnnnnnnncaggaagttcacacacttgagtatgaacaaaaagttgggaaaattaaatgctttaaaattacagcatgggaaagacagaanttatttggctgttgaactggtattctggtttagaaaattattcatttatttaaaattccaactttcccaaaatgtt

SEQ ID NO: 272417 - DNA, 308 bp, Homo Sapiens
  misc_feature (31)..(31): n is a, c, g, or t
aggaggtaaccggcctaaggattggacattnccccatttgggggctttaggaaatatattggttatccttaaattccaaaaatgggtactttatcctaattgaattgaaatccttaaaatttatgagaaacaaaagtcactttatgttcttagtaaatatttctaatggggttataggagatctaagtacaaaaaaaatttaaaattttgttattaatctcccctccttaaggaaaattttattaatatacataattataatttagttataagaacaacttaagttgagtacagtggctcaagcctgt

SEQ ID NO: 272418 - DNA, 488 bp, Homo Sapiens
  misc_feature (453)..(453): n is a, c, g, or t
ctgcggatcgaatccaagtgtctgcacttcactcccaaggactggcccaagagggggaactggtgcccagacactgccaactgcagtcccaagacggcagcaggacatgggctgatagcccaccccgcccccactgaagctcccacaaagcactctaagggagatggggctgaggacagctcaaaaaggagaggacaggcctggcaggggcccaactgtgcccagcaccaaggcgagctccgggctcagaccaactccaaggtcagcctccaacagcccaggcctcctctgaagcagggaccagagggagccaggcagctgtgtacagtgagaagggatccggatgggggagctctgtacagagggctggtgattgtaaaaatttcttttgtaaagtagaagttgggggtggggtgggtgctggctgcaaaaatttctggcttctcttacccnctattgcccccggcaataaattgtttctatatgcc

SEQ ID NO: 272419 - DNA, 457 bp, Homo Sapiens
tcattccttatgagaatctgatgcctgatgatctgaggtgtaacagtttgatttcgaaaccatctctccccagctcccttcccattcatggaaaaactgtctttcacaaagccagtccctggtgccaaaaaggttggtgactgcttaattagaaagtgagcatagaacttatcccaaatcagatttgatggatgaatgaaaggaagaaaactgactgttcttagtgtttgctggaaagaggaaaaccatgagcaatgggataaattaaacatttcagttgaataaatgtttaccaaattgctaataaagaataggctctgtacttggccttgggcaaacaatagtgtaaaatatacagtctgccctctagttgcttattggagtgagcatagtacattctgataaatgtacaagagctagaatccagaacatagaattttccttgtggatttgttta

SEQ ID NO: 272420 - DNA, 541 bp, Homo Sapiens
  misc_feature (257)..(335): n is a, c, g, or t
  misc_feature (402)..(480): n is a, c, g, or t
accttgcccccggaagatgctgggaaaatccttgggctgaagttggggaaaattgatattgcgggaaccttcaccttcttctccccaggatagagagcctagcagctagttcctcaaaaaggcattatttaaaataatatctaccatcttagttagatctattccaggaatctctgatccgaaatgaccccactgccgactagggtggcttgaggaggagagtcgtgaatctgcattttagaaaggtctcttgcggnnnnnnnnnnnnnnnnnnnnnnnnnnnnnnnnnnnnnnnnnnnnnnnnnnnnnnnnnnnnnnnnnnnnnnnnnnnnnnnaaacatatgaaactatttttcttctgtttatttttttaacctactaccaaggcaaagaagaatgtannnnnnnnnnnnnnnnnnnnnnnnnnnnnnnnnnnnnnnnnnnnnnnnnnnnnnnnnnnnnnnnnnnnnnnnnnnnnnncacttgcgggaagaggctatgtcaaaggcaaataaagacggaacaaataccacaggcaaaa

SEQ ID NO: 272421 - DNA, 751 bp, Homo Sapiens
aaagagcaggagtcactaaactttttgattgggcgcctactggatgatggctgtgtgcatgaagcaagtagagtatgccggtattttcatttttataatccagatgtcgccttggtattgcactgcagagcacttggcctcaggggaagctagtatggaggatctgcacccagagatccatgctctcctacaaagtgctgagctgcttgaggaagaagcacccgacattcccctaaggagagtccacagcacttcaagtctggatagtcagaagtttgtgacagtgccctccagttaatgaagtggtaactaacctggaagtgctgacaagcaaatgcctccatgggaaggaactactgtcgacaggtcctctgtctgtatgatcttgccaaggagttgggctgttcctacacagatgttgctgctcaggatggtgaagccatgctccggaaaatcttggcctctcagcagcctgaccgatgcaaacgagcccaggccttcatcagcacacagggccttaagccagatactgtggctgaactcgtggcagaagaggtgacacgggagctgcttacttcatcacagggaacaggtgcccttacccccggggattcccaacctctctgacagcattctctagttcccagtgttaaggatttggatgttgtgcttatatacatcctgtatgtggttctctcaagtttctggattgcagtaatgtattttgtttaaataaaacaaaatacatgca

SEQ ID NO: 272422 - DNA, 364 bp, Homo Sapiens
  misc_feature (23)..(23): n is a, c, g, or t
  misc_feature (48)..(48): n is a, c, g, or t
  misc_feature (87)..(174): n is a, c, g, or t
atgcacttgacctgaaactcccnatgtccctggtgcgcacagcccttngtggtgccccggcccctcccgcagcgttactgcctgtgnnnnnnnnnnnnnnnnnnnnnnnnnnnnnnnnnnnnnnnnnnnnnnnnnnnnnnnnnnnnnnnnnnnnnnnnnnnnnnnnnnnnnnnncggtgaagggcggtccccatcctgggcctccactctagacccccccaccacctggttaagtctcgagtgaatccagtggccccgtggcaccctcctttatgacatccatccatctgtggtgaaccaagtgaaggtggtgacttctggtgacatagtaataaagtgaagactcagaacccaccagtgaaaa

SEQ ID NO: 272423 - DNA, 187 bp, Homo Sapiens
gtatattttttccaggagatgcttggagtgtaaagatcccatggtcacataaatccggaaagcactgaatactttgtttcccataagagaatcccattatatgttgatgtattaaaagacctgagaacctggtgtaagtaacttagttcaattcagtatttcccaaatttactagactatagcatcc

SEQ ID NO: 272424 - DNA, 384 bp, Homo Sapiens
  misc_feature (89)..(89): n is a, c, g, or t
ccgggataaccaatttccaccacggggaaaccagccctatgaccatggattacccgaatttaaatacccgacctcacctataggggaantttggccccccgaggcccaagaattccggcaccgaggatattgattgttatttccaagtattaagtgtaagcttttaatggataattagtataactgtggatggcatctgattttgtttttaattctgtggattgtgtttaagcaattcaatagtatgttcctgattttgagatgctaagtggtattgcacagttgtcactttatcaagtgtgtacaacagtcccatgaagtttatagagcatacccttgtatagcttcaggtgctagaattaaaattgatctgttatcacaaga

SEQ ID NO: 272425 - DNA, 404 bp, Homo Sapiens
  misc_feature (12)..(12): n is a, c, g, or t
  misc_feature (25)..(25): n is a, c, g, or t
  misc_feature (41)..(41): n is a, c, g, or t
  misc_feature (120)..(120): n is a, c, g, or t
aaggaaaccccnagaggcttcctcngggtcccaagtttttnccccaaaagggctcattttcccaagcttttccccttcccaattcctgaagaggctatacccatagcttccccattaaantcctttattgtttggttaatttgggccctaatactgtgacctcaagtctctgtcacttgcccacccctagaacccctagccagcacagaaatgacggagtgaaaccacctccacacaaaccagtgctgcttcctctcttcacagttgcagattctgtctctagtggcagcattaagggagattgtgtcatcaagcctgctttgctctaagatgctgactttaacagattagaaatgttccccgcacagcccacgcttctgctaataaatgattccatatctaat

SEQ ID NO: 272426 - DNA, 223 bp, Homo Sapiens
aatcattttaaagtttttctggaaagagaaagcctctgacatgggctgaaggtgctctctcttctgagtcctaggaattgtacaaataggtactccttggaatctgtgattttcattgtttattattattctagaaaccctaatctgctctaacagtgttgggctcatagtagacagcacatatgtatattaagtgagcaaataaatgaatgtaaatgtgttc

SEQ ID NO: 272427 - DNA, 497 bp, Homo Sapiens
  misc_feature (37)..(37): n is a, c, g, or t
gcctgtcggggatggccaatcccgaagccaataaccntccaaccaccactgttccaaaaatccatgccgagtgggggaccagccctccctcccccaggtgagggaaaaataaccaggtccatggaaaggtcccccccggcaaagattttccctgttaaaaaacccctatgcctggtttgccctttgggatccaccccccccgtgaacccccgggtgcctaagaatgaaaataacccttggtgagttgtacaaattaaagacaaagaacctacatgtgaagatagacttgctttcctatttttaaatcagtagtagtactgttgctgaataatactaggtttttatggaataggatgaatgcttttgaagtattagggcttcagagtccaattttgcttatttatggtatataaatacatatttttttcttgaaattgcaattgagtttgtacttttcaaatagattatctactttttcattaaaatgtaaagatgtt

SEQ ID NO: 272428 - DNA, 622 bp, Homo Sapiens
  misc_feature (15)..(15): n is a, c, g, or t
tttgggcattgatgnaaaggagtggatcccactggccactcctttgtccttgtcacctccctgggcctcacctatgatgggatgctgagtgatgtccagagcatgcccaagactggcattctcatacttatcctaagcataatcttcatagagggctactgcacccctgaggaggtcatctgggaagcactgaatatgatggggctgtatgatgggatggagcacctcatttatggggagcccaggaagctgctcacccaagattgggtgcaggaaaactacctgggagtaccggcaggtgcctgggcagtgatcctgcacggtatgagtttctgtggggtccaagggctcatgctgaaattaggaagatgagtctcctgaaatttttggccaaggtaaatgggagtgatccaagatccttcccactgtggtatgaggaggctttgaaagatgaggaagagagagcccaggacagaattgccaccacagatgatactactgccatggccagtgcaagttctagcgctacaggtagcttctcctaccctgaataaagtaagacagattcttcactgtgttttaaaaggcaagtcaaataccacatgattttactcatatgtga

SEQ ID NO: 272429 - DNA, 499 bp, Homo Sapiens
  misc_feature (21)..(21): n is a, c, g, or t
  misc_feature (286)..(334): n is a, c, g, or t
tttcattatctataaaattangaaagcaactacctcctaggatggttgtgaagattaaattaggtaatatatacgtaactcctaatacagagcatgacacttagtaaatcagaaatgttagtagcaattgttatttaaataaaacaataaaaaacccatgagtaattaactataaaaatcaactgataaaaaaattagctgacagaataagaacagtggttgtcagggaagggaggaagaatggggagttactgtttaatgggtatagagtttcagtggtatttgnnnnnnnnnnnnnnnnnnnnnnnnnnnnnnnnnnnnnnnnnnnnnnnnnttaatgccactgaattgtacctaaaaatggttaaagtggtaaattttgcattatgtataatttgcacagtttgaaagaataatggacaaaataatgagctgacagtagatactaactggaaagaggtgatagtgttttaaggattgaaacaatataataaattac

SEQ ID NO: 272430 - DNA, 362 bp, Homo Sapiens
  misc_feature (97)..(97): n is a, c, g, or t
  misc_feature (130)..(130): n is a, c, g, or t
aagccctccccctccctaaagggtaagcctatgttaaccggaaaagaaaacaaaggtggcctccaccctaaaagaaaaaacttttgcctgccttccntcctttggccggggttggtaggttccttcctcnaggtttttttcagtttcaagtttatccctccttcccttaaaatgctcaacgccctgggtgttcaagctcttccttcacgtgactattggttttcattgctggggcctgttgctgaggcttatgacactgtttctggctagaatgtgatacatgtccagtttgtgcaggatgatgaggttctttcaagcaacccaggatgagcgtgtgacttatcactcaaagaatgagttaa

SEQ ID NO: 272431 - DNA, 312 bp, Homo Sapiens
  misc_feature (287)..(287): n is a, c, g, or t
atgagccaccacacctgaccaacatatgtattatttcacacatttttgtgtgtatgtggtgagaacacttaaaatctattcttttagcaattttccagaatgtgatacactgggtattaactgtagttaccatattgcacagtagatcttgaacttattcctcctaaccgaaattttgtgtcctttggacccacatctctccacccccaagcccttcaaccctgggggaaggcttctgctttttaaggagttaactttttttagggttctaccatataaaggggggnaccaatattttttaggggcgggtta

SEQ ID NO: 272432 - DNA, 664 bp, Homo Sapiens
gaatctgggctggacaaaagccaaagattattaagagcgtcttctacaaacaaagtctctggctaatctaaatttaattctggatcttgtaatatatagtttaggagttcatttaaatttaatttacatagggtgaaaataagctttgacctttataattgctgtatcagtaaagtcacaggttcattgacttgttagccaatttttcctgtgttacttttcttctggttttgttgttgttgtttcagtttgtaatatacagatttaagaacaagtgtctggatatccacaaaggcatcacagacagctgacatgtggatctgcttttgtttgtaattaaaatgggcttaaatctcatcccccttacactaagtaaaatatataattagaatttttaatatataataacttttaaatatctcattgtaggttcagggaaggtaatagtattcaattagaggctaaatgccacctcctacacaaagccttctaattgttttgtatagatggtgatctcttttcataaggcattcaatacagtgatctggaaatcagtacgttaatacagtgatttgcaaatcactgtactgtagctgttaagcatattacctctggagctcggctgcttggatttgaccctggcagtgccacagacaagctcaaa

SEQ ID NO: 272433 - DNA, 107 bp, Homo Sapiens
aatgttgttctagttactgtaaatgaaacggttaaaatgtcataaataccttatgataaacatttttcaaatttgcttaaaaagcaacacatcagtaggcagggtat

SEQ ID NO: 272434 - DNA, 604 bp, Homo Sapiens
  misc_feature (344)..(344): n is a, c, g, or t
  misc_feature (369)..(369): n is a, c, g, or t
  misc_feature (382)..(382): n is a, c, g, or t
gaatgcctatcctgccagatcatcaagaaattcaatctcagcctttctcagagctctctgaccaagctgaagcaaaggtcctgtgtcttacacagtgctcaagcaccagggaggcccccccagcagacatcagcatcagcccactgtggtcactatggtgatgcccacttgccatcctggcccatatggttcccttaccatgcttggagcagagtcttggtgaggctgggaacctaggagcccagcctccctaagtcagcctgcatcctgccacttggaggtgaattgcttccggtgggccctatctcagagggtacgtggctcctcgctgctcatggaacccnacaagactgctctgtctctgccccnatcctcttttccnaggctttattttagggaagatggtattcttttcctctcatcctcagagcctcccccctctactcacacccaccacaacacccagcagaatcttctcaagggactcaagctctggagacaaaagacaggaaaggaaatcttgcaatccattactgtgttctgccatgcacaaacatccctgaggacaggaaactagagcctgtccgtgctggaatgaagagag

SEQ ID NO: 272435 - DNA, 447 bp, Homo Sapiens
  misc_feature (25)..(25): n is a, c, g, or t
  misc_feature (55)..(55): n is a, c, g, or t
  misc_feature (76)..(76): n is a, c, g, or t
  misc_feature (90)..(90): n is a, c, g, or t
  misc_feature (106)..(106): n is a, c, g, or t
  misc_feature (126)..(126): n is a, c, g, or t
  misc_feature (135)..(135): n is a, c, g, or t
  misc_feature (140)..(140): n is a, c, g, or t
  misc_feature (190)..(190): n is a, c, g, or t
aaaaaacccaaaaccctaggccacncctaaaaagcccactgtaagtgtaaaccanaccctttaaaagccaccgggnaaataaaaaacccnggtgacctgccttatnccagtatccaccttacctgnggttacccncaaanggaacacagaatattaaacccctatagcccgtatgtgccacatatggtgnatagggattcaagaaactaagagccttcagttcagtgtccccaagttataccatgggattttgtttgaggcaaaactgtcatcatgtgtcatttgacttactctgtgaaatcacatttgctatatctgtagtgaggcatttttttcactatgttgcaatttatttgcacttagctggaatatctcttttataattttgtttccagcacctagcagacagcccaaaagtttattgcagaaagctagcaccaaactctt

SEQ ID NO: 272436 - DNA, 641 bp, Homo Sapiens
tgtagtaagggttttgagagagcgttccggacttaatctcttcagcagcctcttgcataaatcacattgatactccttttcctgcctccagttgttttcacgtctgtatttttctcctgttatatttacatgttcagtttttatttaacctttgaggaatggaaatgaaggttgtgtctataagtcgaggttccagatataaaattctgtcttcctttttgatacattaacttgtttgtttcagaatatttggtgaatgcaactgtgatgatactagtgtgaataacaacggaagacactcacttggctttggctaggtgtagtgttgactacagaggtgtttaaaaagaggcctgagggccggcctgttagagctcttttggctgtggaagctaatttgtgctgaatgtggtgcctacagaaaaacccttcagaggtcatacagtgtgtactctttctgccggtcagttgaggctccttacctagcttagcaagaggtttctgccctggtcctcaacataaccagagaaagtaaatgggaaactttatctggaaaattattcaaaagcaggaaataaatcaccttggttagcattttaataatttatccatgagactatttacaagttactactttgtca

SEQ ID NO: 272437 - DNA, 425 bp, Homo Sapiens
  misc_feature (281)..(281): n is a, c, g, or t
  misc_feature (307)..(307): n is a, c, g, or t
  misc_feature (344)..(344): n is a, c, g, or t
  misc_feature (354)..(354): n is a, c, g, or t
  misc_feature (370)..(370): n is a, c, g, or t
  misc_feature (387)..(387): n is a, c, g, or t
  misc_feature (405)..(405): n is a, c, g, or t
taggatcttccggagctgccgtgcatacctgtgtgaaagcaaccttccacgcctttaacaaatacaagagagaggggttttgccttcagaatgttgataaggcccctttggctaagagaagaaaaatgaaaaagactagcaccagtaccgagacgcgcagagttttccagtgagagttcccattcttcttcctcttcattcttcacggtaaaacttacacccaccaaggacactggcagcccagcaatcctggccgacagcaattaacccggaggaccctntttccagttcttgggattcagtaggnttaggggcatggggtaggggagtgtattcagtggatnccattggcancttttattttcccttnagggatattgccttganggggatcttttttatggnttttttaaaaatgttttccc

SEQ ID NO: 272438 - DNA, 493 bp, Homo Sapiens
  misc_feature (270)..(270): n is a, c, g, or t
tactagggactctcttctagagccatatagttccttgggattagctcttggccaagaaggctgagtatggttcccaatttttaaatccatttcattttttaaaaaataagggaaataaatgtaattgccatttttcaaagattaagtaggaggagaggggtttcttgctctccagagccaaagggacaaatagggactttgtttaggccaaggaaggagcggaagtagggcaactcggtcctgcgattattaatcccactccccacttantcctagggcacacaaacactattttacttttttaaaatcataaaacggcagaacagatttggttagtttagaagaaaagaaagctctataaatataaatctatattcctgtatttttatttaataatttataaataccaagttcatttgacttttatttttgtgtaatatgtaatgatcgtattaaaaacaataaataaagcccagaagtttaatgaaaaaaa

SEQ ID NO: 272439 - DNA, 440 bp, Homo Sapiens
ctccagtgtccttccacccaacagtgcgtctgaggaacgagctgcagtttgagcgttcccctgagatgtgcgtagcctccgtgtaaatgtccactcccatggcttaattgcctatcagacgcattttcccagacgaaagcaatgttgggttggggaagacagtgcagccacccagcctttaccagcagcgtacggcagacgaaggcagtcgaggtgtggaggtgatcacgaagatacatgtgtttgactgtttaatttgaaagtttacattttttatgctttgtgttggtgtgtaatttttgtactcttggtggctagtttttgtcaaatcttttttggaatattgcttaaatgttttgattttatgatagtgaagcttgtattcagtgttttgccaattaatattatatgcttgtaataaaagcaaaagaaaagcttaa

SEQ ID NO: 272440 - DNA, 639 bp, Homo Sapiens
tctaggtgtttttggaaggcgcatttgagcttgtgagctaaaatggaatggatttaatatttcctatctggcatttccatcttgcccctggtacacaagtcactggcctggaactcagccttgattcactgtccgtcttcacggattagctgtgctgttatgttgtctgtgctgcagattggcccatgtgggaagtcgggggggacctgatttcctgcttggaagacttgggggactgccgagcatatcaaagtgtttatagtcaccaagtgaactgcagcacaaccatctcctctccagcaagccctgaagtcagtagtgcctgcaggtgaaaccaaccagccctgtgttagaggaggaaaagcggagatgacatggaagtctccaagcctgtgccatccacctgccaaggaaaaacacaaggtgctatctacttttctctctaggatttagattatcatttatgtgctgttgcacagtgaaacctcacctgtgtgggcgtgaaagctgattggcattgtttttgattcagctttttggatggctaattgttttcactgtgctgtgggaatgcctctgtattttttcccctctttggccatctttttctgaaaataaagtgatggatcctctagccaa

SEQ ID NO: 272441 - DNA, 480 bp, Homo Sapiens
  misc_feature (14)..(14): n is a, c, g, or t
  misc_feature (43)..(43): n is a, c, g, or t
  misc_feature (54)..(54): n is a, c, g, or t
  misc_feature (78)..(78): n is a, c, g, or t
  misc_feature (172)..(172): n is a, c, g, or t
ggctacccctctcntcctgggaattgtaactgccttgtcaagnggcaatcatcnccctgatatggtggcccttactgnaccctcatttaaaaaaattaatactgtatattttaaaacaagcccatgaactggtaaaaccttaaatagggaattttgacaagatcccctaganggctgagtgtggacctagactgagagtgacaaactgctgggggcacttggtgaaagtagcccacattggcttcctcatggtgaggaacagagaatccctacagtggctctggcaggtggagtggaaaagtaaccattttaaaatagaccaaagcattctcaataacagttctactcaccagggaaaaagactttaccagggccttatccactgctgcagaagggaatttctccaactctagtaccctttggccttcttgtctccccagtatgggagagagaaggggaagggaagaagacaatttccaa

SEQ ID NO: 272442 - DNA, 525 bp, Homo Sapiens
  misc_feature (70)..(245): n is a, c, g, or t
  misc_feature (473)..(473): n is a, c, g, or t
gagatggagtcacactctgtcacccagactgaagtgcagtgatttgttctcatgtcccaggttcaaacannnnnnnnnnnnnnnnnnnnnnnnnnnnnnnnnnnnnnnnnnnnnnnnnnnnnnnnnnnnnnnnnnnnnnnnnnnnnnnnnnnnnnnnnnnnnnnnnnnnnnnnnnnnnnnnnnnnnnnnnnnnnnnnnnnnnnnnnnnnnnnnnnnnnnnnnnnnnnnnnnnnnnnnnnnnnnnntgagccactgtacctacctggatggttttatttttattgcatcatcaacagattttgtatttttaaaaaatttatagtagccattctaaatgggtgataggtgatcttgtgtttcattgtgatttttatgcatttctctacaaattgtaattttgtgtctttttaaatgcttcttcacatttgtgtatatttttggtaaaaatttagttcaattatttgtccatttcnaaatcagattattcaactttattgttagttttaagagttgtttataggccag

SEQ ID NO: 272443 - DNA, 420 bp, Homo Sapiens
  misc_feature (254)..(254): n is a, c, g, or t
aaaaatttcaggtgacactatagtttgaagctagtttacaaacagaactcctgaaactgatttaggtaatctcttaatctgagtaactcaaaaaattaacacaagcctgatactaatatcgccctggacatcctgacagtgctcttccctactttcctcagtatctaaaatgtctctccaaaagaaatgtcacaacaggagcaacacacaatccaaaacaacactgtccacataagacgttaaggctcaagaantgagggtctgacttttaaacgacccttttcggatcaactccgccaggtctggagagggcccccaaaaagcaaaacccttaagtttccctatgggtcttctctccattcagaaagttacttagacgccaacggagatggcgaagaggcggggatcgtaggggaagga

SEQ ID NO: 272444 - DNA, 502 bp, Homo Sapiens
  misc_feature (34)..(34): n is a, c, g, or t
  misc_feature (380)..(380): n is a, c, g, or t
  misc_feature (406)..(406): n is a, c, g, or t
  misc_feature (422)..(422): n is a, c, g, or t
  misc_feature (431)..(431): n is a, c, g, or t
  misc_feature (464)..(464): n is a, c, g, or t
  misc_feature (492)..(492): n is a, c, g, or t
tgaattagatggagtctccctatgttgcggaggnttcaaactcctgggctcaagtgttcctcctgccttggctcccaaagtgctgggattacaagtgtgagcctctgtgcctgaccacaaaagtatatgattttaaagtgttccagataccagtctaggattttattacagagccactgaagaacatgaggtaggtaagtgacaagaccatatctgcaattagggaagatcactactacaacactgaggataacagtttgggagggagagacagattgggaagcaagagtaggtaggagttcttgtaatgggtcttaggggggggaaaaaaaggataagggccctgatttaaagtagttggccagttggggaaaattganccagggggggccaaaaggggttgggntttttttagggagggnttaattttngatttttggttaccttccggggtttgccatttnttagggttgcccttccattgccagggcnttttttttca

SEQ ID NO: 272445 - DNA, 289 bp, Homo Sapiens
tttaagatctctttaggcctgtcatgactgtgtgccactctggttactgtgcggcatgagcggtagtttgttcgtgagtttagatctgaaagtctttaggatgctaattagggtgagatccttacaatcacggctcagtggtcagccctggagctcaccaacagctttacagtgtagctttcccaagcatacatatcttcatggtccccctggtactctctggtttcctgcagctcttctttttggctctatcgtgagaaactcgtctaaatggaggaagggcacagag

SEQ ID NO: 272446 - DNA, 355 bp, Homo Sapiens
  misc_feature (17)..(17): n is a, c, g, or t
  misc_feature (34)..(34): n is a, c, g, or t
  misc_feature (74)..(74): n is a, c, g, or t
gaggatggcaattattncccctattaccctaatngatggtaaagtaccgagggataaatccccaagaaactttncaactcctttggcctttccccgggcctttaccgggatccccaaaagcatttaaggtacatgttcccaaaaactttgaaaagctaaatgtttccccatgatcgctcattcttcttttatgattcatacgttattccttataaagtaagaactttgttttcctcctatcaaggcagctattttattaaatttttcacttagtctgagaaatagcagatagtctcatatttaggaaaactttccaaataaaataaatgttattctctgataaagagctaaaaaa

SEQ ID NO: 272447 - DNA, 581 bp, Homo Sapiens
  misc_feature (16)..(16): n is a, c, g, or t
  misc_feature (39)..(39): n is a, c, g, or t
  misc_feature (51)..(51): n is a, c, g, or t
  misc_feature (104)..(104): n is a, c, g, or t
  misc_feature (116)..(116): n is a, c, g, or t
  misc_feature (141)..(141): n is a, c, g, or t
gggataaaccaatttnccaccaccgggaaaaccagcccntgaccatgattncccgaatttaaataccgacctcacctataggggaaattttggccccctcgagncccaagaattgnggcacgagcccctagtagttagggnccctgaaagcctcattccttagaaggttgtgaagtcctcatgtccctgtgaagagaaaatggggggaggaagggagaaaaacaacaacaaacaaaagaacaatcctggaaaaatcgatataggccacattactctgaagtccacacattagtaggcaggtatgaaagtggcttatgtatgtaaataggttgctattattttcttctgaagtgtaagttgtctggcttcagtttgcagggctttaagaaagcacagcttagttttcagtgactaaatagtttccaaattctggagaaaccaggtagagagaaacaaatatgctcccaattctggtaacagtatactttactcaattgttaagagctgtagatagctttagttttcataattctcgactccgtagagaattgggatctgatggagctaagcagaagctgact

SEQ ID NO: 272448 - DNA, 515 bp, Homo Sapiens
tgcagagtctgtacagtgattaagccatgcccagatggtccttggtgcacacagttatttaagaatccacttccacaggtggctgcccttgtaaggaagaatgcatccctaaatgtggccaccagagagttccagtgggcagatgtctgtggctgcccttctcatttaaggacatgagttcactggagtattactcaaaaagtctgtggttcatttccagtattgtgaatatttagtttatgtggccgtttctttgtttctttgaacagtgggattttcagtgaaaaagtaccctctttttcatttcctattgcagtggtcacagctaatagtgtctgaacatggttcaagaataagagattccatgtagcattttctttattattttcatttcccttatattatccatcattccttaaggacaattattcttaataatgcttatagaaaatgttctctaattaaacatgccaaaaggaaaaagtaagagaaagagggagcaagaagaaaaaaaa

SEQ ID NO: 272449 - DNA, 591 bp, Homo Sapiens
tcgagcaagaatcggcacgagatggctcttctcaggtgtcacatcaggagcacactatatccatctgccctcaacggggaatgtttaattttggatgacctagtcagagtagtgcccagtgtctctactgtgtgggttatcagtttttctcttgccactaataaggaaacaatttaatgtaaatatactagattacagctttttaaatgacttgaactaaacatatttttgtgattgtactgtgcacagtcatactataaaagccctaaagttgcccagactttcctatctacttttctttatccctgaaatgctctctttcctctcggccacctcgctctgaaactgcctttgttcttaagggccacgtgacaacatccacccagtctttttgcttcctgacttttctcagtctgagcctgacttctggaatcagactgaacatgttgggtgtgttctctgcagagagctctgctgaggtaattacaggttctggaaaccatagtgacctgaactttactgagggaggtaacctatttggagataaagtccaaatatggtcaagaatgaaagcaaaagtttgaagccaga

SEQ ID NO: 272450 - DNA, 390 bp, Homo Sapiens
  misc_feature (70)..(131): n is a, c, g, or t
  misc_feature (301)..(301): n is a, c, g, or t
  misc_feature (323)..(323): n is a, c, g, or t
  misc_feature (339)..(339): n is a, c, g, or t
gtaagaaaatggggtttccacccaatattgccccaggcctaaatcttgaaactccctgggctcaaaatgnnnnnnnnnnnnnnnnnnnnnnnnnnnnnnnnnnnnnnnnnnnnnnnnnnnnnnnnnnnnnntggctgccccatcgagatctcacaggaggccctcacgtgcttgacttcttgtattatgctattggacctaaatctgatttctctggagtgcatcaggcatctcacaatgagtccactcacttgaacagttctttatggcgtgtcaagttaccttcacttgctttcctcangtctattaagacttggtttctnggatttgacctttttngggcagcctgggctttgggaagggcatatttatggcttttgtgaacaacct

SEQ ID NO: 272451 - DNA, 454 bp, Homo Sapiens
  misc_feature (23)..(23): n is a, c, g, or t
  misc_feature (37)..(37): n is a, c, g, or t
  misc_feature (357)..(357): n is a, c, g, or t
aaaaaaggtttccccaatttccngaaaaaaccacccnacccattcccttcacagtaacataagttcggcctccagaattagaaaatcccccagaatctgacccgatgtaaaaacacttaccaatattttccttcctactgtaaagcaagcacctaattgcatttttcttccctgtgcaatgttgtactggcccaggtatgagtcaagatctttaatttcccccttctctcatgaactaaaaaacttaaccatgcacacacagctctgtttctgggatttatattctacaaccaaagttctccaacaaatgtactggtaatgggtaataggagtggcaagacagagagagcttttaancgctagagctaccaggcataaaacagccaggacgccagggcagccaaagtctttcaaacagagcccttgtatatgtaccaatcttaagagccctcaa

SEQ ID NO: 272452 - DNA, 630 bp, Homo Sapiens
  misc_feature (16)..(16): n is a, c, g, or t
  misc_feature (36)..(36): n is a, c, g, or t
  misc_feature (63)..(63): n is a, c, g, or t
  misc_feature (109)..(109): n is a, c, g, or t
cctgtggaagtggatncttaaattaactgtgtgcanccaaagacccatctggcatggcttaancactgtaccagactctgcagagaagttggaattgagatccgtagangaagcaaacccaggaatgatgccctgatgattaagagtcaatcccaggaaggagaatccttccatgggcaacatctatttcaataaccaaactctctccccagtgactcatacttatttgtctgcaaaagttacaaaagaagatccccagagaaagtgcttttccaagttgctagatgtaagtttaaagaaagaaaatttttcccttaagaaaaacgtgagcttggttttaaacttgaggcttgtttttaggtcaaatgaattggattttttcctgttgcttttctaacaatgtaacgacaacggtgaagaaaaggtaaatcatcatgttagtaaatccaaggattttgcctccaggaagtagataactattcttgggaaaaacacataaagagtttgtccagaaaaaattagtgtcaaaaatgaaacatccaatgacaccaaaagagttcagtttcctgtgcttgagtcccacacttcttataatgatcaaatcaaggaactttagaatgtcctatgttc

SEQ ID NO: 272453 - DNA, 440 bp, Homo Sapiens
  misc_feature (38)..(38): n is a, c, g, or t
  misc_feature (105)..(105): n is a, c, g, or t
  misc_feature (218)..(218): n is a, c, g, or t
ctgggggaaatcaattgggggaaaggtaaagcaggggnagcctcatcaagggggctgattggccctctccccaagaacaacccccaagctccgcaaatacctccncccagaatcattccaggggagcaagtggggtctgtaagaactgggcccctgctgcagtattaagctgggaagggtagtaaattccttccttatgggcttccttgaatctgagntaaagccacaatttccttaatagttttccaatagcactccatctcttattaaaaagtacagttaatctggaccttccctcccactcccctgtaatgtcagaaaagaaatgtgtttctgaaaataaatgcttcttttgctgcgtggctatatttcttcaggactgtggttagcaaattgctgctgcacaacataaaaccaagcaaaacaaacttattttttgg

SEQ ID NO: 272454 - DNA, 699 bp, Homo Sapiens
  misc_feature (183)..(185): n is a, c, g, or t
  misc_feature (204)..(205): n is a, c, g, or t
  misc_feature (215)..(215): n is a, c, g, or t
  misc_feature (218)..(218): n is a, c, g, or t
gtggtggcatcactgggtcctctcttggatagcatagtcctatgaccaaatgggtcagtcgttgatcaggcttcatgagaatatgatcgctgggagaaatatacagctaatttaacaacaaatgactgtcctaattctggagacctgggaagtattgatgaggagtataggtgatcataagcnnnagacacctgggcgcaaacnncacaaccccnccncagaaccaagatgccagcatccgctggaaggtaaagaagatctcctctctcttagaacttaatcaaactcttggcatccacagaaggctaggaggatgtaatgaatacttacccatttttgtggaagcccacaaccttttgaatggcctttctatactttagtgaacctccatgttatgaaccttacttcctcaagtctcttttgctgctaggaggcagacagtaacttcggtaattagaaacatctgcactcagcaacatgaagcacaagttgtgtgcagttgtccatatgctgtcatgagttttgccatatgtatcatctggctttcagaggacctttcatggttgtcacgttaagttcctgatacagaagtggcatcggtgctggtgttaatggctgcagtaaagtcaaattcctagattttagtgctctgtggtagcagagagaatggtggtagttatttttccttccgatttttgt

SEQ ID NO: 272455 - DNA, 350 bp, Homo Sapiens
  misc_feature (281)..(281): n is a, c, g, or t
  misc_feature (286)..(286): n is a, c, g, or t
  misc_feature (298)..(298): n is a, c, g, or t
ccaaaccctctggatcagaaggcacgaagatgtagacagcgtctcttatgccttatgtaggaagtgcctaatgatttctttgcaaattctgactagtataagtcctaaacaagaggcaaatgtcttagtgtcgtccaagtgctataaatgaagttaaatggggaacatacggttaacatttctatagggactgtatgtttgccaaaaggttaattaatcacttgttccttaatattcataacatccctctaaaggcaggattttccccacactgggggctnggggnggcctcaggggngggttgggagggattttcaaggagggtcatgggggattgggagcccttaggt

SEQ ID NO: 272456 - DNA, 279 bp, Homo Sapiens
  misc_feature (33)..(33): n is a, c, g, or t
  misc_feature (50)..(50): n is a, c, g, or t
ccctaccccccccggagccctgagtacaacacngaagaatgttggatgancacctacatggtgcagttgtgaataagatatcaccctttagcacattatcagcgtcccaatgattaatagtagtagttatttgttccctttgtcttccccaggtacttcttggatgtttcagaaaacaactacaagaatcttttcattttgaggactgtcctctgaatctctgatgaaagcaaataggagatacatacccatggaacaatacaaataaatagataacat

SEQ ID NO: 272457 - DNA, 428 bp, Homo Sapiens
  misc_feature (48)..(73): n is a, c, g, or t
ccatttaatttgcactgacttgcaggaaagattcctcacattatcagnnnnnnnnnnnnnnnnnnnnnnnnnnaagcaagctatagtctagttctggcattctcagggattttttaaaagttcagcaagaatgctgaataagcagcagatgtggatagcagcaagccgtcttctgcttctgatctttcgggtcagcattattttactatcgagccaagcaatgggtctggagagggtggaggtccaccagggcctgtcctgctgagctgaatgcggcaaagtgaaggtgagtgctgttcacctccgtcctggcatctggtgccccagaggaggtggtctgcttctcatttttcacaggggcctgaacaacctgcacccttcactgagtctcagtgtttgcctttgcaaaataggctaacaagaggaag

SEQ ID NO: 272458 - DNA, 441 bp, Homo Sapiens
  misc_feature (151)..(163): n is a, c, g, or t
  misc_feature (284)..(299): n is a, c, g, or t
  misc_feature (425)..(425): n is a, c, g, or t
tgagtcattggtcttgctctgtcactcaggctgaagtacagagacacaatcatagctcactgctgtcccaacctgctggactcaagtgatcctctctcttcagcctcctgagtagctgaggctactggcatgcacccaccctgataggtgnnnnnnnnnnnnnagggatggggtcttgctatattgcacaggccagtcttgaaccctggggctcaggcaatccctccacctcagcctcctgagtaattggggactacaggtgtgaaccacgatgcctgcctaannnnnnnnnnnnnnnngagacagggtcttgctatgttgcccaggatagtctcaaactcctgatttgaagccatactctcacctcagcctcccaaactgttgggattacacacatgagccatcgtgctggctatgaaatttgntaaaaagtggcaagac

SEQ ID NO: 272459 - DNA, 294 bp, Homo Sapiens
cttaagcttcagttacatatggccaaatttaatggcactgaaaaggctaacatattaagatggaaaaaatttacaagtaatataaacattataatctcaattttgtttttaaaaataacataactttacaggttaggataaaatgcaccaaatttaacagtgattacctgaaggtaacagaatcatagcaatctttattttttccttgcgtacatttttatgatatatacagtattttttcataatcagaaaaaaaggcttgaaatttataatttttaaaaagcctctcctaca

SEQ ID NO: 272460 - DNA, 455 bp, Homo Sapiens
cagtgtatcccagtactcaaatctgttgaccagagatgctacagcagtggtagttcttctccgcttggttgtctgatgatggtggtggtgatggtccacctttgaaatatgacttgactcattgctatctgttctgccaccgccgatggaaacatcttctgcataggtgagaaactcccttcagtgaaagcctatgggtaaattatttccagaaacttgcctggcttgaagaaacaacatgaaaacagcagggaagttcccttgcagtcccactttgacatattgttaggaattacttctcattaggagcacctatgtggctctttattggtggtgttagtagtaaaagggagtaatgcactccacatgaatccttaaaaagagatttaaaaatcaacatggtattttttcagaataaaagtatttgcttttgctgattatcaaataatttgtgg

SEQ ID NO: 272461 - DNA, 297 bp, Homo Sapiens
  misc_feature (21)..(21): n is a, c, g, or t
  misc_feature (33)..(33): n is a, c, g, or t
  misc_feature (39)..(39): n is a, c, g, or t
  misc_feature (127)..(127): n is a, c, g, or t
  misc_feature (223)..(223): n is a, c, g, or t
cgggaaaggaactaccttcancgcctgctcctnaagggngcctcgctcccctcatttaaaagctctttttcccccctacccttactttactcggatcatatctgaaagtagggattgtgtgttcccnacccctccttgagggttgtgtggatttcctcagcccacttcctgccccatggaagttttaagtttcaaatagtcacaatctttttaaagacccagnccatggccaggggcggtgctcatgcctgtagttccagcgacttgaggctgaggcgggagaatctcttgagtcca

SEQ ID NO: 272462 - DNA, 439 bp, Homo Sapiens
tttgaccagctcatcgaaggacaccagtggctggagagaaatcttggtgcaaccccccgctctggctgggcagtggacccctttggatacagctccaccatgccttacctgctgcgccgtgccaacctcaccagcatgctgattcagagagtgcactatgccatcaagaagcactttgctgccacccacagcctagagttcatgtggaggcagacatggggactcggactccagcacagacatcttctgttcacatgatgcccttcttacagctatggacgttcccccatacctgtggcccagatcccaagatctgctgccaatttgatttcaaaccgcctgcctgggtgggcgcatcaactgcccttggaaggtgccaccacgggccatcacagaggccaacgtggcaagagaggtatctgcttccagccctttcact

SEQ ID NO: 272463 - DNA, 479 bp, Homo Sapiens
  misc_feature (14)..(14): n is a, c, g, or t
cgatctgacccatnttccatcttctcctcatggccatcgtgaatgatagtagcatctgtatgtacaagggtgggttttatgaggtttggataagatgggaaccacgaggctgagggtggtccctttccgcccacatggttagttacaggtaggtggtgtttgtggtttcctcaacagcagggacatactccgccttctcttagatgacataggacatgttgggttcccctggacgtttcactttgttttgtggccctgctacaaactcatctgcttcatcaatcatcattcccttcttatcttgtttaaacggattgccaaaagtatgcagtcttttgggttggtctggatcaatctctcgcagtggagaagccaatgtcttcagatattcctgatagttacccatttgtgcaactggaacactatgaagggaatcttcatcttgtcccaacaataaacttgtgcgttttcagcagatt

SEQ ID NO: 272464 - DNA, 377 bp, Homo Sapiens
accaacacaaaggcacagccaattgtcatagataagtgttcaagccggaacgtgttcctccgtaccggctcctgtgtcacagtaacgggaagcctcaggagtgggagtccttgtggagggagaggtgactaacttggtaggtgagtgtcgggagcatcacgtgttctagaatccagtaaatacacgttagtccccaagaactctgaaactcacaaatgccagtgtcctctccattcggattggttatcgctgtggcctggggacaggcgtgccctggagggtatttgctaatgcagcctgtgctccagaaagaccctaggttctcattcttcctttcccctaggctggcatccttcagaaaaagcatcctgaggggg

SEQ ID NO: 272465 - DNA, 342 bp, Homo Sapiens
  misc_feature (271)..(271): n is a, c, g, or t
tgttctcaaaaaatacataaataaaataaagtcaaggctggatttcagaccttgacacagaagtggtctgcctgggaatagggggttggaggggacctggctagcaggattggctcacgggcccagaactgtctctccctttggaattctctgctctcattgcctacttgggctcgaccttatcagagaagcctgccccccttcgtagcatgttgctcaggctgggcctctgactcctggggctcaaatgatcctcctgcctcagcacctnccaagtagctgagagtattaaaacatgtgccaggggtgcccagctattgttactttttggggaagcattct

SEQ ID NO: 272466 - DNA, 518 bp, Homo Sapiens
agaagtacgtgttcataaatggtagccattgttgttaccttcccgtctgtgaacatggatcacatcatctctgtgggtaacccagtcctcgttgtatgacttgtcaaaatgcagttccacttgtattaatattgaccctgttcatcgtcaccaggactgcatcttgcaccactgtgccgtcttctaggcacacacgacccgttatctcccttggaaaaattcctctcactggaaatgtacaattaaaggatgattgaaatgtttaaactcctgggagtttttagtattacccaaactccctagaaatttaagctacccacccaaaaataacatgtgccttttccctttattctcattgatggtagcagtgcacctcgtttcagtgtcctgattccttgattactgtgaacactgaacatcttttatacctttatgatatttctatgtttgtgacttcattggaatgttgatctatttcatatagattgtttttaatatacaatgtattagcccctgtc

SEQ ID NO: 272467 - DNA, 393 bp, Homo Sapiens
tcctgatgattctgtagaaaaggtttcttctccctctccagccactgatgggaaagtattctccatcagttctcaaaatcagcaagaatcttcagtcccagaggtgccctgatgttgcacatttgcccacttgagaagctgggaccctgtctccctcttgacttaagtcgtggttcagaagttacagcaccggtagcctcagattcctcttaccgtaatgaatgtcccagggcagaaaaagaggatacacagatgcttccaaatccttcttccaaagcaatagctgatggaagaggagctccagcagcagcaggaatatcgaaaacagaaaaaaaagtgaaattggaagacaaaagctcaacagcatttggtaagagaaaagaaaaagataag

SEQ ID NO: 272468 - DNA, 534 bp, Homo Sapiens
  misc_feature (17)..(17): n is a, c, g, or t
  misc_feature (33)..(33): n is a, c, g, or t
  misc_feature (96)..(96): n is a, c, g, or t
cggggccatagtccccnggggaaccccctaccnaaactaaaggctaagaaaaattaactctctttcacctattcccattactcccttatttccctnactctattactgaccaccctagctattaatgtaacccaagtcaattttgccctcaaactattacatttgatgcttgcccttgttatactctgtggagactggccaagtcaaagatagctctcccacttcagaaaattaccctctgtccttccccaggtgctcctcagactggacatggtgaattgggatcatttagtctaggaagatttcaatgaagaccccagtgtcaactgggagtctttccccccatccccaatccagagcttttatgccatagttggtccaacgttctgtggaccactaaagagcaaggatggactgccccaaccagtagttgtaatttcctaaaatcataaagtcattttactaaaggaacagcttcccctaactgtcagctaaaccagtgcaatccaatacaggttattatcccaaaccctc

SEQ ID NO: 272469 - DNA, 360 bp, Homo Sapiens
  misc_feature (11)..(11): n is a, c, g, or t
ccattaaaatnccaactggtggtgaaaataaaccatatccccacacctaccccaccccaattggcctttatgccttttccagaaatggtgtgtccagtagaaagatgtgtgtccccatacccagaacctggcctacctgatattttatcctagggtatagatctttcctcatgttataaaatatcaataagaattgatgaattctgcacacattcatcagcatcagaatattcttttaattccatttaaaaatagagttggaatagaatgaagaaaggctactatttgggaaaatacatttctgaacatttggaaagctgttatatgttttccatagtcttttttgttttagattatttg

SEQ ID NO: 272470 - DNA, 420 bp, Homo Sapiens
  misc_feature (20)..(20): n is a, c, g, or t
  misc_feature (136)..(136): n is a, c, g, or t
aaaagccccggaaagccccnggaaacatgagagaggaaatgtgagggtcctttaagagaaaagcccagaggagaaaaatgcccccaaatattcacttcaatggccgtgtcaaaagccttcaacaatcaaactaccnaaaaacaataagaatggagcatccctgggaaccaacctttggactctttatgtctcaaaacacaagatcaacctgggagagaaaagttccattcattactcatgactttttccaagaatcactgtgtacatgggctacaattcaagtgcccatgcttgcaagaagtggttgtgcacctctgccatttggaaaacccaccaggatgagtcaagtaaggccccaggagcagggctgcccagtgctgacggcaggtgtctacttcacttttgcattctgatgcctct

SEQ ID NO: 272471 - DNA, 399 bp, Homo Sapiens
actaatccgtcatcaaccctaactcccccaacaataaaaatggtgtgtgaaaaccccctttcccaacaatgtcctgctggcctccccattaagactgtatttggcctgtaattgtaaaaatttgaactaaatatttcccttctgccttcaagtgcctactccttagaaacatggtccctggggtcatagaattttgttaaaataaacaacaaccaaaagggtagcatgtggcttatttccccaggtttatggctccaactcatccacactttctggaagcagagatgctttagctggggtgagatgaagacccttcttctggtctaccggcctgaaggaggtgggatggacaggagcaaggactaactgggctcctcaggaatgcattatgaggttact

SEQ ID NO: 272472 - DNA, 431 bp, Homo Sapiens
  misc_feature (373)..(373): n is a, c, g, or t
tttcggcacagctctaaattatatgaaattgttccacatgtgacttggatcactgtgaacctgatcccattggagaaattagttttactaaacacaaatacattgttagtcatagaaacgtaacttaatgctttgaattccatatatctcaatgcttttaattccatatatcttttttacccacacttgttacatgcctattttcatgggagagggaaaaattatatacagtcatgttgagggctattactaatcttgctgtgtactcttctcagtgttcccaggcgtgtgggctgggacttccactagtgagaggggtggaattgccccggggttaaggccctggacacttcatggaaaccaacctttttanttggacattcacagttaggtttcatggccaaggttctctttggaggggctgttacccc

SEQ ID NO: 272473 - DNA, 357 bp, Homo Sapiens
  misc_feature (30)..(30): n is a, c, g, or t
gggaaagaaaaacaattattttggcccccngttccctcaaacagtgttaaagcagttttggttaatagacatttttggcatcgacacttcaacattaacactttgaaagtcatggtctggtgccagatttaagaaactcgaaccccctaatatttcataaccttcttcattaggtacttgtacagattaatttctaacattgcagcagtttcatatgtgtgcaatatgtgcattctttcattttagttttgcacttggttttctataaagtacgtttttactcagttcatgcgtgaacaatttaaaaaacgacagaataaggtacaaatgtagtgtatttaataaactgtcaaccaa

SEQ ID NO: 272474 - DNA, 712 bp, Homo Sapiens
gggatgagcgtgaaatctctaactcctggtgagaactaaccagtgtttgtgtattcttgatcttcaaaaattattcacgttttcaaatttttgcattttctgagaagtttttgtgagaaatattcacagacattttcaactatatgaagggatatgattttattaaccagtgaagaaggttaaggcaaaaataaatacttatttaaaatacaggcatctactgtatatctccggtgaccttaaagtacatttctattataataaaggtgaaaaatatcactatcctatttttatggatgggtgaaactgaaccacacgaggtgtgtgtccatactttatgtcacaccaatcagaggaaaacaaggaatctagcccagggctcccactttcagttttagtcactaacccttttcaaaagcttcttttgcgagatatgacttttaaatcagacagctggagatcagttcctgcttagcggtcaagttgtgagccacctgcattgttgaccccacttaaagaggagacattgtgaggaatttgcccttttccaaaactcttgggggaaaacacaggaagtctggcagggagaaagccccagcaagtcacctttgaaaaatgtaaacaggattttcaagggtacaaagacccaggataataattttctttttaagttttgctttatttataataaaagatttgtatatatttatcc

SEQ ID NO: 272475 - DNA, 349 bp, Homo Sapiens
  misc_feature (91)..(91): n is a, c, g, or t
  misc_feature (101)..(101): n is a, c, g, or t
ttcctggacacccccagcccagcagggacacgtccgtcccccagagcattggtgagctcccgtattcctctgaagcccctggaaacgaggnacctcagttnggaagagtcccagcaaggtaacagcttcgttttaatttacattgaaaattctgtggtattcttttgggtttaaattgttgctctcttatgtctttatcggggatcttatttggccttatttcagtctcctttattaattttcaatcttcctaattgtagtgggtaaagacagttcagagagacctgttgatttgacttccccttggaaatgagtattttacaaattggctctaatgacttaaaatctc

SEQ ID NO: 272476 - DNA, 409 bp, Homo Sapiens
  misc_feature (284)..(284): n is a, c, g, or t
  misc_feature (315)..(315): n is a, c, g, or t
  misc_feature (381)..(381): n is a, c, g, or t
tattaactgccatactgtgttctacagtggctacagcattttacattctcaccagcaatttacaacttctcccatcgttgccaacatgttattttctgtttttgtttttgataatagccattctaatgaaaatgaagtggtatctcattgtggttttcacttccattttcctaatgaatagtgatgttgagcatcttgtgtttgctggccaattgtatatcttctttgggagaaatgtctatttaaggcctttgcccattttttgactgggttgtttacttttnattgagtttatacattctgggatattaatcncttattaggatacatggatttgcaaatatttcctctggattctgtgggactggacttttcacgggnaataggtgtccctttggatggcacagga

SEQ ID NO: 272477 - DNA, 370 bp, Homo Sapiens
  misc_feature (37)..(37): n is a, c, g, or t
  misc_feature (46)..(46): n is a, c, g, or t
ggagccctgcctcctcaggggcacatgagtccgccgnggcaggganggagacgggccctcagtcacagtgtcacagaccccttgtccacagtggacacctagtcattcctgccatgtccttgcagcccaggaggactaaaaagattttaatgaagtctgtgttactcattctgaagaaaagaacttacctgagaggagtaatatttttttaatatatattgggtcagggacagggatggagtggttgttttatgtttacatttttaataagtaaaatagaagatttaagaactaatatttatggtattgaactttaagtgtgatatattccttagaaaaacacaactttaataaaaatggaaactaaaaa

SEQ ID NO: 272478 - DNA, 395 bp, Homo Sapiens
  misc_feature (361)..(361): n is a, c, g, or t
  misc_feature (374)..(374): n is a, c, g, or t
tcggcacggctggacaccaacatcacaaaccaggtgaataagctgaaccgagacctgcttcgcctggtggatgtcggcgagttctccgaggaggcccagttccgagacccctgccgctcctacgtgcttcctgaggtcatctgccgcagctgtaacttctgccgcgacctgggacctgtgtaaagactcttccttctcagaggatggggcggtcctgccttcagtggctctgctccaactgtcagggcgcccttacggactcctcttgccattcgagatgaacgctgggtgggaagttcttacagaaggaagcttgatgggcctttcaccctgcaggaactggggtcttgccttgaagttncccgcgggggttnaagggagaccagcattgcctt

SEQ ID NO: 272479 - DNA, 455 bp, Homo Sapiens
  misc_feature (25)..(25): n is a, c, g, or t
  misc_feature (30)..(30): n is a, c, g, or t
  misc_feature (51)..(51): n is a, c, g, or t
  misc_feature (75)..(75): n is a, c, g, or t
taattgggtgaaacccctaaaaatnaacanctgggaaacttggggccaaanaaactaatggggctcaagctgggnaactaactgaaatgggaagtaccctaatacctggccctggtcaactgaaggcttgaaatggctaatggggctcattttccttgggaaaacctgccctaatgtcctgctttctccctgcccttaattggggtcttgaaacaacccagggcttgactcctcagagtctcctctctaacttctgaaaccatgggtaagcctgctccaccagaataaactactcttagatctcaaattcgtattgaaagaagttgagttttgctacacccgtagtaggatttggcttgactgctggttcccttcccaacagaggctgaagtcggctctatgctcctcagtagccttcctgacttttcctccccttgcaacccgtccctcgcccc

SEQ ID NO: 272480 - DNA, 370 bp, Homo Sapiens
  misc_feature (15)..(15): n is a, c, g, or t
  misc_feature (40)..(40): n is a, c, g, or t
  misc_feature (63)..(63): n is a, c, g, or t
ataatggggcccctnccattaatggggataggttaatccncgggccgcccctgggatcccccnccccccataatgtttgggaaaacattattccatgattgcctagctttttatgtgttttcctgtttaaccatattcaacaagaaggagctgtgctttctgtttttacatcccatagagacctgtacattgatctgtcatatattttatgtcttttaaaatcatctttttttattattgaatagatataaaagtatcttcataggccgggtgcagtgctcatgcctgtaagctcagcattttgggagccaaggcaggcagatcatttgaacccaggagttcaagaccagctgggcaacatggtaaaacc

SEQ ID NO: 272481 - DNA, 451 bp, Homo Sapiens
  misc_feature (118)..(118): n is a, c, g, or t
  misc_feature (262)..(262): n is a, c, g, or t
  misc_feature (269)..(269): n is a, c, g, or t
  misc_feature (284)..(284): n is a, c, g, or t
  misc_feature (291)..(291): n is a, c, g, or t
  misc_feature (376)..(376): n is a, c, g, or t
agtgctcgccactgcactgggctgatcactgactatgtgcgatatatttagcaataaaaacaagttgaaaaagaaaaggaagagataaatcctaggtcggggctgctcccagcagccntctgggggggcgctctggggacacgggtggggtaccagagggcaggctgatgtggctgccgccttcccgcagcttgagcaggcggctgcgctttgaagttgcccttgcgcttgcggaccccggggcttctcctggctcagctgnacatagncaggtgcagtttccngtcaccngatgtcatctttacgttctgccagctcctgctcccggcgcgcagtgcttctcttggaagcgctgcttctgtgccgccggagcagntcctcctaccgttcgaagctctttcccttggtcccaaagggataaaacaatgtgctgaatctcacatttccaatc

SEQ ID NO: 272482 - DNA, 417 bp, Homo Sapiens
caggatgatatcgatgtagccggcaatgagctgtgcaatctgctccccttcagttgtctgtactgagtaatagccatcttggtaatctccaaaatccagggtgaagcttttgggagacgcagcccagcgtttgatgttggtgaggttccactcctggatcacttccttggtcttctcatccactcgcatcacacactccttggtgatgcccagaagcctgggaactagcttgttcttccctttcattttttccttcaccaggaagaaggagacaccgtaagtcttgagagaacgggctagcttcacgtagcggaccttggcctcaatctcactcatctgcccacaattcttgtgtgcctggaagatcttacgctctcccttctgcttcacataatccttgggcaggaagtccttcag

SEQ ID NO: 272483 - DNA, 604 bp, Homo Sapiens
  misc_feature (36)..(36): n is a, c, g, or t
aagggatgaaacagagatgacagacaagacaaaaanggttatgagagaaatccctcattaatacatggggtaagaattcacccccgaaacccaaagaacttttccataattacaagggagggacagcacagggcacaagatctttgaggtgttagaagacaggctgacagaccaagcttggtgactggcttaataagtctcctaccacttgaaattctgtgttatttatttaaagagaggcagaggaagagttcagaagccagaagatttttggaagagaagttgagcctcttgcattttcttacatcattaatttccttcaccagaagatatagttggaccaaattgcaatagggttcgccaatggactccattatgtagtcgacctgtgctcctcactaggccctgatttcgctatctgataacaaaggcttctgaactcttattcttttcctcactaacaaacctcaataatctacacttagcattaaggtctccaattcagggttatggaagaaactagtcttccataacccaacgtttctacacatctcaagtccttatcagagttataggttcagttttcacatttccagggagaaaa

SEQ ID NO: 272484 - DNA, 555 bp, Homo Sapiens
  misc_feature (16)..(16): n is a, c, g, or t
  misc_feature (77)..(77): n is a, c, g, or t
  misc_feature (83)..(83): n is a, c, g, or t
  misc_feature (90)..(90): n is a, c, g, or t
  misc_feature (103)..(103): n is a, c, g, or t
  misc_feature (132)..(159): n is a, c, g, or t
  misc_feature (186)..(186): n is a, c, g, or t
  misc_feature (261)..(261): n is a, c, g, or t
  misc_feature (266)..(266): n is a, c, g, or t
cctccccaggaagctnaaggggggagggaccacatgaaccccccctggaatcaaaggctgcaagtgaagcccatgangggggnccactgnacccaaagccccngggtgacgggggaaaagacccctgactcnnnnnnnnnnnnnnnnnnnnnnnnnnnngtatgaagtgatttggaaggggctggnaatcccctcaatcccttcaaatgtgtttggtttgccttttttcctcctttcagggcttcctgactttgggcctanggtanggacttgaccttaagagggcagaatttgaaaaagatctcaaagacgtgctcgggttttcatgaagccaatgacggcggtttctggactcttccttgaccctgttctgtaaagactgaagcatccccacctcaggattcagctgatgggaccctggcttggactgttgattgccagtgagtctgggatgtaattggctgccctcaggacccaaacccagacacttcataggattatcacaccctccatctttattctttctttttacctttaaaagtctatatctacact

SEQ ID NO: 272485 - DNA, 490 bp, Homo Sapiens
  misc_feature (274)..(274): n is a, c, g, or t
  misc_feature (409)..(409): n is a, c, g, or t
  misc_feature (416)..(416): n is a, c, g, or t
  misc_feature (472)..(472): n is a, c, g, or t
gcttcaataccctgtattatctgggaacaacaacccctttccctgtactggcatcaacaagataaggtttccatggagctgccataatttttctataacgctgcccctaggccagaattggttggtctacaggtagatacctgatccaaactatgacaaccacaatattccagcccttgacaatgattgactcttccagggacgggcacttaactcaagctaggccaatcatagtcatttcttcaactagatcctgccccactgggtcatagcntaattgggtgcagggactgggaactgggatggcaagctggactcttctgggatttgaggaacttaggagggtcaggaccatttccctgttcccattgttctggaaactggaaatatggcaggcactggggaaaantgcttcntgttcctgggccctgggggttcaggcctttccctttaggccttcagaagggccttnggagttggaggcaacagg

SEQ ID NO: 272486 - DNA, 395 bp, Homo Sapiens
gacttctggagccccgtcctggacaggagacagaggaagaaccctggagtcggaagccagaagcaaaaggccccgggcaggtttcctcagacatggggtccacagcaaagaaaccccggaaatgcagcctttgccaccagcctgggacacacccgtcccttttgtcctcagaacagatgagctcagggtagggtagagaacgccactttcttcagacctgtcccctttgtgtttaggaaatgagtttaaccagggaccaagtgggccattttagtgttcctggggaaatttaggagggacagtgtttgggcctttttggagttggggggctttctttgttgttttaaggggggcacaaaggttcccagatccattcttgggagcagggccagctt

SEQ ID NO: 272487 - DNA, 382 bp, Homo Sapiens
gaaacttcagtatgagatacaaataaaaacaaagtgtagcagcgatggcctcagacagtagatggcagggacaaactaaggctggctctgggccaaagacacgagcctcctggggagcctgtggggccccctccctcctgtgaggctctcgtctggggtgtctgcatttctgatttacatttcatacttgtttggtgccctgtgaaattggcctttcttctttctgcttccagctggtcctgtgtggaggtgaaggacaagggctgcagtgagccaaaagtgaggtgcacagaggtcttgttttcctgaggctgatagagggttccctctagacccggctccaaataagcagggctcacaagccaaaatccagattctcacg

SEQ ID NO: 272488 - DNA, 485 bp, Homo Sapiens
  misc_feature (21)..(21): n is a, c, g, or t
  misc_feature (56)..(56): n is a, c, g, or t
  misc_feature (71)..(71): n is a, c, g, or t
  misc_feature (80)..(80): n is a, c, g, or t
aaacccccacttggaaagcanccaaacaaacctaacaaactcaatcctgaaagacncccttaatcctggcncctcccccnagagagcctactgtgtttaagtccatggcctcacctgcacctcacaagagaaaaaggagtaaagtgggccatatttgccagggtgttggatgggttaacaagagcatttttacctttttccctcccatgtttggttctgcagcatttcccattgatgcatgctattgtagacttcttaggttgaccttggccttgacctccaccactagctcatgacccaaaactgaagatgtgcatcagaaagggacagatttggtctttctgctgtaaaagatattctgccttagtgcctgctaatttgttgtgcatagtcctgtgctgccaatcttccccaccaattgttaaggttaatgtgtgttttatatgtgtattcacaaacattaaaatgtaatcagtggattccaa

SEQ ID NO: 272489 - DNA, 482 bp, Homo Sapiens
ttggttaaaacacctttaatgatagagggaaagacactaatatctcccgtctgttcttgacattttactaggttaggaagctctggagcctacagcttgaggagaagccatcgttcaagtcagtcaatagcaaaaccctcactctctcctcctcagaactcctgttccaaatgatcctatgttaagagtaaatactacaactcattacaagacggagaggcagggaggacgccacctggagctggtctcccaaagtctgggactcttaagaaccagacaatgacaaagacacaagccccagcctacggataggcaaaatgggtaggggtcttgaaagaggaagataaggaaaatacaaggggccagggaataaaggagggagttatctaaaactagaagcatactagtgctaggaaatcccccatgatccctggtacacctctgcacactatgtcactattagcccaaaagaatattaacga

SEQ ID NO: 272490 - DNA, 285 bp, Homo Sapiens
taggaccacaggcactggccttattggcttttgttaattcaagttaaggctctgacacctacaactagaagagtctggatctgtttcctaagaccatgtcttatacttcctctggatttctgcacagctttaagtaatagtcatttaacaatctaggactaaatactcaaattgtgatctttaaattagacaagctagttcttaagggtctgcgattgtctgaatgtttgagctccccaaatatctattttgagtgatggattatgaagtggggcctttgggaag

SEQ ID NO: 272491 - DNA, 433 bp, Homo Sapiens
  misc_feature (15)..(15): n is a, c, g, or t
  misc_feature (46)..(46): n is a, c, g, or t
  misc_feature (91)..(91): n is a, c, g, or t
  misc_feature (126)..(126): n is a, c, g, or t
  misc_feature (326)..(334): n is a, c, g, or t
tcccggccttgcctnaggccctccctaaaggtgttggggattaccngggcatggaacccacccacggtctggcctgtaattttaatctagnggatttaatagttgtatctttaccatttattaacnattaggtgttatatttgtgtcatacctatgatttatttgattttcctaacccaagggtcagggaagctatggccctattgttcaacctgcctgtttttcctatgtctttcaagttaagaatagattttacaggtgaacatttgtacccaatttcattatggggtactaactttgaatctcaattaagcaaacgcccaagnnnnnnnnngtttattcttctcattaattatacattacaaaaaattatactcagttatttttatgacattttgaatttcctcaatgcaaaaaatgtgactctgaaatg

SEQ ID NO: 272492 - DNA, 299 bp, Homo Sapiens
  misc_feature (51)..(61): n is a, c, g, or t
aagccttattagggtgtgtctaaaatacttctactctaacactagtttacnnnnnnnnnnncttttgtgagacaggatcttgctgtcacccagggctagagtgcagtggccaattcatgggctactgcaggccttggaactcctggggtttaaggcaatcctcctgtctcactctcctgaggtaggctggaaccacagggtgcatacccacccatggctagggctaaatttttaaattttagggggtctcccctttgttgccccgggggcttcatcatcaaataaaccactggttacag

SEQ ID NO: 272493 - DNA, 436 bp, Homo Sapiens
agtgttgtaacatccacggtgtagtaggaaagaatgttggcgaattgaatccagttttaggctctgctcctattaaggcaagtggcttcttttttcctgggcctcagtttcctcatctgtaaaatgagtgaattatattagctgctctccagaaacctttagccatgtgcacagtttgaataatttccattttaatttgggaaaagaataaaccttgttaagcatttgaaaatcaaatagaaaacatgagggaagaaagctatatttagtgtagacatttacattttttaaattaaactctacattatgatattggtaataagaattagaatgagacagtctttactattctctccctagctctaatatggcacagatgtgataataaagtccatatgcagccttgaagaaagtgtttgattagacataaaatgtt

SEQ ID NO: 272494 - DNA, 433 bp, Homo Sapiens
  misc_feature (19)..(19): n is a, c, g, or t
  misc_feature (412)..(412): n is a, c, g, or t
cagccttccgcttggtccnttcacagccaagatggttacagctggcagttgatttttgttttttaaacagaaggcatcttcagatgagaagctgatcatttacatgtgcaggtgtttacagggttcctttctgtcctggtgtagattttttaaccagcttgttggccctggtcattttggccacatttgtgaccatcataaaagctaagtggtatttctgtgtagtttccgtctggaactgctttcccattcccgggaacccatagccgggccagccaggggtcccgaacacaggcccaaagtttattaaaccccgatcataacctccagcagggcatttcatttaaatactgagcttagtttcctgctggggtaagggcatttccgagggtaaccaggggccctctggganccccccttcaaaaggccagct

SEQ ID NO: 272495 - DNA, 403 bp, Homo Sapiens
  misc_feature (264)..(264): n is a, c, g, or t
ataagtgctgtgatgaatgtttaattggttactgtgataagaactaaatggggaattactttagattaagtgatcaggaagggctcctctaaggaagcaatgttaagctgagacctaaatgacaggaaggatgctggcatgcaagacatgggaaaagagtattgagcatcttaggcaaaaggaataacctttcgtatagaggaaaccatcagttctgagaagccatgtacttagcggttaagcacacagactgagggagctgtnggagctacacagctgccaggtttacagccaggcatctttgtagctccatacgtagttaactgctttgctacttagtgtctgtgtaacttttaggccaagctgctttaacatctctctgcctgcctttgcttaattctta

SEQ ID NO: 272496 - DNA, 317 bp, Homo Sapiens
  misc_feature (216)..(216): n is a, c, g, or t
  misc_feature (245)..(245): n is a, c, g, or t
  misc_feature (251)..(251): n is a, c, g, or t
  misc_feature (274)..(274): n is a, c, g, or t
  misc_feature (299)..(299): n is a, c, g, or t
ctggagctgagggagcaacagggagagagctgggagatgaagtccaggaagtggtggaatccagatcagatagagcttttgcttttccccatgggagccacaggagagtcttgaacagaggagtgatatcatctaactacagtttcaaggctccctcgggttaccatgagagaatagcacatagaggagcaaggccgcgaggagggagaactttcngagaccattgctgttgcacatcaggagtnatgatngaagcacttgggcttgttagacntcattaggttctgaatatatttttnaaagggtaatttttaatt

SEQ ID NO: 272497 - DNA, 506 bp, Homo Sapiens
  misc_feature (124)..(233): n is a, c, g, or t
  misc_feature (306)..(362): n is a, c, g, or t
gttagagcaggaataagttctcaccccgtagtagggaagcatcaacacgagactaaatacagttcaggtcccaccaaacaccactgaataacaagacccagagccagatgtgggggctcacacnnnnnnnnnnnnnnnnnnnnnnnnnnnnnnnnnnnnnnnnnnnnnnnnnnnnnnnnnnnnnnnnnnnnnnnnnnnnnnnnnnnnnnnnnnnnnnnnnnnnnnnnnnnnnngtcgccaatgtggtgatgcgtcctgtggccccagctattggggaggctgaggtgggagaatcacttgacgcannnnnnnnnnnnnnnnnnnnnnnnnnnnnnnnnnnnnnnnnnnnnnnnnnnnnnnnncagtgagaccctgcctgaaaaaaaaggaccacacagtttccaagtaacttaatcacattcgagaaacaaatgcaaagatatgtataggtttacaaaaatatccagcaccaaacaaggtagaatacaaaatattgaatatccggg

SEQ ID NO: 272498 - DNA, 511 bp, Homo Sapiens
  misc_feature (345)..(345): n is a, c, g, or t
ctggtaagaaacttacctggaatttggaaaatgaaataagaaaggatcttcatgaagaagactaattttgactttttattattcctttttcatgtaccaacatcttttctttctttaatgttacggcaagctaacagggtatgagtaacagaattgactctagggcttgtttttcttctttattttaaaacaaagacttagtgttattttaaaatatgtttcaaagacaaagtgagtcatacctctatcatatacctcaacctgtctctggccaggaaattttaccaggcccatggaaaaagggaataggacaaagctacacttaataatgaaagataaaagtanagaaaaaaatacatttttattgtccttgcacctcccttctatgccattatggttttaacctttcccacttaaactcttaagtggtctcagtcaaagctctcatgtgcctcactgcatattcaaaatccaagataccaccaaaaggtcccatgctccaaagctaaca

SEQ ID NO: 272499 - DNA, 492 bp, Homo Sapiens
  misc_feature (399)..(399): n is a, c, g, or t
  misc_feature (477)..(477): n is a, c, g, or t
tttggtggagatgaggtttcaccatggtgtccaggcttgatttcgctaattttcttataaaagacagcaggaggctccgtcaactaagtgagacggaaaccaggggaaggagctgaggccccgacagggagaacccaggctcctcggaacatgcagaggaagatccgccgaggccccgacagggagaacccaggctcctcggcacacgcagaggaagatctgccaaggccactcggcaaagctgacggcaaggttgctcactcacatgacagagaatcaggtggggacagcatggtccccactcccaggccttctgggaagatcaggtattaaggtagccgattgcaggtcacttaccttgaaccagtctgcatatgacaggaacgcagaggggccctncagtgctgcctgggcgcacaaccagaacgcagtgacccatgctgtcagctggcagctctcgaatgcctgggccatcanacgcgccacccagtc

SEQ ID NO: 272500 - DNA, 1251 bp, Homo Sapiens
  misc_feature (515)..(515): n is a, c, g, or t
  misc_feature (521)..(521): n is a, c, g, or t
  misc_feature (524)..(524): n is a, c, g, or t
agggatggcacaggtttcactgtggctaacgagaggtttaagaagccaacgaaaaatgacctcgtgtattttgagaattctccagactactgtatcagggaccgagaggcaggctccctgggtacagcaggccgtgtgtgcaacctgacttcccggggcatggacagctgtgaagtcatgtgctgtgggagaggctacgacacctcccatgtcacccggatgaccaagtgtggggtgtaagttccactggtgctgcgccgtgctgctcaaggactgcctgggaagctctgggatgttgcacacattgcaaggcccccaagaacgctgacttggacaaccgctacattgaccccagcaggcgtcaccatccaccttccctttctacaaggactccattggatcttgcaagaacacttggacctttgggttctttctggggggatatttcctaaggcatgtggctttatctcaacggaagccccctcttcctccctgggggccccaggattgggtgngcaacnacngctgcacctaaagcctaccctattctatccatctcctggtgttctgcagtcatctcccctcctggcgagttctctttggaaatagcatgacaggctgttcagccgggagggtggtgggcccagaccactgtctccacccaccttgacgtttcttctttctagagcagttggccaagcagaaaaaaaagtgtctcaaaggagctttctcaatgtcttcccacaaatggtcccaattaagaaattccatacttctctcagatgggaacagtaaagaaagcagaatcaactgcccctgacttaactttaacttttgaaaagaccaagacttttgtctgatcaagtggttttacagctaccacccttaggggtaattggtaattacctggagaagaatggctttcaatacccttttaagtttaaaatgtgtatttttcaaggcatttattgccatattaaaatctgatgtaacaaggtggggacgtgtgtcctttggtactatggtgtgttgtatctttgtaagagcaaaagcctcagaaagggattgctttgcattactgtccccttgatataaaaaatctttagggaatgagagttccttctcacttagaatctgaagggaattaaaaagaagatgaatggtctggcaatattctgtaactattgggtgaatatggtggaaaataatttagtggatggaatatcagaagtatatctgtacagatcaaga

SEQ ID NO: 272501 - DNA, 416 bp, Homo Sapiens
  misc_feature (336)..(336): n is a, c, g, or t
tttagtattgagaagggtggaatgaattggtatactttctagaaaatgaaatattcaatatttgcgtttggatcatctcacagcttatacttgtataacatcggatatgttccagaacatttcacctctcttgtctcttatccccatgtgttgggggagagagcgtggacttctgccacagttcccattgtaccatggaggtggcgtgacttgggggcccaagacatgttaggataacgactgggaaatagccagcctcctagctctctgctgcatgctttatctacccagaccctcagctttccccaaataatttgacatttctaacctggaatngctattagaaacaataaaaataaaatgtgatatttgtataagtacgctttcagtttcgctgtatgccaaaacttccagtg

SEQ ID NO: 272502 - DNA, 376 bp, Homo Sapiens
  misc_feature (110)..(139): n is a, c, g, or t
cgtgcggctgtgttcctagtccccagaaagtggccctgaaggtaggtgctcccttttgcacttgtgggtgcttccagcgcttccacctgcccaaggcctgcccgtgagtnnnnnnnnnnnnnnnnnnnnnnnnnnnnnnccttttcctcccaagagaatttacccccgagtacccactctgagggtgacttgctctggttatgcaacccgcattttgtagagggcttgacagtttccagagactcacgcagcgtttgatcctctgtggcggccctgggaggtttgcttgtttagttataccctgctggaggcagctaacaggaaacactgtaaagtgtttaaatggtacactttaaaatggtaaaatgtacaaaaa

SEQ ID NO: 272503 - DNA, 249 bp, Homo Sapiens
cctatgccatggctgttataaaaatgggggttaaaccgtgaaagttggccttataataatttccagacacaacccaagtttttaaagcagtggatatgcccttagctatatcccttttgagaaatgtatataaagaattttacaggctggaggcagtggctcatgtctgtaatccccagcattttggaaggccaaggcgggcagatcacttgagcccaagagttccagagcagcctggccaatatggca

SEQ ID NO: 272504 - DNA, 469 bp, Homo Sapiens
gaatctgctcccatttacaagacgttccatcataaaaatcaaatcataaaatcaaatccaagtatgttcatttggtatattcattttccacttcttactaggggtggtgggggaggagaagctggtacaggagaaatgtcttttatttcccctctataacaatggtataattccaaatcttatagaccatcacacagttctgttagttgattgttttccgtggattctaccctgccaggagacacaataaataactttttgaaacttcattcttcagtcctgggagtttttacaaataaaaggacacacatgttgagacaaattacatgcttgaaaatctgtcactaacatcaatttcatgttaaaaagtactaagcaactattacagtggcatttcttttgttgttggggaaaataatgtgaatagctatgctaattcagagataattttcaaatttcgtgactaaat

SEQ ID NO: 272505 - DNA, 400 bp, Homo Sapiens
  misc_feature (12)..(12): n is a, c, g, or t
  misc_feature (59)..(59): n is a, c, g, or t
  misc_feature (65)..(65): n is a, c, g, or t
  misc_feature (340)..(352): n is a, c, g, or t
accccaagtgtnatggattggcctcctatggccccatccatccaaaataggagccagangacccntcctagcctcccccaacccaatattaaatgcccatcacccaagcccaagtaattagggaaacagaaatttgaccttgaatagagaacattaaaagcccatgataaataaaattcagtatgatttggatgaaatatttaatggaaaataaaaacatattccaaactgataaggttaatctggagaaatgttttagccataaaacccaaaaccggatttgagtaaataccgaggttcttagttaagtaaacacctccatcttatgtaaacaggtttnnnnnnnnnnnnntattattttctgatttggttgtgtaatcgtgggcctcagaggaaaagc

SEQ ID NO: 272506 - DNA, 747 bp, Homo Sapiens
gccacaacccgtctttgacaacatctggaaccagggcctggtttctcaggaactcttctctgtctacccccagccccgatgaccagagtggcagcgtggtgatctttggtggcattgactcttcttactacactggaagtctgaactgggtgcctgttaccgtcgagggttactggcagatcaccgtggacagcatcaccatgaacggagaggccatcgcctgcgctgagggctgccaggccattgttgacaccggcacctctctgctgaccggcccaaccagccccattgccaacatccagagcgacatcggagccagcgagaactcagatggcgacatggtggtcagctgctcagccatcagcagcctgcccgacattgtcttcaccatcaatggagtccagtaccccgtgccacccagtgcctacatcctgcagagcgaggggaactgcatcagtggcttccagggcatgaacctcccccccgaatttggaaagctttggatcctgggtgatgtcttcatccgccagtactttaccgttttcgacagggcaaacaaccaggtcggcctggcccccgtggtttaagcctaagtctcttcagccacctcccaggaagatttggcctctgtcctgtgccccctttaaatggatctaattttcctgactgttcttcccaggggagtgtggaggtcttggccctgttccctgtcctaccaataacgtagaataaaaacataaccccctg

SEQ ID NO: 272507 - DNA, 778 bp, Homo Sapiens
  misc_feature (278)..(278): n is a, c, g, or t
attaacgttgatttcattccatgcacttagagttgctttcagtaacattttacccctactcccaaaggtagcttaaatagacagattacacaaatgtaagtgataagaataagattagacagattttgctttcacagtagagtctcattatagtcctaaaatagctcatggggcttctccgcatccagaagggagaattggtccctggagtggctcactaagctcttaatcagcaaacgcagtgaagtatcaacctgattgttgccaggaaatccttntgaattaaaacaatgcatattttactacagtacagagtttaaatgaatacataaatgtagaagtactgaatgtatatatttaaaaggagcctcttgtattcaacaaaagatggatgcatatataagagagatgatttaatttaaagaaatatgttgtttcttgtctgtaatgtaatgtaaagggtggaaaggcctcaagctcacatttgtagagagagagcgagagaaatcagagttcccctttattgcccctgtccctcaaactggtcataggctctagtcaccctggggagctgtagaaaacacttgcagagcccaggttttgctggtttggggcatgccctgggcaccagagctttaacatttgaagccacttcagcagcagcagcaaaaggcgaactcatctctacccaagatgtttcttttcctagtggtggaatttgaacacttctcactttttattgtattttatcttccgcagataaatgtagaaatacacg

SEQ ID NO: 272508 - DNA, 461 bp, Homo Sapiens
ccaataggactctttggtcctttaaacttaaagggcagatgcattggtgtctgtggtctttgctgatgcacaagaattccattctttaatatgaggaagaggatttgtttgtgtctctccaggtgatgatcaggtgcctgtgtgggtcctcaccaaacatctgaagatctatcatgagccacagcatctagtggacccacctgtacagtgcaaattgaaggtttaaggattgcttttaagccttgatttgctttcctggtgccttctgttggaagggcctgtttctcaatatcagtggcctcccagctacagccacaacagtttttgcttctgtttcagtagatttactaatgtgggggtgagggtatgcttgtgtttttgcaggagatgaacgaaccatgtggatgccctcaagacgtgtacgaccatggaatgggagactggagggacccatggatcct

SEQ ID NO: 272509 - DNA, 421 bp, Homo Sapiens
  misc_feature (50)..(50): n is a, c, g, or t
  misc_feature (100)..(100): n is a, c, g, or t
  misc_feature (114)..(114): n is a, c, g, or t
  misc_feature (138)..(138): n is a, c, g, or t
  misc_feature (159)..(159): n is a, c, g, or t
  misc_feature (161)..(161): n is a, c, g, or t
agaggaccataaatggtgccctggtagggagggttatccccagaagtaangggaaggggtaagccaggataatagggtgcccaggggtgccccctgtcantccacctgtgttanttgggtttaaaatccaaaagtgantcctgggggaagcctatgccncnttcagtggataataaaattgggtaacctcctattgtaaaacatgtcaatggtgtgtgaagaaaaatcaacccaatctgtaggtgttgataactagacagtactgtgtatgttacgtgcctgtgtggatgtgcacttccagcatggtatgtgtagcgatgtggatcatgccagagttcgtagatcctgttttggggtttgcacatggatcgtatgttaagctttttcttttcaataaatgaattttatttttactaataaa

SEQ ID NO: 272510 - DNA, 509 bp, Homo Sapiens
  misc_feature (14)..(14): n is a, c, g, or t
  misc_feature (45)..(45): n is a, c, g, or t
  misc_feature (277)..(277): n is a, c, g, or t
  misc_feature (442)..(442): n is a, c, g, or t
aattcggcacgatngtgagcaaagtgagaaatggagtattattgnttctctttaacaagtgaggtgtctaacgttcagagagggtaagtgaatcatccaaagcctctcagccaggaagtggtagagctcagacgtgaaccaagatcctcttatgtccaaacgcaatatttccatcatccaagggaccgccatcttccacaagaacttgcaagtggtgcctctgtgttttggatgtcatcgggtgacttgaacaacacagtttagtaattccttcccntgaatgaaggagcttttaaaaggaaacatacttgtgggaatgaggtgctcttaccttcctaaaagtcattactgggctcagtctttatctgcttggcttttatctattttgtcaggttatcttgggtgctcagggcatagggtattggtcacagggttagtcctngagagtcctgcacccacttgatctgtaccgtggggccatctaggcagaagatcttggtgcatccttg

SEQ ID NO: 272511 - DNA, 390 bp, Homo Sapiens
  misc_feature (13)..(13): n is a, c, g, or t
  misc_feature (46)..(46): n is a, c, g, or t
ccctacctggtgnctcacactcccctattcctttttgaacattccncccttcccctccctgttccttcctgacagttgggaagtccttaccgtggccctcgctgccctttaacaagctttcctgttgccctgagggggaaaacccaccctctgctcttaaccctgaccccagctaattggcccctggggaagtaaattatgtagaaagaagagccctccctgactcttgccacaaatatctcctaactataggagacactgagagtgaccacagccttcttataaatctgttgtggcctcatgatctctgagcaataataaatagtactttcacaggccgtcctgtagatatgaagatgttttgtgagaacatctggcattcattgactc

SEQ ID NO: 272512 - DNA, 525 bp, Homo Sapiens
acctggcaagggaggaatttttacatacgttcaagcttttcactttgcagccacactctgatttgatcaaaattcttatccatccaaccgatgttttcttcaatggtttcaattgtctgttggacacaacggagctgagatccattttctttcaaagagctgaagaatccttttaccttgtgaggaaaaagtgggttttaaaaaattaattttatcacattaatcagatgtaactttagttaaaactgaagccaaaattccagcatttgtcaaaattctatatagaaggcagtcccagctgtctgaataggattatgtacacataagctgtatgaaatgagctcatgcctcatgatgtcaagttctgttttttgtctgcagttcttttgtttattctcagttgccagactttaaaagacttcactgtttaccattttataattaaggtttaattgtgtctatttaatgtgttattctgttctgttctcacagatgcaaacttcgttttttaaaaacatgatatct

SEQ ID NO: 272513 - DNA, 443 bp, Homo Sapiens
  misc_feature (352)..(352): n is a, c, g, or t
  misc_feature (367)..(367): n is a, c, g, or t
  misc_feature (376)..(376): n is a, c, g, or t
  misc_feature (397)..(397): n is a, c, g, or t
  misc_feature (403)..(403): n is a, c, g, or t
  misc_feature (419)..(419): n is a, c, g, or t
  misc_feature (428)..(428): n is a, c, g, or t
tcaagaaggaataaaagttcttgaaacactggttgctcttggtgaagaacaaaacagagtccagctacttgctcttttagttcccactttgatatcttacctgctggatgaaaattcttttgcctcagcaagttcagcttccaaagatcttcatgagtttgcactccagaatttaatgcatattggacctctgtatccacatgctttcaaggacagtaatggggggctgctcctgagttggaaagtgcgtctaggaaactgccgttcgagcaagccaagcgagcaaagctaaagcggctgccagacaaccagcccccgccatacattctggcaccaacaattaaagctaaanacaagttgtttttgnaatttgtanatttcatttgtttgttatttnatgttnttcaactaggcccctnattaggtgntggggccactggtat

SEQ ID NO: 272514 - DNA, 219 bp, Homo Sapiens
  misc_feature (88)..(88): n is a, c, g, or t
  misc_feature (94)..(94): n is a, c, g, or t
ggtggctgggaccccagggtgcacaccaccacacctgggttaatattttattatttgtagagatggagtcttgctattctgcccaggntgggtntcaaactcctgggggctcaagcaatcctcctgcattgggcaaacccaaaatgctgggggatgacagatatgaggccacagttgcccaactatttatttatttatttatttaataaggggcaaggg

SEQ ID NO: 272515 - DNA, 535 bp, Homo Sapiens
  misc_feature (46)..(46): n is a, c, g, or t
ccaccatctccctgtccgacggtgaagagccacctccttaccaggngccctgcaccctgcagctccgggaccctgaacagcagatggaactcaaccgagagtccgtgagggccccacccaaccgaaccatatttgacagtgatttaatagacattgctatgtatagcgggggtccatgcccacccagcagcaactcgggcatcagtgcaagcacctgcagcagtaacgggaggatggaggggccaccccccacatacagcgaggtgatgggccaccacccaggcgcctctttcctccatcacccagcgcagcaacgcacacaggggcagcagactgcagtttcagcagaacaatgcagagagcacaatagtacccatcaaaggcaaagataggaagcctgggaacctggtctgattccttccaacgtgcacttcagctggagaaagaaaccaagaagggaagcgccgctgggcccctcctgcgcacagtgttgttcagtttcacatggtacaaacaagtaaaaccaaatgagcaa

SEQ ID NO: 272516 - DNA, 351 bp, Homo Sapiens
agtgtaccttgggaagtgtcaacccttccccttgggtttcccaagtgaacccatgcctagcggagcactgaaggagcagtcaccttagagccgagagagcattacacactcagccacgctcccatggcacctgtgggatctctgtcccctgagggttacccaggagctgtcattggggggtatacatattgataaacatgctgtgccttaaagcagctgtacagtactagagaaagcctcgatctgtcaggcacgtcaggcctgagtgcctccttgttgatgactggcccggtcccttttgaaccacttctacttcctgccatagaaagacaagcataatttcttaaaagc

SEQ ID NO: 272517 - DNA, 421 bp, Homo Sapiens
  misc_feature (386)..(386): n is a, c, g, or t
  misc_feature (392)..(392): n is a, c, g, or t
  misc_feature (406)..(406): n is a, c, g, or t
atcagttctcttgtgacacagagaagaagagcagggagaaaggccaggaatggatcttgacagcagacaggcctggaccggcagccttgtcttgaaggaataaacctgagaaaggatagtggctctagagaaacagtaatagcacctttctagcacctttgatttttctcagtccacctttctctaggaaaagacttgtttggaaggctctcattgatacctgggcagatcagtgtaggaagagggtttagtgtacttggggagttgttcaccttcccttggtttccccagttgaaccatgcttagcggacacttggaagggagcagttcactttaggagccccagagagccttaccacattcagcccacgttgcccccttgggancctgtngggatcttttgttncccttgaagggttac

SEQ ID NO: 272518 - DNA, 599 bp, Homo Sapiens
  misc_feature (310)..(310): n is a, c, g, or t
atcagttctcttgtgacacagagaagaagagcagggagaaaggccaggaatggatcttgacagcagacaggcctggaccggcagccttgtcttgaaggaataaacctgagaaaggatagtggctctagagaaacagtaatagcaccattctagcacctttgatttttctcagtccacctttctctaggaaaagacttgtttggaaggctctcattgatacctggcagatcagtgtagaagagggtttagtgtcacttgggagttgtcaccttcccttggtttcccagtgaaaccatgctagcggagcacntgaaggagcagtcacttagagccgagagagcattacacactcagccacgctgcccatggcacctggtgggatctctgtccctgagggttaccaggagctgtcattggggggtatacatattgataaacaaggctgtgccttaaagcagctgtacagtactagagaaagcctcgatctgtcaggcacgtcaggcctgaagtgcctcctttgttgatgactggcccggtcccttttgaaccacttctacttccttgccatagaaagacaagcataatttcttcatagcccg

SEQ ID NO: 272519 - DNA, 248 bp, Homo Sapiens
agtgtaagccactccacccaggccccctttatgtgacttaagatcaaaatgaaaacaaaaattttcctttgtaaaaatcagaacattatacataaggctataatcccctttggctgaccactcttcaccctagtcccctccgtctggccagaggggattcctccagaccctttaaggatttacttaaatacttgtacatttacatatgtgtattcatagaaaatgcacagtattgtttgtgtgggttt

SEQ ID NO: 272520 - DNA, 462 bp, Homo Sapiens
  misc_feature (48)..(48): n is a, c, g, or t
aagaggagggttggacgatgcaggcgactctccctgcgctccggcgcngcggggtggctgtgcttcggctcccacagccagggccacactcatgcaaagactgcgtttggcccggcttccagcagtcgtcgcgccaggcgctgctgcgagagactgggtgcgcgacattcgccagccagggccaccctgccgcttggccttggggctttgtgcagcagtgccccgtgtgaactgccaccgccggcatttcccactggctcttgggcgcgtacagtagggcgcacacacatgcaaatgccctgcaggaggcagcggcttagggtgttgacagtggcagccctcacgccaggccagggagcccctgttcccaggcagggcccctcagggtactcatctgccccattctgctgcctaatccggttatcagctgcagaacaacggggttgcctggtggagctggga

SEQ ID NO: 272521 - DNA, 434 bp, Homo Sapiens
agaattttgattcccagagtaccacatcattaagttcacggtcccattttcaacaagaatcacaaggtatataaagaaacaagaaagtatggcccactcaaaaaaataaatcaacagaaactgtttctgaaaaaggcctcatgataaattcacctagacaaagacttaaaacaactgtgttaaagacattgaaagaccctaaaggagtatgtggggaacatcaagacaaaatgtattaacaaaatggaaataacagtaaagagatagaaaacctgaaaagaaaatgaaaaggaattctggagctgaaaagtacagtaactaaaatgaaaaattcaatagagggtttcagaggcagatttggcaggcagaagaagggaatcagtgaaattgaaggttaggacaattaaaattattgagtgtgaggaacagaaaga

SEQ ID NO: 272522 - DNA, 437 bp, Homo Sapiens
cccccaagaacaaaaatagagagggcgcaaaaccaagaactttccgttatgtacctaaaaatattttttaaaaatccaaataataagtatcctaagcacaagctcccctcttaacgtcttggagtcgggttgtggcaggcccaggtcctcactaacgcaggcctcccatgacatctgtttcggcactgaccgagtggtgaagttactattaaaagctgaaagagccagtgtcctcatacaaaggctggaatggaacaaaagcccatcaggagtttttgcccaggcctctcctgggccttgaagcatgacatgataacgaaggattcttaacaggactcgtttaggattaaacaagttttactgggggtctgaagaaactccccagacctccacaaacaagtttactggagatctgaaggaactcccctgtgccgaat

SEQ ID NO: 272523 - DNA, 476 bp, Homo Sapiens
  misc_feature (87)..(87): n is a, c, g, or t
  misc_feature (350)..(350): n is a, c, g, or t
gctggcctcttcattcccattttgggaaggcgaccttaaaccctgccacttgatctggggcagcggaagtcttcgcttgcatctctngtggcctcctgtggcatgttccctgcttttcagcttcccttccccattccttttggccacccccaacccccaagcccagaaatgacctgccacccactgtgtagcttggccctcacctttgtctacccctccccatgcagctgcctcttctccctttcaaaatcctttgctgaagtttgggctcattatgtcttgcagactgttgtgttctgtgtggcccatttcctgcgatgataatggaaaaagaatgtgtaggagtattnaagacttttacaaatgtaacacgcttgtgttttggcccccagctgtaggtgggcctcagagatggatactgtccttaattttgtgggggagtgatgacctggccaaacataacaaacagatgttgt

SEQ ID NO: 272524 - DNA, 424 bp, Homo Sapiens
  misc_feature (19)..(19): n is a, c, g, or t
  misc_feature (61)..(61): n is a, c, g, or t
  misc_feature (149)..(149): n is a, c, g, or t
  misc_feature (177)..(177): n is a, c, g, or t
  misc_feature (389)..(389): n is a, c, g, or t
tttaaaaaagggcaacgtnaaatggggcctggccctgtgcctggggcccctgcccttttanaaaaagcggggaacaagctgaaatgctctcccttggcccaaaacgtgctcccttttaaactgcacggccctgtctttaaggtgcccantgtgaatgcaccgggtgtgccgtcgaantgaaacgtcccgaaggccacgtgcgaaggcccctcactgtgctgtcaaaggcctgtgggtgccaggctctgcccgcacagcctctcttgggtgcttgtttgttgcagtggttgaaagtgtgtggggcacagaggacgtgcacctccctgccctcctcctccctgggccttcaccgcaccccatctgcttaagtgctcggaaccccgtcaccntaattaaagtttctcggcttcctcagagaaatgaa

SEQ ID NO: 272525 - DNA, 398 bp, Homo Sapiens
  misc_feature (211)..(211): n is a, c, g, or t
  misc_feature (350)..(350): n is a, c, g, or t
  misc_feature (358)..(358): n is a, c, g, or t
  misc_feature (378)..(378): n is a, c, g, or t
aacaacaaaagcactggaggggctcaatagttagttagtttgtcccagacccttctagaatattgagatcctggacagtgcttctgagaaacctgcagtctctgtccaaggagcccttaaggaagaaaggcaggagtgtggggcaggaagaccggcttcccctttccattccacacggctggctcgcaatattctgtttctcctgcgacanctgggttcctccctgctccccagctcgcctctgccaccattctttccctcagttccagattcaagagtttcaaggggacgggggacagatgatcagaaaggcccagttcagggcaagggaagggggagaaaaggggaantcgtattntggcggttgggttgggattnggaaagttagttaccattca

SEQ ID NO: 272526 - DNA, 276 bp, Homo Sapiens
  misc_feature (33)..(33): n is a, c, g, or t
  misc_feature (48)..(48): n is a, c, g, or t
cccttccttcctccaatccccctcaagggtaantaacctgctcctaancaaccacaatcctgttgtaaaaggttgttcaactgaaccaaagggaataaatgggagctctgttccatcaaaccaatacactggcccaaggggtagggtcagcccagcaagttaaagggctggtggtgggctctgtcacctttccccatacaccctgaaatgctacacttctggggcctgacttgacccaggaatctgggcttgtggccacaccctgccccttctgtt

SEQ ID NO: 272527 - DNA, 350 bp, Homo Sapiens
gttgtatcatgtgccagaagttccttcctttgtatgactgaatatattcctattgtgtgtgtgtttgtggttgtttgtatgtacatactttgcttatccattcatctgccaatggacactaaaagctcccaccttttatgtatttatttataacctaggaagtgaagaagcttctgccaaattctaaattttatgggagggaaaacaaatcatgggctgattaggataactaggtgtttactttaggataggaatatttaattttacggtctactttatggggcatataggaattttttttaaatcaatatttgcattatactttatgcccattttatagggttgggata

SEQ ID NO: 272528 - DNA, 355 bp, Homo Sapiens
  misc_feature (35)..(35): n is a, c, g, or t
caagtgctcatgacccacgtcagctggggtcatcnttatttttggaaattcaaacgaaatgggcttgaatcttgtctcacatgccagggaagacccaactatcctcggattctttccagggattggaggtgaggggcgcacttctgtctcacccagacacctgaggctctataaattcctgcgtccccttaatcagttctgcttgggcacctttttgctggcctcaggagaaggctagccgtcatagccatcggaggcatgggaacgtgtgcagtgacacaagcccatgctgttgctgtctttcaacttttataataatttttggaacaaagggcttcccgttttcattttgccc

SEQ ID NO: 272529 - DNA, 431 bp, Homo Sapiens
  misc_feature (329)..(329): n is a, c, g, or t
  misc_feature (334)..(334): n is a, c, g, or t
aagttgacctagcaagtgagggaacccctgtctctgcaagttgtgcggatcaagagtatccttaaaatagtaaggttaatgccttaggcctatcaagctgccccccagccgaacctgtgaaagatgtagaaaagaaaaaacgttccctgcctccctccctagtccctgctatggtggaggcaggccacacacaagctagggaggcaactggactggaatcaactgccctctgaaggcacttgtgcttctggcttcatacaggaggcttgtcttacagttttatgggggtggaccactgatttactctgaatacaaatgaccttgggganaatcnaaagtattttctgccaaaagttgaagtgtttatccccaataagttacactctatacgagatccaaatgattctatgaaagtgttagattgttagaac

SEQ ID NO: 272530 - DNA, 318 bp, Homo Sapiens
tgtttgctactagaactgggttggcatctaacttcctttgtaaaagcactacaaattaactattgtaagctgtgaaatggagtttgtagtaacagacctggcaagtaaacacctagtgtttgtctcttaaaaaatgatgtattacagctccaccagggtggctgccaacagtgtgaatgagacaggctggcatcgaccaggaggaggggaaagctgctcttgattttctttgtgcatatcggagtctacaacataataatttacgtgaacggacaaagaagggagcccactgcaggtttttctaggaagtctggcaaa

SEQ ID NO: 272531 - DNA, 385 bp, Homo Sapiens
agctttcccatatgagtgagaacatgccatgtttaactttctgttcctggcttatttcacttaacgtcttccagttccattcatgttgctgcaaatgacaagatttcattctgttttatggctgagtagtatttcattctttagccattcatctgttgttggacactgaggttgattccatatcttgggctattgtgaacagtgctgccagggaccatggggggtgcagggtgtctctctgatgcactgattccctttcctttgggataaatgcccagtcgtggggactgctgggatcatatgggcccgttctatttgtaggttttttgaggggaccctcccacccataggtgacctgtactacttttccaattcccacccaccg

SEQ ID NO: 272532 - DNA, 412 bp, Homo Sapiens
tagctttcccatatgagtgagaacatgccatgtttaactttctgttcctggcttatttcacttaacgtcttccagttccattcatgttgctgcaaatgacaagatttcattctgttttatggctgagtagtatttcattctttagccattcatctgttgttggacactgaggttgattccatatcttggctattgtgaacagtgctgccaggaccatgggggtgcaggtgtctctctgatgcactgattccctttcctttggataaatgcccagtcgtgggactgctggatcatatggccgttctatttgtagttttttgaggaacctccacccatagtgactgtactactttccattcccacccaccgcatatacgagttcccttttctccccttccttgcctgagctggg

SEQ ID NO: 272533 - DNA, 424 bp, Homo Sapiens
aactcgtatatgcggtgggtgggaatggaaagtagtacagtcactatggtggaggttcctcaaaaaactacaaatagaatggccatatgatccagcagtcccacgactgggcatttatccaaaggaaagggaatcagtgcatcagagagacacctgcacccccatggtcctggcagcactgttcacaatagccaagatatggaatcaacctcagtgtccaacaacagatgaatggctaaagaatgaaatagtatttcattgtggatgttggtacatctacacaatgaaatactactcagccataaaacagaatgaaatcttgtcatttgcagcaacatgaatggaactggaagacgttaagtgaaataagccaggaacagaaagttaaacatggcatgttctcactcatatgggaaagctaaaa

SEQ ID NO: 272534 - DNA, 497 bp, Homo Sapiens
  misc_feature (19)..(19): n is a, c, g, or t
  misc_feature (34)..(34): n is a, c, g, or t
  misc_feature (45)..(45): n is a, c, g, or t
  misc_feature (66)..(66): n is a, c, g, or t
  misc_feature (157)..(157): n is a, c, g, or t
tcttgaactttctgctccntcccaagttatgagncacagactttnaaactgggaaaaactacttgnaaaaagaccaaatcgaaaagccgctcccatcgaaaactctttaaacatggattgcccaaaaccatggcttcaaaggtgggcatgaagctgnaggccgtggacctgaatggaaccccggctcatctgtgtggccacggtgaaaacgaagtggtgcatcggctcctcaagcatccactttgacggctgggacagcgaagtacgaccagtgggtggactgcgagtccccagacatctaccccgtcggctggtgtgagctcaccggctaccagctccagcctcctgtggccgcaggtaaactacccaggtccctctgagcagccctggtaacaagggtgggaagaagggacagctgttctccggcccctcctccagccccgccctctcctcattgcccagaaccggccacaccgctgaagccaaagaggccacaa

SEQ ID NO: 272535 - DNA, 372 bp, Homo Sapiens
  misc_feature (280)..(280): n is a, c, g, or t
  misc_feature (303)..(303): n is a, c, g, or t
tggaagacttcatgctgcccagtaagactttagaggcactgagagcacatcataaattcatatgcatcaggtaacatagccccagagaatataaaggaaaactgatagaactaaaaggcgaaataggcatatttggagattttaacacgcttctctcattaacgaatagaaaaagcaaatgaaatttagtaggagctataggaaggatgttaagttaatgcctatttaacttactttgtccctggactggaggctattaaaacactggcacccaggacantagtggggatttgcacatttccnttcttaattggggccacagttatattttcatccaggatttgggccccacatggcacttgttccaaaagg

SEQ ID NO: 272536 - DNA, 392 bp, Homo Sapiens
  misc_feature (283)..(283): n is a, c, g, or t
  misc_feature (310)..(310): n is a, c, g, or t
  misc_feature (342)..(342): n is a, c, g, or t
  misc_feature (352)..(352): n is a, c, g, or t
cttactacctggaatgttctccacattccctcctttccagctgccacctgctttctctagctaacacctactcaaacgtaaaggttcagttcagatgttactacctccataaaacccttggattctctcatcccttttccccttccctgtctggcctggcacagggccccatctgcatgctaccctaggcaccaagggcatattacctaccacaacattaggctacaaggacagtggaacccaactgtttcacccatcagttttcccctgaaagggtactaantggaaatttcacatcggctaggggccntgttcttgtggttcagtagggcttagggcttngggcacaggngggaccggggggtacagggtggggggacttcggttagggg

SEQ ID NO: 272537 - DNA, 474 bp, Homo Sapiens
  misc_feature (40)..(40): n is a, c, g, or t
gtaggaaaatgtggggaaaagtttggaaccttccatagantccttgttgaaatggctttcacccaaaagcctgatagcgatatggacagtaaggtccccggctgaggatgacgtacttgttgggaactggaataaagatgactcttgttatgttttagcaaagagactggcggcattttgcccccctacccctaacaatttgtggaactttgaacttgagagagatgatttagggtatcctaggagaggaaatttctaagcagcaaagcattcaagaggtgattagggtgctgttaaaggcattcagtttcataagggaagcagagcataaaagttcatgaaatttgcagcctgacaatgtaatagaaatgaaaatcctattttctgaggagaaattcaagtgggctgcagaaatttgcataaggaaggaggagccaaacgttaatccccaagacaatggggaaaatgtttcca

SEQ ID NO: 272538 - DNA, 432 bp, Homo Sapiens
  misc_feature (343)..(343): n is a, c, g, or t
  misc_feature (368)..(368): n is a, c, g, or t
  misc_feature (393)..(393): n is a, c, g, or t
  misc_feature (411)..(411): n is a, c, g, or t
  misc_feature (416)..(416): n is a, c, g, or t
tgaaagcagtacatggataattaaagagagtaatagcttggagatttccttgattaagaagaatgaaggactgacctggccagagctagtaattggagataaacaaggggaacttataagagattcagcccagtgtgctgcaatagctgaacgtttgatgcatttgacctctgaagaactgaatccaaatccagataaagaaaaaccaccttgcaatgctcaagagttagaagaatgtgatattttctttgaagagagctccagtttatgcagatttgatggcaatacattaaaaactactcatgtggtgaatcttggaagcaaccagtaccttttctctgtncatagtgggtccccaaaggaaatgnccctgctttctgtttgccgccatgntgtttgatggccctactntggcnacccacattcccggca

SEQ ID NO: 272539 - DNA, 346 bp, Homo Sapiens
tctgtgatcgaacgccaggggggcacctttgagcgccacaccaagggcattgggcggaaggtgatggagcggcagggctgggctgagggcagggctgtggctgcaggtgctcaggggtgcctgaggccctggatagtgatggccaacaccccagatgcaagcgtggattggggtaccatggagagaagctacagccatttgggcaactgaagaggccccgtagaaatggcttggggctcatctccaccatctatgatgagcctctaccccaagaccagacggatcacttgcttccgccgccagccacccaccagcatgaagttttcggacagacatggcctttttt

SEQ ID NO: 272540 - DNA, 846 bp, Homo Sapiens
  misc_feature (80)..(92): n is a, c, g, or t
atcagatcataaatatggtcataatgacatcataatgggagagacaagagatagagaacttctacaggtattcagagcannnnnnnnnnnnnggacataaaatgaatccattgtacaagaatgccttctccccattctcagtgcagagacaaagctgacaagcttaaaagtgcatgtttaggattctagacttggtttaactcaaatggccttgattgggatggggtccctctgcagtattaaaactgctctaattgcattcttcaagccagctgaaggctgacagcttccgctcccggctcattatcagagcacttcaaggggctccattatgagcagagcacctggtccaaatttatttcaacggcccagagcaaaatgggaaggtgcttaatgttcaaccacaatggtgacatttttatgagatatccaaggttcagaaaccaaataaatgaaaggtttgaagggagcatgaacagaaactgtgacaataaaaattcaacattgatatatcaatttaaaaacatataccacccatacacttgggggtaaggccaaaggttcaatgcaggctaaccaggaaagaaaaagaagaaaaaaggtcaatactcaactcctcccatgactggctttgctaaaaaagactgatgaaattctaaaaatgtttaaggaaatcagaatgagatgcgaattctgaattcctggttaggataacaattatgttatctatctgcaccaacatgagaacgaaagaaaatccaagtggaattcagagtgaatgctaaatgtattatgttcatagtttttctccggtttgcttacacaattgctgtctttctctctctc

SEQ ID NO: 272541 - DNA, 449 bp, Homo Sapiens
  misc_feature (439)..(439): n is a, c, g, or t
acaacttgaccaagattgaacttgccaatcctttggttcaagagccaaacaaaatcgttcccttaaaatattgcttcatgggaacagtcttcttcaaacatcttttagcacaggcaagattcccatttatacattaattctgttcaagacaatgagattgggcagaaaaggcattgagttggaagtcaatggatatgagtttttatcccagttttaccacaaattaggctgagcattaacttccacagatggcatttattcaagtagttttcatggtcattgcaatgccaaaaaactgtaagcatttagaaaaatttaagttttcagaccttggaaactatttaaggcatttcatatgaaagggtgtgtccttgtgagagtttgcttatgcaagataaggcttctttcagctgcaagtcagggagcggaccaaaactcnaagcagcagg

SEQ ID NO: 272542 - DNA, 338 bp, Homo Sapiens
ccaaatggacataaacacattcctaatgcctaaaaaataattccattattaactaaagtggaggtaaaatccccagagcttttggggctttcctcatgctgcaaatggctgtttctctggttcactcaaagcagcatatgacagcatccaaagatgacactaagctcagtaaagggcaagactgctggtagccagctctgacctccccgtgaagcatggctactgtgtccataatacaggatgtgtgaggatcaaaggcacactattctgctagctaaagagatagcaaaccaccccccaaccctaaaagctccttccccaggtaaataaaagtatac

SEQ ID NO: 272543 - DNA, 420 bp, Homo Sapiens
  misc_feature (39)..(39): n is a, c, g, or t
aaagaaagttgtgggtgccaagtcaaaaaactggccaancggcaaccggaagatttaagctggtttccctccggcccagcagctgttccagggtaaggggtctccctgatgcaagtaagaaaagcgctccctgcctcaagcccatttccttcaaatttttcccttgtaagacatatcctctgaaaagtctgaagctaatgcagcccaatttactcaagcccaagaagggttttccttctttgcaaagtaacgagtttcccatatttgccaaacccagaagtgttgcatgagccttttctaattcttggctattaatttcatgtaaccagctgagatgttcatgagcttgcaaaaaatttgccaactgtccatgctgagaaatgggctgagataataatttgcctcgctttccctcgtgcc

SEQ ID NO: 272544 - DNA, 380 bp, Homo Sapiens
  misc_feature (269)..(269): n is a, c, g, or t
  misc_feature (279)..(279): n is a, c, g, or t
  misc_feature (302)..(302): n is a, c, g, or t
taatttacctactgaagcatagtcagtagccactgtagcatctgaagaacatatgatggacacaccactcccacactcagcacccagataagcaaggcaggcagcaatgcagatgagctatagttatcccagggaaatcactttgacttgtaaagtgtgaaaaggactgggccttcacctattcattctttctataggcagagctcccttaaagctcaggaaagccacagctgggctgggatgttcatgggcttccacctatttataantccccaccanttttgggaaggacagagggcggngtggggtcactttaaggcccggggggtttcattcacttgaggcccgggggggtttttttaggacccagcctggggggg

SEQ ID NO: 272545 - DNA, 395 bp, Homo Sapiens
  misc_feature (327)..(327): n is a, c, g, or t
  misc_feature (358)..(358): n is a, c, g, or t
  misc_feature (372)..(372): n is a, c, g, or t
agaaaagacaagagacaaagtgggaccagggggcaacgctagtatggaggctgcgaaggcctggagctctgggagcccacgctatttattggtgatcaaacaaagaaacaggtggtgaggatgtgggggttaaaaggaagcggtgtatcaagcgaatgagctacagctgtgagggtttagcattttctttgaaacatatggctagttgagataatgggagtgctagaagtaaggagccagcagtctagcaggcatgcaagccctgccttcagctttctctccccgacacttcagctttttctccccaaccaaaaagaactttggaantaccctgagattaaagtttactttgggaggntttgcaggttcccncattgtttgaaaaaaattttttt

SEQ ID NO: 272546 - DNA, 347 bp, Homo Sapiens
  misc_feature (45)..(45): n is a, c, g, or t
  misc_feature (62)..(62): n is a, c, g, or t
  misc_feature (117)..(117): n is a, c, g, or t
  misc_feature (135)..(135): n is a, c, g, or t
cctacctcacccgcttcctgagaaataccaaccagtataattaanccccccgggcccccgcnggtgagacaggtcctagaaacacccctgttaaagaggcacagagtttcagtagtncccatctggtgagcaaancggacgcctgtgaaaggcaaattcatggcccaactgtgacaattaacctgttacaattgcttggaaatatctactccttttacttggttttgtcttgtctttgatttttaatgttgttgttttacctgtgtttaatactaaatatcagttcaaatcttgcttggaaacaggagggtagaaatttttattaaattttaaaaaaattgccaaaa

SEQ ID NO: 272547 - DNA, 278 bp, Homo Sapiens
tatcatctcttcctatacggaccagtcatgctggattagggccatcctaatgaccttattttaacttaattatctctttagagagcctgtctctaaccacagccacattctgtcctgggaattaggacttcaacaattaggagggggcataattcagctcctagcagccactatgtgagaaggtctgcatgacccagctgacagcaaacctctcctggggcagtttttcatcccagcacctcagggtttgcctgctggctgggggtgggggctggggc

SEQ ID NO: 272548 - DNA, 476 bp, Homo Sapiens
ggtgcaagtttggctttggagcttctcagtccaacagctgagctggttgtcagtggttgtcatataaaatccaattttcgtcccacgtcacaatccgactgagaaatggttcattgttgttgcacagaataagagaagatgcttccaaacaacaatttatttttgcttggctcatgaggcacctacttattgagttttttcacctttccgatttgcttcaaatgtaggaaagaccataggaatggtcaatgttgaattcttcagcaacttctcgtgtaggttgtaagaggaatcagctttgattattgttcttgaggaggtcgctgtcaacttccaatgggtcaggccactatggctcctcatcttcaagtccctcgtctcctttgcaaagcttcggtgaaccaccaccgcactgtacgttcattagcagttcctgggccaaatgcatggttgatattggcagttggctccactgg

SEQ ID NO: 272549 - DNA, 425 bp, Homo Sapiens
  misc_feature (404)..(404): n is a, c, g, or t
tctcctaaacctttcaattacagccaccaaggtttcctcaatgcctttaggatcaagtcttaatagccggtctccaatgggccttcctggcctcacatctcagcttagtcaggctctttcacagcctctgttcacactgctcttctcgtcaacctggcacacacacctatggatgctttcaagactcagcaggagcgatagcttccacgaagcctttcttgaccacttgctttttattccaactgtgccctaaataggatatctgggtataatacccgtttttctttattcttctctaaggaataaatttagatcacatcttatttatctcactaggatacagcctgataaacagcaggcactccataaacagacatagggaggaaggctgcctcctgacctgntgatactgagtggggtcccct

SEQ ID NO: 272550 - DNA, 225 bp, Homo Sapiens
acgtgagcccctgtgcccggctgggacttacatatttagaagagatacagtgacatagaggggaaattagttttcacagattttcaattcccaatgcagggattcttcaaagtcagagcaacctacagatgatagatgactaccaatgacaatgttttgacatcatatttacagggatttctttcccgggtcaacattgaggcattttctacccctatgtataag

SEQ ID NO: 272551 - DNA, 396 bp, Homo Sapiens
  misc_feature (125)..(125): n is a, c, g, or t
  misc_feature (137)..(196): n is a, c, g, or t
agagaatgacccttccttagatgggtcacttcctatgcttttaaaggggtatgcatgaagctgggaagtctcccaactgaactgtttttaaaaacaaagatgccagctgggcactattgctcctnacctgtaaatcnnnnnnnnnnnnnnnnnnnnnnnnnnnnnnnnnnnnnnnnnnnnnnnnnnnnnnnnnnnncctggtcaacagagcaagacccctatttgtacaccccaaacaaaaattagccaggtgtagttgtgtgcacctgtagtcctagctactggggaggcagcggtgggaggatctcttggcaggagttcaaggtttcaattaaccatgattgcaccaccgccctccagattgggtaacagccagactttgtctctaaaaaaatg

SEQ ID NO: 272552 - DNA, 413 bp, Homo Sapiens
  misc_feature (23)..(23): n is a, c, g, or t
  misc_feature (65)..(65): n is a, c, g, or t
  misc_feature (74)..(74): n is a, c, g, or t
  misc_feature (366)..(366): n is a, c, g, or t
cgggccccgagggagaagtgaancccggcctaacctcaccaagaaccttccccctgtgtgcctgngaggcccancgggaaccccacttgtaccaatggcccagatttggtttatctttgtacagaagctttgatgaagtgccttgtatttaacaccccttatttaagcttatttaaccttaaattgttaattttataaaatttggtttgggcctgcactacgatgaggggatgggaggtaggctggcaggctcaggaagagactggaggcttgcacagatccaggaccgaggaaggcaggggtgaggaggatttctaacgactgggatgctggctaggtaacacattgttttggtatttgctttanccattttttaacctgtttaggattttgaggatggacatacattttgc

SEQ ID NO: 272553 - DNA, 417 bp, Homo Sapiens
tatcctattgagtgcccacaggtatgccccgtgtattgaaaatgtcagagataagagatgagcagacgcccctacacctgcagcgctgcccaacagagttaaccctgtaaagaagcagggcggccagcactccccagcctctctgtcagacaggactgtcagggtttgatctagaagcaaagcctcctctgttttctgcctaatccctgaaagagtcatgcccttggggagttcatggtccagtggggaccaaggccttgagaacacaacaagcacatctccaggcaggtgagtgaacagtcgtgcaggtgcccagcacacggtggcctagtgctgagagtgagggacaggatggggccggagtcatcccactgtagacacactatcattgctgtgttttagaatcaaactatccag

SEQ ID NO: 272554 - DNA, 324 bp, Homo Sapiens
  misc_feature (169)..(169): n is a, c, g, or t
gggttgttggaaagaccactggcctgtttatgaaaaacattcccttttttgggaggtgatgaagttcaaccctgaatgtgaaccttatcacctagtcccagatcatgtgatccttagagcagcaagcttagttataatgaaatccttagaaatcaagtttcaaaattantcttcagcaagtgaaatgaaaggtaattctccaaactccttttgtatgcagtgtgtaattatttacttaagtacagtaattcataattatcaaatctcaggactagtttaaattccagtaatttaagctgtatgttatcctatttgtaacttatt

SEQ ID NO: 272555 - DNA, 486 bp, Homo Sapiens
  misc_feature (74)..(74): n is a, c, g, or t
  misc_feature (130)..(130): n is a, c, g, or t
  misc_feature (343)..(398): n is a, c, g, or t
tcctgtgggccagaagtaggcctttaaaatcctgccaggtgatcccccacaaacacccatcctaagccaaatgnactgggctcctccctcctcccctcccacaggatgctttacccagagttactgatgnaagttccctcaaggacagttccttagccttccttccctcccatgagcagattctggctttgggggacatgcaaaagatcaataaagcagaaagcaaaaaataaattagaggcctgaggaactacaaaactagataatcagcctctaagtaaatgggagttggccacactttgagattaacagagtaatgtatttgaaggaatgagtatagatnnnnnnnnnnnnnnnnnnnnnnnnnnnnnnnnnnnnnnnnnnnnnnnnnnnnnnnntggtgatggtttgaattgagatgtgtttaatacacactgaatttcaaaggcctaatatgaaaaaaagtaaaataactcattaataatt

SEQ ID NO: 272556 - DNA, 519 bp, Homo Sapiens
  misc_feature (306)..(306): n is a, c, g, or t
  misc_feature (367)..(367): n is a, c, g, or t
  misc_feature (421)..(421): n is a, c, g, or t
  misc_feature (496)..(496): n is a, c, g, or t
  misc_feature (506)..(506): n is a, c, g, or t
agagaaagccaaaacacattatgatgccaagaagcagcagaaccaagagctgcaggagcactcgcggacctgcgagcagctgcatgaaggaaaacaaagagctgcgagctgaagctgaacggctgggccatgagctacagcaggctgggctgaagaccaaggaggctgaacagacctgccgccaccttactgcccaggtgcgcacctcggaggcacaggtaagaatttggctggcagactcaccttcactcctatttccactgggacccctgttgccctctcctcctaggccactgctgccttagncttttcttcactctccccctggccctctccttctcaaggttgcccatgcaagaccaagcangcttccgagacctgggcaaattccaggtggcaacttgatgcttttaaagagccntgagccccagtctaagccccagctggacttgagtattgacagcctggatctgaagctgcgaggaggggaccccantcagtatcancaggttaggaggg

SEQ ID NO: 272557 - DNA, 425 bp, Homo Sapiens
  misc_feature (14)..(14): n is a, c, g, or t
  misc_feature (47)..(47): n is a, c, g, or t
  misc_feature (61)..(61): n is a, c, g, or t
  misc_feature (346)..(346): n is a, c, g, or t
gccatcaaaaaganggcctaactacccttaagaaaatccctttgaanaaggggaactaatncatttaccttttgtgttttcaacactaataagagcgtacccctggacattgtaatatttggcgttgttcaaaatgagtgaatgagcaatgatcccccaggcaggtccacggtaaatacacgcctaaggtaacagactcactcagcaaatagtgaccaagtgcctgctaacatctacgcagccacagggaggtgcacagaatctgttgcaaccggttctgtgcaatcactgaccaagtgtaagtgcctgtccaggctcgaggcagcctccagagtgaagggaattnccacaaagggctcccaggggcctgccttcaactcaacaccagttacaatgttaagaaaatgcagaattgctttcaaact

SEQ ID NO: 272558 - DNA, 640 bp, Homo Sapiens
  misc_feature (154)..(214): n is a, c, g, or t
tctgtgtgacagattgtattttccacagatagtggcaacaatatcttccatcctacatgttcctcttacagtgtcactttgaccatccttacaattagaggtagagcctattcttccttcccttgaaactggtgggacttttgtggctattcannnnnnnnnnnnnnnnnnnnnnnnnnnnnnnnnnnnnnnnnnnnnnnnnnnnnnnnnnnnntgacaaagcctgtgctttatttgctggaatactctctctttaagcctttagccaccatgtaagcaagtatgactgttctgagggcactgtactgtaaggaagcccaaacagagggaccacagggttgggccctggctacatgaagagaaagagatagacacctgcagctgctcccagccaccatctggctgcatgtgcaggagagaccccaagccatttctgcccagccaacctcctaaaatccagactcctgaaactgtgtgagatagtaaatggactgctcattgtttaagcttctaagttggaggttgatttgttacatagtaaagaatggcaggaatagcatgcataacttcattagtcatcagggaaatgcaaattaaaaccaaaatgagattatcacttcacacctaccagaatgactga

SEQ ID NO: 272559 - DNA, 431 bp, Homo Sapiens
  misc_feature (370)..(370): n is a, c, g, or t
ctgcacctcagcttccctctctactttctgatgcaaacaattctttataatgaacacactcttggaaatgctaatgtcataaaccacactgaggggtcacagggtgggaggtaaaatctgcaaaaccaaaggtacacttttaattgctaaaaacaatttagtggaagagtgtctacatttgcactcagttttatataggtaattctgtggcctgtgatgcaacacctgggacgtgtgacccaatgtaacttttaattctaccagatgaagcctaagccagcagagcagctcaacctggagctcaccaagagagaagctcatagaatataaaactaagataaaatacagcaggttcccaagataagaaaantctgatttccaaaacacaaagatatttggaaaacaaaggtttcgggaataaagatgactat

SEQ ID NO: 272560 - DNA, 426 bp, Homo Sapiens
tacagaaacttagtctgtgtcttgtagccctgagctcctcctcttcctcaccagttaacaatatctcaaagaagggtgttgtcctgaaccattaccataaccccagcctaagctcaccctgaccaccactgtcccaggtatatcaccggcttccagaactccctggctgccagggcaacccccgcccccagccccttgctctgggacaggagggagtgggtctcacctttagcctctgcccccggttctggtctgacccagcacatggcagctccaaagagcggacaaaaccttgaagcaaagccaaagggccaggcctgaatgggaggtcagagggaagaaggcccaggagagggtctaagccagccctgtctaagaggaatctaacgcaggcacataggtagctttctatggtggccacattag

SEQ ID NO: 272561 - DNA, 411 bp, Homo Sapiens
  misc_feature (34)..(34): n is a, c, g, or t
  misc_feature (78)..(78): n is a, c, g, or t
ccccaccctgcctgaaaatgttaatgtgtggttnaacatttgaaaccccccctgaaaaaccctccgaattaaaacaanaggtccttcctcctgggaaattgaaggcctgcaaaggcctggcctaactccagctttgcccttccatgagcccccggagtcccagcccaaaagatatctgcaggtcaggggggcaagaaggggtaaccccaggtgtcactgaagattgtacagatttggggaatgttgcagtatttgaaagtgctcccaccaaagctgctgacaagttctggaaatgtcaggagaataatctttgtggacattggtgatgaagaagacagaagaataaaaggcccaggacttcttcatgggtatgcagttaggaccagggtattgaagctcatagctctctcc

SEQ ID NO: 272562 - DNA, 304 bp, Homo Sapiens
  misc_feature (48)..(61): n is a, c, g, or t
  misc_feature (278)..(278): n is a, c, g, or t
aattgtctttattaacaaacaggatatccaaggccactacattgaggnnnnnnnnnnnnnnagggagaagggttacttgctgctcacactatatacagatgcaagcaaggggcgtggagagtgagggctccctgctccctccctccgccggggaagggcatgggctagaagaggagatgggggtcgggaatggggggaatgttttggctggcggggtcccccctccattccctgggagtttgggggaaggggaatcattaaagtgctttcagaaaatnaagaaatggtccctgcccctgggagt

SEQ ID NO: 272563 - DNA, 500 bp, Homo Sapiens
acccttaccacaggtggatagaaaacgggccgacagtcagtcccactcataatagctgggacaaatgtttccctgtttaagggatgccataaagacctaaaaaaaggctgtggaaaagtccctgcagaacaagggtaaaagcaagagcttctgtagactgagatgggagtttcctattttgaaaaacccatcctacagcagactccagaagatagttttgggaaaatatgtggcatcctcagtatacagcaaaaggacatggtctcccagggccaggaacagtaaaacgtgaagaaaggatatttgacatggaaaagcaacagaaagggaaaagcaaggagatggattccataaggaaaggttttaaggatccaatagcagaactaaaatccaaattagcaagagtatagaaaagtattcatgtatagtaaactgaataatggcctccaaaagttttccatatcctaatccttggcacttgtgaatgttacctcacatgg

SEQ ID NO: 272564 - DNA, 606 bp, Homo Sapiens
caagcaggggtcgactactgctgggggaggagcaagaaactcacccaagaccagtgcaagtgagacaggttttgctgccacagagaagacgaaaggattgctaaacatggaaaagaaatcccaccttagagggccagatgtacagagcctgcctaatactgaagctggagcacgacaaaagagaacatgcccattcctgccagccctaacatgttgtaataaggaagagcaggccactgctgggagaagagtaggagcatggagaattacctcatttaaggcccaggcatgcaggatggctggaagttgagggaggtcaagaacactcacacaaaaagcccctggcaccccagctccaactcaaagttcaagataaccgcagtctacctttgtaagaatgtgaaggctgtggtgcactggaagtaacaacaaaactcaaactcaggtcaacccctgagattgactcagccttctcacctccatgctgacaacttcacagaagaagaggcatgttgatttccagccgtaaatactatttacctcagtctctactgctcttctatgcttgatgtctggcactcaactaaaaattatcacacaccaaaa

SEQ ID NO: 272565 - DNA, 552 bp, Homo Sapiens
  misc_feature (22)..(22): n is a, c, g, or t
cctgggagacgacaggctcctnctcggggctgggggacgcttggttctgggccctagcaaggtggggacagtgctgggggcactgctggctccactggcagggcaggtccgaagggctcctggccttcctcaaagcttctccaggtaggaaccagggacgaagccacgctgcccgttcctctccacagtccaccagccatcctccccttccaggatcacctccaggatgtctcccgcggacaggtccagctcatctgggttctgcgctgtataatcgtagagcgcccggtactcctgggctggtgaggccgggtttccctgtatctcctgcactgcgatggctgtgtagacaccctcattccgctcgggggtgggggtcagggtctctgtggaagcgagcagaagctgccaacgaagtggtcttgggacttccgtgcagcaatccagagaaccggggggctctgtgcccgtgctcttggcctggatgaaactgtcgatgtcggcgtctatgctgcagccttccgagcgtcagccgcacttcctcgtagagct

SEQ ID NO: 272566 - DNA, 515 bp, Homo Sapiens
gatgtccagcagcaccattcacggtggcaacgtttattacagggcagggaggacctggaggagcctatctgtccaatgacaagggcttcattagcaaagtacactctgttccactggcagccagtcaactctgaacccggcacaacctgggcaggggcccggagcacaggcgtgaacccctcgcccagataaaacccgtgtttcctcaagcacgtgtccatctgtctgcctggcaggcccagtgctgaaggggaggcatccagagagggcggaggagggccccaagttggccctgttcacaggccctgccctggtggattctgggccaaggtcagggctgggaccaactggtggtcagctccagagaccacacagtgagggccctggtggccacacgggctcttggtcacacaggctggctgttcctttgcagctctggcagcccggccatctgtgacaccctctagcctctgtgcccccaggtgagaggtaggccctcacaccccagccctggc

SEQ ID NO: 272567 - DNA, 390 bp, Homo Sapiens
  misc_feature (46)..(46): n is a, c, g, or t
  misc_feature (160)..(160): n is a, c, g, or t
gaaatcggggcaacccccagtcaagtgggtttcccccccagttgcnagcaaacccccctcccacccaagggacagcccaaagtgtattattaaatgagttcctgctcccctgtgcccatcccaaccgggtgagacccttcccaacaggggttgtccaganacccctatacagaagcatgccctactggtaacagattggtgacccttggagtcagagatccctaaaggagggagcagacactcatctttgctgttctccagcctcctcaggtgacatttccaggtgtgtgagtgaaccagatgaatagggcctgaaataaaccccagcaaacagcagccatgcaaaagagggacctgactattgaaagaaaaacaaacagcaatgacaac

SEQ ID NO: 272568 - DNA, 359 bp, Homo Sapiens
actgggttcgagcgattctcctgcctcattgggcactgaatttgtggatattcattatattattagtataagtaaaataaaaataagcaaaacagggtcatgcttggatcaatgaggatactatgttatgagccaaggaaaaactgaggagccagagacctcaagaagccaaacatacaatgtattaaacaaccaaaacagagtaaggaagctatttttaaaataccagttaaaaccaaaagagggttgggtttctccaaatgttaaacccacacgctttcttgagggcctttgcccttagggcacttggtaggtttccaggaagctttcccttttcttccccctagggttttccattg

SEQ ID NO: 272569 - DNA, 285 bp, Homo Sapiens
  misc_feature (36)..(36): n is a, c, g, or t
agccggggagggatcatttggagccccaggatattngaggctacagtgagccatggatcacacccactgcactccagccctggagagaagagtgacaccctgtctccttaaaaaaaataataatatattgcaacaagctacattttcttttgattattttctctagcacttaaattaacatttgctagacatacatttcctttggtaatatgtcttaatacaaaatgtattatacgtgtgtgtatagtgctacaacgtatcccatgtccttaaatatttctgcca

SEQ ID NO: 272570 - DNA, 498 bp, Homo Sapiens
  misc_feature (11)..(11): n is a, c, g, or t
  misc_feature (46)..(46): n is a, c, g, or t
aaaagcctgtnacagaactgcctcgtgtttcctcattagggttgcntccaccttgagcacacgtgtgggagcaagcgagggaagtcagcctaggagggaagctgccgggccctaatgggcggatgggccgcaggggagggaaggcatgctgttggtgactcagagtcagcgagaggtggatttcgccagcaggaagttggattcaggaggcactgccgggtacttttccatcctccctcctctccccctccccaccatgatcctgtggttcaggatgccaaaatgcacaggccaaactcagcttgtttcctagaactgcacgaactgtttggactgacttgaactggtcaaaataaaacaaccgaggaacctgtcaaaatccagtgaagaatgtacagctctgcttttgtgcaggtgattgttttgaatgacagtgtttgtgaccaacaacccaccactattttctaccatcaatcatactctactccaaaccaataa

SEQ ID NO: 272571 - DNA, 758 bp, Homo Sapiens
  misc_feature (46)..(107): n is a, c, g, or t
  misc_feature (125)..(203): n is a, c, g, or t
  misc_feature (321)..(373): n is a, c, g, or t
gtattcttagtagagacagggtttcaccgcgttacgcaggatgatnnnnnnnnnnnnnnnnnnnnnnnnnnnnnnnnnnnnnnnnnnnnnnnnnnnnnnnnnnnnnntgacaccacacccagccnnnnnnnnnnnnnnnnnnnnnnnnnnnnnnnnnnnnnnnnnnnnnnnnnnnnnnnnnnnnnnnnnnnnnnnnnnnnnnntatttgatcacaagacgcaaaaaacttgccattaaattgaatctacttcctctcgtgcgattaatcccttatgttttcagctaaaatggagtatctggtagatgtagtttatttgctnnnnnnnnnnnnnnnnnnnnnnnnnnnnnnnnnnnnnnnnnnnnnnnnnnnnnctaaccacaaatacattctattcagatcatactattctgcaagtttcagaaacaaacacataaagtaaatgcggttgctctctcagtgctctgtcactaggacaacattttttccaaatgtccctgttatttaggatgtagagaaatagcaatacgcttgaagaagaagttcctggtacaccagtgaagtgatgcccgatgacatttaaagctaaaagatgtcaagtcttttggatgacttaccaaaaaccatttgtgtttcaagaccatccgtgcaggctgaaatccactctttctctcttgttcctggtctgcagcagcactaagtttgaagcttcaaaatagactctttcactatgctccagtatgctgcagtcaaacaaaa

SEQ ID NO: 272572 - DNA, 513 bp, Homo Sapiens
  misc_feature (359)..(359): n is a, c, g, or t
actgcatagggctcggcgtggtgcctgctgggtgtggatgctggtactgctacttcatggggaacgtccggtgggcctcctgccaccctgccccttggtgcccctgtctgtaaagtggcacctcccaggcccaaccctttcttcactggctggccagggttcaatgggagcaggtttcgttggcatgtagcaccgtgcctgagacagagagatggctcacaaatggtcgtcactgttgttaaagaaataaatatgcttagagaaaatggcgtttactctcttccaggcgttttcaccggctgcgtcccattcagtcttcccagcatgatcccagctcggagaaggtaaggggcctgggncaagtgtcctggcaggggctgaacccagatgcatggctggctcgaggggccatgtgccacagaggctcacctgtctgaggctttatttctgctctgaaaccccttcttatcaggggcaggggcacccaaggcccacaagacaaaacacagacat

SEQ ID NO: 272573 - DNA, 204 bp, Homo Sapiens
  misc_feature (117)..(117): n is a, c, g, or t
  misc_feature (142)..(142): n is a, c, g, or t
  misc_feature (173)..(173): n is a, c, g, or t
  misc_feature (182)..(182): n is a, c, g, or t
ggggctcaagtgatgaactcctgggggcttaagtgaccccacccgcctctgtcttcccaaagtgggtggggattataatagggttggaacccattgacaatcccagcccagcttgtnggcttttcttgagctttaggggganctcttcctattaggaaagaattataggggtnaagggccantcctttttcacacttttacaag

SEQ ID NO: 272574 - DNA, 226 bp, Homo Sapiens
  misc_feature (136)..(136): n is a, c, g, or t
aaaaccctcctctggcatttaatgactccttaagaaatgttggaataagacgctccctaatacatttgcacacctcattccctacacagtcatgtattcatttgttaaataagttcctgacttgggtgggtgtggngtggcacgccctataatccccaacacccagaagtcccaaggtggaagaatcgcttgaggtctagaattcgagaccatccttggcaacata

SEQ ID NO: 272575 - DNA, 619 bp, Homo Sapiens
  misc_feature (20)..(20): n is a, c, g, or t
  misc_feature (66)..(66): n is a, c, g, or t
  misc_feature (122)..(122): n is a, c, g, or t
tcccatgatctgacagtttncctaaagacctgcctgaggaacctcagtgctgagtattcgaatggntgcctgtcagttgccactaagccagtggaccctgccccttcctgctagtgtccccntgcttctaaacatcatggcctcttctttgtgacagctctatggcccacttggaggatgttccaaactctcctgagtcctatgtaaattaagccataagcaaaactttttttaaaaaaaggggcactgttttaactcccattttttacaaaggtcctttttccatatttaaaaaccatttcagttctctgaacagttggttaaaaccacattgaagattcaactaaaagctgaaggaaactgaaataataatgctcaggagaatatcttataggattccacagtgaaaccatggaagcaggaaggggagaaagtagaacatactgtagaattttcaaataatattctggaagggtaacacagatgtactgatccaccccatctgcttcccctgagagcatagagagggcttctgagctgggaaggagcttgtgaactgcccaagttgagagagcgctaacgatatgcttgacttctctatcactgcacaaaatgctag

SEQ ID NO: 272576 - DNA, 775 bp, Homo Sapiens
  misc_feature (171)..(171): n is a, c, g, or t
  misc_feature (283)..(283): n is a, c, g, or t
  misc_feature (478)..(478): n is a, c, g, or t
  misc_feature (508)..(508): n is a, c, g, or t
  misc_feature (708)..(708): n is a, c, g, or t
attgatgtaaaaatttgccaggaatttcactgccttctggtcagaattcatcatcagagtctcctggctctcttccccaacggcaccacggagctctgtgacctcactggtaggcccctctgttgctgggactcctgaggaagacacattgtctggccctggagggcgtgnccccgggccccgacccctggtgggcccctcccccactaactagatgatcagcgggtccgcgtgggccaggacccccagcctgccccggtgactcctgggcccagccctctcncctccccgcaacctttccagccttctcccctctcctgcaccctggggtctcctgggagtctggggtccactctagcaggtctgggaggactgaggcctcagcagagggggtggagggaacaggatccaccggcatccaccaagccctaggagatgccagctgtgtctggccagcaggacccctggggtaaggagngaggggccaggaaggctcctggatgaaganggagagccgcacccatcttgatttcacttaagggaaagcaatcacatagatggtctgaacagatgaggttggccttgagctagcagcgtgggtgtgaggctactctactggggcaagagcttaggtgtaagatgccggctcatacttcaagacagcactgttacagagcgtgtgacaagcctactttgtctggatcacantgctagctgttgtgatcgaggagcggttaaggggagttgcgtggtcgcggtgtcctctgcggataag

SEQ ID NO: 272577 - DNA, 408 bp, Homo Sapiens
  misc_feature (37)..(37): n is a, c, g, or t
  misc_feature (60)..(60): n is a, c, g, or t
  misc_feature (178)..(178): n is a, c, g, or t
  misc_feature (350)..(350): n is a, c, g, or t
ccccacttccccaaaaagtcctggaaaaaaacccccnggggctcccccatgaaattgtgncccccctgagctgattaatgccaggaaagtgaggaaaccccctcatattgatgaaggacagagcccgtcacttttgaagaggtgatgggtgtgttccattacccttgactcttggaancctaggggcatggtcagcctcacctgcaggatgggtgggatgcagagggtaagccagcctgcaggaagagccactgctcagacaatagtgggctcatgcctgcaatcccaacagtgtgggaagcttaggggaggcttgcttgaagccaggtgttcgaggttacagtgattgngccatgcactgcagcctgggtggagtgacattgggataaacaattatattttagatac

SEQ ID NO: 272578 - DNA, 393 bp, Homo Sapiens
  misc_feature (18)..(18): n is a, c, g, or t
  misc_feature (131)..(131): n is a, c, g, or t
agggcctcgtaacctaanccctatgctgaggaggcatttgcaaggcccattgagaagtggcccaaaaagctgcgggcagggcagatgagcagcccctttggatcctctgctttgggggcccgaagggcagntcctgcaaagagggagctattcctggatcttgactcccaaccggggaagactttgaccccagcacctgtaaagagcaaatttgattctcttgactttgacacattgttgaaacaggcccagaagaacctcaggaggtaaccttgggcccttccctgctatcctttttctcctttggaggtgcccaacctcctccacccccttcccctactctaggggagagagctgctagtgagatgactgttttataaagaaatggaaaaa

SEQ ID NO: 272579 - DNA, 388 bp, Homo Sapiens
cgctgccacccccacagcgcgcacagtgatttcaggaaggaggtttgattggtttgttgtgtgttgccctgcaagggcccccaatcagcttcctgctcatcagccccatctcaggcaagtcccacatctgtgatgtcaagccctgagccgggtaattggacttggatacctgcttgactcatctttccagtgaggttcctaaggagcatccccaaccccaacccccagggggagctctcgatgtcacctgaagaacaaacaaacaaaaactgtgttgatggtacagtcccagggctccgtgactggacaggctccctgcgtgatacacctgtgtatgtcactacagaaatacagctggtgcaggcctgtccgcctctctcccaaaaaa

SEQ ID NO: 272580 - DNA, 374 bp, Homo Sapiens
  misc_feature (37)..(37): n is a, c, g, or t
  misc_feature (69)..(69): n is a, c, g, or t
  misc_feature (78)..(78): n is a, c, g, or t
  misc_feature (234)..(246): n is a, c, g, or t
aaaagatgggggtttcacccatggtaagcccaggatnggccttggatctccctgaccctcatggatccngcccgcctnaacctccccaaagtgcctgggtacattttaatatctggtagtgttcaggaactccagataacttcccctgccctgctcttctttttacacaagtttccaaaatattcttgtgtgttcatttttcaacaccaaccttacagccagtttatttagttnnnnnnnnnnnnntcagttagcatttaaatttagttttagactgacaagagagaaatgacatctttataaaaataattcttcttagtaaaggtcatagtttgtctctctgaagagttttaaagttttcttctcattggccc

SEQ ID NO: 272581 - DNA, 552 bp, Homo Sapiens
agaggtttaattggctcatggttctgcaggctgtacaggaagcatggctggggaggcctcaggaaacttacaatcatggcagaaggcaaaggggaagcagacatgtcttacctggctggaacaggaggaagctggggaagggaggtaccacacacttttaaacaacaagatttagtgagaactccatcaccagaatagcaccaaaggaggaaatccgcccccatgatccaatccaatcacctcctcctaggccccatctccaacattggagattacaatatgacatgagattcagctttggcataccagatcctaaaccatatcaccagtgtaaatatgttgtttgtgtatttcagatttagcttttttcttcccagtagcatcttagtttataaaatgccagagaacatgtctttctgggttggtaagattatatacatatatattttaaataagtacgattaaattcccattttaagggctgtttatagcactaatttctgtgtaaaaactcacttcctgaaagttctaacctaaaatgtgactaaatat

SEQ ID NO: 272582 - DNA, 395 bp, Homo Sapiens
aagccagacctctacccatcgggcacttaaattacccttgaatttgtgacaaaagtgtactataccattcacttcttagtgtcatagttggggcatgtctaaattgtttaatttgaacaggtgcgttcagacgcaagacaaattcgcgcttgcatttttgttgaaaccgtctctggctttggatcccaccacccgcaagaatcctaaacctaacgtttgataacaaaacgaaggagaacccttgggaaccccctcactggtcaatttaaaataacagatggtgcataatcctaaaggaagactagtgacctataattaggcctagaaccctaatcaaacccgtattaccgatccaaattaaaacctggtagaatctaatacattgactgcaatta

SEQ ID NO: 272583 - DNA, 827 bp, Homo Sapiens
ggcacgagactccccaaactctcattttcaggatcggagaaatttgctaatcttcctattagcccaaccctgccaccttacttcctcctttttgtctccctcctcatttcccagtcaggtttagtaaatgaagaattatttctttggaatcatatgccattctatctcatttgtttgttgaagatggcaatcaaggctagtacgaacatcttgtcgtattccacaatccctctgcaggcctgagaagactcaccagcaagagagggaaagagagactcgataacatctaccaaatgtggccggcattttgttggacgttttcgggagcaccgtcatctcggacaaaccccgccacttcaagttccacctccctttatagcttcacgcatttcaaggaaaatcacttccaactacaagcagccagaaacagcagacagtaaaacacagataagactcctggggcacagagggaggtaagggaaaagtctcttgggtaactgccaaacttcaccctcatacaatgggccccagtaaaacagtgggccttaataagcacattcctttcctttcaggtgcactaagataggaaggctaaaggcagattggggggatatgcctgcagctacagaaagatgtatgggaacagacacacaactctccctcccaaataagcacaacagagagacacagaagcagtccaagcctctgataaactctcccaccctgaatctttaaaaactcttagtctgcaagagagtgtggcttctgacctaactcgatcagaagtccctcccaggtttaaaataaacctgttaactgttgagcca

SEQ ID NO: 272584 - DNA, 507 bp, Homo Sapiens
tgatgctgggaaactgaacagtgagaatcagccgaaaaaggctgtggtagcagataaaacgattgaggcctctatctatgctgtgattgcacgagcctgtgctgagcgagagccagatcctttcgaattttcttctggatcggaatctgaagggagacatttttactagcccctaagagaatttcaggcccggagtgtactactccccaaagcttcccacttccgcgaacaatttcacaaagtcaggatccactcctctgcctctttacggtggaacctcaagttccaataactcatggacaatggatgcctccattgatgaggttgtacgtaaagcaaaactgggaacaccttcaaatatgccccccaactttccttatatctcttctccgtcagtgtctcctcccactcccgaacctctccacaaggtgtatgaggagaaaaccaagctgccttcctccgtggaggtaaagaagaagttgaaaaaggaactaaagactatatttg

SEQ ID NO: 272585 - DNA, 512 bp, Homo Sapiens
  misc_feature (261)..(261): n is a, c, g, or t
  misc_feature (316)..(316): n is a, c, g, or t
tgattcactcactttagtcagagtgcaaatattcactgcataacctaatttatctatgttcctattgttaaacacttatttgcttttttttcttgctcttacaaaggaggctgcagtgacctctcttatatagagctccttatagactcatgtgaaatgtttggcaagggaaataatgaggaatgtcctcactgggtcacagggactgtgccccttcagactacaccagatattatcaagtttctcttccctcgaatgggnacaaattcatgttcccaggtatcaggtatagggaaaggttcacctttatacgggnattggtcactttttaaaaatttctgccaatctaatgggcataaaatgttccttgaatatgtcctcccctcattctactgctgttaggtattattttattcagtcatctgctcttcgaagaccttatgtcttctttgaataatgaaatcctaattcactaatgaatgctacacatttttcaaggcataaaagagaaa

SEQ ID NO: 272586 - DNA, 389 bp, Homo Sapiens
accccaaatccaaaattggttgggtctcccgaaaaaatcaaacgtcccaactggtccgttgtttgttaggaactggaggaaacatctgcaaggaaggctgaaagctgcccccggtgaaagtcccaggagcacgttgccaatgctcccagccctcagtgcttttgtagtaaaagttcatgttagccctgggccagacagacggacagacagacggagggcggtgagggctgggcggctgcctcatgcgcctcgtgactgcccctccaaacaaaagcggttctcattcctcccactggggccttggctccaaggacacggtgacctttgggctatgacagcctcagccaaggaacagtttgggtggtcctgggggtaggcgtctcatctgc

SEQ ID NO: 272587 - DNA, 292 bp, Homo Sapiens
  misc_feature (14)..(14): n is a, c, g, or t
aaaaggccaaatantcccctcaacatccggaacaatgcctcaagtcctttccagcccacgtctgagcagtcaaaggcaaattagaattaacaagctgagccaataaatgaattggtaaaagggatgctagaaattcaactgaagaaaaaaagcaagtcaagtacgtattcagcattaaagatgaatctcagaagtcatggttcaatgttgacactgtgaggataacaactagagacagcttcatcttactaaagaatttatggtcaagtatatttggacctattatccctcg

SEQ ID NO: 272588 - DNA, 347 bp, Homo Sapiens
  misc_feature (191)..(191): n is a, c, g, or t
  misc_feature (331)..(331): n is a, c, g, or t
acataacaaaaattccaggattgctaattctctagctcagtgacatcattgaagacccatattcttttcatctttctctgtcaaccacagcttatgggccttatcctttagttcctcatggtttcaagttggttgcagcaactctaaggcaaccctaattcatatatccttatggataggccaaagggaanaaagttttctgaggagtcttctaggcgacttttcctttcacaactccttgtccaggaactggggtcacatggcccatggccttaaaccaatttaaaggcaaaggggaggatggtccaccacggattcactttgggacccntggggaactgttgggc

SEQ ID NO: 272589 - DNA, 526 bp, Homo Sapiens
  misc_feature (25)..(25): n is a, c, g, or t
  misc_feature (47)..(47): n is a, c, g, or t
  misc_feature (62)..(62): n is a, c, g, or t
  misc_feature (95)..(95): n is a, c, g, or t
  misc_feature (106)..(106): n is a, c, g, or t
caaaataacaaaaacggggaagggnaatcaactggcacaacacctgnttgaaatttggctgnaaaaaaacggggctccctcaaaggcccccgggntcccactcggnaaatggttcctcaagcacagctgtaaaaaagccctagtgtaagctgcttggactttggctcaagatctttagcatttttagagacttggagaaccacagggcactatttggttccaggaagatacactgaacgcaactgaagaaaacttgaagggaggcaagaaagaaaaacatactctgcagcaaacgtgcagccaggatgcaggatgcgcaccctaggattcctcagttctcctcactcaccacggctgagcccactcgtgcctgtgccacctctcattcctctcagagttacagtatgatggctgattttgttttttgagagttaggcaccttcaatttcatgttgcattattagtaatacaatggcagttagggcctctactatggaaatgagaaaatttcaaactacattcattt

SEQ ID NO: 272590 - DNA, 431 bp, Homo Sapiens
  misc_feature (29)..(29): n is a, c, g, or t
  misc_feature (58)..(58): n is a, c, g, or t
  misc_feature (63)..(63): n is a, c, g, or t
  misc_feature (77)..(77): n is a, c, g, or t
  misc_feature (97)..(97): n is a, c, g, or t
  misc_feature (131)..(131): n is a, c, g, or t
cctcaccttcccccccaaattggaaaccnccgggcctcacacctgcctgatggatttnggagnggcctgtccggggnggggggccccccaccccgangcgccctatccctaatccatggaaactccccccngtcccctcatgtaacctccccctgaaaaaccctaagtgtttccataaatttgagagtctgtgaccccaccttacccttgcatcctcacagggtagacagtatataacctaacaacccaaagactacatattgtcactgacacacacgttataatcatttatcatatatatacatacatgcatacactctcaaagcaaataatttttcacttcaaaacagtattgacttgtataccttgtaatttgaaatattttctttgttaaaatagaatggtatcaataaataccccattaatcagaa

SEQ ID NO: 272591 - DNA, 440 bp, Homo Sapiens
agttcattatgcatgttccccagcgcaatcatgcccatcaaatccactgcagtttaatcagcataatgaagcaccagccaaataaagttcctaccggtgatctacagcacccctgcgcgctgacggtgggaatgcacggatggacatatgcggctcctacctcctcagggcttcactcccggctgggggcgtgttacatcctctccacttcctccgacctactaagcgctctcggtctgggaggtggacactcgtccatcagtcaccaggaggctgcccatcgcggtgggctcccgggggtgtcccccgccagaaacgttaccatggttgcaagctgaggcgtccgtggcgggccagccaggcgagttagagccgagcatcacatcccccgcagtgcaggctgcatgctcccggctccgtgcgtgcgtgctctggctgga

SEQ ID NO: 272592 - DNA, 363 bp, Homo Sapiens
cagttagaatctaccaggcacagatgaggccgcccttgcctgacggagcttgatgagcagcccttggtctccggttccaggactgagagcccagctgcctctgcccacccttccccaggcctctgccagcctctggctgcacggtcaggccctgccccatggcaggcctgccagagcttggctggggacccctcccgcctctggctccctgatgggctggatgtaacttgtgtcttctagccccttaaggagcccaggtgttttaaggaatgaattggtcactgcatcttgtatcgattatggttctgagaaaagcaaatatcacttttggctgcattaaaagaagcatcatatataaaataa

SEQ ID NO: 272593 - DNA, 391 bp, Homo Sapiens
  misc_feature (316)..(316): n is a, c, g, or t
  misc_feature (371)..(371): n is a, c, g, or t
tattgttccctaaaggattattcattcgttcattcattcctacatcctcccatttattccagtcatccacagatgtttgagtggttacaatgtgccagcctcccttctaggtactggagataaagtgggacaagagaggtgaggtctggacccttgggcactttcacgataaaatacacaggtaaacatttgcctttagggccccctgtgattacttccactcttgcagataagaggataaggcctcttcagcttgttcacagcagctggaaaagcaaagcctcttctgtcagtaggagggtaaaagattaaggantgcaggagtcccgatggggggcatttacccacatggattatggatttaatggcantttttccatctttttatttt

SEQ ID NO: 272594 - DNA, 438 bp, Homo Sapiens
  misc_feature (177)..(177): n is a, c, g, or t
tcaagtgtgaagacagtgatgcctcccagggacttgggagcaatgtcattcattgccggaaagatggcacctggaacggctccttccatgtctgccaggagatgcaaggccagtgctcggttccaaacgagctcaacagcaacctcaaactgcagtgccctgatggctatgccatangggtccggagtgtgccacctcgtgcctggaccacaacagcgagtccatcatcctgccaatgaacgtgaccgtgcgtgacatcccccactggctgaaccccacacgggtagagagagttgtctggcactgctggtcttcaagtggtatccttcaccctgctctgattcactgtgtcaaaggctgtgagccttcatgggagacaattattgtgatgccatcaacaaccgagcctttttgcaactatgacggtggggattgctg

SEQ ID NO: 272595 - DNA, 473 bp, Homo Sapiens
  misc_feature (327)..(327): n is a, c, g, or t
  misc_feature (350)..(350): n is a, c, g, or t
  misc_feature (366)..(366): n is a, c, g, or t
  misc_feature (377)..(377): n is a, c, g, or t
  misc_feature (454)..(454): n is a, c, g, or t
gtatgtgtcgtcttcccaactgcactcgaagctacgttgtaaacttgagagcagcagctccattccatttactagtataggcgaggtcccagttagggttgccgtagatgtttgtatgtggcttcagtgagcgtgtgtctttgtgtacgtgggggtgaagtgaaggcgtgtttgtgggctggtttcccagctgcccagcctgactttctacagtcagcaggatgggacctgggagatgtcagggctgaagaccctggggagcatgtgggcagtgacagtctccatcactcacccacggcgcggcacttgggagctgaagctgttctnccccagtggcattgatgtccctncatcgggcgccccccncagcatgggantcgtatgttacacccgcccgaggccttgaggcaacctttttcaggcaaggggccttttccagggggaaaaggaattnggaaggaagttgggatcct

SEQ ID NO: 272596 - DNA, 454 bp, Homo Sapiens
agagaaaatttactacttccgtattgtaaaataagaaataaaagttaattctagatatttatgaagcagtcacaatgtgcaaggcagtgtagatacaacaatgtataaatgtacatgttctctgatttctaaaacttaccatcccatccaaggtcaaaagcctaatgagaaaaaactcatttcaaacctgcccaatgtcccagtcctggggctctttttattaaataaagttatatttcccaatattgatgaatgtattacaataaagtagcttttcaaaactgtctcatctctcagacaaacattgagtgaaattgtgtgaatccaatttttccagcattatctcaaatctttttagtaatctgaagatcctataaatatacaattgagattaaattttctagtgccaaactttacccattttaaaattttaaaactattgtcttattttaaa

SEQ ID NO: 272597 - DNA, 882 bp, Homo Sapiens
  misc_feature (152)..(152): n is a, c, g, or t
gggaacggaggcctggctgcgttgccctatctccgtctccgccacccacttagcgttttaggcatcaattaccagcagtttctccgccactatctggaaaattacccgattgctcccggcagaatacaagagcttgaagaacgccgcgagtntgcgtgggaagcctgcagagcaaggggaagcagcgtttgatgccgaatatcaggcgaaatccttcacagggtggacctcgatattttaacctttacgatagctctgactgcctctgaagttatcaaccctctgatagaagaacttggttgcgataagtttatcaatagagaatagttatgtggtgacactacttcaagagaacctctgcattccagtcataccaatcctgcaacttgattttcagaagtcaagagtatatcgcgataagacagtgcacaggtggaggggaaaaaaagggggagggggaagcttatcttgaaaaagcatcacagaagtagaaaaaaatgtcgaaagcattataactgtaacgttctttgagtttgtgattgatccacatttttccccctgcattatggaaaatgtctctcagcattgctttattacaaagtaaaggatggttttataaaattgagactgatgaaacatcaatactagagcccatgaggatgaaagaaattatcaaatagtgctgaacagaataagatgttaacgctgagttattaggactggaaggctatgaaaagaacttgaaattgtcggaatatgtgctctcttcatgtcatattcaatagaagtttctagtttaagattgattttgtgttttcttaggcatttcaagtgacaagcaaagtaaatgtatatattatgtgataaatcatgttttcaaga

SEQ ID NO: 272598 - DNA, 412 bp, Homo Sapiens
  misc_feature (60)..(60): n is a, c, g, or t
  misc_feature (72)..(72): n is a, c, g, or t
  misc_feature (91)..(91): n is a, c, g, or t
  misc_feature (97)..(97): n is a, c, g, or t
tccctgaagaactgtgccccagcacccgccacgcaagacccctggtgtgtgggtcggganccacaccgtgancggaatgaatgcctgaaanaaatantatccatccctacacacattcctaagcccagaaatagaagaaatgttaacagcccctcaaatggtgggaactgcaaaaacctcagcccctgcaaagccaatgcccatgtaaggggcagcgccactgcctgcttgtgcggctcagctgaccgagcggaaagccagagggggcactccggagagtcgccgagcactgctgctccagtgaccaaacgtccggccttctaagaggtatgtgtcaacctcaatcctaaacaagcagcaaggaagatgtggatacttactgtccctttaagttaaattacctagagaaaac

SEQ ID NO: 272599 - DNA, 404 bp, Homo Sapiens
  misc_feature (250)..(250): n is a, c, g, or t
  misc_feature (314)..(314): n is a, c, g, or t
ctgcagatgtttcaacaggaaaagccatgtatgacattcaaaacaccgtattattagaagctcatttaattgtttaatgcagacaaaaatcaaggctaactaaaagcagatccaatgacccagtgatcaacctagaggttcccacggccaagggaaagggagggagtgccatgaagcagcttccggggagagagaggaagggggcctgcctgaggaattcgctctgtgtgggcagtgcagtcgcaaccangcgacactcgccagggcactgatgaaaccaaccgccagcgagcagacgggagacccgcggggangggcgcgcctcggctctgcacctccctgctcccggaccacactggtgggcgcaggcagacgatcctgatgctcgaccacggccgcatctc

SEQ ID NO: 272600 - DNA, 556 bp, Homo Sapiens
agaaaaaagtgaacaaaatggttcttagaaaacatggtcttgtggtgccaggtgcccagggagctcttccctgcacaaggatcccgcgcagtcggccagcccgtccagaactgcagccacgccccccgctttcctcaggcacagtctccttcactgtttttcacatctctgcttctctctctggacttctcggtggccccagacgtcaagctgtcagtcttcttctgtaactctttcatgggcgtcatctatccgcttcagctcctcgtaggcgatctcggggattcccaaagtgggctgcagcatgatcttcctcaaccatggggaagagcttggtcactgtttcaaacattgggatcaggacaaacttgatgaaacccaatcctgggctgtggccttggtcactttgtctcggtccatgaacggggccacaggaaggccttctgacttctcacggtcgctctgcagggaatgcagcagacagtgacattagagacagaaatgccccataaccagatcgctgttctcagagaaagacaagatgcgccagttaacc

SEQ ID NO: 272601 - DNA, 463 bp, Homo Sapiens
  misc_feature (54)..(54): n is a, c, g, or t
gtctcttctgttccagggtcagaagcccctgtggtccccatgcaatcccagganacccagatacctctttatttctctttgttcacagcttagtttatttttaataagatagctgttttaggatcctatgtggaggatggttgaatcagtttctggcttaggcatcaactttttctcacttcaattctatttgcctttttgtcaaatgacaataaactttcttctctcatgagttgagtcacattgtttagtggtgattttatataaaaatatgtttcaccagatgggtgatgatttcctaagcattttgttctagcacagtgacataacagtgctatatcatatgtcattgatatctttgaccatcacttgtgacaattcgttttcttaatttgggggaggatttttaaaatctcagtagaattattgtcctcaccactacttagactacttaaacaagtaa

SEQ ID NO: 272602 - DNA, 454 bp, Homo Sapiens
  misc_feature (255)..(285): n is a, c, g, or t
  misc_feature (306)..(355): n is a, c, g, or t
gctgctggcagcatgtaccctcatcctgcctcactccttagcagctagtgtgaacgtgaagaattgagaaatatagggatccacatcagtgtgtattccattccgggtcagcaaacctaggcatatccttaagttttttaggaaatcactgttggcctccttttgtgtatcatagtgcaaaacagttttaattagttgaattattatagatacacaagaatttagaaaatgcgtctgggcgtggtagctcacacnnnnnnnnnnnnnnnnnnnnnnnnnnnnnnngaatggatctgcttaagtccnnnnnnnnnnnnnnnnnnnnnnnnnnnnnnnnnnnnnnnnnnnnnnnnnnaactaccgtgtctacaaaaaaattagccaatcatggtgttgcatgtctatggttccaactactttgagaggctgtggttggaaagatcacttgagccca

SEQ ID NO: 272603 - DNA, 322 bp, Homo Sapiens
  misc_feature (21)..(21): n is a, c, g, or t
gccaaaatggggtccctttgnaagatccaagaaatggcctcatccccctatggactcaagggcagccttgtttggctctcctgacacaggaaccatctgcccagggatctccctggaagataccccagtccatcccccctgaaggcaggcccaccaaccttggttcccactgcagatcccgaaatagccctgtaagtcagctccaacccctcagctgcagtctgaaagcagtcctgccttcccaaggacgtgctgggagacactcgtctgagttaggccacaaaatcccaaaagaagtgttgaaatggttctgagtttactc

SEQ ID NO: 272604 - DNA, 556 bp, Homo Sapiens
  misc_feature (209)..(209): n is a, c, g, or t
gcaagagaaaggagcaggacgcaggggtccctcttgtacttcacaacaggaaatgtcacagacaccatcaaaatggcagggggtagggcacggggaagggtccccggtccgcggacgggcacagtggggagaagagagcaccagttctgtccggccagagggaggtgggccccaatggcagagtggaggtggggggttggtgggcaccnaagcccccatcccattccgtccaaggtgaggttcctgagtaacaaggggtccgggagcctggcagctcactcgggggggtccggtttcttttctgcactcggaatttgagctggtgggggcgtcccgaggggctggcagagctggcctcttttctgagaagaagtggggcttgaaagcctttttgggacacgttgttgtcggacttgaactccacgcgcatgttgttgtactgggaggtggtgacctgcggctctctcaaaaccacagaacttggcatgcgacttggagtcagctgtgagtgcactgcgcagctccacgagtacgtacttgcaaacatcattggcct

SEQ ID NO: 272605 - DNA, 839 bp, Homo Sapiens
ttaagtgccaagaccatgttgacctttctcacaataaaaataactattgaggtaaagcatttttaattggctagaattaagcatttcaaacatcatgtgttacaagatatatatatatgtagatataaaattttgtcaatttaaaaataatttttaaacacatcatggagcgatacgaatgctccaaatactgagtctgcatctttttcataaacttagctgaactatatagaaaatacagtttttatgatttttaaaaatgtctacttatcagccataagcatagaaactctgatatttaccagcatgttctagaaccagcacagaacatgggagtcaccaaaggactctatggctttcactttaagtttgggacacctggagtttctggtgctgatgctgatcatatggacgacattaaagaagcaggtggtgctaacagtcccatctctggccatggtgtgaacacagaaatcaggtttgcatccaaaatcaccaaggaaatatttcaatccaaaagctctctagatctctgagttttttaaatacagaaaatgactaaggaattgggccttgttatgtgattatttatataaactcctgcaatgtaagcctgcatcccatttaaataaaacatattgtgatataagtaagaaacttcccaagattcccagtatcaatggggaagaaaagattattccaaaatttaaatccacagaagcatttagaaatttaaattaaatttgaaaaattaaatataaatgtaaacataaatgtaaatgtttattattgtctaatatattacataaacactaaaaactaaaagattctacatgtac

SEQ ID NO: 272606 - DNA, 429 bp, Homo Sapiens
ggcagccagcagtttcaggatggggaaaatgaggaatgtggggcaagcctgggaggtcatgagcacccagacctgagtgatggcagccagcatttaaactcctcttgctatccatctacgtgtattacagacattctgctcagctacaagcaccccgaagtctccttcagcatggagcaggcaggcgtgtaacaagaaacagagagttttgtgtacagcttgggaatgaaaaggttgattgtaaacccacagtatctagcagcgttgtgccaaattgcccttgtgtttctctccacccaaaatatcacagctgctttcctcacatttggttcatccgtgtgctgttcttttgggttctgagagggttttgccatgtttgcttgtatgaccaagtcaccaaggaaataaacaggaaggaaatccaaaaaa

SEQ ID NO: 272607 - DNA, 708 bp, Homo Sapiens
gctaagtccttgaaaccctagagctgtgacgtagaatatgtgctgtctgtgagaccgtgttcccaggagcactgactgcagttgagagagacccattttgctctcccttaccgccccccgccccgggtgctttctgcacaaagcctagagcctggcactcaagcccaccggtggcagctcctagtgactggacatgcctggaagacccctcagccttctgtttgcagaacgttcatttcaggagcttctccttcccacagacatcttacacttgctcgacactgccacctgcagaagcctggcgggctctggtcaccatgtgtctatctgaaggttgcactggccagcatgggcctgtcccaagcgagaggggagacacagtggactgaaaggactggttgaaagtggccaatctctgtcagcttaatttggcagagaaaatttgtaacaactctgagcacatgctgggtgaagtcacagctcaaggaaagataaagctgggcggaaggaggtgtgcgtggcttctggggtgggacccagaggggaggctctgggacaggggctggggttcagtgccagggccctgaggaagaaatggggactgatctcaaaattccagaattccctgtacatctgttcacgtgcttgtgtccaggtgtgacttgtaaactgtctagtgtttgcattaaataaaatggcaccgagcag

SEQ ID NO: 272608 - DNA, 275 bp, Homo Sapiens
  misc_feature (26)..(26): n is a, c, g, or t
  misc_feature (111)..(111): n is a, c, g, or t
acaagacttgggttagtccggccccngggtccacaaaagctgggtaaaatggacaaagcctagggactcaaaatccaaagagtgactcccaaagtcacccttacctaaccnacctgaaaaatttcaccctccctaataaaataaatcaataagctgaaatacattccttatttaatctctggcaggtgctaatttttttcccctttttagtagagacaaaatagctaaaactggcagccaaccaagaaacaacttcaaattaatcatgtaatcat

SEQ ID NO: 272609 - DNA, 443 bp, Homo Sapiens
  misc_feature (232)..(232): n is a, c, g, or t
tcccttgatgctctatatgttaagtagtaggagaaagatattaaaaagatgtctgtccccagtaaatttctaatctagcaatcgaggcaagtgaaagaaatactaggaaaccaccaggtaatgcatctgcaaaagctaaaatgacattgcacctactgtggcagctaagagggattaggagaggaaagacacacgctttgatataggaatatcaaattttctttcttggaanttttcttgacaggcttcatgggaaaggcagggcataaggtgggctttggtagagagcaaatttgtgagtttcaggaaacagtatttcagctgggtaacaagagcccagactcatggaaatggctgaaagtgttgctctgaaagggaagagaagggaagcagggatccttctgcccatgcctagagacctggcttatccttgcatgagtgca

SEQ ID NO: 272610 - DNA, 405 bp, Homo Sapiens
  misc_feature (278)..(278): n is a, c, g, or t
tagagacaggatctcactatgttgcccagagtggcctcaaaaactcctgggctcaaaggatcctcgcacctcagcctcctgagtaactgggactacaggcgtgtgccaccatgcccagcttacaaatcttgatattcatagtaagccctcccacttcaagattgtcttgataggcgccttgatattttgcatttccctataataatgtgtatttccacaaaaacattatgggtgtgctgacttgggaatgcatgaaatctgtttatcaatttgggaangaagtgacatttttacaacattgaggttttaaatcagcaaatatacaacttctctccattcatttagggatggaatccctgatcttttatttttaagtccttcctgggttttatcccctcccttgct

SEQ ID NO: 272611 - DNA, 378 bp, Homo Sapiens
gggccccggtaacacttacagaaaatggaccagacaacaaaatgcccgcctgcctttgtgtgttggaagtccaggtcaagagcaggctggagaccctgatgtagaaaatgcccgatttaacgcccagttagtccctgttcctcacatcaaaggcaggattcaagggcagtttgcgatgagaggcgcgcacaagaaagcttttaaggcaaaaaactaagtgggaagaaaggaagcaaatataccaaccacctaagctaagtgcatataattgctgtccctgggggtggaacttgcatcctatcatatctgtattacagatgcatttgccagtggattggaccatattttaaattttcataaaagcaaatttgcatcaga

SEQ ID NO: 272612 - DNA, 350 bp, Homo Sapiens
  misc_feature (20)..(20): n is a, c, g, or t
  misc_feature (37)..(37): n is a, c, g, or t
  misc_feature (78)..(78): n is a, c, g, or t
ctaatgcccccaaaaattgnaggcatttattgccccntgaaggacctaaggcctaattgtcttgacctacctaaaagncccctgaattggtggtcaaactttcccccttgtgttgtgtagccccaacgtcatttagcttgttgtctgatgcctcccagtaggacacctccgatggagctttgatttctgagcagcgaaagctcccttcctaagatgcatctcgcataggctgcctatgatgaaggaccgtgcacctccactccaacagagtgctgagtttaaaagttgacctgtgtttgtaatttcactttcatcttgcttaataaatatctgctggattctttcattca

SEQ ID NO: 272613 - DNA, 444 bp, Homo Sapiens
  misc_feature (49)..(49): n is a, c, g, or t
  misc_feature (140)..(140): n is a, c, g, or t
  misc_feature (151)..(151): n is a, c, g, or t
  misc_feature (249)..(249): n is a, c, g, or t
cctgtgtggtaaagggcaaagttggtaccggaggcaaaaagcatcccgnagcctcaggaatggcaaaaaaataggatcctccccatggtgggggatggtgggcctcttttcccccccaagtgtgggacccagatggtcanggccgcccttngtgagtacctcaagggaatggttacgggcttcccttccttcagggacttcactgcttctctccatatggagaaggctccctttcccatgcacttcccnggatctgaaaaacaagaacaagaaagaggatggctctaaagtctcaggaaatggacctttctatatcctcccttttaaaaagcatttgtatgtaggttttttaggtcttgctgtcaagtcggatacacagctgtcatctgttatatcggtgatttaataacataataaaaatttatagagaaccacaagctcctt

SEQ ID NO: 272614 - DNA, 546 bp, Homo Sapiens
tgtaagatcactgtttagatttgccatagagtacactgcctgccttaagtgaggaaatcaaagtgctattacgaagttcaagatcaaaaaggcttataaaacagagtaatcttgttggttcaaccattgagaccgtgaagatactttgtattgtcctattagtgttatatgaacatacaaatgcatctttgatgtgttgttcttggcaataaattttgaaaagtaatatttattaaatttttttgtatgaaaacatggaacagtgtggcctcttctgagcttacgtagttctaccggctttgccgtgtgcttctgccaccctgctgagtctgttctggtaatcggggtataataggctctgcctgacagagggatggaggaagaactgaaaggcttttcaaccacaaaactcatctggagttctcaaagacctggggctgctgtgaagctggaactgcgggagccccatctaggggagccttgattcccttgttattcaacagcaagtgtgaatactgcttgaataaacaccactggattaaaaaa

SEQ ID NO: 272615 - DNA, 732 bp, Homo Sapiens
ctggctcagttcttcacctgggccgaagccttgcgttttgccgacggccctgacgaggtgcaccgggccacggtggccaagctagagctgaagcaccgcatttagagccttggggctgcagtggctcaatgtcctggctggtccagctgtgcccagatctgtcactgatgtgcctcgaaagatccggtgtttgtggctcctgcaccctgctcagcagctctgtcccgggacagtcagggtggactcaatctttctggttctccacagaagacgtctctgcaagaagcctggagtctgtttcaggccaggaggaggggatttgctgagggccaagggggttctgggacagagtctggaaagctggtcttcaggctctcagtcccaggctgggcaggcacggtcacttcacttcagcctttcagtccctctctctctgcctgtgggaatctggacacattttgggaggcctcccaaggctgtgggacgtgcttgctctggcagctgcagggttcctgtctggcctccctggtgagcagaggggcggccacggcgggcggtggcctagagacccaggacctgggcgcctgggaaaatggaatgcaacccacattgtaaagccactggcatctgattatctccatttgaacacacagcacagaacaatcatttaaatgttattttggaaaggggttttggggacacagaagaataagtaaacacatctcggaggca

SEQ ID NO: 272616 - DNA, 328 bp, Homo Sapiens
  misc_feature (19)..(19): n is a, c, g, or t
  misc_feature (50)..(50): n is a, c, g, or t
  misc_feature (60)..(60): n is a, c, g, or t
  misc_feature (214)..(214): n is a, c, g, or t
ccgaagctgtcttcccacngtggagacctcatcacggacccctttttgcnaaagttgctnccaaggtgaagggttcctagccgctgggattgaagaaattgccctggcctcgttctctcttcttgcccttggcccagctgggaccaaactctgatcagtattaggggtagagtgaggtagacactggactccctgtccccaccacccctgcccnacccagggccaacatgactaagctctctcatgacccacctcagctcagccccccaggcccgtgccagctccacactatctcttagctgagtttttgcaaataaaatgtgttgta

SEQ ID NO: 272617 - DNA, 416 bp, Homo Sapiens
tagtactagtgacatcatcacgtgtattgttatcctatggggcaaatgtgtggtgccccagaataaaatataccctcatgcctagggtagggacatccctttcccagctcaaacgtgggtagggatgtgggagaataagaatgtgggagaaccaagagaaaaagtggggctgggagagtggagttcccgtagggcataggcctgtgaagtaacactggggcagatatgtatgttatatacaactatttttttaaaaaacttatatccatgttgggagtagatgggtatataacagtttggaaatactatctttggagaatgtatttttgtatttataaatcaacttttaaaaactgtctcattcaaaagggaataattcatatgtacccttaggaaataaagacctgtgttatcaa

SEQ ID NO: 272618 - DNA, 420 bp, Homo Sapiens
tacacttcagaggaacacgcacctgacagccaaggagaactgagcaatagtcctcgggatgttgggcgtcattttccgtgggcagttgggagtcactgtgcttctccccacaaaaactcttctcacagtccaacttgtatacaaacccatcagactgctaagcccagggcaggtacctacctatcttcctgtcccagtactgaggggctcaataactattgttaacctgaagacaccgaaaaccttgacagcgctgagcttgttacagcaccatcttgctgtgtgtccatgtgcaggtgcaactgtacgtgagatcagcggccaaccaccaccctttcccaggccacactccatcagcaagagactatgctacaccccaagacgagatgcagccaataaacatgtctatgtattgacctg

SEQ ID NO: 272619 - DNA, 428 bp, Homo Sapiens
tctcaaacccctgggtggcattagattcttacaggagcgtgaaccctattgtgaactgcacatgcaagagatctaggttgtgcgctcattatgagaatctaatacccgatgatctgaggtggaacagtctcatcctgaaaccatctaccccaacacctgtgtctgtggaaattgtctccacgaaaccggtccctgttgaaaaaaggttaggggaccactgctttatacagtgtttgaagtaggcacacttacagttactatttctggttctttatgactgttgaggggggcagaattctatgtttgattcacagtaaaacttttcatgaatcattgagggttaactgttatcacttgccaatggaaactggatattgaaacatttttttaagaaatgcacttttacctgaaataaaactataaaaact

SEQ ID NO: 272620 - DNA, 417 bp, Homo Sapiens
cccttttaagagagagacaaaagatttgactacaggagaaggcaatgtgatgatggaagcagaaactggagttatgtgctctgaggatggaggaaggagccacggagccttccccacaccctagaagctgaaaagagcaaggaaatgaactgatcctccctgctctgagagcctctgtaatgaatgcagccctgtggacccattttagactttaagcatccagaactttcgaatagatttctgtttttttaagagccactaagtttgtggcaatctgttaaaccagctgttacctaagcccttgatcctatgtagtgcgcttcccaaaatgtacaccaccacctttagtagaattgggaagttttagcacatacccatggagggaatcaggaataaaggcagactggtctcccaaaa

SEQ ID NO: 272621 - DNA, 421 bp, Homo Sapiens
  misc_feature (12)..(12): n is a, c, g, or t
gtgtgctctggnccatctgcctctctcatcccccatggcttgtgctcaggctactcctactgggaacaaggagagaaatgacccacttctgaccccagtagggatgttagctcctgaataccttgtctacttccccctactccctgcttctggctgtaccccccgccctgcaactgtggtcagtgtgtctggaagtattcaatgcacaatggattatgattatgattacatgtgtctgtgttttccactggaatctgagggacagaatacttgggcaatcagaagggagccacctaagccttctgcaaaaaccaccaccctttgagttttcaaaaagtttcagcaggggtcaagttctacttctttccggaacctgacctgggtcccgtactcattagagtaatctcgcaagccagtggtt

SEQ ID NO: 272622 - DNA, 311 bp, Homo Sapiens
tggactcaagtgataaacctgcagctgtcttccctgagtagctgggactacaggtacacaccactacaccgggcctctcattttgcttaatttatttaattaggcaactaattttgagggagggcagattttggaagtaaagggcatagatggttctgtagtatgcggaaatctgaagctttgctaagatgggatcaacatgaagcatctgtacatgtacaaattagcaaatgttaccatgactaacagtaaaatgaagaattaaggaaattataaggttaatttccttgaagtctctcagtagtcatttg

SEQ ID NO: 272623 - DNA, 461 bp, Homo Sapiens
  misc_feature (303)..(303): n is a, c, g, or t
  misc_feature (351)..(351): n is a, c, g, or t
  misc_feature (372)..(372): n is a, c, g, or t
atgagcctgcactcagagtggagtgttggctggaacatgcacacctgcaactgagggttctaaagtcataggttaggcccttctcccgggtaggctctggacatgcacaccaggagtgacgttcccaactctagataactatgtgctaggctctgggctaagtgctttacataatgttgctcaggacaacaggacaaccctatgatttaggtgcacccattctacttgggagggattgaggcttagatgttaacgtaactttgcctaaggttaggagccattaagtttcaggagtctgatctngaactccgtctacacctgcactgttccagtgtggtaggtcacctagtngacatggtgaccattttgaangttgaattaaaataagaacttcagttcccttagttgttgccagcttcatttcaattgctcagcagctggtctgtggctagtttggttgg

SEQ ID NO: 272624 - DNA, 387 bp, Homo Sapiens
  misc_feature (341)..(341): n is a, c, g, or t
ctgtcattcctaaaacacccttcagcaatgataatgagcagatgagagtttctggattagcttttcctattttcgatgaagttctgagatactgaaatgtgaaaagagcaatcagaattgtgctttttctcccctcctctattccttttagggaataatattcaatacacagtacttcctcccaggcattgctactgctcagcttcttctttcattctaatccttgctattaaggaatttaaggacttgtgcttacaatatttttgacctggaagtggatctatttacatagtcatttaggatccatgcagctttttttgtctttttaaagattattggcncataagcatatgtatactggtttatgggaacttttatttacactcc

SEQ ID NO: 272625 - DNA, 533 bp, Homo Sapiens
cggggcacccacacattggcccccaagataacaatacacgtgatgatgtcactagtactaccttcctagtatttacatacttaaaagtagtaactagaacagttatcactggaactaagaattttccccacagaggtgaacagaccaagaactaaaattttcaggaaacctgtttaatttcttttgtatctttgaaaagttagttttatatctaagatttcttcacataggttataattcatctgtatgttcaagcttttatgtaaaaatatatagtgccttcagttttaacatagtttcacatgttctcagaactgctaaattcagtgctaccagtaaggcttaataagtagttcattgaccctgtaagataggagcactcagctctgtcacaatttgttgttaaacacatcactcaatgtaagtataaaaatatttattgataaaaaataaacttataattcagcaacttgaagttccaggagcatttctgttgttcctatgtcagtaagcccttgatttttcacattaag

SEQ ID NO: 272626 - DNA, 414 bp, Homo Sapiens
  misc_feature (46)..(46): n is a, c, g, or t
ccttaaaggaaacatggctcttctcctcggtgccaggggtaactgncaagggcccgggggcccacccgctgaaaaaaacgtccttcccattgcgggctccccaacagtacccttcctcccttaaccacaagactgactcactggcccagtggttttgctggaatgacaggagagatgaaaataacccttgcagctgcaggccagggctgggggcagggaggagctcaggggaagcctggcccaggaggagacagaagctgggggacagttcgagtcctggctttgcactcactagcaagggggccttggccgggtcacagcacctttctgagcctcagtgtccttttccataaaatgggggtaatgtctacctttagggtttgggatgaacattaaagattccctgtgccgaat

SEQ ID NO: 272627 - DNA, 436 bp, Homo Sapiens
  misc_feature (16)..(16): n is a, c, g, or t
aaggaagtgtggtttnccccctagactgtccctaagatgtccctgagataacgggaacctcggaagtgctcccccaacacccctcctacagctgaagaacagggactccctcccccacttgacccagcattcctttggtttgggtgggatgagctcctagagcccttgggcactgcaaggaaactgtacatcacactggaggaagaattgaagcagacgtttgggtttaatgaaatgttaattcatgactagagtgtagccattatggtcatgggtgctcccatcagactgctggtcatgcaggttcccaggacccacactcagcatgagtcaaatcttgatagagtggctataaaaatgtaaatcaaaagattgttaaatgtcggccaggcgcggtggctcacacctgtaatcccagcgcattgagattaatgtt

SEQ ID NO: 272628 - DNA, 438 bp, Homo Sapiens
ttcaaaaatggtatttccagtaagcacgcaaagtgatcttgaattggaatattcagcttccctttggatgaggaactgatgcacttattttaagctgttcattctctagtagatgacaacatgaagggagaaaccgagaatcttggtctatttaattcagcttgcattcataataatatggaatgtttcagtataatttcaatgcaaaaagataatgtaaaaaggggttaggaaatctaaaattagaaaccactactcaaacaggatataaatattagatatgtgtacttctacttcctgtaagcaattagttttgtagtagacagaaatgggataactatttaggagcttaattttgtgttagactaggttgtttctgaaacttccctcctccagtaaaaccccgtgttttgattcaaaagaaaagggtagatatcc

SEQ ID NO: 272629 - DNA, 334 bp, Homo Sapiens
  misc_feature (13)..(13): n is a, c, g, or t
attcggcacagtncctctctaaactggctgttgtggctatcagctcctgtattgtttgatcatgattcttagcttctttgcattgggttacaacatgctcctttagctcaccaaagtttgttgttatccaccttctgaagccgacttctgtcaattcagccatctccacctcagcctgggttctgtgcccttgctggaggggtgttgcagtcatttagagaagaggaactctgactttttgagttttccagtgcttttgtattgattctttctcatcctttggggggctaactatcttcagtctttgagggttgctggacctctggaatgaggg

SEQ ID NO: 272630 - DNA, 422 bp, Homo Sapiens
  misc_feature (355)..(355): n is a, c, g, or t
  misc_feature (401)..(401): n is a, c, g, or t
attcggcacagaaggtttccagtgtgtcaccaacaaaaagtgcattgatagggacctttgtctcttcctccctttgattaattgcccggcatcacagtttactagattaccaagtgttacatcatattaaataaaatgtagcagaaccatctgcatcaatatattcctgtttagatttttgcaggagagaagttaaaaggatttgctccttgtatgatgtaagtggcccaccccaattttgtaacatgatgcaagttgtctgggcactaagggaagcaagagtagggttgtgggaaagaccaagctgatgggggaggggacttgtttacggggaatttttttagttttccttttncaaagggaaaacatttaaattcccttagggatttgggtatttcacntctcggaggaactacaacaca

SEQ ID NO: 272631 - DNA, 172 bp, Homo Sapiens
gactggaagaaaaatgtttcccaagcaaccagctttattctagctgactcactttgtactccctccttccatgtcattgctcctttttacctctttaggagtctgttaggaattttgcaacctgacaaaaggcttctgcagagccaaccaccttttttttcctcagggcctg

SEQ ID NO: 272632 - DNA, 473 bp, Homo Sapiens
  misc_feature (20)..(20): n is a, c, g, or t
  misc_feature (27)..(27): n is a, c, g, or t
  misc_feature (32)..(32): n is a, c, g, or t
  misc_feature (60)..(60): n is a, c, g, or t
  misc_feature (87)..(87): n is a, c, g, or t
cctgaaaaaaaagtgagtcnccctacngaccnggaaattaaaaaagggaccctggttagncaattttttcctgtatgtcccaattgntctggtatattccttttccttgagtataaggaaaagtctgaaaataatggtaaaagtgtgagattgctctgatatttccttttggtactttaggaggtggttctttgagttcctaagttgtttagttgaacatgaaagcaggtggcaaatgtaagtttagtctacacactgattccttcctgttcgcagaagggttcatgtgttcgtttttaaataatcttcgggtaaggaatagagaaacaccaagcccaagaggcagaaggatctgtctatagctaatgagtgagaaactaactgtgggatggtttatggtctctggctctttgaaaccacagaaatttaaagttatttttaaaaagccaacttgactgggcacagtggctcat

SEQ ID NO: 272633 - DNA, 328 bp, Homo Sapiens
tggaacaaaatcgctttgagatgccctctggtgtgttgctgtgtgacatctctctggtaacattttatttccttgctatttgtttttcctacattaagagtcaaagttgaccctggctggcgtgggggtgggggaggcacccgtcggccccttggtgttgtccctctgtctttggttagccatacgatgtttgttctcagcactgtacaacggtccctatataatacggagaagcaatatcactgtatgagactcacaccatgtattattattcactagcaccctaggtgtgataattgaagtaaatatcttttatacaacagaccaa

SEQ ID NO: 272634 - DNA, 758 bp, Homo Sapiens
tctcgtcttgacctcttcctcttgaccttgagtcccttgagtagggggactctgtgttggtcaacttctattttcaacctcaaagaaagttggagaggactcctgcatatgctgtaaagggtgtcctctcagatttactgatcgaaatagacaggggcagttggctgtgcatcaatgcagaatgacaaacagcatgtcagggcatttgtgatgccaatagtggcctttgaaagtctactttgtgcaacctaacacattgactagggcctgtgacctgacccactcctagagaaaggggaaaaactcatgagcttgcctgccaggtaacatttctgcctcctcctttgctccaagtctgctctgagagccagcgaagtctctctcaccagcctatcatttgtctgactcaggcttttgtctggggctgaaggctattacattttgaggagaatgacatttctctgggaaccctgggggtctgtatactgagtgactgcccagtgagccgggaaagcaaagtgtgattaatactttggccggaaatacgacagaaaagtgatgaaacaagtctccatcttgctccttgctcctcttccctttctcttctcccacacctttgctctgctcttccactcttcaccctaaatcagcaaccttcaagtgatgatgacaaaaccataattcaggagcacgtggtcttcagagaacttcaaagaaaatgagcaaaggtaaaggggtgtggtggggaattggatctg

SEQ ID NO: 272635 - DNA, 482 bp, Homo Sapiens
  misc_feature (15)..(15): n is a, c, g, or t
  misc_feature (31)..(31): n is a, c, g, or t
  misc_feature (425)..(425): n is a, c, g, or t
gcccacatctgccancgatgttaacactganggctccaggaaaggaacacatctgccagagttgttacactgaaggactaataggaggggaatgtgtctgcacagatgttacactgagggctccaagagggggatgcatgtgcatgaatattacactgaagcctacagcaggggaacacatctacacaaatgttacactgagagctccaggaggggacacatccgcacagatgttacactgagggctccagaaaaggacacatctgcagagatgttacactgagagctccagaaaaggacacatctgcagagatgttacactgagggctccagaaggggacacatctgcagagatgttacactgagggctccaggaaaggacacatctgcagagttgttacactgaggactataggaggggaatntgtctgcacagatgttacactgagggctccaagagggggatgcatgttcatgaattt

SEQ ID NO: 272636 - DNA, 598 bp, Homo Sapiens
  misc_feature (347)..(347): n is a, c, g, or t
  misc_feature (416)..(455): n is a, c, g, or t
  misc_feature (526)..(527): n is a, c, g, or t
attgattgaagttgggataatggaattcattcttcccttttcagctgtttctcaaacatctctctggctgtgaacttttttcagagcttgaggttaatgcccaaaccctgtcttgctgtcacctcaaactcagtatatataaaattacattattttccttcctccagtctttcacttttgttaatgctgccatcactgacagtcctcaggcacaaaaccttggtgttaacttgcagtgttcactccccccgatccctagggtgctgtatattccccatttatgtgtttgagggaagttttctggttactgtttcacctctgctttttgcctattgacattttaagcncagccctcagggccctgcctcagtctttctcttctgagcacgaagctgaatttccatccaagcaccccnnnnnnnnnnnnnnnnnnnnnnnnnnnnnnnnnnnnnnnnagaccagcctggggaacatggtgagacactgtctctacagaaaataagaaaaaaattagctgggtgtggtnngccaagcgtgactccagctacttaggaggctgaggtgtgggaggaccgcttgagcccaggaggtcatcgct

SEQ ID NO: 272637 - DNA, 168 bp, Homo Sapiens
gataaagaaaatgtggcatatatacaccatggaatactactcagccataaaaaggaatgaaataatgtcttttgcagcaacttggatgcagctggaggccattattttaagtgaagtaactctagaatggaaaaccaaatcttgtgagacctaacctatgaggatgca

SEQ ID NO: 272638 - DNA, 343 bp, Homo Sapiens
  misc_feature (245)..(245): n is a, c, g, or t
  misc_feature (319)..(319): n is a, c, g, or t
gcataaccaaaataaacaaagcaagacaaattaaaaatatgtgggggagagatcagtgaaaagtggttttcttaatgcagccctgctggtccccattaacaattgcttgaaattcacatggatgtaaaattataattgtcaggatcttattcagatgatcttttaaggtttaactgggttttgcttttgtttatctatatgtccaaaatacttgtaaattgggggaacaaactttctcttcaggnttcttggaggttgttccaacttatccttgccactgggggaggacccaaacagggtttttcactggcttttttcntttttacataatatggctggaggg

SEQ ID NO: 272639 - DNA, 376 bp, Homo Sapiens
cctggaccaggcctaggcaagtggggagaaaaggaggaaaatgccccaacaatgataatctctcctttctaaaacttgggtgtgaagcattggtcatcccctgttgtcagtaacacaagctgtcattctgcagagctagtttagccattcccctaacagacagctagttaatagtctcccttctgtggtctagcttcaattatctattcctcagacattgctggtgggaatgtaaaatgttacagccactagaaaaacagtctgatagtatctcaaaataataaacatagaattaccatgtgactgagcagttattcctaggtatatgtatttccaggtatagatcctaaagaaatgaaagcatacgttcaaacaa

SEQ ID NO: 272640 - DNA, 469 bp, Homo Sapiens
  misc_feature (51)..(51): n is a, c, g, or t
  misc_feature (133)..(133): n is a, c, g, or t
  misc_feature (152)..(152): n is a, c, g, or t
  misc_feature (155)..(155): n is a, c, g, or t
acatggctccctcaaatcctcgtctaggaatcaacgtctcttcaaaaaacngaacaacatccttttccctccagggtgaggtacttcaggctctcatcatcccaaagtgaaagcttctggagcgaagagctgnctgcttcgactccttcccntgncgcctcctgctgaaaggctcggagcctgcagctgggggacgtgtctgagttcatgtcagatgcgtctgatttccggtgggttacaggcatctcccacagagtccctcagggccggctcgatcacaggaagcagggcaggagccagcagccccattctgcggcaacagctcactcctagagaggctgggttttaacaggcctcgagggaagaagtttcctagtgtcggttcgccatcactgaaaaagataccaaaaccagattttcctaaagtaaaatctcacctgaaaacaatcttgaccagacatctgattgg

SEQ ID NO: 272641 - DNA, 436 bp, Homo Sapiens
  misc_feature (266)..(266): n is a, c, g, or t
gagactgcatagggctcggcgtgggaacagagcgcaggagtctggggtgctccaccggcggggagggggcgcgcagtccctcctggggggatcgggggtgctaggcaggggtggtggcgcaagaagggtctcgggagccggggggtctggaggtggaggagtctcagcatcttgtttcctgtgctccttcccagcaggtgcaggccctgctgcctgggtcccctctggaaggccctcggcttccccggcgccagggtgctggctgncactaagtcgatgacatcttcaggctcggagggactggaggtgctctcctccagagacggggagcagaggcagcacactcctccatcgcacagcactggctcctcaaagtcctcggctagggagtcaatcgtctcttcaaaaaacaggagcacatccttttcctcatggg

SEQ ID NO: 272642 - DNA, 441 bp, Homo Sapiens
  misc_feature (76)..(76): n is a, c, g, or t
  misc_feature (262)..(262): n is a, c, g, or t
cccaggaggttatatcacgttaagaaagcttcccctgacgccgccctcctgtagcgcagccaaagcgagcctgtgnaggtacccatatgactgtaggcctctggggacagggagctgcatctgcttctcaaggcccagggacacagccatttctgcccagcatctgttgatcagtgagtgagtgagtgggcaggtagagcaggagccagtgaagagcaggccctggatgggtggggatgcaccatgtcccccaggctgcaantgcaggcagccccccacattgtcggagaagcctctgcaccagctcagccccctcctcactccccttgtgccctggggacactctgcagaggggcactctgcagtctgtccccggccatcgctggacttctggacatggcctccagatttgcacctcttaaataaaactgcagtggatgt

SEQ ID NO: 272643 - DNA, 409 bp, Homo Sapiens
  misc_feature (119)..(164): n is a, c, g, or t
  misc_feature (188)..(225): n is a, c, g, or t
ttttaacaattagctgtgtgtggtgatgtgcacttgtggtctcacctactcaagaggccaaggtgagaggattgcttgagcctgggagctcgaagttactgtaagccctgcactccagnnnnnnnnnnnnnnnnnnnnnnnnnnnnnnnnnnnnnnnnnnnnnnccaaccaaccaaccaaagaaacannnnnnnnnnnnnnnnnnnnnnnnnnnnnnnnnnnnnnttaaaataataagagggaagttgatctatgaaaaaccaagcatataagtattaaattaataaaagtcatttgatagcattaatgtaaaccttaattttgaataccaaatttaatattgctcctcatcttttgatttctaaactgtgttgagatattaaagagagacaaatgaataactactatc

SEQ ID NO: 272644 - DNA, 428 bp, Homo Sapiens
aagggaaagtggaatcacattccctggaagcctcctatttgtgaggcaccagctgaaaccctgagagccaggtctctgagattccccatcctgccgttgattcttcctagtgggctaagtcccaactcccctactgtctggctgtaggatccctgaacaaattaatgaatcaacgaatctggagtccgaatattatgcacaccatacagtcataatgtgtcaaacaaaatgatgtgacccacactgataagggctctacagaagttagttatgccttaagacactgagggcagtaatctgtggatgagttggcctgaagggctttgagggaagggcatacggactgtcagaaagacctggaagatagcacctgttgccttaagagatatgcagagcttctggctaacacggtgaaaccccgtctcacc

SEQ ID NO: 272645 - DNA, 361 bp, Homo Sapiens
  misc_feature (35)..(35): n is a, c, g, or t
ggaacctggggataagatgtatttaagggtccccngaaggttaccgaatacgggccatgctgagcggggaaagtcccagcctctgcccccgggcttccctcaccctgatgcagttatttccttgttaaagattccactgtaaaatgcccaaataaacttaataactaactaataaccatctttgtcagttgaggacacttacattttatgaattttggggaaaatataggaagatacctgaggaaatagaattttcaatatcataggtctagcttttgatattacagaatttttgtgcacatgtggcaatgtgcttgctttggctttctaaaaagaattcaggtagcggtagacatcttgc

SEQ ID NO: 272646 - DNA, 536 bp, Homo Sapiens
agatgagaaggatgagaaaagtgagtacttctccttcataaaagccacatgaattgaacaagacttcagaattcagaagaactacatcaagttcttgggtcatttttttaacccattctccaagaattgaaaaaatgaccttgcaaatatgtgcaagactctggaatcttcctttggcagatgatgaatgagatgaatatttccaggtgcttgccttcagcaccagcacatgtacattctagtactcttggccttgatcctacactgaatctgagggtgcaaggactttagatagaggctcaggacagactggacctgtatgaacctctgaattgtagctagcctgggcagccagttacttggatccctctggggcttctggacaaacaactcttttatagcccaaggtagatggtcaggggcgaccagagagagcaatagattcgttgacttcaagcttaacatgagttagcagtatggtgaggttccagcaaaatgtaagcactcaataaatgttagctattattactgtgaaa

SEQ ID NO: 272647 - DNA, 754 bp, Homo Sapiens
  misc_feature (223)..(223): n is a, c, g, or t
ctacaaattaagttacgatagtccctataccttaggatgtagattctaaaatgtttacagttggtttgcaaaccacccatacataagattacaagagtatttccagaatgtgccatttgtaattacaaatattgctctcggtaatgccgtcagttgtgcggtgccattgatcaaaaagaagagatctatgtatgtggcacttttacaaagagagggtttaggnttcccagaaagctaaaagcggttttaaaacatgctgagacaatagccgcccctcctcaacgcctttaaaggtgaccaggtagcttctggggctcggggaaagctttcggcaagtatgtcacacacaccctgcctgagtaaagcgctgcccctttgatggccatgaatgagctcagatgcactctccaccctctactatggttcctcccattgtcacccacgagcctgctggatagagtttctgatggctttcatgatcatttatgtaatttctgtttcatgtatgtaatttctgaagtttccaaagtgcccatatataaattctccttctttgtgaaggtgggaagggagggcaagcaggcttccccttgacagatgagacttagggcagttcagggacactcagctggtagatggcagagtagattcctacaacccagtctttcccttccagggcctgtgctcttcccaccctctgctcccttccaagaccctatactgttcttgctaccattctcatcatttcttccta

SEQ ID NO: 272648 - DNA, 462 bp, Homo Sapiens
cagcagggaatcccaggcccccccgccaagtggttacccaagtcaccactcctgacccaaaaatcaggcatggcattaaaacgttgcaaattcctttactgttatcccccccaccaccaggaccatgtagggtgcagtctttactccctaacccgtttcccgaaaaaggtgctacctcctttccagacagatgagagagggcaggacttcaggctggatccaccactgggctctccctcccccagcctgggagcacgggaggggaggtgacggctggtgactgatggatgggtagtgggctgagaagaggggactaggaagggctattccaggctcagccctgctcctgcagctttgccgctgagtgtaggaaaaacaggcatgacagaccagggtgagggttgtgcccagctgggccacggccatgcgtggggtggcccaataaacaccgtggactcccaa

SEQ ID NO: 272649 - DNA, 439 bp, Homo Sapiens
  misc_feature (20)..(20): n is a, c, g, or t
  misc_feature (27)..(27): n is a, c, g, or t
  misc_feature (33)..(33): n is a, c, g, or t
  misc_feature (58)..(58): n is a, c, g, or t
  misc_feature (70)..(70): n is a, c, g, or t
  misc_feature (79)..(79): n is a, c, g, or t
  misc_feature (129)..(129): n is a, c, g, or t
ggtatcaatttaattaaaanggtaaanaaaaanaaaaaggtaaataaaaggtaataangtcaattacaanaaaaatcantggaaagagaaaaagaccaccaaaactgttctttgcctaataattattanttccatgaaatcttaatcaagacgtgtatttctctcctctcatgtgcaggcaccttccctgggcaggaagcagacctagcagaactgcagtggtggccctcaaaccagcaccccctcttcctgacagcacaggcactccccccggagcctgcgccacagtgagaccagctctatgcagatacagctctgtcctgtgagggggtgagacacaggctctgctggggactgaggctgccggctgcagtttcttaccgattgtagttgtccatcctccccaaatatggcggggggcagaagagagtggacacat

SEQ ID NO: 272650 - DNA, 400 bp, Homo Sapiens
cccttgccatataacgccctcactcaagggctgagatatcaaacagttaagatcaaaagaggacacttcttttttaaaaaataacccatgtccctgacacaagattagcaatcaaataaattcccacagtcctcttattcactaatttgcccagcatcactctcagacagggtatgcctaaacttggtgaaggcaatcctatgaataatcaggtcaagacttatgacacaagcccatgtgtcctgcttcctagaaacatcagagggtattagggaagcttccattgaggaggtgatatccgatcaggttggggaatactctgaaatccaatctccgaaagattcccagtcagggcaagatgagtttgtggaaatcctggtatttcagagtcttggaaacc

SEQ ID NO: 272651 - DNA, 366 bp, Homo Sapiens
  misc_feature (13)..(13): n is a, c, g, or t
aagtgggaatttnaaagtccatttaccttgggcccttgccagaggtagtattaaagagcctcccatagatttagagaacgagcctaactcatttttcctcaaataccttcccccattcatactcccaaatgatggcattataccataaatgtaaaggagtacagcgtaagtatgtagggatatacaaaaacattttgggactgagttggacatgataccattgatatcacttaaatgcaatcctgtcacttgctaaggaagaaaaaattaggcattcctttgaagaagtaatttagccaatgcataattcttcattttttggattagttcaggttggaataaatgaaagatttgttttataggaaa

SEQ ID NO: 272652 - DNA, 227 bp, Homo Sapiens
agactgcatagggtcggcgtggtttgaataatttcaagtgggctctggggtcgcatttggtctgctccagggcacatttggagcagtggctgtccctagatgtctggtacctagcccttgagtggtcagggcaggaggatagtagcccagagtgtgagagccccacagaggagatgctggggtaggagctctgtactgatgattttgcatttcaaaggtgaatttgc

SEQ ID NO: 272653 - DNA, 431 bp, Homo Sapiens
  misc_feature (26)..(26): n is a, c, g, or t
atcttaagctatttgggtactccctnccctccgggaatctgtctcctagattgtgaaagctgtcagagaatgggagtcagggaaagccgtgatgggaaagttctcactaataattgcctgatataaagaattagcacaaaagactgccaaaaccacaaccttgcacaaaggccacaaaactacacaaaaaaatgcttcaaggacatttgcgcagcaactgcctgtccaaccttggactggccatcccctttgttactgatctttgtagccaaggataattgtttcaaaacaacttacgtaatcctcctcgtttttccttttaaaccccttatcttcctttacctccctgaatacacctatagtttactatgacaccatattctacattgcaatgcccactttcaaataaatttgtcatgtttggcaaaaaa

SEQ ID NO: 272654 - DNA, 360 bp, Homo Sapiens
  misc_feature (69)..(69): n is a, c, g, or t
  misc_feature (81)..(81): n is a, c, g, or t
ccctggcccccaaatccacaatcccccttcaagaatgggttttccattaaagggagtagaatagtcacntaaactggggcncctaacattgcctaataaccctgtggctcaatttccctcaactgtataatgaggttacctacctagtatcctacctcaaagcgttgtcatgtggattgagatgatatgtatgaatcacataaaagagtgcctggcacatagtaggtgccattaataatattactattgttaacaccttaagggtctaacttgtaatgaagacagaaatatgtatgaggatgatcactgaaatatttatgacagtgcataatttgcaaaataaaaaatgtacactagcaa

SEQ ID NO: 272655 - DNA, 415 bp, Homo Sapiens
  misc_feature (120)..(120): n is a, c, g, or t
  misc_feature (136)..(136): n is a, c, g, or t
taatggcccccttccacctagttggggtatttccctataggtattttccctataaccttattttcccccagccctcagcctcaaccatgacctttcctccccaagtagcctccctcaatncctttaagcctcaaancccaattagcacaggggccctatgaaaccctgacaatttgcctcatatggagaattaggaaatattgcactttaatgcataagacaccttgtaaaatacccataaaattttaactggctgcagtgttaatgaagcaaataccatggagttataatagcttttgaatgtgatttatgcttacagctaatgaacagatgaaaagcactgtccttttttaagtaaacactacacactccagatggattgcaaaaatttattaaaattggagacactgtttta

SEQ ID NO: 272656 - DNA, 144 bp, Homo Sapiens
cactaacacttaagattttcctggccaggcgcagtgctcaagcctgtaatcctagcactttaggaggctgaggcgggaggacagcttgagcccaggagttaagacgccagcctggacaacatggtgagaactcatctaaaaaaa

SEQ ID NO: 272657 - DNA, 204 bp, Homo Sapiens
gtgagagccaccatgcctgggcctctaccacctttggttttattgatccgagctgttttcttcgtgtgactgatactgggtgggattacccaacagccattttaccactcaatcctgctaacaagaatccagattttgtagcctgtgaaaatcttttgagtttaggaaggaaagttcccttccccccttccccaggcccggggg

SEQ ID NO: 272658 - DNA, 698 bp, Homo Sapiens
  misc_feature (228)..(228): n is a, c, g, or t
acacaaaagctttccattcaacaaaaccttcaggaagccctttggaaagaaaacacgatcagatgcaaatgtgaaaaccttataatgttccaagacccttgcaaacggagaagtaagaaaattaacacagcgcttagaagaaatgacacagagaatgaaagccctggaaaatcgcttgagatacagatgaagattagaattcgcgacacatttgtagtcattgtatcncggattacaatgaacgcagtgcagagccccaaagctcaggctattgttaaatcaataatgttgtgaagtaaaacaatcagtactgagaaacctggtttgccacagaacaaagacaagaagtatacactaacttgtataaatttatctaggaaaaaaatccttcagaattctaagatgaatttaccaggtgagaatgaataagctatgcaaggtattttgtaatatactgtggacacaacttgcttctgcctcatcctgccttagtgtgcaatctcatttgactatacgataaagtttgcacagtcttacttctgtagaacactggccataggaaatgctgtttttttgtactggactttaccttgatatatgtatatggatgtatgcataaaatcataggacatatgtacttgtggaacaagttggattttttatacaatattaaaattcaccacttcagagaatggtaa

SEQ ID NO: 272659 - DNA, 444 bp, Homo Sapiens
gaagagataaatgaagagatgttcgttttataccatctgccatttgtaaaatataaaatttcttaagatcttggctgtttgggagactgcgtatgtagtggtgacctatcatggtttttgatcaatcttgtcaaaagacttagcttgtctgtcatggcatttcagatgagtgaatttcagatgttataaagctgggtgcacacaattgccaaccacagtgatatatatttatacattttgctttttgacatacttctttatgagtatgggtttgtctgctcataatttttatacctcttgcaactgttgttagtataccctgagtgcttatgtttgcaaatgtatgtatgttattaatgcctattttgttgtatacaatggcctatgaagtgttctgttgtgtttttatgtttatcaaataaattcccctttaaaaatgtgaaa

SEQ ID NO: 272660 - DNA, 332 bp, Homo Sapiens
  misc_feature (183)..(192): n is a, c, g, or t
ttgagagagagagaactgggaacattataatatgttaactgcacagctgacatgtaaatagtttgactctctcactttccactagaggctgcaaagccaatgttataaatgtaataaacagactcacagagttctatacgagcatagtatttgctgttatactacaattttaaactctttaannnnnnnnnnccattttcatcccaccctaagctttgtttcctaggaatttcctagatatttttcaagtgatggtaaatgacactcgaaaggttttcttgccaaagcttggcttcttctgggtatatattcttcatctctctttttaaaaa

SEQ ID NO: 272661 - DNA, 896 bp, Homo Sapiens
ctggggagaagaacagagagaaagcaaaccaatagtggttcttaatataatttcaggaataaatttgttcagtaatcacttttctccttcccctcatcttttggctctcaggcccaagaagccatacaggaataatcaaaatgatcaactctttccaacaggactcaacttaccaactgatttcaagaaaagtccttctaaacttcctgtctctctccctttccccaaacatacacacattcccaaactctggtcaattttcagtatttatggtggtggagccccagctcatggcccccatcaaaagtaaaggaggatatcaatttagtgtcatagtatgatgtatatggggttttttgggatgggggggatggtcaggtgcttcctccagcttttgaggagacagctgactctgacaaaggagccctcccagtgggccacatttcagggaacaactgcgtctctgcactcattgcctttaaattccagacaattgctattcaagttctaaagatgacaaagactttatatagtccatttctttcaagctgctcatgagtggtgggtggtcaagctaggcacactaatgcaatcaaccacaaagtgaaccgtgatgcaccaactacaaaccctggttacttaacatgcataagtatattcatccccagcaatatcagatttttctgagatcaaacaattcagaaggcagaagaaagggggcaaaagacaggtatttagaactacttgtggtgagtgagtctgagtgtagaaaggcaccccacgtacctggcgtagactatagtgcctaagtttccttactccaaatctccagcacaaaaccatgtatttcaagagtaaatacaaacaccatttgcaaatactagctgctgattttg

SEQ ID NO: 272662 - DNA, 504 bp, Homo Sapiens
cacttgggccattttggaacccatttatattgtgggtgttactctgggcttcatctagccccatactagcctctgagactgcctcagaccgtctgaacattcatggcttccttgggccaagtgtagctgtccagtgtaaaggagtcatagtctggagtgtagaccagggatcttacaaaagcctccttgtccttaggctctgggtagtaggaagccaggttgtgtttgtacgcgtagtcgagaactttgatggcaattctcaaagacacgtctcggatggtgctgagtggtgggtagagtctcccctgggacagatgctgctcagagacttcctgggcaatttgctctgctgtcaggaggaagatctcatctgggatgtgccggatcccgccggcgaatgactcccagtgccaccccggggaacacgtaagcattgtttccctgcccaggaatgaaggtcttgccatcttccagagtcacactcttaaaagggctgccactggg

SEQ ID NO: 272663 - DNA, 420 bp, Homo Sapiens
  misc_feature (332)..(332): n is a, c, g, or t
  misc_feature (339)..(339): n is a, c, g, or t
  misc_feature (356)..(356): n is a, c, g, or t
  misc_feature (378)..(378): n is a, c, g, or t
  misc_feature (389)..(389): n is a, c, g, or t
  misc_feature (408)..(408): n is a, c, g, or t
agaccatggcttcccctgctagagccacagaggcagacggctgggtccctagaggtattccccacagcccaacacactggctttggcagattgcggccagagtgcctctttaggcctgaccgtaacccttccctcctcattgagtggggcctccctgcaggaactccaacaactccagccaggggttcaaggacagaactctgatctccctggggactgagcccctaggggagggcttggttgtagtctccatgggaccagcagactttagtcttttcctcctggctaatttccgagggattccggggcagcccagttcaagtggggttttncccccantttgaaggaaaaacccnttccaaccaaggggacaagccnaagtgtatttnttttaaattgagtttttgnttccccgtgggt

SEQ ID NO: 272664 - DNA, 356 bp, Homo Sapiens
  misc_feature (311)..(311): n is a, c, g, or t
gactttgggcaagtcactcaagcaccttcagtcttttcggttataaagtgtaggagtcaggctgtatcctctactaggccacagctctgtcaaggtaggtctatatcttattaatatttgaggtttcagtcataagcacacaataatatttttggtgaattgaacatatgtagtgggatggatgactgtatttatagttgaacagggagactgactcatttttctcaatgggaaggcactatttgcattttagggtagggatagttctttttgggttctgtagccgtgtgtcacctttgggggcccctagngacttaaaggcccagcagtaatccccatgtgggttttctaccaaa

SEQ ID NO: 272665 - DNA, 412 bp, Homo Sapiens
  misc_feature (19)..(19): n is a, c, g, or t
  misc_feature (26)..(26): n is a, c, g, or t
  misc_feature (32)..(32): n is a, c, g, or t
aaaggccaattaaaagccnagggttncacttnccagcattttaacagctggggaaaacaggctggatgaaaggcctaaaaaaaggtgcccccgggtccacaagaattaagtcaagtggcagtgcccaacattcctgagaaaggccagtgtgaactgtcaatttcccaacagaagcaataagtcccaggccctgggttgtctggggttgatacctcagaccctgcccaagtcatatcagggtgaacaacttggcatctcaccattgcttccccttactcccctttagctggctttttaacacactgaaggcacaggaacccctttcctacttttttagtttctcctttgccacctaatttttaaaatattaaatatcaaatctaatactaaaaatcaaatatgccatcccgat

SEQ ID NO: 272666 - DNA, 188 bp, Homo Sapiens
gcatgccttaggaagaagcacataggtaaaaccagcagtttccagtaatatagggggtttttgagcaaggcccctggagcagcggagagacaagatggagcacatgtagtctgtgtgcctggtcacacagaggcctgcatgcaagtagcaaagcagctctcaagggcttgtcagtaaaatatattaga

SEQ ID NO: 272667 - DNA, 712 bp, Homo Sapiens
attctgtcctggtgaagttccactcggatgacaccatcaccaaaaaaggtttccacctgcgatacaccaccaccaagttccagacaacactccacagcaggaagtaaccactgcctgagcagggacgggaactggagcctgctacccttggtcgcctagactggatagtgggggtgggcggaaggcaacgcaccatccctctcccccaggccccaggacctgtcagggccaatggcctgggttgagactgttccattaggaggtgggggaactggacttccggcattaagccacttccccacaaacccccaccagcaaggggctggggccagggagcagagcttccacaagacatttcgaagtcatcattcctctcttagggggccctgcctggtggcaagagggaatgtcagcaggaccccatcgccatccctgtgtctctacacgctgtattgtgtatcaccgggggcattattttcattgtaatgttcatttcccacccctgctccagcctcgatttggttttattttgagcccccattccaccaacccagtttcctggggcacaagtgtctgtgcatgtcccccaggagccaccgtggggagccgatggggaggggatggagaaacaagacagggcttctctacagcccagtggccggtcagccacaccagggcaccgcagccaataaaccgaaagtgttacagccaa

SEQ ID NO: 272668 - DNA, 529 bp, Homo Sapiens
  misc_feature (130)..(130): n is a, c, g, or t
  misc_feature (162)..(162): n is a, c, g, or t
  misc_feature (168)..(168): n is a, c, g, or t
  misc_feature (184)..(184): n is a, c, g, or t
  misc_feature (223)..(223): n is a, c, g, or t
aattgtaacttgacatttaaaatgcctccttaaaacatcctcccaaaatacgaaaaaatacactttaaaattcaattatcttgaatgccatgatggaaatgaggccaggaatgcaaagcccagtgcccanctaagaacacatgagggatggggggcaggggnagctgnccccagcctcacagtnccccatggcaaatgggggttccttgctgctgctgccccnagaacaccttaaccctgtggggcaaaagattccccccaggccccacgggcaagagtgcctattccccaaaggtattttgggtagcaggagggggcagctgcccagaagacccaacaggggggacaggtcccagagaggcaggtattgttaggttcacagcatctgcaggcagctccttgggcaggtttactttaccagcatttcccttagccagatcaaaacctgggttgagcttttgaggtgactgaggctcttgcagaggcaagtcctcaaacaaactgatattgcaaaaacctttagtatctg

SEQ ID NO: 272669 - DNA, 499 bp, Homo Sapiens
actaccaaaacacacagcatcatggagcatatcacattcagattgttccatctgattcatatgttttttctaaaattcaaaagatcttaaatcagtaagtagtttcatccatctgtatgtggtaaaagtctcaaaggtccaaaatcagtctaaggcatgattctttttactttgcccataaatataattaagtgtgagtgctgggctccagcatttatagtcccattaacctgccaacaagaatcgtttattagcaacttaagatattcagaggccaaaacacatttccttggcacacgaactgcgcagagacacagcatcttctcctttcctttcaagccgttatacaggaacacaccgaaaaacaactgtgcgcattttggcctgtagacaagaaagtaacaccaaaacttgatgttcctggctatgcagactccttgagtgacgcctgtgggcatattacaggtgggtttctgcaattctctggcctctgttcatt

SEQ ID NO: 272670 - DNA, 564 bp, Homo Sapiens
  misc_feature (545)..(545): n is a, c, g, or t
aatagcagaatatgtaaatgcttatagtttgaagactcggacacataaatgggatttgacctcattccaacaccttcgagaaccttgtggaactcttccttaaagatttgtttcatcttagagaagaatttttcctgctagtcttgatctctgacactcattgcattgtcgctttctgataatagtctagcaatgcagtatttcagtgctgttccttttagacatacgcgaagtagtcctcgatgacacatggagcgtttctatcatattctttcttaatttatccagattccaagtggtggactcacggaaatctgccgaaagcccgtctctcctgggtgcatttcggtctgtgtcagattggctcatttccatcggtctgcccatgtacgccggcaccctctccaccgcgggcttcagcacacttgagccaagtgccttctctgtctcacacttgccttcaggaggccgggcatcacagaggagagacacataaggaaagctcctatctgcagccagactcttcaaacttgccgccgggctgnagggcattgtaggccaggg

SEQ ID NO: 272671 - DNA, 569 bp, Homo Sapiens
acagatgaggacgagaagtctcagagaggtagaaatttacctgctgtggcacagctgctcagcaagtggtcagggccaagggctgcaagtgaattctttttaactatctttctgtctgttccttagcttactttcaggtttagattgactttgctttgttgaaaatactaatggctcacacacataaaggtcagacatgatggagccctttcctcgttttagaatttggtccttgttacagccctgtgaagatagtgacataattatcctatggtattagtgaaactgattttctttaagtgtgcccctgtcattacttgtcacttgccttttgaattaaaataatgctacaagaactgctttttaatctatatattccatcattcaaattcaagtgtcttaagccttttacataccaaaataggtatatttgaatacaggagaagtcaaagaaaggcaatctggaccagaattctgatttttctgggtagtaaagtttccttcagaatgctggtggccagcataggattgccagttctttattttgccaagtaagaacattaaaaaaa

SEQ ID NO: 272672 - DNA, 429 bp, Homo Sapiens
caaacacaattgaggcaccgccctggaggacctcaccaagacaggggtaagctgggcacgaaggcagacatctcacaggtcaaccccggtgctggtcaggagccatgactataggagctggagggagcgaggaggccaccatgcgcagcccagtggccctccttttccagcctgagccagcactgtcaggcgtagagcgtctcggattctgcaggtgcctgggtgggaacaccttggtatttctatcaccctggggtcttgtaccacttgtcagcttggagcgggagcttggtaacagttgggcaacttcagcactctgggggaaagaagtgcattttcagaagcgtagggacagtcaggagaaatttgctcaaatgttgcttgggcacagtcgctcatgcctgtaatcccaatgacttgggaggataa

SEQ ID NO: 272673 - DNA, 159 bp, Homo Sapiens
ccccaccccaaaccaatacattccaaaaaagcagacattgtacgggttctaatctctggctgcaagtaagcataactggaattaatttttaaaagcttaactgaacaagcatgtaagagagactcctaccacttgataattaaaaagaaaatgaaaacc

SEQ ID NO: 272674 - DNA, 337 bp, Homo Sapiens
  misc_feature (25)..(25): n is a, c, g, or t
  misc_feature (136)..(136): n is a, c, g, or t
ggaaaatacctaaggccagccaagngacattccacctcccccaaccccacaaaattttaatacctgggaatatgcctttaaatttcctcattttcctgccatgggtccctttacattgtcatttttccttcaggtnctgttcctataaaatgtattccagacttttattcagagatatctccttattctggggctttttgcattaagaaacagtataatgtcatctaactcttaagaactacattgtattaatgtgcagattgaatagctgttaactcttaggttttacattggggtagtagatcagaagttcttaagaaataattgcttctattta

SEQ ID NO: 272675 - DNA, 392 bp, Homo Sapiens
acgcataatcaggaagtgaaggcaaaggctgagtagtaaactgcctggttgagtgttgaaggtatcctcccacccccacacacaatggacacagagccccttggctaggagtggatgatttattagttccaagtgttgaaggatatttctattcaaatattaattggccactaagctaactaagcattcagtggctacacatgaccgtagaatacagattttatggaagtaattcggaaaagtgaataaacaacaaataaaataacagcaataatagcaaaccatggagaggagggagaatctgattcccaggttatgatattcaaaatcttcaattttcaattagaaaattacaaagcatgcaaagaaacatcagtggcacataccaggag

SEQ ID NO: 272676 - DNA, 390 bp, Homo Sapiens
  misc_feature (333)..(333): n is a, c, g, or t
  misc_feature (373)..(373): n is a, c, g, or t
cacagccatctttcaggacacctgcttgctggggtgcagttagaatacagccaccaagttgtgactccctcccttccagcctgccaggtgattggacagtgtggacacgtgtccctgtccagccaggctctcagagctgtggcacttcatttattcctcagaagtgtgtctgtcctttcacttcagggaacatttgccaagtgtgttcaaatggggccatgtctgctagggtgcttaggaaaaccaaacacaatttgagggcaccgcctggggaaggaccttcaccaaggacagggggttaaggttggggcacggaagggcaggacatcttcnacagggttcaacccccggttgcttgggtcagggagccttnatttttggggagcttgg

SEQ ID NO: 272677 - DNA, 389 bp, Homo Sapiens
  misc_feature (302)..(302): n is a, c, g, or t
  misc_feature (361)..(361): n is a, c, g, or t
  misc_feature (371)..(371): n is a, c, g, or t
gaaaatttcaatctaagtaaaacaaaacacatggaatctattctgttagtatggcaaaaaggcaagatttttttctttatcctgttaagtccttttcttaaatgacttaatggactgaatagtgagcactctgccatgtaatttagtagtaaagtgaactgcccttttcttctttccctaaaaatttgcttgtatattataaagcaaaacacctttgaggcgagattcttgccagaccttaaaaataaaaagaataaacagcacccattttgatctttctctgtacatcctgtcttatgggnaagggcatcaggtgcttctataggaacttaccaacagagctccctctgaggggttttcngtctgagggntccaccagtaaagctatg

SEQ ID NO: 272678 - DNA, 429 bp, Homo Sapiens
tgatggggtctcactatgttgtccaggctagtcttgaactcctgtcctcaatcctctcatcttggcctcccaaagcactgggagtacacccatgagccactgcacccagcccaggaaaaaaattttttttgaattcaaataatgactatttcaaagccttccgactggcataagccaaaaaagtctgataacaccaagcattaattggccagaaaatgaggaaactgggacactcagacatataagtataaattggcacagcaacctttatactaattcgtcagaatctggaaaagttgaagctatgtaacaattcaaaccaacaattccacttcctaatgatctaccctggaaaagctctaaccatgagcaccaggaaacacttgcacgtaaattcttggcagcacgatttggtataacaaaacctgg

SEQ ID NO: 272679 - DNA, 417 bp, Homo Sapiens
  misc_feature (24)..(24): n is a, c, g, or t
  misc_feature (43)..(43): n is a, c, g, or t
  misc_feature (60)..(60): n is a, c, g, or t
  misc_feature (82)..(82): n is a, c, g, or t
  misc_feature (108)..(108): n is a, c, g, or t
atttttaaggatctcaaaacttcnaaggcttttggttgtcccnagtggaagaaggatcanagtccagaccagttcaaggagntgatcctcacactgtgcgatctcaanccgccgaggcctagctcaaagcccctgcctgctccccaggtcccgctgcaggactaccagtctgccttggaagcctccatgaagcccttcatatcttcaaagcagattctcaccatgtgatcatcccaaaagagctggagtgacatgggaggggaggcggatctgaggggctgggtgcaggccctcagttggggctcccaccttccccagactactgttctcctcactgcctcttcctattaggaggatggtgaagccagccacggttttccccagggccagccttaaggtatctaataaagtctgaac

SEQ ID NO: 272680 - DNA, 783 bp, Homo Sapiens
  misc_feature (22)..(22): n is a, c, g, or t
  misc_feature (34)..(34): n is a, c, g, or t
  misc_feature (63)..(63): n is a, c, g, or t
  misc_feature (113)..(113): n is a, c, g, or t
  misc_feature (214)..(214): n is a, c, g, or t
aaggctggaatgcagtgggtgnaactccaagctnaactgcaagccttgaaatgctgggggctnaaagccatcttccccgcttcaagccttcccgaaagtgttggggattaacnaggcatgagccatggtgcctgccctggcctccctcaggttgaaatttgatccccagtgttgggggtgtggcctaatgggaggtgtttgggtcatgaggacnggatccctcatgaatagattaatgtcctccctggcgagtgagtacatcctcactgtaatagttcctgtgagagctgattgtttaagagcttggcacctggcacctccccccactgtcttgcttcctctctcaccatgtgatatctgcctatgccaactcgcttctgccttccaccatgagcagaagcagcctgaggcctcagcagatgctcagacatcagaatcgtgagccaaataaaccttttccctgatcaatcatccagcttcaggtattcctttataacaacacaaaacagactaagacagtgctgtatgcagctgcatgctaaataattgattcaggtgatggtgaaggtcagaacaggaggatgtgggcttacatcatagcaggggagtgtccctggctgagagacctgcaggaaccaacagcagagaggttatcaactcttgttctacctggagaggtatttgagggcccctaggtccagctgatggggctcttggaagctgttgatcaagccagggaaaagatgatagtgacagccaagaccagaggtgatgaatgtttag

SEQ ID NO: 272681 - DNA, 235 bp, Homo Sapiens
cgaatgagctgtcctccaccccacgtcggagacctcagcgcccgggccccggcctgttagcacctgcaatgcctttgacggcaacccccggcatatgcctgggcctcacagctattagcggagcgcctactctgttcccaggcacagggcacagcagcaaccctggaacccccaggggtggctcctcctccatcccggcttcctgctggaacatgagcaggcaattcacacaaga

SEQ ID NO: 272682 - DNA, 504 bp, Homo Sapiens
  misc_feature (114)..(137): n is a, c, g, or t
  misc_feature (148)..(148): n is a, c, g, or t
aggtggcagtggctagggacatttcctggggacactctcccctaaccccccagaaggacttcacaaaaacctgtggataatggaagggatgttacggtacaaacgtatatttannnnnnnnnnnnnnnnnnnnnnnncgcgcgcgtgntgcacataggcgtgatgtctgtgaccctcctctcctcgtcacatttcccccagaatgaatgctgtcctgtctgctcatgtttgtgttgaagctgccaaagtcggggagctctggtcctgcccagacccctttggaattgctggcccatcctcccactggagagctggggtgcagctcaccttggggaaggaaacctcatgcctcagagtaatttcttgtgaatgcaaagcctgggggagcgggtctttggggggcaaggagccagtcaggggcttgtttcccctcatagagctccccagacgtgcctccgcaatgcctgaaacccagacctaggctaataaacggttcaatttctg

SEQ ID NO: 272683 - DNA, 360 bp, Homo Sapiens
acctattgttttccccccccattcctacagaaccagaggctaggagagagatgtcaaagtagctagccccagcatcacagaaggctaggaagtggcagaaacggggactagaactcacatatgcctagactccccaggtcccactcccacactgtctcccccaggatgtttctatacttctttgttaaatgagatgtgggggtagatggggggaatctagcattcaagcaatgtatcaattatgcaataaagaaaaagcaggaaggaatcaaaaggtgtcaaaccacgcaatgtcacttttgtatatacccacctttcacccgggagtcctgaggcctcagtcaaaatgcagcatctcat

SEQ ID NO: 272684 - DNA, 609 bp, Homo Sapiens
  misc_feature (20)..(20): n is a, c, g, or t
  misc_feature (52)..(52): n is a, c, g, or t
  misc_feature (58)..(58): n is a, c, g, or t
  misc_feature (88)..(88): n is a, c, g, or t
  misc_feature (99)..(99): n is a, c, g, or t
  misc_feature (590)..(590): n is a, c, g, or t
gggtatgtctctggaaaaancaacatggaggtgaaacaatgaaagccctccnaacttncctccaactcaccctggctgagggccacangcacagctgangccccaacacatcccatatattccatgtatgcttctttaacaaggacttcctcaccatggtcgaaggagaaaatctattcgtgaaagacacattctcttgaccatatgcgtctccctgttgcactggggcagatcagcatagtgtgggcacaaggagaatgaagctttgactgatatggactgtgccgtgggtttagcaccagcaccctcagggacacagccacactgtttccaatcctcctctactaggctgtctctaaatcttcctggactgatgtgtttatcacttcatggtgcttctcttttaagaccgtatcagaaggaactgtggcttagaaagtcatccctcatgacttaaaagtaaaacctgtgttaaaaactaccctctctgtgtcctttaaaattaaattccctaggaattggctgaggagaccttagggcctccccagaggtgcatatgttgctcctttcctcctcactccctccacatnctaggtccctggtacatat

SEQ ID NO: 272685 - DNA, 454 bp, Homo Sapiens
tcatttgcaacaacggatggatctggaggacagtgtgttaactaaaataagccaggcatagaaagcaaatactgtatgatctcattcatctgtggaatcttaaaaagctgaactcatacgtagagtatagagtggtagttaccaggaccaggggccggggtgggggatgctggtgaaaggatgcacagcctgagctggcaggagggtgaggtcgggagcttggctatgcatgacggtgaccacagttgacaacaatgtattgcattcttaaaaaatactaagagagtggattttaagcattctcgccacaaaagatgacaagtatgtgaagtaatgcgtgttaaattagctcgacgttgctgttccacgatgtatacatattttaaagcatcatgttgtacacaataaatatatacggcttcatttgtcaattaaaacatgaattaaaaaagaa

SEQ ID NO: 272686 - DNA, 448 bp, Homo Sapiens
  misc_feature (15)..(15): n is a, c, g, or t
  misc_feature (24)..(24): n is a, c, g, or t
  misc_feature (35)..(35): n is a, c, g, or t
  misc_feature (48)..(48): n is a, c, g, or t
  misc_feature (55)..(55): n is a, c, g, or t
  misc_feature (65)..(65): n is a, c, g, or t
  misc_feature (71)..(71): n is a, c, g, or t
  misc_feature (159)..(159): n is a, c, g, or t
  misc_feature (228)..(228): n is a, c, g, or t
agccccaagtgtgtncccctgggnccctttccgtnctttgcccctggntagagtntttggccaanacgctnctgaaaaggtccagggtcaagatgctgggagctgccagtggcgctagaggaaccccatgttttcccattgtggattaaaataccccantttctgcggctgagcttcccctccgaatccaataggtcaataaggaccaaggacaaagcacaaacaggncctggaagccaagagatgtcgataaaaatggagatgaataggcatttcagtgcgggcaggccgtgggtgtggggcattgtcttttctctggccagcagtgcctggccactttgtctccaaacagtgcttccattttagagatgccagattggtttggacccaaagcttgactgttgcggggtgggctgaggtgggagtggggaggattcacaccagaaaa

SEQ ID NO: 272687 - DNA, 450 bp, Homo Sapiens
  misc_feature (435)..(435): n is a, c, g, or t
gtaccgtaagctctttacctaatttggtataagggtcatagctcaagagatctcaaatctaaagactttccgagtcagttatctgtcctggaggtaattatctgacaataactttcatctcttatatttacttacaatgttgatcagtctaacattttaggggctaacactttgaagagtgtaccttttttttggcaaggtgatgttagaattctcatttggtgtgaaaatttgggtggggttaaattactgtttaaacctcagtttaacttctaattacactgttctcctgggccaaagaccctaaaccactgatttcttgttagcactaaaagccacaatgtaacagactggcttcttgtgaaataggaaccaaatactgccagaactggaagcctctaacaggaagtcatgacttagtggtgaaataactanagagaaggaggggac

SEQ ID NO: 272688 - DNA, 461 bp, Homo Sapiens
  misc_feature (274)..(274): n is a, c, g, or t
  misc_feature (326)..(326): n is a, c, g, or t
  misc_feature (373)..(373): n is a, c, g, or t
  misc_feature (413)..(413): n is a, c, g, or t
  misc_feature (419)..(419): n is a, c, g, or t
  misc_feature (429)..(429): n is a, c, g, or t
ggaggaaccactatagcaaaactaaataatcatagctcctgaggatgaccccatgatcctcctttctgtctgcctacactatcaaagctaagtaccttccacagacactgtggagcacatgtgtgtggatacaatgatcgagatggtgctaaatgaaccacttgtgaaaaacaaatatttttactttacagtcacaccttaactggtgggttaagagcaagattttggaagcaacaatgtagggtgggctaaatatcagctctgtgacttgggnaggagttctttgggcctccttgaggcctccctgaggagtgtcttcacagggntggattagggagcgtggggcattaggggtccgcaattcataggggtnccattgtggttttttccccttcttggctggatttgacttncacatncaccagtccnacaccaccagtttttttgggggtcattcggac

SEQ ID NO: 272689 - DNA, 410 bp, Homo Sapiens
cacctgagcttcaataccctgtctgtagtctgtgctgtgctaggggaagctgttcctggcatctcctgctgcccctcccagctaccccctcctctcaaacaactggttggacaggtttgggggcagaatctgccagcccagtgaatctggcatcgccagggaggggtctgaagagaacatacagttgcaagacaagcctggactaccccccccacccaccaggagcgcctgaccagggaggggctgaggaaggaggcggggcagcctcaggatccaggctgccccagggacaatcccgctaagtctaccccgtggatctccttgtccaaacagtccccaatgtagcgactcttcctttaggacctgaggtgggaggatcacttcgaaccttgggaggcttgaaggcttgc

SEQ ID NO: 272690 - DNA, 546 bp, Homo Sapiens
  misc_feature (17)..(17): n is a, c, g, or t
  misc_feature (39)..(39): n is a, c, g, or t
  misc_feature (44)..(44): n is a, c, g, or t
  misc_feature (66)..(66): n is a, c, g, or t
  misc_feature (82)..(82): n is a, c, g, or t
  misc_feature (99)..(99): n is a, c, g, or t
  misc_feature (118)..(118): n is a, c, g, or t
  misc_feature (137)..(137): n is a, c, g, or t
  misc_feature (241)..(241): n is a, c, g, or t
ggaaataaaaagaaggnccaaacccctaagggccaaagnaaaanccgagggcggctggtggccccnattttaaggggtaatncctggaataataagccnaaaacaagggatggaatanttaagccctcccccttttnaagacccatatagggtaaacttccctgaatgttgaacatggcatttgtaaactgtccctagtgcctgggacatagcattgagtgctgtccatagcattgaaggnagaccagaggtcggtcttgtcaccatctgtgtttcagcaggttttagccagcttctttactgcaaactgttttatcagcaaggtctttatgacctgtatcttgtgccgacctcctatctcatcctgtgacttagaatgtctaaccatctggggatgcagtccagtaggtctcagcctcattttactcagcccctattcaagatggagttgctcttgttcaagtgcttctgacagttccttaaaactgtccgatgttatctgattttatgtgcatcatcctaaaatatgatattccagctcgtgcc

SEQ ID NO: 272691 - DNA, 629 bp, Homo Sapiens
gaaaaagtcctgtagaggctttccataggccctgtgtgactcacgtgtctatacctgaatcaactgttacaaccaagcagatgcagagactgcgtgccctctcctggagctaggagctaggtgagtcaatcctgcactttctctacaaggcttgcaaaggtgagcaagaagattccccaaagtgaaatcagggtgctgttaccaaaagaagctatgctgggcaggcaaaaaacaacagctgtttcccataggggcaaaacctgaaacacccaattactatcccattgtttgcttcaaaattaaattttgtttgaccccaactagttctaggtcaagttttttgctcgatgggaccacgtgaaaaaaggataaacaatgtctctatataatgcatgatcaggtggtttatgaagatgtcaagagcactgaacaaaatccaaatgctcacataaaatgggattaggtttcataagccacccaagaaaatcagtctcattattttatgtaataatgtattactgtgcccagagctaacctgtagctctaggggagtacaatgtgtttgtattattcttcattgtacacagtgcctcagacatagtaggtattcaataaatatttgttaaatc

SEQ ID NO: 272692 - DNA, 361 bp, Homo Sapiens
tgatttaacaaatatttattgaatacctactatgtctgaggcactgtgtacaatgaagaataatacaaacacattgtactcccctagagctacaggttagctctgggcacagtaatacattattacataaaataatgagactgattttcttgggtggcttatgaaacctaatcccattttatgtgagcatttgggattttgttcagtgctcttgacatcttcataaaccacctgatcatgcattatatagagacattgtttatccttttttcacgtggggcccatcgaggcaaaaacttgactaggaactaggttgggggggtcaaaccaaaatttaattttgaaggcaaacaatgggggg

SEQ ID NO: 272693 - DNA, 298 bp, Homo Sapiens
  misc_feature (39)..(39): n is a, c, g, or t
  misc_feature (109)..(109): n is a, c, g, or t
taatagctattaataatttcctcctttgccccccataantatcctgggccccaagtttttaaaaatccctctccagcttctctcctcctcttgtcctgtaaaatggtgnataagtaataagtacgtatctcccccaggtttgtcatgagtattaaattaggaggttgcccaagtgcttagcacagtatctagcacataggaagtgctgaaggaatgctagctactattattactattactgttatttttattgttaaattctatacccaggctaatgtcctaaacagagaacaattca

SEQ ID NO: 272694 - DNA, 410 bp, Homo Sapiens
ggctactctggctgcccacgtccgttccccctgcttctcttaatggccctacaatagccttccagggcgccatctccatttcttccagcagaacatgagctttgtggggaggagacaccactatctgctccagaggagagcaaagaacctcaactatcagaggattacttctccctggccacagtggctggttcaatacgagacttctgttaggacttccagctgaccacgaagctggaaagaaggctggagtttctgcagctactttgcactgtaacaggaagatctgtccacagatagaggaaaccaagcccagtgcctgtgactgggggagcagaggtggggagttaacacactgggatcctggttgatgtcgtgcctggaggaagttcataacacttgctctttgt

SEQ ID NO: 272695 - DNA, 180 bp, Homo Sapiens
tggaaagagctgggggagcttaagcagcgagtgtggccctctgcttccgggcacgcccacagcaactcggcttcagagtctgacccgcagaagttctttaaagagagggacttagggaccccagatcccggcagccaggcccagagagggaagcaggattagtcaaaaacaggtggggaa

SEQ ID NO: 272696 - DNA, 491 bp, Homo Sapiens
  misc_feature (77)..(77): n is a, c, g, or t
  misc_feature (108)..(108): n is a, c, g, or t
  misc_feature (122)..(122): n is a, c, g, or t
  misc_feature (152)..(152): n is a, c, g, or t
gtggacttatagaaaggcccaggaggtgaggaactgagttctctgccaacagccaagaaagaactgtggcttcctgncaaacagtcagagagagcgagcttggatganaacttccctcccanaagtagagccctttagaatggcccccagcncaggccaaacagcttgacagcagccctgtgagaaaccttgaaccagaacccacccacctacgctactcttggattcctgactcatggaaattatgagataataaatgttttatatcataagtgtctaaggtttgaggtaatttgttacagagcaatagtgactaatacaagagttcagagggcaaaacagtcacacatacttaaaggctttaaaaagtcccagcagttttctgtctcgcctcttcttagccacccagacacattacccagaggctactgaccaagtgctaggctgccactgccagatttcctgttagaagaagaaaataaatttctagt

SEQ ID NO: 272697 - DNA, 381 bp, Homo Sapiens
  misc_feature (315)..(315): n is a, c, g, or t
  misc_feature (370)..(370): n is a, c, g, or t
ggcacgagaaaaaaattagccaggtgtggtggtgtatgcctgtagtcccagatactctggtggctgaggtgagaggatagcttgagcccaggaaattgaggctgcagtgaactatgattgcactactgtgctccagcttgggcaacagagtgagatcttgtctccaaaagtccttgaaggattttaggaagttgttaaaagtcttgaaacgatgtttgggggcatgttagggttcttgaatgtttaattcctctaataactgcttattcaagagaagcatttctgactgggtgcagggcagtgctcatgcccatnaatcccagtacttttggggaggctgaggccaggagcattgctttgagcccagggncttcaagacca

SEQ ID NO: 272698 - DNA, 411 bp, Homo Sapiens
  misc_feature (228)..(286): n is a, c, g, or t
agtgccagtgagcccatgggggacggccactgcactcccagatggggctgaccctgtcctcccaaaaaataaaacccctgcccatgggcaccttaaactcccattggtatggtgagatggatactcctaaaatttaatccataacataatacttatttagcattagctctgtgccaagacactgttctaagtacttcttctattttcattaattctgtgattgtcatnnnnnnnnnnnnnnnnnnnnnnnnnnnnnnnnnnnnnnnnnnnnnnnnnnnnnnnnnnncatactgtctttaagggaaatttgaaaaaatacattaaaaccatttaaacagctcctcacattttgatgtatttcctttagtctttaaaaaaaatcatagattaaaaatgtcatcgtaaacatat

SEQ ID NO: 272699 - DNA, 434 bp, Homo Sapiens
  misc_feature (376)..(376): n is a, c, g, or t
  misc_feature (387)..(387): n is a, c, g, or t
  misc_feature (408)..(408): n is a, c, g, or t
  misc_feature (413)..(413): n is a, c, g, or t
gcatttaacagattactgcttcagtgtcatcagtggtggcactgtgatgtaaattaatagttctgcactcatgggtgttcattaatacttacagaatagttggcaatgcttgctgacagactgctctcaagtctgcctttctaatttctgggaaatagtttgtctaccatgagactctaagtcccaaatcaagtatacttttgaagcaatttcctaatcacagtgaaaattccccaagcagcatattttattttaaacttgctttatgtaggcaggcaacatatttacctgtggcctttggaaaaatataggtatcgggggagtctttgaaagattattatccaaatgtaggctgggacggggtgggctcctggcncgttaatcccnggcactttgtgggagggctgngggtngagccccaggagtttcagggc

SEQ ID NO: 272700 - DNA, 501 bp, Homo Sapiens
  misc_feature (112)..(112): n is a, c, g, or t
  misc_feature (115)..(116): n is a, c, g, or t
  misc_feature (118)..(118): n is a, c, g, or t
  misc_feature (125)..(165): n is a, c, g, or t
  misc_feature (170)..(170): n is a, c, g, or t
  misc_feature (173)..(175): n is a, c, g, or t
  misc_feature (230)..(230): n is a, c, g, or t
  misc_feature (306)..(306): n is a, c, g, or t
  misc_feature (349)..(349): n is a, c, g, or t
gagactgggtctcactccgtcactccatggctggagtgcaggagtgcgatcatagctcactgttccgtcaaactccgaggctcaggtgatcctcccacctcagcctcccaantanntnttggccnnnnnnnnnnnnnnnnnnnnnnnnnnnnnnnnnnnnnnnnnccttntannnggggcagtcctccaactcccagggcaggccctggctaaggcagtcacaagggccnaagttcctcttgaaacccagaattaagtacagcccctttgttcctcaaccctgcagctcccatcatccctcccccnacacagtgctctctggagtacagggtacgagctgcaggtgctnagatggggaaaatgaggtggaggctccatggtgggggctagaacctgggactcctgattactagttggggtccctcccctagacaaagcccagattctcattcccaacagatccagggaagaaacaaagcagataataccttcaggctttaa

SEQ ID NO: 272701 - DNA, 404 bp, Homo Sapiens
gagccactgtgctcggcctctgacactaaataatgtcagttaagggaatgagaaaaaagggcaggtcacgcacctggaacctgggctgtgcaaaaggtcaaatgtgcacgtatatacagtgactaggtgacaaatgcaatggagcatcccaggctgggatgaaggccaaggccacctacctatgaggaacaaccactgcctggcttggaacgttcccagaacccagtggtttcccatagctgccctacgacttccgagatgactaaacccaccaaggactctatcacactgcttgtcttggccactcacccaccgtggatgtgcacagaccagtggctcccacgcagcacaggccagacaaaagctggaaggtgaaggcttcttaccttagaaagacaaagtgg

SEQ ID NO: 272702 - DNA, 276 bp, Homo Sapiens
  misc_feature (208)..(208): n is a, c, g, or t
  misc_feature (241)..(241): n is a, c, g, or t
tagacagagcaagaccctatctcaagcaaagaaactcaaaataattatgatttccccaacaaaatgcaggcaatggtccctatggccccaaaagtaatataggatgtttcacatcatgtgattttattccttaggtaaccttcctttctatggaaatcatctctaaggggggctaaatgatccctttcttgtgggactgtggttgttnaaaatgaaaaggtcccattttgctggatacggnaatctaccctttcccatggtaatttttttaaaaaa

SEQ ID NO: 272703 - DNA, 631 bp, Homo Sapiens
  misc_feature (26)..(26): n is a, c, g, or t
  misc_feature (325)..(340): n is a, c, g, or t
cctacccttaaagtttttgggaagcncctttcaaaaccttccagacaccctagaaatatatatagtgcagttcagttttagtttctgcagcatggtttggaaacaaaagatacataggatttaaactcgatttgttttcttcttacagtagaagtaaatgctcttgtggcttgaatcgcatctcccaagaaagatacgttcacgttcaaacccccagtactgtacatgtgaccttatttggaaatagggtctttttagatgcagtcaagatagaattagatcatactggattacagtgggccccaataactaggtttttttgttnnnnnnnnnnnnnnnnggaaatgtgaacagagagagaatgccgtgagatgatggagggatagattggaatgatgtctgcgagctaaggaatactgaggattgctgccaaccatccgaagctgggagaggagatggaacaactccctcggagcctccaagaggaaccaaccccactgatgctttgatttgggatttccggcctgaactgtaggaaaataaatttctgttcttttaagccatttttaccagtttgtggtaacttgttacagcagctgcaggaaattaataaatgccaatgttgaaaatt

SEQ ID NO: 272704 - DNA, 466 bp, Homo Sapiens
ataaagaaaagaggtttaattggctcatagttctgcaggctgtatagcaagcgtagtaccgatatctgctcagcctctggggaggcatcaggaatcttacaatcatggtggaaggcgaaggggaaggcaggcagatcacatggccagagcagaagcaaggggtggggcgcacacttttaaacaaccagatttcgtgaaaactcactatcttgagaacagcatcaaggagatggtgctaaaccattcatgagaaatccaccccatcatcgagtcacttctcaccagggccctacctcccaaaacaacttcaacataatcacaattcaccacgaggtttaggtgggaacacagacccaaaccgtatcagaggtctttgtgttttgtgcggatgtgaagctcagtgcctggctggcagtaggtgcagtgcagatggagccagtgtgtgatgaatgaaggaagggtcctt

SEQ ID NO: 272705 - DNA, 268 bp, Homo Sapiens
  misc_feature (13)..(13): n is a, c, g, or t
ctcgaggcccaanaattcggcacgagaagtatcacaaaaacaactgctctgcattgggcagtgctagcagggaataccacagtcattagccttcttctggaagctggagctaatgttgatgcccagaatatcaaggcaatccttaggtgtcacatggccctctagtggaagggatgctcagctggaccgaggcaactgcaggatattcccggggagttgttacccaagggattgcttttattcagggcgaatcagcactttcttgggc

SEQ ID NO: 272706 - DNA, 412 bp, Homo Sapiens
  misc_feature (263)..(263): n is a, c, g, or t
  misc_feature (273)..(273): n is a, c, g, or t
  misc_feature (368)..(368): n is a, c, g, or t
  misc_feature (378)..(378): n is a, c, g, or t
cctgctcagtctgtatcaggcccgggatgaaatcgtcacttagacgctcaggggtcctcccacccatctggccaacacaaacctgccagcatagcactgagtggaaggttccagtgcacccacaggcctggctgttaaaatgtccggcctctccagaggacaggttaagttcacactgagaaagcctggcttctctccacctagcctgaattaaagtgagaaggatgaggcacagcacctgtggaaatggcgctggaaagaangtgtacctanggaactgcctctgggccaccgaacgtgcgccggcccaagtgttctcacgacaacccaggaggagtcctccatctgggccacttcccacccgttangccccgaggngacaccaggttggtgagacccggaccccaccagc

SEQ ID NO: 272707 - DNA, 726 bp, Homo Sapiens
caacaacagatagacgggccggccctgcctccacgtggctccggctccactctcgtgcactcggatgcttactcgtcttcttcctgttctggtttcttttccccctttgttcttcccaagtttctaccaaggggccccgtgggcttccagatcacggtgatgaacctctgggcctcaggattggcccccacatcaccacgccaacaggacccacagcgcactggctccaccccatctctgccatctccactcccctccttttcatgctgtctcccagaaaagctgccagggctctggccttggaattggacttgagatggggagcagacaggggaggatggggaatgtgggacacggtgtggtgggcatgagggcttggaggggtggggatgagggctcaagacacgagagaagatgtccacggtcccaggtggttaacaaagttctggcagctaaaagatgaccgcgttgaaggccacctccttctggctgggaggggcagaactgtggacagattctcaatgcctttttgaagttctgacccaccaaagaccttctgccttcaccctcctccccacctgatgtccctctgtgtctgatagtgatgttggtgaaagttcgtagaccccaggagtagagaaaagcaactggactgactttcttaccagcagttacctagactgaggcaagctgtgtggactcacccaagtatatttcagtactgtc

SEQ ID NO: 272708 - DNA, 519 bp, Homo Sapiens
  misc_feature (58)..(58): n is a, c, g, or t
  misc_feature (67)..(67): n is a, c, g, or t
  misc_feature (94)..(94): n is a, c, g, or t
  misc_feature (125)..(125): n is a, c, g, or t
  misc_feature (138)..(138): n is a, c, g, or t
  misc_feature (209)..(209): n is a, c, g, or t
ctaaagaccccctaaatgccccagcctaattaaagtaaccccccggtaaactgcaggnaattgccanggggccctccttcccaagtccccccanggatccacctgtcccccaagtattccccctngccagaagccccngcccctgacctccagaagaaagggaacctccaggccccaagaaggcctggtgaagtcctggaaaccccaanggaagccagagagctcctgcatgaagcccttcccctagagagaaatcaagcctctgcctcctcctagactgaccccctcagtccacagcatggtgctgtgattttgcccaagaggcaggggtgggtctgggggaagatggacggtgcttcccaaaaggctaaattttagtctcaaaggtttctgattgcggacacataggtgatatctaacttgcttttgtttagccttgaatattttcaaatataatcttcaatatttctgttacaatattgtagcttgcttctgtttataaaaataatgcagcatttg

SEQ ID NO: 272709 - DNA, 299 bp, Homo Sapiens
  misc_feature (82)..(101): n is a, c, g, or t
gctcaaaagatatttatgagtgaatgaatgcatcatgagaagaaattggaccagatgaggccctgtgaagctgcttgggtcnnnnnnnnnnnnnnnnnnnnctctcttctgagtgtccctggccctggactagaaattctcccatccttcggccttctgcgagactgcaggaacattacttttgaagggatgcttttcttctttccatttctcctcttctccttcccatctaggtgcagcatctttcactccgaagcagaaatttgccaaaaaagcatcctctttttatcagaaaataa

SEQ ID NO: 272710 - DNA, 295 bp, Homo Sapiens
aagcagacagtgaagaagggggcacgtatattctgggaggaggaacactgaagtggcttcgggagttgggggacagaatgcactctgttcccacacttggttcctccacacctcctccctgtgggcccaggcctccctgactgctttaaaacctgtggtcctgtatctctttcagatcctggctctgcagagagaacagcccagaaaagaaagttccccagccctccacattcttccaatggccactcgccgcaggacacatcaacaaggccccatttagaagaatattggaaaa

SEQ ID NO: 272711 - DNA, 421 bp, Homo Sapiens
  misc_feature (338)..(338): n is a, c, g, or t
aagaagagaatccatggatggacatggtcgaggaattcggaaagcctgcagttgacattcagtcttcacttgaaactcaaaactgacactaggaacagcttcatgagttcagtagaagtaagctttatttgtagcttctgccttgtttgacggcgtatctattcagggaagcgcacagtaaaagaattccttaggcatgatgtctgttttgggtacctcagcaatgaaccttttctaggaaattattattcccaaccactaggaataccctagtcactattcccactttgagcattaacccctttgaaaagaaatggacttaaagtatctctgttttnggcaaaattcaggttcaggggctggatggtatgtgtttctgctgccttattcaatccaccacttctctgtgaaacactctacc

SEQ ID NO: 272712 - DNA, 380 bp, Homo Sapiens
ggaccaggaagcagacagtatgagcatgaccagtggagaaggtactagtcaacctccagaaagagtatgaagagaaaaagaggcacacctggacgcagagccctgccagcgccctccctctgctgttgcagctgcaaggagacccatgcctgtgggagcccaggcctcgcttgcatgaagaaggaacgatgcctttttcaatggtgtctccctcccattgtgcagaagagcttttgttggcttctctcccgagcttgtgcctgaatctctggcccaaaacaatcattgttaacatcttcatgtgtttcattctgatctttcattcatatatatgatgcctagctaatttcattttaaaataaatgggaatctgttgtaaa

SEQ ID NO: 272713 - DNA, 375 bp, Homo Sapiens
ccccctctaagcattagccgccctgaattaacgttttcacgggcagccccctcaatgtgtgctttctggtagtgactttgttctaaagctcactttgctcccccagcggctacaaaggaccaattcccaaatccccatcagcctccctcccagctgtcactccctcagaagactctggagcaaagggccaggtttgagactggagaccagaggttaggggtggactgcggttctcaagatcagggtctgaaactcccctgggtcttctctcatctgtgcagatggtccactctgcttcattagctcttcagcacttcactctgttcttcttcatcctaggggtactttccttgtttttttctccggcaaaaaaaa

SEQ ID NO: 272714 - DNA, 429 bp, Homo Sapiens
gttccccaaacgctgagccccaccccccatccctggtagcaagaagtgtttccaattttaaggttaagaaacaaagtccctggatttgtgttagggatgtcttcctgagagtgggttgtgttccgtttgaccctggcggttgacctcggcccactaggatcatgccgccctctccagggaggagggcctccccatcaccctgtacagtggcaccccagccctggcactgcccgcccttgctcagcgtacctttcccatggcactctgacgtactggatgtttggtttctgaagttactggctgtttacctgccgggatgtaagcccctccagggcaggggcttgtctcgtgttcagtgctgcatcccagctgctgggcacggtgcctggtccatggcgttcaataaataactgttggatgagtgaaaaa

SEQ ID NO: 272715 - DNA, 436 bp, Homo Sapiens
  misc_feature (16)..(16): n is a, c, g, or t
  misc_feature (201)..(201): n is a, c, g, or t
tgtaagaataaaagangggtaacttgggtcctcctcccctggcaaacccgctggtgtctgccccaacaaggagccagacacattactgaaatactacagcccctgtatctgtatttcccattttggtttaaaagacactcagaacacactgaaattttagtaccagatgggagggattccttgcacgtaatcttgagcatnccactgcttcagcaggttcaacaccaggtgcaaagccatccaggtgtgccccaacagcaattagcttggtattattcagtaaaactttcagttaagatttcaattgacagtttggggaagggatgtgctggctattagttaaatgactttagaggggggttcatttgtctctgtctcacccaatcctgaaactgcagtgtaaccaagaaaaagccaaagagaagcacttcccttt

SEQ ID NO: 272716 - DNA, 425 bp, Homo Sapiens
cctgcttgggccctctgctgccaactgctcaaacctgctttagctccagccacttgtggcaaacaacctcgtttccttacaaattccagcatgtgactttggtgccgttacttgtgaaaaatctattctgttgtctttgatgtgtccaagaaaattccgtgtagtttaccgtaaaaatatcctgacctcacaagaaagcccaactgtatgtcttgtgatgggacagttcataatgtagttgctagacccactttacaaattgttcttgtcaccagatgtgttcagacattgctgtgcaattgttggggagggtagggggaaaggcgagaggagatacttattggtctttttgtttaatacctttcccaagaggggacagtctggccaacttgctccagtaatgcaataaagacattgcaataaaa

SEQ ID NO: 272717 - DNA, 279 bp, Homo Sapiens
  misc_feature (68)..(68): n is a, c, g, or t
  misc_feature (76)..(76): n is a, c, g, or t
  misc_feature (79)..(79): n is a, c, g, or t
  misc_feature (95)..(95): n is a, c, g, or t
  misc_feature (103)..(107): n is a, c, g, or t
ccctggcccagatttagcacttcctgatataccaaccacctcacagcttagcttggctgggagctccntcaggttnccnaaggacggtccttccntctccctnnnnnaattgccatcccgtacaccagggtgccaactcccaagtgggctgacaggaagggagattggaaacagctttatagtagatttgatgctgttataagacacgttgtaagacatcaggtaaatatagcacatcagattttattaatcataagaattctttaaaagccttcagca

SEQ ID NO: 272718 - DNA, 470 bp, Homo Sapiens
  misc_feature (28)..(28): n is a, c, g, or t
  misc_feature (277)..(277): n is a, c, g, or t
  misc_feature (282)..(298): n is a, c, g, or t
  misc_feature (343)..(343): n is a, c, g, or t
  misc_feature (458)..(458): n is a, c, g, or t
ggtcttgcttctgatgcttagattacangtgcagagttcatccacgttgtgacttgcatcaatactccttttcatggctggataatactcagtttgatggatgtaccatattttgtttatccattcatcagttgatgggcacttggattattttctactttttgactgttgtgaataatgctgcagtgaatatttgtgtacaggtttttgtataaacacgtttttatttctcttggctgtataccctaggtgatgggaattgctgggattataaggnaaccnnnnnnnnnnnnnnnnngagatgggagtcttgcttgtcaccagggctgggagtgcagtgacngagatctcgggctcactggggaccctcccatcctccccggggttcaaggcgattccccctgccctcaggcctcccaagtaggctgggggactgcaggggacggacccaccatgtnccgggcaaattt

SEQ ID NO: 272719 - DNA, 580 bp, Homo Sapiens
gtgccacactaagaattggaaaccttacaacccaacaaactcgagagatcttacatttccactataccacatggcctgactttggagtccctgaatcaccagcctcattcttgaactttcttttcaaagtccaagagtcaagggtcactcagcccggagcacgggcccgttgtggtgcactgcagtgcagggcatcggcaggtctggaaccttctgtctggctgatacctgcctcttgctggatggacaagaggaaagacccttcttccgttgatatcaagaaagtgctgttagaaatgagggaagtttcggatggggctgatccagacagccgaccagctgcgcttctcctacctggctgtgatcgaaggtgccaaattcatcatgggggactcttccgtgcaggatcagtggaaggagctttcccacgaggacctggagcccccacccgagcatatccccccacctccccggccacccaaacgaatcctggagccacacaatgggaaatgcagggagttcttcccaaattcaccagtgggtgaaggaagagacccaggaagtcaaagacaccccccac

SEQ ID NO: 272720 - DNA, 494 bp, Homo Sapiens
ggccacggctatccgaaccccaattacttgcaaaacgtgctggctgagctggctgcccagggggtgaccgaggactgcctggagcagcagtgacctcgcaccccagcacgcccgcctctggtgcccaccccgctgccccatggctggctgggtggccaggcaggaagtccccagcccgagaggctgggaggtttgttgagggtgtggggtgtgccccacctgaagccggggctccccctgcctgcctctctctcctcccttccctctgggaattgggcacccctgggcagttgtactcatgggggcttaggatgcagctacctcagtgcgcagggcccgtctgtcctctgggggctgcttcgggcacgcggtgctcggggcctggtgtggggcgagtagagacttccccagcctggacgggcgtgggttctgggtcagcttcttttacctcaattttgtttgcaataaatgctctatagccaaaaaaaggaaaa

SEQ ID NO: 272721 - DNA, 272 bp, Homo Sapiens
  misc_feature (113)..(113): n is a, c, g, or t
  misc_feature (163)..(163): n is a, c, g, or t
cccagggggtttggaattggcggaacccccggtaaaaggaaaatggagccaccctttccaccgtatttaaggggccaattggtaaaaccctttaaccccattaacaacccttngcccccaatttttaagtgggttgtcctttaaaaccgttgaaagtgtaggnagtacctttaatatattcctagatatgtccccttacccagatttgcaaaaattttccttgcactctgagctgtcttttcactttcttgatagtattgaacccacaaaag

SEQ ID NO: 272722 - DNA, 384 bp, Homo Sapiens
  misc_feature (163)..(163): n is a, c, g, or t
  misc_feature (185)..(185): n is a, c, g, or t
tggaatatcagagttacagttgtcagtgaaactattttggattttaacctcttagaggaagaaaaaaggttagggaagtgtcaactctggatgaaggtgatgtgtttgcctctcagtctttcattcatagcctgctagtgaaaaggaagtaaatgagattccntttgtgtgacctttgtagtccnctttgtattacccaaatagttggggtgttgactcctgtgtgttttgcaagaatgtgtggtaaccctgggtaaagagaagaaactgcggtgttgggagagtctttgtgttggggagtggcaggggatgatttgtttcaggggaaaatgcccacattttaacttttaaacttctgaataaactgtgtaaaaacagtagtgg

SEQ ID NO: 272723 - DNA, 472 bp, Homo Sapiens
  misc_feature (191)..(191): n is a, c, g, or t
aaataaacatcatcatctatgtgtaatcaaattcccatattttcttcctataaagaatttgctttagtttttcaataaggcatttttttgtcatccaaacatctcttccttttaaaattttcttagagttaaaaccataaataagaggatttaaaccactaaaatgacacgtgccaacatcttcattcagnccagacctggttaaattctatcaaaactagtacagttaaataaggaaccacgttataaaaatattagccaaaaaaagactattagataattctgcaaactcaaatatgaaactgtgctaaacaaaatatgtgcaaaggtacacaagcatagagccacgttgggggttatgctcagattagttttaaagctcgctctagtggatttaattcaagagttgtccacggtggtggtgtttactttgaactcacacgagtccaagaaaaataaaatatgcacaacc

SEQ ID NO: 272724 - DNA, 534 bp, Homo Sapiens
tgttagttgacatctgagttttcagtaaaatgattatggaattaatcagcaaatgtagaagaatatattcaaagttaaaattcagtggcagcacagattatttttatcagagctgtaaagaaaacaactgtccttttctccccaccacccctcctgccccactttggcccagaaaccaaatgtgaacttcctgtctcccacctcagcactagtccatgccaggacaccagctgacaattccctggttttacctgtccaataattgtaccactgtgatcaattacctgtccctcacctagaacaaagcccgagtcccgagaatatttatattttacccaatatatgccctgttacaagagaaggaaatatgagttatttaagtttaacttttttatgtgaattcagagtttatttatcgagggaaatatgtacaaagaagcttcaaatggaatatttaccgacattccttatacatgacagacacttggctacatgggaagatgatgttaataataaaatgatttttaaatggaa

SEQ ID NO: 272725 - DNA, 481 bp, Homo Sapiens
cagaatctcatttaaccctcacaataaacatgtgaggtggtaggaggaatcactcccattttcagataaaaagcagtctcaaagaagttaagaactacattcgcatatttagcagacaccactgctgggtttccttacattccagaaaggcctttaagacagcaaactccaaaaatgtttaaactctttcattgcacatataatttacaatgaaagattaaatatagaatttccctttatcaaattctttcaacctgcccaaataatttcaaacagaaagagatattctctttgacatttatattctgtttgaaggacattcctaaggccctttgaaagatgattaaccctaaagaaactgcctacatttactaagctttttgaaaatactattgcccactctgcataaccattatgggctctctaagacaaagatctggctcatgaataagagtggaaaaagaaaagtatttatctaagg

SEQ ID NO: 272726 - DNA, 428 bp, Homo Sapiens
  misc_feature (68)..(68): n is a, c, g, or t
tgagtgtttctcccctcactttggattccagaacagagcttcgggggtctgaatatcagtccctcacnataggactccaaaacactcctgctgtggtcggaaagtttgtccctcacattggattccagaacgctgatgctgtggtctgaatgtttgcccctcatataggattccagaatactcctgatgtaatctgaatgtttgtaccatcacataggattcctgaacactcctgctgtggtccgaatgtttgtccctcacatggcattccagagcactgctgctggggtctgaatgtttgtccttgacataggatttcacaacactgctaagtgggtctgaatgtttgtcccttacttaggataccagaaaactcctgctgtactgtgaatgtttattcctcaaatacaattccagaacactgaaaa

SEQ ID NO: 272727 - DNA, 447 bp, Homo Sapiens
cttctccttggaagtgtgagagtttaaagtgggcaggacatactagggtttagcattttagccaatgtcttcctaggtggggctaggaatattgttacagtagagaggaagggaactccccctgtgtgacagtcctttcaatctgccccttttcagccctacttttggcattccttgggagcctcagttgttgttcaaggccaaagttatctccgtgctgcaaggtcaccctcttcctcccccagcccctgagatcagatcttatttgctctgcaaagatgaatccctgcctcaggttagggtgagacaaaatcggtctggtaaaagggcctgttttcagggacaaagggaatgaggatgatctttggctgttgctgctctttatgaagaatcttatttgtaactttttattcatattaaagttgtttttaataaaattaaaaaaaa

SEQ ID NO: 272728 - DNA, 388 bp, Homo Sapiens
  misc_feature (42)..(42): n is a, c, g, or t
  misc_feature (48)..(48): n is a, c, g, or t
  misc_feature (333)..(333): n is a, c, g, or t
  misc_feature (340)..(340): n is a, c, g, or t
  misc_feature (346)..(346): n is a, c, g, or t
tcaaatatgtatatggaattggaggagggtacggggtgcccnaggtcnacaaaagacaagaccttgtaacatttcccacaggcagctgctcttttgcccgggtaacccttgggaaagtctttcctgcagttcagtgcaatgaaaatggcacattctccccccaggtcatcacttcagtcactggtaggcccagtgtaaatggcctagcattagctgaatatgttatttacagaggagaacaggcttatcctgagtatttaattacttaccagattatgaggcctgaaggtatggtcgatggataaatagttattttaagaaactaattccacntgaaccntaaaantcatcaaagcagcagtggcctctacgttttactcctttgctg

SEQ ID NO: 272729 - DNA, 446 bp, Homo Sapiens
  misc_feature (20)..(20): n is a, c, g, or t
  misc_feature (62)..(62): n is a, c, g, or t
agtcacccctgccgtggtgnccccccacaagaagtgaagatgaccagaggcccctggggacnagggcaaaaagcctcatgtgatagggatgcctgtcctcctgcaaccccacatggattttaaatagttaccccatggctggcttcagctttttttgtgaatggcagcccaaaaagtgtggtgaaaatggagggatagttcagtggagacagaggggagactgttgaatttgtggagtttttagttcttcctaaacagagagcaacagacaagagttacagacaaattaattcttttcgttaatttaccctcaactactggccaagaaggggtgtaacttcagaatgttttcttcttttgtgccctgagtagcagacccagagtctggagacccagattctaggcctggcttggccatacgacaagcagggtgaccttgggttaaa

SEQ ID NO: 272730 - DNA, 332 bp, Homo Sapiens
  misc_feature (262)..(262): n is a, c, g, or t
  misc_feature (277)..(277): n is a, c, g, or t
gagacagagtctctttctgtcacccagtctggagtgcagtgatgcgatcgcgcgctcactgcagcctccgcctcccgggagaaactcttttcatcttttcaaagagcatattctttaaaatactaaggtgtgttccaattatatgtttaaaaaaatctaaagaacccccccgatagatcagatgagttgcgccaagttcccagtggcacctgtgattctattggctccttgagcaaggtaccacttgaggcactttattccntcacttgaaagtttngcagctgtgactgacaatagtggtaaacacagagttaaatccttaccacaaagaa

SEQ ID NO: 272731 - DNA, 179 bp, Homo Sapiens
aacttgccccaatgatagaaaagtcttttgctgaaatgattttgatgatttttgtttatcgtttataaaaaggaaaagaaatatacaaactttgacttttgtgactttgtgaaggtttctttaagatgtgcattcctttctgcttgctctctagtaaatgttttactaccgggaaaaaa

SEQ ID NO: 272732 - DNA, 417 bp, Homo Sapiens
  misc_feature (14)..(14): n is a, c, g, or t
  misc_feature (58)..(58): n is a, c, g, or t
ccccccaaatgggngataactctgtttggggtaaggggtccaagaggactacggtccntatttataaaagtattaaaataaatacacatctgaacctctaacagagcaaacccaccttgccagggacactgggaacttccccgccttcccaaatgcccatgaaagcaagtcccaagaaagagtgccttcctcctaaatttgccctttttcccaacgttcaggtttgaacaattccaggctcaggaaaatactttggatttctatgcagccaaaatggagacaacatcaacaagtcaccagaaggaatgatgtaattcaaaatttccacaggcttcaccacttttctagtaatgacaccaggagcttttaaacgaatggtttccaaaacacaccatttaattagaaggagattctcca

SEQ ID NO: 272733 - DNA, 452 bp, Homo Sapiens
  misc_feature (42)..(42): n is a, c, g, or t
atggctttcatgtatttgtgttgtttgctttttcttacgtgnatttatgttcatagagctagaaagtagcatctcatgatggcccaacaatctctgttgccagttaaaggttccttggagatgaggctgaataattatgaacctcaaacttctctgattgtgggagtggcaagaactggggagacgtcctccataagtggagcacagggtatggggttaaagcatgacagggagagtcttctgtgcctggtttcttctcctctatctcataatgcattatgggcccgaggaataggggagggttaataagactccaaccctaatggcccaacagggaaattctcattttggtcgatgatattctgatggactggtttggtcttaataccagtcaaccgttgtccttctggaaatatacatatatgaaataaataaaggtaacacttgcagcc

SEQ ID NO: 272734 - DNA, 581 bp, Homo Sapiens
  misc_feature (13)..(13): n is a, c, g, or t
  misc_feature (364)..(364): n is a, c, g, or t
ttgggataaaggncgctctagaccaggctctgctgaaagatccggggcaaagttccttgacaggactatgtccgcctcaaataggccacagaagagccccaggctcgctgacgagcaccggctccgaggcagtcacatcaggagacagaaacagaccatgttggtgctgccctctcaggtcagtgcaaatgccacttgaggagggctgagactttgcagcataaaatgaccagaacaaggagaaacacagatgcaatggcaatagctggcaattcgcacatggcgtcaaacaccactgccacagaagctttttagctacaagccacgctatgcaacctttaagcaaaacattattgattttggnggttgtaaaaacataccttcaactgcagaactcagtttttatgacaccttgaataaaaacaaaaagtggcagttatataatggacccaaatcgccttttccaggcttctcataacacacgcatgcttcagatttggatttttctttttctgctggcattgcaagaacgtaactaaacaaatatcaacttcaaaaataaaataatttttagtcttaaa

SEQ ID NO: 272735 - DNA, 257 bp, Homo Sapiens
  misc_feature (241)..(241): n is a, c, g, or t
attctcttaagaaaactgtagagcctttcagagaactttacaatcatttgaattaatttgtaatttccaagaagaatcaagaaatattccacagatcaataattctgaaacaaagaaaaatttacgtctgaaattgaattaccaagtgacctagttaccatcaacccatcttccttcctccaccttatttgtctcctttctgtgatctgaagtgtgtgctgagggattaaaacttgtgggnaaggagggcagccccg

SEQ ID NO: 272736 - DNA, 393 bp, Homo Sapiens
  misc_feature (208)..(208): n is a, c, g, or t
cccaaagtgctaggattacaggtatgagccactgtgcctggtcatgcctggtattttgatggaatgcaggatactatgtttcaaatagtatagaggctaagtttcttctggcaggtaactagaataagggctgatcacctcattcaatcaaagttttgaagttagatttaaagctgataacttctgggtcaacctttatttgtaggancataattcttttgaggtctcaaccgaaggcctcgaatatttccctttgtcattcccatttggctggccttgaaatctaatttttttgtctacctactcctgtaagaacaaaaactgtgcttaagtttttaagtctttggtaatagctctctactgaatttctccttctgaatttgaaaataccta

SEQ ID NO: 272737 - DNA, 417 bp, Homo Sapiens
  misc_feature (21)..(21): n is a, c, g, or t
  misc_feature (36)..(36): n is a, c, g, or t
ccacccccaaaaagaaagaangagaagccggacccntgttgaagtccattatgtgaacatgctcctattcctagagactttggtatgtgttattttatgtaattcctgaagacaatcctggcaggtaggtgtggggctattttaaagagttagggcggtaaagtcacacagccagaagatggcccatggagggttgggaggcagatttttctgatcctagtctgtgttctttctatctcacaaagacattccataccatctgcaagtcgcttttgactagcactcgagaaagaagtatggggacattggaaacgctctaatagaccacaaccacctttgaaagagcagtcatctctatgagccataactataaggaagaaatgcagatcccacagaccaaaatggaacatgtctcct

SEQ ID NO: 272738 - DNA, 350 bp, Homo Sapiens
  misc_feature (29)..(29): n is a, c, g, or t
ccagaattgagaaagtgacgcagatgcangcttgtccagcttcaggcgtagatgaagggagttaagtgtgccagattaagtccaaagtggcacacaagcatgaggggcaataagggcacctgggtaaaccacagcaagagggagtctgcaactaagaaagggggagtgtggtgactagcaaggagcaagcgcttgcaattttcagaagtccagggcaagctgtgctgggcaccaggacagggaaacattgcggctgcgctttcagtccagaggctggctttcagctttttgaaggagactgacagggggtatttaagtagttacttggaattgagaccttttaaaaaagg

SEQ ID NO: 272739 - DNA, 484 bp, Homo Sapiens
  misc_feature (148)..(148): n is a, c, g, or t
  misc_feature (234)..(243): n is a, c, g, or t
ctcaataggccccgtggacttttttgtcccctacttatcttttggaaaactacccccctttttctctccccttccttcctccgggaccctgggcctaattgcagttcactagagctttcaccatagggtccagaagcacagctattcntcatgcagtcctgctgtccaccctacaaaagcaactaaggcaaggaaatgcaaagaattcaggtatgttcttggactaagttgttnnnnnnnnnnaatctagtgaaagcaaattaatacaccgatagtttatgtcacacagctaaccacagaaaaactgcttagtaggtggaaggcaagagctgggcctaccacctgtttctatcatgttcctcaggcagggctgcagtgctacaattcattcctcagagctgtcctcccaaaggctcaccaagaccctaatttagcagcagcatgtgtgaaattgaactgagtcacagtgtaatccagtgagtca

SEQ ID NO: 272740 - DNA, 335 bp, Homo Sapiens
  misc_feature (44)..(44): n is a, c, g, or t
  misc_feature (48)..(57): n is a, c, g, or t
tttaaaacaagcccaaccccctagctggtaattaatgaggttcncttnnnnnnnnnnttcggtgcacacagactgacatgaaaccctgggtgctacagtaaaagaaaacaaaagtccagtttgtgtctcttaatcgctcacttcaactcatttcttctaaataaactatttaatatcctggtcaggaaatgacatgttaatgctttgccccctgaagggggaaaaaatctgtcctttaacaagctattctgttttgtgtcaattggttcgtggcaggaagctattagaagtcaaacgtccagatgcattactgctatcttagtttaaagggggaa

SEQ ID NO: 272741 - DNA, 354 bp, Homo Sapiens
catgggaacagccctagggtgagtgctgtgcatcactgctaagggaccttgagcttgggaaaccctgtctgtaagaaaactcactcaacttttgccccaggagaaggtattttatacaaaaataatagaaaagatggtctgaaacaaaagctgttcagtgctgctgctcaccaaatgcacaaacctaagacccatggaaatctttctaccagcctatttcttcctccttccccactttctttaactaaaagagaaatttatgaattaatttcagtggagaagtagatggttttttaaccatcaaatacattataattttactagaaaaagtataagcattatacatatggatat

SEQ ID NO: 272742 - DNA, 788 bp, Homo Sapiens
  misc_feature (247)..(247): n is a, c, g, or t
  misc_feature (274)..(307): n is a, c, g, or t
ctagagcctcccaaagtgctgggattacaggcttgagcaaatgtgccccagccaatgatgaattccagccgtcccattttaaagatgagggagactaaggctaggagaagggaatgacggcctcagggcaacaaagcttgggagtgcagagcccgagttcatctcaggcaaattcagaacaaactttctgagagaaacagtggggaaaacagtgggagtttagggaagatgggccatattgtcattnggaatatccaattgtctgctatctgcnnnnnnnnnnnnnnnnnnnnnnnnnnnnnnnnnntagaagagtataaaatccagtagaggaatcgtgatttaaaactagggctctggtttaaagccataaaacctcagttcacactagcttaatgaaaagggaaagtcaagggggttcattaagctcatgcatttattagctcatacccatgggatctccccaggcatgactgatcccaggcctgggaccaggtaccatcaccagatctccacttctgcctcttggctctgccatgttagcttgattctccaatggagtggcaagaagagccaccaataccttcatacttacattctagcatgtagcaaagccagcagaatctcccgatggttccagctctcaagtacccagcattgggtgctatgtgcattcctaaccctgccatggtagccaaaagactcgaatgtattcattgccaggcctcattcacccacccagcctcggagtagggtcagttctacacaaatcacacgcctgaacacaa

SEQ ID NO: 272743 - DNA, 593 bp, Homo Sapiens
  misc_feature (267)..(267): n is a, c, g, or t
  misc_feature (320)..(320): n is a, c, g, or t
  misc_feature (503)..(503): n is a, c, g, or t
gtcagtcttactcattgtgagagggcatgaactgggaagcaaggattattgggagccattcagagacaagccatgtagttcaccatgacccccagaaatttgtgttccttcctcatgcagaataccctcaccgccaccaaatccccgacagtttggtcccatgacagcatcagtttgaagtccagggctctcatcattgaggtgagatgaggctcctgggggtccagtttcttcaagtataggtcctctcagtctgaagatctgagnaactaggagagagaggctatctgctcccttccacaaacccaatggcacatgtngggacagccataggataaccattacagacatgcccatccaaaaagggagaaacagggagcgtacaagagtcgctgatccattccagttccgaaatccgctaggtttatggtggcatttcctcaattgggactcaaagcctgggagtgatttctgtcttggttctgccctctgagttctccttncttttctgtgaaaagtagcctgtattttcagtgtagtcgttttctcagcctgcttcctcctttttatgttatattacctttgactttttg

SEQ ID NO: 272744 - DNA, 199 bp, Homo Sapiens
  misc_feature (94)..(94): n is a, c, g, or t
  misc_feature (97)..(97): n is a, c, g, or t
agtcattcacagatggacaccgcaggcctgcccaggtcacaccaaccctggggactgggactcccaagctggcctgggagcctccagggcattncangggacccggcaccatcgaccgcagtcaagtgtgcatttcctgaccacctgtcctgtgaccacatggcccctgtagcaccatcactgtggtgtagacactgcc

SEQ ID NO: 272745 - DNA, 396 bp, Homo Sapiens
  misc_feature (274)..(274): n is a, c, g, or t
  misc_feature (282)..(282): n is a, c, g, or t
  misc_feature (326)..(326): n is a, c, g, or t
ttgtagaatgtaatggctagaaatcttagacattcttattcagtagatctggggagaggtctcaagatgcccttggtgcttctgattggccaggctcctggcacccgacctctgagtgagtggagtggtggggccgggacggggtgagggcagagtgggaggctggctgcaactgttgcagcttccggccttgagggagctaggatgcctcgcctcttcctttccctccccacttcccctttcccccatgcgtccgctaatggcattgccgcangtccaagnggctccttcctgttactgactcactgtgtgaatcggggggtctncagcaggatggagggagtagagctgtagggtgggctggggccccttccctatccggctgctggagccctg

SEQ ID NO: 272746 - DNA, 647 bp, Homo Sapiens
  misc_feature (383)..(383): n is a, c, g, or t
  misc_feature (461)..(461): n is a, c, g, or t
  misc_feature (529)..(529): n is a, c, g, or t
  misc_feature (587)..(587): n is a, c, g, or t
gaaacaactataatttgacttcggaataaaatttctttcatcagaaatgtatgttttgataggtgcactgcataggattctaatagctctaaaatctgcttcaattcagagctgtgatcttcatcacccctaagccttatatcttactctccacaaattagactgcatccttaaaaggcatccgctgacagatttcacagggactgaagtggggctggggaactgcattccatgggcatctgaggcttcccttagacaggccaacttcgtcattcagagcaagcactgaataaatctcctccaacttacatgaatgtaacccacttcatgactgtcagagggaagaaataagcctttgagaatcctctgttctaacagggctnccctcatgataatgcctagaccggtggccagagtttcccacagccgaggctccagggtacagatgctaaaatgctggncccagagggtcagcagggatgagcttagtttctaaagtgaaagactctcattacggcaatgagttgcntagggccttaacactaaccaattcacacaggtctgacggggcatgagtgtgcaagtgnaagccatgcaggttcctgagacagccacagtcggtggggatcatcaggggccggctcaat

SEQ ID NO: 272747 - DNA, 461 bp, Homo Sapiens
  misc_feature (41)..(41): n is a, c, g, or t
  misc_feature (99)..(99): n is a, c, g, or t
  misc_feature (144)..(144): n is a, c, g, or t
ggaataacgggccagaagcccaccaacccccggcccccgtnccttaaagaacctggttaggggatgaagtgtgaccccctacaaaaaggtccccgggtngggtacccgggccacaaccaactgaaccggagggattaatccaangggggaaaaagtttccctaaaaacccctagtgttttccccccctgaaaacagggataaaaattcctaccccacaggcatagcaatggtgatgagaaatacccatgattagtagagaaaatagtggaataaatatttggagttagacatcaactactcaaagggcaagtcatttcactactctgagccttcttttcttgtctgtaaaatggaactaacaatactcatcctatgagttcaagggattgctccaaatgtaaaatgacataaggagaaagcacgtgtaaagattatcactgccaatctctctgactctgtc

SEQ ID NO: 272748 - DNA, 395 bp, Homo Sapiens
  misc_feature (232)..(232): n is a, c, g, or t
ggagaactagaccaggaggcactggtgtgaccctggagtagatggaactgtttgtgcatgtgtctttcttaccttccattctcataaagaattagcacattccccacatacaccctggccagactgtgtctttgggactgcagcactaaggtgtgtttttgtttgttaacttattcccagtgcctgtgttgaccagggaggctttggggaataaaggtacataaaggtcttnggagcctgggatgagcctgtgggtcaaggagatgggcaggcagtgtccttgaaatttgggaatgtgactcacactcttgcctgtagggggaaagaaaagagagatccagactgttactgtgtcttattgtaggaaaggggaagacagaagagactgcattttt

SEQ ID NO: 272749 - DNA, 606 bp, Homo Sapiens
  misc_feature (50)..(50): n is a, c, g, or t
ttgcctcgaggcaagaatcggcagaggcgtgccacctcaggatcataacngtcatcaagggctcacccaaccaattaacttctaaaaagggcttaataatcacttgtttattttttcttttctttccaacagaaggtcatcttgtcatcaatgtaacttgggctaaccatcctttaatccttcagtttgatgcttgttcagtcatcctgtgtggagacaagcaagctcaaaggaagctgtctcatgtagataagtacctatgtccataccataaaaagtcaaccaagtataagtatagaaaccttaaaaagtccctgtggtgactgggacagatgtttgggaaaccactcagtatggagggtggacagccagggccccctttttcaaataagttatggggactaaaacagaaactccaactaattcatggtcccaccccaccaaactgtaagccactgcagtgtaacccctcattgctaattatagctaacccccaaacaatggcccaagaacccactatattcaaacagtatggattaggagcaaatgttacaaaacaaaatcccataaaaatcttcaaccactggttaacaatgataattaaaa

SEQ ID NO: 272750 - DNA, 321 bp, Homo Sapiens
atatggttaaataaccagcccctaacagattttttggttttaaaatatcctcctagggctagccctcaaggttaaagtaattatagaagtttgggtatgtattttccttcataatttgaatataattgcttcccattgtgactgtcaattgaatgcatggagatcaattgtgataatatacaggattttagtcctatctctactgctgaagtaaccttacacaaaatactttgtaaaaaaatcactaaagtgccagcatttttaaagtgtatatttttctttggcaacctctcatgaaaagcactaactaaaaatatttaa

SEQ ID NO: 272751 - DNA, 583 bp, Homo Sapiens
ctgcaaaagctcgacacctggacatctcccgagaccgcctctccagctactacaagttcaagctgactcgggaggtgctgagcctctttgtgcagaagctggggaacctaatgtccctggacatctctggccacatgatcctagagaactgcagcatctccaagatggaagaggaagcggggcagaccagcattgagcctcccaagagcagcatcataccttcccgggctctgaagaggccgctgcagttcctcgggctctttgagaactctctgtgccgcctcacgcacattccagcctacaaagtaagtggtgacaaaaacgaagagcaggtgctgaatgccatcgaggcctacacggagcaccggcctgagatcacctcgcgggccatcaacttgctttttgacatcgcccgcatcgagcgttgcaaccagctgctgcgggccctgaagctggtcatcacggccctcaagtgccacaaatatgacaggaacattcaagtgacaggcagcgccgctctcttctacctaacaaattccgagtaccgctcagagcagagtgtgaagctgcgccggcaggtttg

SEQ ID NO: 272752 - DNA, 432 bp, Homo Sapiens
  misc_feature (41)..(60): n is a, c, g, or t
  misc_feature (101)..(156): n is a, c, g, or t
  misc_feature (263)..(324): n is a, c, g, or t
  misc_feature (338)..(359): n is a, c, g, or t
caccaccccggtcaacatagtgaacactttgtctcctactnnnnnnnnnnnnnnnnnnnntgaagcctaacacgttgccagtgccacaccctgtaagtccnnnnnnnnnnnnnnnnnnnnnnnnnnnnnnnnnnnnnnnnnnnnnnnnnnnnnnnngctgtagtaagcctatgatcacacccattgcactttagctttgctaagagcaagactgcatttcttaaacaaaataaaaattagatgggaatattgctcaagccctnnnnnnnnnnnnnnnnnnnnnnnnnnnnnnnnnnnnnnnnnnnnnnnnnnnnnnnnnnnnnnagaccctttctctnnnnnnnnnnnnnnnnnnnnnntaaccttctatcatatttcccagtaacaccttccctcctacatttctcctagaagcccttaaattttgttttt

SEQ ID NO: 272753 - DNA, 449 bp, Homo Sapiens
  misc_feature (424)..(424): n is a, c, g, or t
ttaagcagtaataaatggcaaaactacaggagcagtcaactatgaagactgagaagcctaggaatgaaattcagtactgatcaagtaaaagttacttcagagttaatgacagacaccaacgatacatcgatactgcaccaaatggtaacaggtatgacagaaatcaatcatcggccgcccacacacacgagtgggaaggtgacctcactgtccccaaatacagaatggcctcacctacctcctaccttcttctcatgctgttcacctctcccttggctcagcaccccttgccagttctcccaaggtcctctctgccagttgaaggcttccctgatcgccatcctcaatcccccaggactcacaggttgaaagagtcgcagccaagagttagggaacctgaccatgagccaatcccagtgctaangccccttgacgtgttaattcagtta

SEQ ID NO: 272754 - DNA, 514 bp, Homo Sapiens
ggtcagcaccgcagtctgtttcctgtgcttctgcctgggtggccaggggctgcccagaaatgacccagattcacaccccagcctcctgctcccctgtagcatgctgggtttctgtccatggtagcatttgctggaaacatctgttgttcctttccatcctggccttcgttccttcacttgctggccttccctgggaggcaggggcagtgagttcttgggttcggagtcccagggcagtcctggcgcaggtgtccagtggatggatgtgtgctgggggtgtgtggaggaccctgcagagcatgcatcgaagtccctctgctacactcactcaccctcaaggggagtctgctgcgtgccggcaccgtgccgctgagaactgggtgcacacggccccacttggtccccattgcatctctgccccagaatggaggtgcagagaggccaggtgtgtgcctggcgctgtagggcaatggttccccaggtggggtgtgggcgcctagcaaggggcagtgat

SEQ ID NO: 272755 - DNA, 648 bp, Homo Sapiens
  misc_feature (101)..(194): n is a, c, g, or t
tagtctccctctgtcactcaggctgagtgccgtggtgcaatcacagcttacagcagcctgaacctcccccaggctcaggtgatcctatcacctcggcctcnnnnnnnnnnnnnnnnnnnnnnnnnnnnnnnnnnnnnnnnnnnnnnnnnnnnnnnnnnnnnnnnnnnnnnnnnnnnnnnnnnnnnnnnnnnnnntaatattcattcaataatttcaaaatcataaaaatacacatttcttcagaaaataagaactagcgttagactttggaaggaactaaattgttttccttaacagaattaccatttttaactttattaacattacatatgcaatttcaaaagtctaattcattaaatcaattcctctcaaaatcctagaacagtttttgtagttatagacaagcttcttttaaaaattaacatggaaaggaacaagccttagaacatctaaaactgttgaaaaataaggtgaatagactccacctggcattaagtcagactatgtagctacagtaatcaagacagtgtgatactgacagagcaacagatactcaaaacaacggaacagaagagaacccagaaacagatttacacaaatatattcaatgatttttcacaagggtgcaaaaaaccatgtcagtagacg

SEQ ID NO: 272756 - DNA, 469 bp, Homo Sapiens
tgcccctggtaaaatatggtgcccttttgggtgtgtttggttttggttccatcacctacaagataaaaagggaaacattacaactcaagtctttaaaaagttcatttattgaaaatccatatgtataaccctagcatacgaatgagcagatttaaacacataacttcaagccatttctgaaaacatacacccaggagctctgctcagctagagtcagactcccagctcccagaccgactgcgtgcggggacagcgcccgcgttgatgaggaccagccccactgcaggctgaggcggtgtcaccctgggaaggtcgtggtgcgttgtggcatattaagtctaaaccagatgaatgtaaatatctctttgtaaatcatttatttcactctgttccatccaggtcagcaatcagattgtggcatgctgggtaactggaaaaaataataaaaagtaagtttcaataaaaaaaa

SEQ ID NO: 272757 - DNA, 225 bp, Homo Sapiens
caaagcactgggattacaggcatgagccagcatgctggctggttttcctaatttcttaaaatgaactgtcatttatttgtgaactctcttcttgtataataatattaggctataaatttccctgtaagtactgctttagcagttatcccccaaattttgatatagtgtgcacttgttttgtgtgagatggaattaggttaaaattggactggaaaagctctagtt

SEQ ID NO: 272758 - DNA, 912 bp, Homo Sapiens
aaactactccaaaaccacaaaataactttgctttcctccttttccttccagtatagaaagaactgcagtggttcacttgcctccccaaagtgtctcaatggttccatgactgaaactgaaagtaaatctgcttgcattttaaattataaagcaggctcattaatgatattgcttaatcagcagtacatatgtgttgtttgataatgttctttgaagaaatttcgtaacggcttaactcttccaaacccagccatcacccctaatatttcatcacaatcacacaactacaaccctccagcctctgccaaggtattctgactgggctgccttccatgctcctcaacccccatttgccaatccagttattacccctgtcctccacagtttggcctcctactactgcttccatctttcaacatctgcctgttacagtcaccttcttaaaccaccatatacaatgtcctgggcctaatttaaactgtgaagcagatccaaagaaaagaatgaaaactagacccaaatgacccactggcttcccaagcacgatgtcgctgttcaacaaaagatgatatacaattagtctgcttcaacttccacagaaggggcaggggcagggagagaaagcaatgactacaggaaagtttaagtgcagtttagagtaaactcatctatgtgtctcatttctgaatctgtgaaagatgagctgggtcacccttgctggaatatcacatctgctctagagcctggagaaaaaaggcagtttgaagtgtcccatccctaagaataaccacacttcacaagagtacaagtctgaaaagccttttgtgttcaatgtgaatgcttgtctacaacctaacactcaactctgttctttctatgggttctcaaacataaaagctacgtagaacacat

SEQ ID NO: 272759 - DNA, 489 bp, Homo Sapiens
  misc_feature (264)..(264): n is a, c, g, or t
gagattgcatgggctcggcgtggaaaggccatccaaggatagcgggctgcctggcctggaaaactgaatgaattataaaccgctcggtgctgctgaaattgagggaacctctggggcaagactgaaaaggtactattgagagaattggcatttgtagctgcagcaggatgcaggaatccagagcctgggacctttggcggttgtagtgtgtgaagaggagttctgaagagatgtggggcgaaagggaaggttggtctttgaacnggacagttccttctcaatcaggtctgctaaggctttttcgagtgacatcgaagggatcaaaacccaagtcatcctctggttgtttagaagaaccaaagccaaaagctgcttgccagtctgtagaggatgatactgggattgtttctgatgtgaagaggctctgtggttctggtgctgtaggccagtcactggatgtctgtggggagctggggaaaggaggaagcc

SEQ ID NO: 272760 - DNA, 450 bp, Homo Sapiens
  misc_feature (434)..(434): n is a, c, g, or t
gcaccatgagcttcaaacctgaccctcacttctcagtggacccgagtttcccttccatgccattattttcagtggggaagttttagaggtgagctgttggccacaatatcaattttaagtgttcatagcagttatgtctcctgcattcttggctcctgggatttaccaccaagagtccccaaaatattaatgctcttccctttttctaccctcaaacttatagttgtatcttattttttaaaatgaattttcatgggccagggcacagtgggctaccgcctggtaatcccaggcactttgggggagggctggagggcagggaggaatttgctttgaaggccaggaggtttttgaggaccagcctggggggcaatgttaggttgaggacccccctggttcttcttaaaaaaattttaaattaaaattaaagggcngttttccccggaagga

SEQ ID NO: 272761 - DNA, 516 bp, Homo Sapiens
  misc_feature (167)..(167): n is a, c, g, or t
  misc_feature (172)..(172): n is a, c, g, or t
  misc_feature (400)..(400): n is a, c, g, or t
  misc_feature (438)..(438): n is a, c, g, or t
  misc_feature (485)..(485): n is a, c, g, or t
tttcatatcaacagttgttcagaaagggaccagcagatagctgccccggctcctctaaggaagagcaggcagcttccccccgaatctacatgtgcgtgtgctcggggagaggaaggctggcggtcaggaaggcccatctcccagcctgatcccaggcagcagggctnaaggnagctgggcaggaaggctctgggccggccatagccacctgccagcaagggcaggcttctcttctcatggctggggcagctcggcacagctgacctctgctggccaagtgaagcactgcatgcagccacagagccaggcacagctgtcttccgaagtttcccgactcctgatgttttggggattcaaatagtcctttttcatatgcttggaggcacaaaacttggggcangctaaaaattttttatttctgttggtcaagggggcaangatgccagcttggaagtgccaaaggagctaaagggcccagcactgcnggccccagaactgtctgttcaaggctgtgct

SEQ ID NO: 272762 - DNA, 391 bp, Homo Sapiens
ctcttctagcatcttctaggtaccaaggatattagccacttgagggtgttgggcatatttgtttcattgtaggcaaaaccctcttgtggtttcccctccccaggtattgttgagtctgttcaaagctgggtgtgttgaaacactgcacaaatcctgccactcttgatgtgccgcttgtctcagccttggcagaggctgagtctgttcctgtgcccacctgtccagcaggttttgatgttggctcctgaaagagtttgtatttattttattttgcactagtcacagttgttgttaaactgtatcaaatgttttgggagattatttgcctgagatggaaagagagatggatgatttattgcttcaattgttttaaattaaaagctattctcac

SEQ ID NO: 272763 - DNA, 381 bp, Homo Sapiens
  misc_feature (18)..(18): n is a, c, g, or t
  misc_feature (315)..(315): n is a, c, g, or t
ctcagctcactacaaccntccaccctgcccagggttcagggtgattctcctgggctgctttattgtttgtaggagacaagggctcactatgctgagatgcaaaaagcattccttttgccccttcccagtccatatgctgtcagagggtaaccactgttcggagtttttaaagttttgtttctgactgcagaatcttacattttaattttatttgggaaaatggctccctttactattccaattagtagtctacattgttccatatttatattactgctacctactttcccatcttagtcacgtagtcacattttngttaaagacattttttattagaactaaattgcacctctttactacaattgaaggctaaatgatttg

SEQ ID NO: 272764 - DNA, 468 bp, Homo Sapiens
ctacaattcacagtgggcacgagatgaaaatagaatggttgctagggggatactcagcttttcctgctcccgggactggagagaagcttgtgctttggtccccagggaggggccctgtgcaatcacagggacagcgcttacagcatcttctcagtggtgggagtgcacctcatgtgactacatccccccctactttacctcaagccccttgaggggtgtgtcctccatcatatatcagagcccagcacagtgccctgagacatagtaggtgctcataatgtatttttgaatgaatgaatgttatttgtaatttctgtcaatgaaagccaatgggtggatacaagatcaatacacaaaaattaataattttttccatacattagcaatgaaccatctggaaataaaatttctaaaagttccacttataatatcatccaagcaataaaataattaggagtaaaaatttca

SEQ ID NO: 272765 - DNA, 439 bp, Homo Sapiens
  misc_feature (181)..(395): n is a, c, g, or t
atgtgttgttgtaaaaagcagttaaatacaatggaaaaactcgtaataagaagatacagtttaacatcaaaaagtttacccaaggtaattatgagtactacctggcaaaacttcacggaagctgtggtatcacttttatgatggaagaatggtgtttgcattttgtgtaaaagtacttgcnnnnnnnnnnnnnnnnnnnnnnnnnnnnnnnnnnnnnnnnnnnnnnnnnnnnnnnnnnnnnnnnnnnnnnnnnnnnnnnnnnnnnnnnnnnnnnnnnnnnnnnnnnnnnnnnnnnnnnnnnnnnnnnnnnnnnnnnnnnnnnnnnnnnnnnnnnnnnnnnnnnnnnnnnnnnnnnnnnnnnnnnnnnnnnnnnnnnnnnnnnnnnnnnnnnnnnnaataaataaatggaagcaactgaatgggatgaggtctctcttga

SEQ ID NO: 272766 - DNA, 461 bp, Homo Sapiens
  misc_feature (77)..(77): n is a, c, g, or t
  misc_feature (131)..(131): n is a, c, g, or t
  misc_feature (163)..(163): n is a, c, g, or t
aagcggttcctgcttgcatctctggggcagaggctccaccagcaggctctcctccattcctccagtcctggcggaanaaggccctcctaggcagctggtggataacagaggagggccctaagagcaccaanaggaagaacccttggctgggcaccaggacttnggacgttgaaggtcctcggtgtccccgcatgagatgtctgcagaatgagacttacagtgcgctgagccctggcaaaagtgaggacgttgtgcttcgatggagccagggagttcagcaccttgactcttaggccagtttcggatgagctggcgtcttatttcttgcccacaccccagcccaacctgcccacgttctctattgttttgagaccccattgctttcaggctgccccttctgggtctgttactcggcccctactcacatttccttgggttggagcaacagtcccagagagggc

SEQ ID NO: 272767 - DNA, 880 bp, Homo Sapiens
  misc_feature (630)..(630): n is a, c, g, or t
gtctgtttatgctactatagcaaaatacctaagattaggtaatgtataaagaacagaaatttatttcttacagttttggaggctggtaagtccaagatcaaggtgccaacaagtttgcttgtctaacaagggctgcatcttccagaggggaggaatgctatgtcttcacatggtggatggcataaaggcaagagagtcgaatgctgcgtgaaacctcttttacaaagacctcaatcccattcacaagggaggagccctcattgcctaatcatcacctgttaagggtcttgtctcttaattctgttacactggccattaagtttcaacacctgaaatttggaggagacacattcaaatcatagcagcaggtcactgattgttatctttattttacatataaggaaactgaggctcagcaaagtcatgtaattattccccaggttatgcaggcagcaaatggcagaggcagctcattgtttggtctttccataccatgctgtactgtagatttggaaaggtttaatgcatcaccagttagtaagtcaggacctatagctccttgggattgctacatatgatggtgaatgatctgatggcccaaataactgcatattatagtgtaaagaaaanagaaaagtagaagaagaaaaagcgtatatacgggcggactatccctagtgggtaattactggctgcggcgttaacgttgctggaacttggtccaatacgctgagaccctctcaggaaaggaagcccgagcgtctatgcgggacggatgaccttgcgggcgggttttgtgagaaaccccggtgtttttcgaggctaaagctggtttcgcaaaagggccggctctgggtttcacctttggaaaaacgggctg

SEQ ID NO: 272768 - DNA, 407 bp, Homo Sapiens
acgagcaattctgaatacaccttcccagtgtctgcagtccagccccttctgtccatcccacagttcctgcctcgggtcagtgttctgggtggtttctctggaatcatccaaccctctcctacctcactgccctcagcccatcctctgagctgcctcagggaaatctccttaaaacttcagattgggtcaccttcctgcttaacaagcttcagtctccatccccatgcccaggtggtcagggtcagaggaaagcagctggacgtttcaactgctcagaccgagggtcagccctggctctctgcttacccactgaacgcctttagacaagtcacccaacttgccaaaccttcatttcttcagctgtgaaatggagataacttgccttactgagggatgagtgagtaaaa

SEQ ID NO: 272769 - DNA, 686 bp, Homo Sapiens
attgcaaggactgaggctggagctccacttaagtggtttgatccaaactggaaaagcaacttccagcaaggaacatccagataaaccctttgcggaacaaaagagtgggccccctcctgaccacaaagatggaacccgctctccttgatacaatccacgaatttacatcttttaatcggctgtccactcaggcctaggcgtagtcagaaaatgacaccctccacacatgtgtaagcagaaattagctcaaccacggctgaccctatgtagttctgggtttgactggggagcactttcaaactcctatacttccgacgaaactcactggagcttttaagtcacacagttcaataatttgtatcccgccttcctggagtgtatcttccctgctactcatgaaaagtacaaccacgagccaacacacgccgtggtgcgtcagcaggacttaaactgtcctgactggtgggtgaggtcggggagtgtagggtggtggcgggcatgatctgtgtgcagtgtgacagagtaggagcagcccaggagaagttgggtaacatgcactctgaccattatttcaagccatcggatcgcaaggttgttggtaaatgctagggagaaaagcagatttttagtaccgctttatgaaaccccttgtgtcctttccaaggaactgtactcaagcaatcata

SEQ ID NO: 272770 - DNA, 679 bp, Homo Sapiens
  misc_feature (139)..(139): n is a, c, g, or t
  misc_feature (298)..(298): n is a, c, g, or t
  misc_feature (630)..(630): n is a, c, g, or t
  misc_feature (662)..(662): n is a, c, g, or t
gcagacagcaagtccctgaggacacatcacacagtgtcctgtagctaagtgtctaggaaaaaacaaaaactccaaacccttcagtggatgaggacaaggtcgcagaaaggcattctgttgacagatgaacagccgaaanctggccagaccctcctgtatgcctctgcccttgtcctgtgggttgagggggtctgaccaggaggccacctacagcaggaagtgaggctgccatgtttccttgagacacagctgccctctccccagctctgtccctgtaggtcacctgccggtgggcganggatcctctccctgggataagcactcccagccccgtttatcagaaacacaggcaaggaaattggaactgccacccagcccagcatggtggctcaattggttggttgcgttgtcagttgtctcttcgttttgttaaggtttttaataagtacgtttggcataatgtcttttaatgggtttgtaatatttgtaacggttttagcagcctataacttttcagctgggtgcttttacttaggggaaaaaaacaatttgtaaatacaggaacattgttttaaaaggacataaccataggaacataggcttcctgtttgtggggattttgttttcccnattatatttccaaaggtaaaatgacctttacnagggggggccccaaaaa

SEQ ID NO: 272771 - DNA, 831 bp, Homo Sapiens
  misc_feature (316)..(332): n is a, c, g, or t
ccattttagcaaggcacccacttttaatcatggcactcccagcttcaaacctgtcaaatttcatgtcctcaacataaaatctaaatgcctgagcatgaaatgaaaattggaccaattatttcttacattaaaaatctttggattgctcttctctacttaaactataaagctgaagttcttttcgcatgaaactagaacttttcaccacctacagtttccagcttccatttcctgttcctcacgcttctctctgaaaagactgagtttcccattctccagcctccaaatgcatttcgattttattgtccccaaatgnnnnnnnnnnnnnnnnngtttaaccacgtccctctgcccataattcattaattcatacagcagcatgtcctgattctttttctgggccaggcacggtgctcgatccccaatggaaggaaatggaggcagacccatcttgcaggtcatcaccaggaaggagatgagactcatgtcctggagacgaataccccactggaggtgagtgaggggccttggaagcagggccagggggttccctccacacctgctgagcatctgcctctctgggagggctttgggcgttgttggggcctgtcgggcctccaaattctggctttagatgggcactctgggattcccatctggcttcacctgcctaccagctggcctgccatagcctgggccctgcctcttctctgcgctttgcagaaatcatattctcagtccttcagctgtggctcaatacatgttgttctcaaatctcatgacagtttctttaagaaatatctactgatttgaaaattcccgccttatttg

SEQ ID NO: 272772 - DNA, 925 bp, Homo Sapiens
  misc_feature (360)..(360): n is a, c, g, or t
agaacaaatgttgcaaacgaaaatcaccctgccaaagcaaatcatacagtttcacaaaagtagtaaatttggcactcgttcacaactgacagtgcagattattcagacaatgtgttctgtttttattgtttatgttaaattgttatcattatgtttcccataattacctagattgaacattagtacaacctacatttcaacggacttaagagtcttttatcatcttaaaatgaaagtgataaattaaaatttacccctaaacgtgctactgctactttaacaccattagtctgtactgctctgtgttctaagggcccctggatatttattcaggaatgtgaatcagcttcagtcctcttnattgcgcccaaactctccaggagacaggcaggagggggatgatggtactgagagagtatgtgtcccagagcttgtcaggacacagtgccagaatggctctcatcctcttctacttctctgtcccgcagattcctgccaggtttatgttgattggccatggccataaggatattacccatcagacattctctgaagaatatccagaaagcagatatttagtagatacggtattttatctagtatgaattgtgcagtttgaagatgtctgttaatgactagccctatcagattttttgagccatttcccagcatttctatgcttaatgtaaatatttgttgcatggacttggatgctttaatttaagaggatttcagatgtcagcctccagttattatgatatttttagtttacatcttttttggggggtggggtggctgggtatatttgaaaagagacagctggataaaggctgtatagccaagttaatgtatacagaacttcttcggtgaagatttgattgtgattgagtctctaaacacatatacaattgtttctttggtaaaa

SEQ ID NO: 272773 - DNA, 420 bp, Homo Sapiens
  misc_feature (17)..(17): n is a, c, g, or t
  misc_feature (26)..(26): n is a, c, g, or t
  misc_feature (48)..(48): n is a, c, g, or t
  misc_feature (53)..(53): n is a, c, g, or t
  misc_feature (60)..(60): n is a, c, g, or t
  misc_feature (84)..(84): n is a, c, g, or t
  misc_feature (95)..(95): n is a, c, g, or t
ttgtggaaattgtgaangggataaanaattttcaacaacggggaaaanaggcntttgacnttgaattccggaattttaaaacgnacttaacttanagggaaatttggcccttcgaggccaaaaaattcggcacgagctccctggggaacgcgctggcctccccagcttaggccccaggtgcccaggtgtcatggggtctcctgccccatcttccccaaggatgccattgctgtcttcatcgtcttcccccgtgtgagacactggttgtctggtactcggcgacagtgtaccagacgcgcaccctatgtgaggtgctttaaggtccctgtcctcaggaagcgcagtctggtgggaagagatgagcgcttgaacaaatcactaaataacacaaaacaacaatgtaagcagcactttcttgta

SEQ ID NO: 272774 - DNA, 422 bp, Homo Sapiens
  misc_feature (148)..(148): n is a, c, g, or t
gtaggcctaagagtgaagtcagaagagagaaaaccagaagcaagagatggaaagaccagacatcgagtcttctccaatatccattttacccctgaagtcaccctgaccctggacttactggttaattgagccaataactttccataantgcttaagccagtttcggttggggttctgcacttgccaccaagatagtcctgattagggaagatctcaggttcaattttacacgcagtaaatttgagatacctcagagtggagacatcaagttggctgatgcaaatgtgggtctaatctagaggtttaaattggtaattctcctttgtatagatggaaagtgaattccccgtgcaaaagcagaagatgggtcttcattgaacatttgatgaataaatgaatgaaggcataaacaatttcaaaaa

SEQ ID NO: 272775 - DNA, 462 bp, Homo Sapiens
  misc_feature (96)..(96): n is a, c, g, or t
  misc_feature (142)..(142): n is a, c, g, or t
  misc_feature (159)..(159): n is a, c, g, or t
  misc_feature (236)..(236): n is a, c, g, or t
gaaccttaaggaaaaaaaatccatctcacaaattaatgtggccacagctgcccagaaaacctggtagtggctcaattaggcaaagtgtaggaatcntcatttttgtttttctctccctttaagtttaaagaaacaacaatgncaataggcccagagaantttagggagggaaagaaaagctccaaagggagggaaacctggggacaagaggtgtgcacaccccacatgtggtctcnactcttcacacaggcccacttatggtttgaagtagaccagtttagtttgactgttcttctttggttcttggcatctgactggaccaacctggaacctggtccagaccctcacccactctattcttatgccaatggacatacctatactttgaacctctgtacttttaagaaaagtccaatgttacaaaatcaaatgcttatattcagactggcacactttttaaat

SEQ ID NO: 272776 - DNA, 389 bp, Homo Sapiens
cccggtgaggccaaggtttcccagtgagcctctgcgcctctccactgtttcatgagcccaaacaccctcctggcacaacgctctaccctgcagcttggagaactccgctggatggggagtctcatgcaagacttcactgcagcctttcacaggactctgcagatagtgcctctgcaaactaaggagtgactaggtgggttggggaccccctcaggattgtttccttcgcaccagtgcctcagtgctgcaattgagggctaaatcccaagtgtctcttgactggctcaagaattagggccccaactacacacccccaagccacagggaagcatgtactgtacttcccaattgccacattttaaataaagacaaatttttatttcttctaa

SEQ ID NO: 272777 - DNA, 589 bp, Homo Sapiens
tctcagcccggcaacaagcagaagaagcttcacaggagtcagaaaacgaactcaaggaaatgatagaaacccttgctcggaagctgaatgagaaatccaaagagcaaatggaacgtcaccaccagaatctgaatctccaagaaacactgaagagagtagcaaattgttcagctccttgtccgcaagactggatctggcatggagaaaactgttacctattttcctcgggctcatttaactgggaaaagagccaagagaagtgcttgtctttggatgccaagttgctgaaaattaatagcacagctgatctggacttcatccagcaagcaatttcctactccagttttccattctggatggggctgtctcggaggaaccccagctacccatggctctgggaggacggttctcctttgatgccccacttatttagagtccgaggcgctgtctcccagacatacccttcaggtacctgtgcatatatacaacgaggagctgtttatgcggaaaactgcattttagctgccttcagtatatgtcagaagaaggcaaacctaagagcacagtgaatttgaaggctctggaagaa

SEQ ID NO: 272778 - DNA, 418 bp, Homo Sapiens
tgtaatctaaaaatggtgatgctcaggaattaaaaataaattgaacccgctgtctgcaattcccttacattccctgcaacacacaatctcatcaactcttcaaggaaagactatacaagctctagaaagtgaagttctcaggtagcctccttcttttcctcccaccatttccaacctttggtagattaaaagggtaacttcctgtttttcattatctaaaatgaactgacctaatcagttggctctgtttctcattggagttttccttggttcttctcatttataaaaagaaatgcataataagaaatgcaaatttgggatgaaataacctgtaccataaacccccatgacacaagtttacctatataacaaacctagacatgtacccctgaacttaaaacaaaagttaaaaacaaac

SEQ ID NO: 272779 - DNA, 414 bp, Homo Sapiens
ggaagaacaggaaattagaagtaaaatataccatgctttagataagttgctgaatattgtggatttctttaatggtttgacctttctcttcaggctctgtttgagcgcctgtacaaatgcccatctatgttcaatttcagcaaaggcaagttccctatacagtaagaataactcctggaatggttaatgatgcaagtttttcaaaactctcttcctttgtaatatactcatgtcacatagtaaaggaagtagttgagcttatataaggctaagataacactttattatagtacagtattagatatttttagtaaaagcagatttacttttgccatagttgatttcctgctaaattttatacacatgcacacacactcaaattcacattagtaatttaaaaaatggaaagaatct

SEQ ID NO: 272780 - DNA, 442 bp, Homo Sapiens
  misc_feature (348)..(348): n is a, c, g, or t
atttcggcacagggatgttcagaattgaaaatgtggagatagaaaagctcaaacagactcctaaaaggagggtttctttcctgaagactccaagaaaatgagtgtgcagatgagttagcttgacaacctcaactctggggagcaggcaggcggtctgaggaagataagggcccacgcccactcacctggcacctgttcggtggtcccggggcatcatggtctgcagctctgggcccccagccccactgtgaagtcagtcctgcatgctggccgaggccggcacctcccgatgcctccagagtcagtggggaaggagtcagccctttcccagaatttccccgccacctncagcaggagcagcttcagttttttgggttctggggagttccgtttttttgcaaaacccaaaaaggttgttgcatttttgggaaggccaaaaggt

SEQ ID NO: 272781 - DNA, 388 bp, Homo Sapiens
aggggtggcatcaggaaccgcagggaaccaagcagcctttggtcccagtgctgctccttggaacagttgagtgtggcctcaaacccattctccctgggtagctcagtcataaaacaccgaatgcctgcctcaaaatagcctctgagggaagggagctgttgacaagtgaagccctcaggttgtgtgggattccagcaggttattacagcttgtggggggagggagggtccattccaccgagctttgaatcccagggtcccctcagcttcactgggccacagtgtctgtcccaggaagaagcaaatggacagtgaggatgatggagagactacagctgccttgtctaaaacctgggatcttaaaagtgttattttggcttttatttttt

SEQ ID NO: 272782 - DNA, 616 bp, Homo Sapiens
  misc_feature (305)..(305): n is a, c, g, or t
  misc_feature (367)..(467): n is a, c, g, or t
aggattcagtaagtgcttataccctgtgcaaagtgtattaatttacctatctctttcctgttgatttttgttgtgtgtttaagattgactcaataagctgtgtgatgtaagcatttcaatttggtttgtgaaacttcctgtttcatgacatgcagattagcttgcaagatcgtatacttaggaagctttttgtcacattagtgccatatcccaagttcataaggacctttaggaacctcaaatctagttgtttttgcactcctcaaagtactgtgtgggatctttatggaaaactgtaatatttnccttatatttaagttttgttataatagaaaacaggtttaaggctgagtgcaatggctcatannnnnnnnnnnnnnnnnnnnnnnnnnnnnnnnnnnnnnnnnnnnnnnnnnnnnnnnnnnnnnnnnnnnnnnnnnnnnnnnnnnnnnnnnnnnnnnnnnnnnagacaaaattaaaaaaataaattagctgggtatggtggcacatgcctctagtcccagctactctggaggccaaggtggaaggattgtttgagaccaggagttcaatcaaggttgcagtgagccataatcgtgacactgcatcctttttc

SEQ ID NO: 272783 - DNA, 492 bp, Homo Sapiens
  misc_feature (393)..(393): n is a, c, g, or t
  misc_feature (419)..(419): n is a, c, g, or t
  misc_feature (470)..(470): n is a, c, g, or t
aacaaaattcctatagaatataacaatattaaagagggaactttaagtgaacccccacttttggccataacttctttttgtgtcagccagcaagagccaagagaacataaccagggtggtaggatgtagctagataagcctctttaaaggcacaagaggccacttcttcaaccagatttgccaaagcccttggttcaatgaccagataggccaacacgggtagtagtgggggtcatcagccctaaatgcagctttctggggctaccttctagggatgctctgggagcttgggaactgtccacctggaaagaggggttgaggggaggctgggatgaataccaatatttgggtccactgggattttccctcattaacccttaggccccacacctnccagctcagaggggagggttgccttncccattttattaaatccttgggctacagctttgatgatggattctgcagtncggatgggttaaaataggccgc

SEQ ID NO: 272784 - DNA, 485 bp, Homo Sapiens
  misc_feature (241)..(241): n is a, c, g, or t
acacctggggcaacagagtgaaacctgtccctgttttcctgctcttactctcacctctgaggcctcctctgcctggaagagattacagggaaattccaggcagcccttgtcaattgtttttatgaattctttacctgttccttttaaagacaaggaaactgaggcccaaagttctaagttgtttggcaaatggagtctcctaccctcagctcctgcaaggacctgggggacccccaggcangctagccacatgattctgcagcagacagggacctagagcacatctggatctcagccccacccctggcaacctgcctgcctagagaactcccaagatgacagactaagtaggattctgccatttagaataattctggtatcctgggcgttgcgttaagttgcttaactttcattctgtcttacgatagtcttcagaggtgggaacagatgaagaaaccatgccccagagaaggttaagtgacttc

SEQ ID NO: 272785 - DNA, 410 bp, Homo Sapiens
  misc_feature (337)..(337): n is a, c, g, or t
  misc_feature (374)..(374): n is a, c, g, or t
aggaaatcgacatggctaaaatttgtaactcaagaaacagtatgaaaatattttaaaatactgagattttaaaaacaagttgttaaaattaaagtgattgccattagatattcgggagtgctggcaagaactgctttatttcataatgagcattttatactattacattgataaaacttgaaaaaagtaatgtcaggaattctattaggcattcagggtgatgcgggatgctggctgggtctatggaaccacacttgggcattactttcatgggtcattatgaggattaactgccacctggggcctgagtttttgttattttgttaaccactatatnactcttaaagggggccctgtccgcttccataataacnggttttgtggtttgtggataggacttcttcggagtc

SEQ ID NO: 272786 - DNA, 389 bp, Homo Sapiens
  misc_feature (24)..(24): n is a, c, g, or t
  misc_feature (146)..(146): n is a, c, g, or t
gttacctgccaacctcctggaaantcctcctgaacagccaattggaaatgggccccctgccccttaaggaagtcctgggaaatgccttccccctgaggacctttagaaaaatgaaggccaggatcctgaaaaaatgaaacaggaanaaaagagggaacagccagtcctgtgccaaggcccctctgacggaggggtaaaaggtaaaagcaggagcaaccagaagaaaatcaggcccataatggagcgggagctgagaaatatatttaagaaggatgatgagaggcttttttaaagatgatgaaaagctatcaaagggactttaaaaagtagtaacagaacctgattggaattttgaggggattattcatttttttcttccagctcgtgcc

SEQ ID NO: 272787 - DNA, 397 bp, Homo Sapiens
  misc_feature (321)..(321): n is a, c, g, or t
taattgtagagacggcggggtctcactaagttgccagggctggacttgaactcctgggctcaagcgattctcctgcctcgacctcccatattcttcccacttctagaggtgaccaagtcttatcaaacctacctatttgataatggctatttagtgacagccctcctttctagcgcctggggttcagggatctcacataggtctccctactgatcctgcaggtgccagtctcagcccctcctgccctcatccattgtctcagttcaatcttttaaggatatggtaaacctggatctttttccagccctgtttaaaatcttngcctctaggcttaaggatctgaggttgcaggccccatggtcaatcactaactggggcatatggggccctagggaca

SEQ ID NO: 272788 - DNA, 705 bp, Homo Sapiens
tttaaacattgctaatgatgtatggttacaatgtataacaggttttccattgtcataactgtatggaattttcttggaggatgtcattagcttctgtttgcactgacttgtgagctgtgtgtacgctgtggtcaagatttctgaatgctgtagagcacttaccagctctgaccgtgtcttgctggggccaacaggctgcgtgtgcagcggggccagctgtctcagggctgatatgtagacgtgtattctgtttacaattagttccccaactctgtggggaaagaacttaagcggttttagtgttttataatatggtgaggcaatgagggtcagggcgcgtggtccctgagggagggtcttcagggcaagacccatggccctggcctggaactgtgctccccagggcgtggtgcctccctaaggggatggtcagtgttcctgggactgactgccaggccagcccgtctgcagactcctgtggtgggagttccctgggacgggaagcccctcggccccttccctccaggggcaggaactgagccagcatgggcggggccggccgagcttccaggcgtgttttctctgttaaatgtacctctgtctttaagctgtctcattttctaatcgctggcatgtcttgcctagaaaagcatttggaattgcttatgttcaattacagaaataaaatgtcttacttgccattgt

SEQ ID NO: 272789 - DNA, 455 bp, Homo Sapiens
agctggtcgcaacacttagtaggaagcacagtggcataaggaaacctggactagtggggcctttatatctaaaattatgtattattccttataggcagaatctgtaagtacgttatgactgctaatgacttttaaagcaaacatgttaacgatctttctatggtaaaaactgttatttggggacatcaccagatgatgtggacattcttgcaggtattttggcatacccaggcaagctgtcattggtgtatattccagttaacctctggagatgatcgtaacagtttacagggcctttccatttgggatggatatatcaagagggagacaaactggtccaaatcaccagaaagaaaatctcacagcaccgacttggcatctgtgttaaaaaatagcaactatatttaaaataaactgtacaacataaaaaatttaaattaaaaaatgcattaagc

SEQ ID NO: 272790 - DNA, 474 bp, Homo Sapiens
  misc_feature (16)..(16): n is a, c, g, or t
  misc_feature (55)..(55): n is a, c, g, or t
  misc_feature (92)..(92): n is a, c, g, or t
cagaaagcctaaattngggagacacaaaagagctagaagcccttcattggcggancctgacaaaacttagccaagtatgtgaaacaagaagntcctgggcccttttcatccataagggagaagcttcagaaagttcccgaggacctgctaaaatcagctacagaatctgctgccagaggggacaaagacgtgcacctcaaccttcctaccccaggccactctcaggctcaccttaaaatcagcccttgatccccatttctgggcaatttagacagtgaaactgactttgtttaccctcttgcagcatattagaacagacgatccatgctaatattgtattttctcttaaaacatagctttcctgtaatttaaagtgcttttatgaaaatatttgtaattaattatatatagttggaaatagcagtaagctttcccattataatatatttttgtatacaaataaaatttgaactg

SEQ ID NO: 272791 - DNA, 454 bp, Homo Sapiens
ttctcaatgtgaacacttgacaatttaaacacgtctttagaaaaatcacgtgtgcctacctagaacatcctggttcccggaagaaaaattttaagacacatgggttaatgcagtcagggtatatgatagctaaaatgtaaaatgcttactaggtctaagcatggctgcaaatgttttccatataccacacatttgatcctcagcacaatcttagaaggtagatactatataacccccatttgacagatgaggaactggggcacagaaagattaaggaaacctgcccgaaagtcacagagttggtgagtggtgcagtgatgtgaacccaggcagtctggcccagagtccatgatcttagctaccaccctccactgctcctccagttgcctcttggggttctgtgtcctgttgggaatgtgaaagccaaaaccacttgcacagaagacaggccttg

SEQ ID NO: 272792 - DNA, 340 bp, Homo Sapiens
  misc_feature (11)..(11): n is a, c, g, or t
  misc_feature (28)..(28): n is a, c, g, or t
  misc_feature (89)..(132): n is a, c, g, or t
  misc_feature (246)..(246): n is a, c, g, or t
cgcacccaaantcctcagaaatcacccnactaaagaacttatttatgtaacccaaacatccatcctgctccccctagaaaccctattgnnnnnnnnnnnnnnnnnnnnnnnnnnnnnnnnnnnnnnnnnnnngcatttaatatgttagagcagtcattcctcaaagtgtgatttcccagatctgcagtattgggtatctgccctggggaatttaaaatacaagtccttgtgtcccatccgagaccnaagtgaatcagaaattgcaggcagcaggtggggggaaggaggcagcaattagtctctagtaacccctccaatcattctgctacactcccaattt

SEQ ID NO: 272793 - DNA, 596 bp, Homo Sapiens
  misc_feature (15)..(15): n is a, c, g, or t
  misc_feature (26)..(26): n is a, c, g, or t
  misc_feature (82)..(82): n is a, c, g, or t
  misc_feature (122)..(122): n is a, c, g, or t
  misc_feature (134)..(134): n is a, c, g, or t
  misc_feature (160)..(160): n is a, c, g, or t
aagggaacccagggnccacccgggtncaacccctcccaaaggccaaccctcaccttgaccgtggaagctggctaaacctaanagtgaaaggcaggaagggaactcaaaggtggctggaagangggctgctgctnacccctccctagccctgctctggccnactggggacgggctccctgcttttgggggctcctggatcaagtgtgcctaaccctcaactgcctcatggcatcatcccattctctctgcccaagttgctctgtatgtgttcgtcagtgttcatgcgaattcttgcttgaggaaacttcggttgcagattgaagcatttcaggttgtgcattttgtgtgatgcatgtagtagcctttcctgatgacagaacacagatctcttgttcgcacaatctacactgccttaccttcacttaaaccacacacacaaggtgctcagacatgaaatgtacatggcgtaccgtacacagagggacttgagccagttacctttgctgtcactttctctcttataaattctgttagctgctcacttaaacaatgtcctctttgagaaaatgtaaaataaaggctctgtgcttgacaaa

SEQ ID NO: 272794 - DNA, 632 bp, Homo Sapiens
  misc_feature (128)..(128): n is a, c, g, or t
agagtcgggcaattagtggcccagagccccagttctgccccacttacaaagggtgaagcttttgagaaagtggctcctccccgggcacagggtgctcagaatgaccccccaagactcaatgctagtcntgccgcaagagaagaggccacctccccaggcgctaaggacatgccattgtcatccgacgggaaccccaaaggttaatgagaagactgttggggtgattgtctcccgggaagccatgacaggtcgggtagaaaagccctggtggacaagataaaggctccccaagaggatgatcctgcagccactcaaaggccacctaacaaatggtgggcaaaaggaaaccagtcattgcatcacttcccaagccagagcctcccaggagaaggagggagcaaaagaaacaagaatggcgataacaactccaaccataatggagaaggaaatggccagagtggccactctgcagcgggccctggttttacgagcagaactgagcctagcaaatctcctggaagtctgcgctatagttacaaagatagtttcgggtcagccgtgccacgaaatgtcagtggctttcctcagtatcctacagggcaagaaaagggagatttcactggccatggggg

SEQ ID NO: 272795 - DNA, 883 bp, Homo Sapiens
  misc_feature (617)..(617): n is a, c, g, or t
ccgttacaatttgagtggtgttgtcagcccatgcttatccctctctctacctgtgacaaaatggaaagctggtgatttttcaagctacgtgtacatatttgaaaattttgtaaatggttttcctaaacattaatgacagaagtatttatacttcattttgtgactttgtaaataaagcgacggcttttgtttcagtagagttgtgtttactatgcattgttttgtgtttattatacaatgttacaaatatgcagaccgtgttgtttgctccagtgataccttgttaagctaggtggctgagtcgcttatggttttaatgcaatgagcaatgtggatatgaccaagagttgttgtgcaagttgacaaatgccaaatagaaaaccacttggccatttatttctatgttcactaaaaatcctattgccttgtgtgattcttaatctcttttgcgaacctttcagtctccgctagctctttcctaatgagctttacagcaggaagccgttttatcgttaagtccccacagagacactttaccaggaggctgggagaagtctcgagattgggagagctgcaagacagtgtgtgagctgagcctgtctcagcatcacctggangactagagatcgcgtcccttacgatcagacgagagaaaagctacttgtgtcacctcgtgggtaggcacctgccctgttaacctctcagatgttaagaagctttgtttgggcacttacaaatattgatggtgcttaggctacgcacatccgatgagtgatttgtgacaccccgtttgcggcgtaaaacccttccctgaaagttcaggttttttaaggaaaaaatgtcgcttgtcgggttcgagtccctgggcctttgggccgttcag

SEQ ID NO: 272796 - DNA, 472 bp, Homo Sapiens
ggagagttctccagatttgggagaggcgcagagacagtgtgtgagccgagccctgtctcagcaatccacctggaggagctagagtatcctcctccctttaccattcagaccgagagaaaaagcccagcttgtgtgcaccctcgtggggttaaggcgagctgttcctggtttaaagcctttcagtatttgttttgatgtaaggctctgtggtttgggggggaacatctgtaaacattattagttgatttggggtttgtctttgatggtttctatctgcaattatcgtcatgtatatttaagtgtctgttatagaaaacccacacccactgtcctgtaaacttttctcagtgtccagactttctgtaatcacattttaattgccacctcgtatttcacctctacatttgaaatctggcgtctgtttcaagccagtgtgttttttcttcgttctgtaataaacagccaggagaac

SEQ ID NO: 272797 - DNA, 473 bp, Homo Sapiens
ctccaggtgaatgaggagatgacatgatgggagacatatgtccaatgactgacggctctacttcagagtcggcaagtggaatctggggcgacccaggtgggcgtccctgaacagtgagagctacataggaaccagcttggggtggggagacggaaaaagggaagggaagggaaaataacattgtcaagaaactttttataccattttactacttaatcttcgatagttctaaaagatccagttatgtaagacagtcccatcatctgctacatcatgtctccacagaaataaaaactaatttgtcatttctcttttatgactgccctaaaaatccaaaagaatgatgccgttttcagatagcaagttactactagtaagatcagatattacttaaaagcaaataaaatttataactccaagaatatattatatattttctttatttagaggagtgttaaaatcaaccatctatt

SEQ ID NO: 272798 - DNA, 439 bp, Homo Sapiens
  misc_feature (65)..(65): n is a, c, g, or t
  misc_feature (76)..(96): n is a, c, g, or t
cttcccgggaagaccccgattggcctcagtcagcaaatgagatacagagtctggctttcaacccncatctccttgnnnnnnnnnnnnnnnnnnnnngaaaaaaattgagcacttaaacccctcccttttggagggggccccctgaagcgtcaggctgggggcagtctggtacggaacatatttattgcctccatgcatgtgtgtgtgtgtctgtgaggactggtgtgcgtggacacgtctgaagcaggcgtgtggggctctttcagggaccacagaggagggagcagtttgcagtgcccagccaccctgaaatccccaataatggtgcctcagtgggccccagagttccagtgggagagtacggttccctcctgtctccctcttcttttccgcacctccatctttgtggataataaataaatatgcaaaggttctgaaa

SEQ ID NO: 272799 - DNA, 506 bp, Homo Sapiens
  misc_feature (37)..(37): n is a, c, g, or t
  misc_feature (43)..(43): n is a, c, g, or t
  misc_feature (67)..(67): n is a, c, g, or t
  misc_feature (100)..(100): n is a, c, g, or t
  misc_feature (107)..(117): n is a, c, g, or t
  misc_feature (131)..(131): n is a, c, g, or t
  misc_feature (147)..(147): n is a, c, g, or t
  misc_feature (226)..(226): n is a, c, g, or t
aagggttgggggtgttggtccccccccaaaagtcctnaaggtnaaaaatgggggtccccccgtgttnaaaaggtggggccccgggtaaggggtgggtggnaatggtnnnnnnnnnnnaattccttaagggntggatttggatgctgnccctcttgggtgctggccctcaatggataagtgagctcctcagggaaatctgggtggtttaaaaagggtgtggggtgcntcccctcggaccccccacctcttgctccccactcctgcccatgtgacaggcctgctccctgctagccttctgccatgattgtaagcttcctgagacctcaccagaaacagatgccagtgccatgcttcctgtacagcctgcagaactgtgagccaattaaacctcttttcttataaattacccaaactcagatatttctttatagcaatgcaaaaatggtctgacacaccctatgaccagtcattgaatatattatccaccccgagccctatgcagtctc

SEQ ID NO: 272800 - DNA, 405 bp, Homo Sapiens
aaatgaggcctccatgcaaaacacatacttccctcccattaatttaacatattttttctcctacctatggggaccaaagtgctttttccttcaggaagtggagatgcatggccatctccccctccctttttccttctcctgcttttctttccccatataaagtaccttgaaatagcacagtccgtccttgcatgtgcacgagctatcatttgagtaaaagtatacatggagtaaaaatcatattaagcatcagattcaacttatattttctatttcatcttcttcctttcccttctcccaccttctactgggcataattatatcttaatcatatatggaaatgtgcaacatatggtatttgttaaatacgtttgtttttattgcagagcaaaaataaatcaaatc

SEQ ID NO: 272801 - DNA, 418 bp, Homo Sapiens
tctccaggactcccacccggcagatcagctctagtgacacagatccgcctgcagatggcccctccaaccctctctgctgctgtttccatggcccagcattctccacccttaaccctgtgctcaggcacctcttcccccaggaagccttccctgcccaccccatctatgacttgagccaggtctggtccgtggtgtcccccgcacccagcaggggacaggcactcaggagggcccagtaaaggctgagatgaagtggactgagtagaactggaggacaagagtcgacgtgagttcctgggagtctccagagatggcgctggaggcctggaggaaggggccaggcctcacattcgtggggctccctgaatggcagcctgagcacagcgtaggcccttaataaacacctgttggataagcc

SEQ ID NO: 272802 - DNA, 264 bp, Homo Sapiens
tcttttccacgcttttaaatgggggataagatttgggcttaataaaaaggataaccatcaattttcatcagcaacctagaatcgaagtagggtttcccaatggttttaaaccaaaatactatatttcatagaaaaataacattacacttcttcccttaattctagtttattctgcctcagaaatgtgggaatatactacttagtactgtagtcacacagaaactttatgaatagaggatttctaataaagagattttctaaaaa

SEQ ID NO: 272803 - DNA, 442 bp, Homo Sapiens
tttataaatatataactatatttattttgaatattaaatagtttttaaattacaagcaatttattgaatcacactatgcatcaatatacagtaaaaatcttacaatttaaaaatgtacacaatttaaactgaaagttcattgactattatattgccatgaacctcttctgcctgtgttaaagcacagcagggaggcctggtgggtgtgacggccccctacgtcctcctctgcagacggaatccgacggtggatccatacaccagccccatgatcaagatcccgctcggcccacgtaggcctgagtgcttaaccagcacgtgtccacaccggtcaaactgatcttcacaggctgttggtaattcaacactgtcaatgcatctttaagaatttctttatagatgaaagagaatgttctttgttaataaagacttgagccaaccc

SEQ ID NO: 272804 - DNA, 981 bp, Homo Sapiens
tttttttacactgtcattgctcatttactgcatcattttgacaacatctcatatttacacaaggcttttacataatctatacacagggacagaaaggtaaggaacacagagaacagggacaaagtttagacctcccgtattgtcacttcctttcatttttccattaaagggtaaggctgaagggtagcattttaagatgattttgttaaaaggctgtgatggtaataattgaacacagcaagatgagctgtgaaaaactgccactgcttgctcactcttccaaaggatgagtgtaattcagtcataatgaaggctctttaatgttcctgccccaaatcttttccgatcaggaaagcctggaatctgattaccttctcttaaaaagtatctcttctctatgaccttatcaaaaaacctactgagcttgacagcattggaagaacctgcagctaagtaccgtggatttgtgcagtccaaattaatttcttctggattgaaatcctcagccaggaaagcagtcctagttaaaacttcatggcgctttgtttcatgaatctggtccagtttagtccctattaccaacagtggtatttggttatcagcaaactgttcttgatcataatccccatttgtcaccaagactccagttggcaccaaatccctgttgagagcttccaatgaccaacgacgcaagttttgggaggacttcttatttgttaagtcgtgtacgaaaataataccatttacggagttgtagaatactgctcttgtgcttttcacgctgctggcactgcccacagagcctccaacatcccataattctatgtagtaggtcttctcttctggggttccttctttgtaatcatgaactctgacatccactgagcagcccacagtccatgatggatttcccagcacttgattttggcataggagatggactaacgaagatttcccaacacctgagtctcccaacaccag

SEQ ID NO: 272805 - DNA, 545 bp, Homo Sapiens
gttgagggagtccagggcttgcaccccaccaccacccccaggcaggggcacacactcaaattccagtcggacagagcatcatcatcatcgtcatcctccgcgtcctcggagccatcaggccgctcagcctcgtggggcagtgtgaccgtgcgtgacttgtggaagcgtggcttgatgtcctgctcactgtcggggacagcctcatcctcctccacatcccccttgagcaggatgatgtcaatttccgagtacttcatcccattcaccaagatggggatcaactggaccagatgggaggccaggacttccttgcagatgggctgctcggccagcgtcagccagaactcacaggcctcaagggcaacgttctcatcatggtcctgggtcctctgcagcatgtactggatgatgctgtgcatgtgggggatgagcctgtcaatccgcacttccagaagcatcaccagggcacggcacacaatcttccgcacctccgggtcatcatccacagccagggcaaataggtgctcgatgaaggtgtcaatatt

SEQ ID NO: 272806 - DNA, 460 bp, Homo Sapiens
ctttagctggtacctcagtggggaggcttccttaccaagaatgagttcctgaaacccagggccagagacaaggacaacttaggggaagacggggttttcggtggagccaggggcaaatcttaatgggaccagtgggggataccccagagcccatggcctgactgcacagcctgcctggaggatgggtgcgcaagctctgcccctccctgaggcccccaggactatgcccagaagcgatggggtacccgtgtaggggagccaaggccagtagtttgggggtaggagtcccctagagtctcagaagactgggctctttggagtacagggtccccggcctctcctttaagattctctccccagctggaaggccgatgactgggtggtcgggagggagacccagctctcctttctgtcccgtttgcagcactggttttgtttccttaataaatttttagttatg

SEQ ID NO: 272807 - DNA, 365 bp, Homo Sapiens
  misc_feature (349)..(349): n is a, c, g, or t
ccctaaaaattaacagatgtgatttccttgcagcctttttatgcatcattacatattaagaaaatgaacaactgatgaatataaatttaaatgccctgatgcttagcaaaaagcttccttgtgttttttagaaagttcaaaaagcaaatagaaaggcgaggtaggtatacaacagcactgggttttctttttgaaggcacccttgcagggtttcacaataattcccattctttattttaatgggggagtttttaatcagtggggattcgcctctatctaaaactaaaaatccaaattggtaggtgcaattggttcattggcaatggctaaccaacagtggaggaatacnaacccaaaactccatt

SEQ ID NO: 272808 - DNA, 396 bp, Homo Sapiens
  misc_feature (174)..(174): n is a, c, g, or t
aatgctcaggttcttgtgggagttaatcagccacatccaatgttaccttgagggggaagaagagggtgatgctcagaagctaaacaagacaggggccacatgaccctctattgattagccccaagtagaaagtcctgtggttttatgtttaatggtaatagttgatcatatatnggcataattttcctatcagcttccctactcagtcactataaacacagacttgaaatagtactttaaatgtccaaatacctaaatgtgctaaactggaggtaactatttctaggtagttgaatttttgaaagtcatgatcagccacacaactgttttgtacatacttattttctcatgcacttttctgtatgcaaataaagctataaattcactcattatgtc

SEQ ID NO: 272809 - DNA, 285 bp, Homo Sapiens
  misc_feature (242)..(242): n is a, c, g, or t
ccccagggctctgcagcacctcacctgagacctccactccacatctgcatcactcatggaacactcatgtctggagtcccctcctccagccgctggcaacaacagcttcagtccatgggtaatccgttcatagaaattgtgtttgctaacaaggtgccctttagccagatgctaggctgtctgcgaagaaggctaggagttcatagaagggagtggggctggggaaagggctggctgcaatntgcagctcactgctgctgcctctgaaacagaaagttggaaagg

SEQ ID NO: 272810 - DNA, 448 bp, Homo Sapiens
  misc_feature (19)..(19): n is a, c, g, or t
  misc_feature (33)..(33): n is a, c, g, or t
  misc_feature (40)..(40): n is a, c, g, or t
  misc_feature (45)..(45): n is a, c, g, or t
  misc_feature (68)..(68): n is a, c, g, or t
  misc_feature (80)..(80): n is a, c, g, or t
  misc_feature (85)..(85): n is a, c, g, or t
  misc_feature (117)..(117): n is a, c, g, or t
  misc_feature (183)..(183): n is a, c, g, or t
gttccactggaaaaggccngactctgggcaaancctccanggttnactggtccaaaaatccatttccngggcaccccccnaacangatccacaaaaaacaacacccagcatgcctgnccaccccccacaaggataacaaaacgtccatccaaacatccaaataggtgttccaataagcatttnattgaatttgtcccttcctcccagacagcacccccagaattaataaacacccttaaattatctcctactttttaaacctttttaaaggcacacattaaaaaatacataaaacaatgtcatctttttgtaaggctaaattttatgtactaggaacagatgaatagatacaccctaaagcttgtacttctgcacaatgctggaaatggctttacagtctctgctgccatcactcagaagttctgactagatccttctggctcctcgt

SEQ ID NO: 272811 - DNA, 549 bp, Homo Sapiens
  misc_feature (52)..(52): n is a, c, g, or t
  misc_feature (467)..(467): n is a, c, g, or t
  misc_feature (476)..(476): n is a, c, g, or t
  misc_feature (479)..(479): n is a, c, g, or t
ggagacagccaacctcaggcttagatcaatgtatagggctatattttggcanctgggtagctctttgaaggtggataagacttcagaagaggaaaggccagactttgcttaccatcagcatctgcaatgggccaaacacacctcaaatttggctgagttgagaaagcagccccagtagttccattcttgcccagcactttctggcattccaaacaggcatcctacctggggtttttatccacaaaggtagcgggccacatgggttttttaaagtatgagaaacacagtttgtcctctccttttatccaagcaggaagattctatatcctgatggtagagacagactccaggcagccctggacttgctagcccaaagaaggaggatgtggttaatctgtttcacctggtttgtcctaaggccatagttaaaaagtaccagctctggcttgtggtccgtgaagcccagnccagggcanccnaatcttggcctgtgctgggcatacaaccctctggctttcacatctctgagctatatcctcattaagttga

SEQ ID NO: 272812 - DNA, 860 bp, Homo Sapiens
  misc_feature (187)..(196): n is a, c, g, or t
  misc_feature (381)..(391): n is a, c, g, or t
  misc_feature (414)..(463): n is a, c, g, or t
  misc_feature (583)..(583): n is a, c, g, or t
attgtgcttacatccttaaatcgatccttacatccctgtgataattggcggagtttcagttgatctacttacaaagcccttggttgggatttttcatttccactcccattgtcttaagaatacaaaagaaatagggagctatcctaaagaaaattagcaatcagatgtgggagccaaattatacagnnnnnnnnnnttgtttagactagttaggaagtacactgtcaaggataaacttaataaagggctaatcagttgtatacattttgaaggaagaaagagaaacactggtgtggaagagaacatcctgggtggataagattatacttgcaaagggaagaatgcgaaagtcattctcaacagtccataagtggctcatcnnnnnnnnnnngagactgagtcttgctctgtgtnnnnnnnnnnnnnnnnnnnnnnnnnnnnnnnnnnnnnnnnnnnnnnnnnngtttaagcagctacttgggaggccaaggcagagaattgcttgaatctgggaggtggatgttgcggtgaccgagatcgtgcactgactccacctggatgcagatgagattcactcaaaagnaaggaagatgtgagaagtcttattagcgccgcagtatccgttgtggggtaatttactgcatgcgtcgttaaagcgtgcatgaacctgcgtccacttatctgagaatcctcccactggaatggagcgacgtcctcacatcgcggtcgatggccttagcgtacggggtttgtttggcacgtattgcccggttgtctcttcgtgggctaataatgctggcttctccccaattgtccgaccgagcttggcctacttcgcagcttgccgggagaaacacgcg

SEQ ID NO: 272813 - DNA, 413 bp, Homo Sapiens
  misc_feature (25)..(25): n is a, c, g, or t
  misc_feature (279)..(279): n is a, c, g, or t
acatgggtgcagccgcccagagccnccctcccagggcacagggtgggcccgggtgagcttgtgtgctcacaccctgggcaggccccgcggcagcaatggcagctctcctgtacaggctgagtttcagccacacccaagaagtcaaagctaaccgagctgtgccttccgagacccccgggatggcccctgggaggccaaggagtcggggactgggtacccggagcagagtcactgtggccacggagaaccgcagctgagctttatgaagccacgtggccnaactcccggtgcctccaccccaagcaaacacagatcgctcagaaaatgggaacccagggcaaattgtatgtgctccttactgggtttattataagtgtcacatgttttttataataaaacataggtgatttacc

SEQ ID NO: 272814 - DNA, 408 bp, Homo Sapiens
  misc_feature (272)..(272): n is a, c, g, or t
tgtacaaagatgtacttctgaaaacttaagtttaagtcaacttttgtgagttgtataatttcaaatatcttagccaggtgtgttaagagaaatcctgtgataatttggtagaacaaaggccctgtaattttccctaattttaattaattaatataaaatcctagagatccttaaagttggggtttgccttaaagtgaaggcatactttttggttgccctgttttgcatttagggtattaaacttaggttgtacagtctgtttaatttagggntactaaatttattccccttattataggcactcttaacttccattgttccaaaggaaaatttaatgctgaggaactttgccttgatgaaaatgtggttttttaaaatacccaggtataggccaggtgtggtgcttat

SEQ ID NO: 272815 - DNA, 362 bp, Homo Sapiens
atccgcgtgatgagcatgacgcacacaggagagccaggattcatgctctacatccccatagagtacgccctgcatgtatacaatgaagtgatgagtgttggccagaaatacggaatccggaatgctgggtattacgctcttcgcagtctccgaattgagaagttttttgccttctggggtcaggatataaataacctcacccacgcccctggaatgtggacgagagtctcgggtgaaattagagaagggcatggatttcattggtcgcgacgccctcctgcagcagaagcagaatggagtgtataaacgcctcaccatgttcatcctggactcatcatcaataaacactgttacagcaaaaa

SEQ ID NO: 272816 - DNA, 467 bp, Homo Sapiens
cctcagttaaaaacagcccagaaaacaagacaactctcaggtaagaaaagagtttctgaaaaaggacccagcatatacatgtataatacaacggtgaaaaaggaaaaagtatttacaggtgaactgtttttacattggctagttctgtacgaaaagcagacattacgtgtatgagttagctgctccagagatatgaatgttattgctgttgtttttcccttcgttaaaaatcttctttcagtataggaaatataatgagaattaaactgaatacacaatcacttagatgaagggcctcacacacagaggagtcagcagcccacacagcggacacctcttcccccttctgcttgaaaagaaacggactcgcacctgtgccaaggggagccaggcgtgcacccctcgggccctgggacccctcagtccagagcagccctgcagccacagctgcccctcaggcccctgat

SEQ ID NO: 272817 - DNA, 904 bp, Homo Sapiens
atgtggatccagacaccagtaacttaaatatagaacaaaataactcctggaccgctgagaacttctggcttgaccctgctgtgaaaggccagtcagagaaggaagaggatgatggccttcggaaatccctggatagattctatgaaatgtttggccatccacagccaggctctgcaaactcactctctggcatctgtctgcaagtgcctgtctcagaaaatcactcaactaaggaggccagggagagccaaaagtatgccctccgcagttttcaaatgggcccgggtgatcttcaaccgggacggctgctccgtcttacagaggcattccagggacacccacttctacccactggaggaaggaagtacatctttggatgatgaaaagccaaacccaggactgtcaaaggatattactcatttcctcttgcagcagaatctaatgaaagacctgtaactggtgccgggtggtgtgcagggtagtaatggaggtgctgtgccatgaccagcagtgttggtggccacccagatcccctagggtctctggccagctctgtgtgcccaatcccaattaagtgctttgaggttaaaggctggcacctgtgacctggtattggagccagtcagcccatatggagagccagcagggtctgggagttctccgtcctcttggccaaggccgctgactgactgggctacgagtcaaaagcccagctcccttgcctcaaggaaggacattctctgaggagtaatttatgctctagcactccctttcctctagatcggcctgaggctgggacattacatgaaatcacacccttgctgggcttaatccctttccctaccctcccatttatttactggtgtctctgggagcctttccttaataaacctcttatatctga

SEQ ID NO: 272818 - DNA, 536 bp, Homo Sapiens
  misc_feature (435)..(435): n is a, c, g, or t
agtacttctgggagaagagggtcacaggctgcccaccctttgatgaacacaagtgtctggctcagggaggtaaaacttatgaaaattccaggcacctgctgtgacacattgtgaggagcctgagtgcaacgacatcactgccaggctgcagtatgtcaaggtgggaagctgtaagtctgaagtagaggtggatatccactactgccagggcaaatgtgccagcaaagccatgtactccattgacatcaacgatgtgccaggaccagtgctcctgctgctctccgacacggacgtagccccaatgcaggtggccctgcactgcaccaatggctctgttgtgtaccatgaggttctcaatgccatggagtgcaaatgctccccacaggaagtgcagcaagtgaggctgctgcagctgcatgggtgcctgctgctgcnctgcccttgcctgatggccaggccagagtgctgccagtcctctgcatgttctgctcttgtgcccttctgagcccacaataaaggctgagctcttatcttgc

SEQ ID NO: 272819 - DNA, 466 bp, Homo Sapiens
  misc_feature (40)..(40): n is a, c, g, or t
ggtcacccattatcccatttaatggtcttataactaaatngaatgactatgaaattaaataatgcaaacttaaagctgttggaaatttaccttattttgagccttgagaggaatgtggctgtgtggcctgagttatgtagcatgcaactgcaacttctgctttttcctgtaaatgatcaggaaaggccttgtggcaccagacataagacccccctgaaagtatcatcccctcctgatggaatggtaaagcaatctttcttggaacatagcaagtagtaaccgatcaaattgctataacgtgtgtactgaccttatgtggaaaatgctgcaaccctgtttactgcctatgtaagtgaaatcttaacttccccattttggaatgctgactccagtcattaggtgtctgtatttcctgagtggttaccctcaagctttgtgctcaaataaactctatacttaatcataa

SEQ ID NO: 272820 - DNA, 395 bp, Homo Sapiens
caaacttcaattatactttaaaaatacatttgataaaagacattcaatttaaacatttcccaagctgatgttgaataatttaaacattttcccttctatctgagacagaaaaaataaatacataactctgagaatgtacataactctgaggaatcaatcaccttcatttccctattccttaatgatattctgtaatgagctgtgaacatatacctgtctttctgctgagcctcttccatcagcattttaccattaaatgggaaataggggtggagaaggctgaggtaggagtacacaaattactgcagggaacagaaattaagggcattttccaactccaaagatcagaatataaaactgttcattctctcaagaattaaagcagcataacataa

SEQ ID NO: 272821 - DNA, 404 bp, Homo Sapiens
  misc_feature (68)..(68): n is a, c, g, or t
caaaaataaatttaaaaaagaggtaaatgtggactattatacagcctccttgatgaatttgtatgcanaaaggcctaagaaaggctctgagaagtcctgtaattagatttaaaaaataaacaaacagaaaccctgtaaaaccctagcattttccccaaacttaccttgacccaaagaccccattttttcctcttagcaccctgttgatagcttatggccgatccctatggaacttatggctacatgttcttgtttacttattatgtcactggaatataagctgtgtgtaagcagtaatactgtcttgttcagtacagtatccttgacacctagaacagtatctgacatggtgtttgatccatatttgatgaatgaaaataaactgaacaagtgaatgaactctg

SEQ ID NO: 272822 - DNA, 495 bp, Homo Sapiens
gctggtttggaagtgtggagattgcatttctggcttctctcaatggcttgtgttgaggactctgggtgctcctggccctaattgtgcaccctgatccccgtgcttggagctaggcctggtggcgtgctctagccctctcagttaccagctctttggagaaggatcaaaattcagatggaatgtgggatgggtaataggtgagagtagaaacccttccctccaggaggcccccgctgcctcccacagaaacccacctaccataagatgtccttcaggtggccttgtcccaaggatgggggtcaggcattttatatcaagggtgctctgaacatattttattttttaaaaaaactatgtttgtgaattttgcgtatactggcaagcttttgaaaatgtatttaattttgtattgtttaccaatgatttatttacaagatatttactcaaataaatggagctgcttacaagcctgttgacatgtgtggcttgcacaac

SEQ ID NO: 272823 - DNA, 271 bp, Homo Sapiens
cactctcagcccacacaaaactaggaactttgttattctacttattttcctgtaccctgtctgtttgcacacagatggatatctgagagccagcgaactttctttacctccctagtatcatttcatgaaaattagtagcacctgcacaatggggccttggagacaggaataaaaggaaaaatctggaatggaatcacatgacgcaacaggctatgaagactccctgcccggctgctatatgtctggtaaacagaataaatagtacttgagc

SEQ ID NO: 272824 - DNA, 503 bp, Homo Sapiens
  misc_feature (373)..(384): n is a, c, g, or t
gcaggacatgggggacacattgagcaggtatagttttctgtttccctagtgttaaatcaaatatgagaagactgtctccttcacatttgtaaatcctgaaaggagccctgagcctgaggatggacatcttatcaaattgacacatatccctgaagagagtcactagtatacaaagaattagatgaaccacagctctactcagtaaaattcaggaagtagggggttcatgtgggaggctgccggtggattaggggtatgaggacaattccatggagagggtgtggccttacagggacctgggctgaatataagggtagtttatgtctattgcttcctatacatttcagaatcctttcccccttcattatctcannnnnnnnnnnnctgtaatgggggaaataaagcctaagaaaggtgtgactggcctgcatttacataattactgatgagccacctggattctggctcttattcttactcttgctatttctctatgttccatc

SEQ ID NO: 272825 - DNA, 416 bp, Homo Sapiens
  misc_feature (54)..(54): n is a, c, g, or t
  misc_feature (112)..(138): n is a, c, g, or t
  misc_feature (399)..(399): n is a, c, g, or t
gcgcgtgctgttagtcccatctcagcctcccaagtagctggggctataggcatntgcaccacacccagctattccttcttatagccaaataatattccattgtatggatcannnnnnnnnnnnnnnnnnnnnnnnnnnctgagatggagtctcactcttttgcccagacgagtgcagtggcacaatcttgggctcactgcaaccttcacctcctgggttcaagcaattctcctgcctcagcctcccaatgtacaggaaggctcacctggggtatggcccttgccttccaccccggggtttccaggatttgcttaaaggaaagtcttgaggcacagggcccaggggaacctggcatttttttaacagggcatatttggggtggatcttgatggcaggggnaaattaaaaaatcaagg

SEQ ID NO: 272826 - DNA, 422 bp, Homo Sapiens
  misc_feature (123)..(123): n is a, c, g, or t
gggctaagatcaagtgaagaaacaatctacagtctgttttctgatacaaaactgagactcttgaggatgatcatccgaaaagcagtttcatggtctttttcctaagtgcacactgccttaggnaatttccccataccataactcagcagacatttttcagttcattctcatgggctttgtgagctctcctgttatcaatcgaattcatttacttaggttcagtaggaaaggaacaaggggccacagacttcaggacctgctttggaatcctgggctctaacagtgactttgcttttgtgatcttaggataagtaattagtacaaagcctcactttttccactggtccatgggggataattatccattggcttttcactgggattgaggaacattaaaaggggaggtggggagtagtaactcc

SEQ ID NO: 272827 - DNA, 671 bp, Homo Sapiens
  misc_feature (19)..(19): n is a, c, g, or t
  misc_feature (49)..(49): n is a, c, g, or t
  misc_feature (58)..(58): n is a, c, g, or t
  misc_feature (92)..(92): n is a, c, g, or t
  misc_feature (242)..(255): n is a, c, g, or t
  misc_feature (258)..(258): n is a, c, g, or t
gcaaaaaagggctcccaangccacgttggcaagttaaacggggcccaangaagagcangccctccaacagcaagttgccccaatagaataantccctgagcttgtttttaatccacagttagacagagaatggtctcttgtttcctcagttatcccagggaagaacagtgtatattctctgtagatgagtgttgtctaatgtagtgattaatctctgctagtgttaggaaagctccactacnnnnnnnnnnnnnncgntgcatgcgcgtgcgcatgtgcacatactgcagtcttgactttccaattacaaaatgcctaagtcaggtcacattgtcttcttccagccagtttctaaggcaggcaatggaaacaggagccgatgccaaatggtctagaggcagaagggctgcatgctttgcagggccagccccaaggctgccttccagagctgcactttctctggggacagtaaactctcaccgcagctgccggccccctgtgcttggccatgcccctcacatggacttggaatcagtgtctctcttgctgatgagcacctccaggagcctcagtttcgcctttatgtgcttatattcactgtattcttcagccataggagtgcggtcttccttctggacatttctaatgcaaataaaggaaaaaggggtctg

SEQ ID NO: 272828 - DNA, 540 bp, Homo Sapiens
caggtctcaacagtggggtaattcacttagagctggaggcacatagaagggaagtgcacatgtggcctgtgctagacactgtgggagcagcagaccgtgacagttctcatcactgttacaatttctctaggacagttagaggagggctcatcacagcattcaattacagtctacgttttccctctttaaaacactgcagggccaatttcccctcatttcagtgatacctatgtggcacacgcacacatgcacagcagataagactttggacattttgacagagaatttgcagatgcagctattgtcctctatcttggtggctgttagaagagcacacaggcctcagcataatttgcataagagacgtagacaatgttcacactctgttcctcttatctgcttctcataagaaggaagtgattatgtgggggtgtcatgtggggtcttacaccgtgttggtcagggtctgaaagaagcagaattgtactcaggtggctcaactaaaaagacttcagttggctcagcgtgctggctcatgct

SEQ ID NO: 272829 - DNA, 441 bp, Homo Sapiens
gaaagtttacagcaactgtatagtgagtacagtcagattatattcctgttcctcagatttaagaatggggtcacattatagagcttctgtttgcaatgacatactcattctgccacagtcatcttctagaagctttattttcctggggatgtttgaaaacccaaaacacttatattgcagttgagtattgactctgcttcccaaattaatcccagatgtttgggggatcacactaggacaaaggcagttcaagtcactgaggtaggagtaaaacctttgctggattcccttgcaggaagtgttaggaatccagtgatctttaagatcttttgcagctgtttgtgggtgggcttcatgcctgttaatcctaggcactttaggagacctaggggggggtccattgagggccagggggttttgaggaccagccgggggcaacct

SEQ ID NO: 272830 - DNA, 383 bp, Homo Sapiens
  misc_feature (37)..(37): n is a, c, g, or t
  misc_feature (76)..(90): n is a, c, g, or t
  misc_feature (102)..(102): n is a, c, g, or t
  misc_feature (116)..(227): n is a, c, g, or t
  misc_feature (302)..(302): n is a, c, g, or t
  misc_feature (332)..(332): n is a, c, g, or t
  misc_feature (336)..(336): n is a, c, g, or t
  misc_feature (366)..(366): n is a, c, g, or t
ccctaggaggatcatttgaggccccaggagtttgagncccacccctgggcaaacatagcgaaactctgtctctatnnnnnnnnnnnnnnnttaccccaggcnatgggctgtgcacnnnnnnnnnnnnnnnnnnnnnnnnnnnnnnnnnnnnnnnnnnnnnnnnnnnnnnnnnnnnnnnnnnnnnnnnnnnnnnnnnnnnnnnnnnnnnnnnnnnnnnnnnnnnnnnnattaactggcgtgttggtgcacgcctgtagtcccggacactcaggaggctgagatgggaggattgcttaagcccnggaagacaagcttgcagtaagctgtgaacngccnctgcactccagcctgggtgacagagccagnccttgtctcaaaaaaaa

SEQ ID NO: 272831 - DNA, 439 bp, Homo Sapiens
cccattacttgggttacaaaatgatctgtacacccaaaccagtggcacacacaatttaccccatggagcaaacctgtgcatgtaccccctgcaactaaaatagaaattggaagaaaaaaaaggaatttccttgtacaaagtaagcatttgataataatcagctagtggtcatagtaattttaattcatataaaatgtcagttttgttgtcaagggaaaaattttcacaatatgatatacaaaagttaatgcaaaagtaatgaacttttggtacatgctacaacatggatggacttgacatgcgaatggaagtaagccagacaaaaaggcatcagtatttctcatctccctttttgcttttacttcccatttgcaacccatctcaagagaggacaatggaaggaaaggggtaaaaataatatttaagaaagaaacaggag

SEQ ID NO: 272832 - DNA, 350 bp, Homo Sapiens
  misc_feature (98)..(193): n is a, c, g, or t
  misc_feature (197)..(197): n is a, c, g, or t
  misc_feature (206)..(206): n is a, c, g, or t
  misc_feature (215)..(215): n is a, c, g, or t
  misc_feature (219)..(219): n is a, c, g, or t
ctagctcattgcagccttgaactccccgtgctcagatgatccaccttagcctcttgggtacctgggactacagatttgtgccaccgtgcctagctaannnnnnnnnnnnnnnnnnnnnnnnnnnnnnnnnnnnnnnnnnnnnnnnnnnnnnnnnnnnnnnnnnnnnnnnnnnnnnnnnnnnnnnnnnnnnnnnagtnttgggattntaggcgtgngagnctgctgtaggcccacaaaatgtatttttatagcctctttcccatccagtcggggtttctgtatttacatattgtcactgaagtatttttatagcctcttttcccatccagtcagggtattgcatggtgcta

SEQ ID NO: 272833 - DNA, 418 bp, Homo Sapiens
  misc_feature (13)..(13): n is a, c, g, or t
  misc_feature (35)..(35): n is a, c, g, or t
aatgttccggtgnaacttggggctctgcttgacgnaagccccaggcccacaaaggggacaaacgctggcacccaggccccagtcacctctgtacccactcgttagtaagtctggttggtggccgcccagatacaggacaaacaacaggtagccaccccaggaggaagctcagaaccacgacaaagcccagcatgaagacaatccgtggaaaagtcaggaacaggtactgaataagaaagaccgtgtccataacatggaggtgtccaaggtcatcgatgtaagtctcctggtataaatctgacatcaccaccaagtggaccagaaaagtggtgctcacaatggcgacggtggcagccgaggccgtcaaggtcaagacgtagatgaggaagtacctgatgttccaggccccgatgcagtt

SEQ ID NO: 272834 - DNA, 591 bp, Homo Sapiens
tgcttggaaaacgaggatccacatgtgtaaataaacgggaactacagctcaaaggcagtcatacacttgtcattcttgtttcttcctctcatgacatggaaaggcaggtagaaagatctcttgaaggttgctccgaagcccatgggagtgaatgttccggtggacttggggctctgctgacggaggccaggccacaaggggacaacgctggcaccaggcccagtcacctctgtaccactcgttagtagtctggttggtggccgccagatacaggacaaacaacaggtagccacccaggaggaagctcagaaccacgacaaagcccagcatgaagacaatccgtggaaaagtcaggaacaggtactgaataagaaagaccgtgtccataacatggaggtgtccaaggtcatcgatgtaagtctcctggtataaatctgacatcaccaccaagtggaccagaaaagtggtgctcacaatggcgacggtggcagcagaggccgtcaaggtcaagacgtagatgaggaagtacttgatgttccaggccccgatgcagttgttcacccaaacacagtgatggtcgaaacggtgcac

SEQ ID NO: 272835 - DNA, 466 bp, Homo Sapiens
  misc_feature (128)..(128): n is a, c, g, or t
gtttacagagtgtcactggaacctgccctctctccttgtgcaggcctgtgttctctcttctgaagatctggaagaagcctaaatggatctcattatccagcccaccaaccctcccagcatgtcttaanacgtccctgccagagttacccatcaaaaagtgaaatctggtggcaagtccactgcttctgatcggtccccattgcccagctccctggtggtgagcgcctgggtcgtcctttccccttggtagtttggttttgtcagttttctgtggccctttgaggctcacaatcacaggctgaggctttccccactgcctctttcccattccttcacagcattttattggcattctctacctatttctacctcttctcttcccgccctcctcactgcatctccacataaattcaagagtttgtggctggacttgactaaatagatcaatctgctaaaaacaattact

SEQ ID NO: 272836 - DNA, 576 bp, Homo Sapiens
  misc_feature (53)..(53): n is a, c, g, or t
  misc_feature (443)..(443): n is a, c, g, or t
  misc_feature (473)..(473): n is a, c, g, or t
  misc_feature (494)..(494): n is a, c, g, or t
  misc_feature (514)..(514): n is a, c, g, or t
  misc_feature (540)..(540): n is a, c, g, or t
gcttcacacaacacgtctaccataagtatcgtaggcgctgcttaatgagcggnaacgtttgggcattggcagtctcaggagatgaacacactcttccgcttctggtccttcttcctccgagatcacttcaacaaaaagatgtatgaggagttcaagcagctggctctggaggacgccaaagaaggctacagatatggtttggagtgcctttttcgatactacagttatggcctggaaaagaagttccggctggacatattcaaggattttcaggaggaaacggtgaaggactatgaagctggccaactgtatgggctggagaagttctgggccttcttgaaatattccaaagccaaaaattgggacattgaccccaaactgcaagaatacctcggcaaattccgacgtcttgaagacttccgagtagatccccccatgggttnagggagggcaaccacaagcgacactcagtngttagcaggaggttgccggcngtgagggcagggaagcggtnccccttccccagtttttcccagccangccttctttcccattgatccagccaacccccttacc

SEQ ID NO: 272837 - DNA, 438 bp, Homo Sapiens
  misc_feature (384)..(384): n is a, c, g, or t
  misc_feature (411)..(411): n is a, c, g, or t
ggcacgagcaaattctagtagtactcaattgtctgcagttacttttttgtgtgtgtaggtctcatctcccctcaaaatcccagatagattataaactcttaaacaggaagttagtgtctcttggtgtgtaaccccaccatgctagtccatagtagatgaccagtaagtggttgaatgaatgaaccatctattcttttcacctctttttggggacatctttgcttttcacagaggatagtgctgatttggacagcattgaagcagttgctaatgaagtattgaaaatgggagatgcctaggcaccccacaggcagttacaggaacttggacaggaaggatattacgtggaacgagttggaaaggccttttcttcaaggtaggagngttatttcttccggcataggtgctgcntgacctttgccagagcttgaggtgttg

SEQ ID NO: 272838 - DNA, 305 bp, Homo Sapiens
  misc_feature (17)..(17): n is a, c, g, or t
  misc_feature (38)..(38): n is a, c, g, or t
  misc_feature (49)..(49): n is a, c, g, or t
  misc_feature (61)..(61): n is a, c, g, or t
  misc_feature (69)..(69): n is a, c, g, or t
ccagcaatttgccctcncctcacctcagtatcatgtanccgggcctcancctatattggcnctatgtancctttagttctttcatttttatttgacattcccattgatgaatatacccacaatttatatatctgttctgatgatgaacatttggggttttgttttgttttcctaaaaacagtgctgctactgaacattagtaggcagaagaaaaaacaaaacaccttgatctgtgtctcacactttatgcaaaaattgcccaaaatgaaaggactagtccctagaataagtacttgcaaaactca

SEQ ID NO: 272839 - DNA, 437 bp, Homo Sapiens
caaatattctgaaaaaagaagagcagtttcaagaagatatactcagagaacacattgcgaaagcagaagctgaagtatgggctcaggtaaaagaagttacatgtcaacctaaagtccatctttaccgttctttcacgttttggatttgtctgaaacaattgtatagtgtagtagtcagaactgactgaatcctggctagctgtgggacattgggcaagttctacaacctctgtagtcttggtttcttcattgtaaaaaagtaataatagtacccattctgtgggatagttgggagggttcagtgaaataatatgcctggcacacagtaggtgcttagtaagaagccggcatcatcaggagcttccttccttctcagctgccctctctgtagggaggactcctgctccctttattttgatttgattgaaaccaaaact

SEQ ID NO: 272840 - DNA, 348 bp, Homo Sapiens
  misc_feature (161)..(161): n is a, c, g, or t
  misc_feature (250)..(250): n is a, c, g, or t
  misc_feature (286)..(286): n is a, c, g, or t
  misc_feature (313)..(313): n is a, c, g, or t
  misc_feature (327)..(327): n is a, c, g, or t
  misc_feature (337)..(337): n is a, c, g, or t
gggaggctgccctgggaagttcgctcctgggtcgcctcgctgtgacccgacgatgacttgcctgctcagcccagtctgatccacgcaccctcagccggacggatccacggtttccccaccgcctccctccagttcctgctcaccggccccccgccgccggnaccaaagttaccacaaaaggctaaggaggtttctggagcctggagaccgctgcgtccccgacctcgctggactcccccagtcatttctncaagcgctgccatgagcaggcgtgcaacaggtgttnagcctcctttaagttgttgggacgatnccctggagcatttnagctgttccnaattttttgac

SEQ ID NO: 272841 - DNA, 491 bp, Homo Sapiens
  misc_feature (219)..(219): n is a, c, g, or t
cctgaatcctctggactgtttcccctgtatgtttccctggaagcttcaggcagtgcctcataagccaatggaatctgttgctaatagccacagcatatcccttgcataatatgacctctagattactgcaccttaattgcttcccagctcttctatgctttggtttagaaaaatgaagtactgacttacgggtgaagaaagtattcaaacagttgacantatttatttcagtcaagaaacagttcagagggagatacaaacaagtaacttagttacaatataatagttatgatgagaggaagtactggatgctaaacaattatatgagagacagctcaggctgggggtgtcaatgaaagcctcttggaggaagtagcctgatatgttaactttctgcatgccagtggtaagtcatttgagattatagtatctttgtccactcaaggtttactgctgtaaaacatgtaattaaagatttggaaagttgaaaa

SEQ ID NO: 272842 - DNA, 369 bp, Homo Sapiens
  misc_feature (24)..(24): n is a, c, g, or t
  misc_feature (40)..(40): n is a, c, g, or t
  misc_feature (62)..(62): n is a, c, g, or t
  misc_feature (92)..(92): n is a, c, g, or t
ctttcggtcccccaagtaaaaacncccttgggccctgaanctccctcggggtcccgccgtangggctcctccgtaacacctctgtgtcccangggtagggcttcctcctctgggggccctttgtcctgcaagccccgggtgcaagttcctggcctcatacggattgaatgacacagtactctcttgccggttcccttgggcaggggaggactttctgtggccaggctttgggaaggagtatgatttgattcttgagattattccacccgctgaccaagtcgcaggatgggaacctggaagttgtggacggcctccaaaattaacatttccctgtgtgccgattttttgacatgggacagtaagaactct

SEQ ID NO: 272843 - DNA, 259 bp, Homo Sapiens
aggtacctgggagcccagctcctttccacctgctcaggtgccccctccattgcgatgccccctccagcacctcaaatcctctcctggagcttctggggacacaggctcagcctctctcagctggcttcatcccaaaagcctgaaatccagccccacttcctggggcctttgagtcctcacttgcttgggccccatccgctgcaggctggctctgcctggctgttccacgtcctcactcttgttctatttgacagcaatt

SEQ ID NO: 272844 - DNA, 446 bp, Homo Sapiens
tcttcctgctccccaagccatgtggtaaaaggataaaaagttcctgcaggatcaaatgcaattctagctagtgagggcctgggcaaacggttttatcccaaggaatcctttgccctggagtagctgtgctgggccggctggggcaaggtggagccacccgagccagtcctggattgtgccaggtgagaagatgtgtgtgctgcaggccttccaactcctgggacaggcctgtccctttaacggggacaacacccattgctggtagcagaggcacaggcccagggaaaaattttccaagtcggcctgtcccaaaaggcatcggcttgtcaaactagcagctcagtgttctatagaaaatgtgcaaaagaatttctctttctcatctaactgctcggcagacagaagaaaaccaataatgtacatatgaagtacttaaaactacttaa

SEQ ID NO: 272845 - DNA, 579 bp, Homo Sapiens
  misc_feature (344)..(353): n is a, c, g, or t
gggcagtctaggtggaagggcctatatgcaggagactacagggctggagatgctgaatgtgcagtgcagtgggtggtaggaagtgtaagctagagctcaatcatgaagaggttggaatgtcatgcttgaggcactaaaaacagctttttattaataaagcatatgtggacatatagcacataaacagttaaatagcatatctgtgggtattaagattttacgaggggatgattaggaaaatagcctaaaaaggctccgtagcgggcaatgatgagaaaaggttaaaactgcgaatggcaactacctgaaagtttttaagtaagagagacttcgtcagatttaannnnnnnnnnggatatgtaaaatagaagagtagagagaactgagatctgtctgagtccttagggaatgttctcagttgtaggtggaagaagctactggaagcagaactaaagggcagttaggaaaatgtgttcacaatgattgacaatctaagtatggcagaagattgttaggaaaatgggagtgatctttggtgctgataaaaagtcaaagaaggccggccatggtggttcacac

SEQ ID NO: 272846 - DNA, 463 bp, Homo Sapiens
ttaagaccagcccgctctgtgtgagcctctggggctccctcgctcagtgagcacagttccccgggggttcatgccagagctccggctgaagcaagaagtcctccagctgcgtcgtttgccgcctgtggacgagtgcgccccagtttctgccctggcagctcctggccacaccttctcagagctcacctgtgcacttctaaattgaattggcccacggtgtccaaccaagaaggagcatctgcactccgagaaagatgtgttctgtaactgccccagtgtgaccccgcagtggctctcggtgctagatatgcatgactaagattgatgctgggcaaaatgtagatgatctttcattatgttgtgggcagcgtctttctctgcctttgctatatgcagtcagcagtaagccttttgctaaaagagttttgtttgacttctgagatccaaggctgattgttgttaa

SEQ ID NO: 272847 - DNA, 280 bp, Homo Sapiens
  misc_feature (127)..(127): n is a, c, g, or t
  misc_feature (140)..(140): n is a, c, g, or t
atgccaggcctaaactctgttttttaatatcgttttaaatataaatttaaaaaacattgttaaagtaaaaatccatatttaaacaaaatcaaacaataaaaagtgggcttctcactcacccctgccnatctctgaaggcncactatatttggattaatcaactttattgaggaatcatttatataccataaaatgtacacatttaaattatagagttgggtgagttttgacaaatgtctgctgctgtgctcccgcccccggtgagacatcactgttcaca

SEQ ID NO: 272848 - DNA, 404 bp, Homo Sapiens
tcagtgattgtacataccctgcccactcctagagacagctgtgctcaccttttcctgctttgtgccttgattaaggctactgaccctaaatttctgaagcacagccaagaaaaattacattccttgtcattgtaaattacctttgtgtgtaccatttttacctgtatttgagacattttttgtgtgtgacctagttaattttgcaggatgtgcccatatcattgaacggaactaaagtctgtgacagtggatatagctgctggaccattccatcttatatgtaaagaaatctggaattattattttaaaaccatataacatgtgattataatttttcttagcattttctttgtaaagaactacaatataaactagttggtgtataataaaaagtaatgaaattc

SEQ ID NO: 272849 - DNA, 628 bp, Homo Sapiens
aacaaagtctgagaggcagagatttaaagaagaagctgaaatgttaaaaggtcttcagcatcccaatattgttagattttatgattcctgggaatccacagtaaaaggaaagaagtgcattgttttggtgactgaacttatgacgtcgggaacactaaaaacgtatctgaaaaggtttaaagtgatgaagatcaaagttctaagaagctggtgccgtcagatcctaaaaggtcttcagtttcttcatactcgaactcaacctattcattcaccgcgatctttaaatgtgacaacatctttatcaccggccctactggctcagtcaagattggagacctcggtctggcaaccctgaagcgggcttcttttgccaagagtgtgataggtatgtttcaggtgtaccttggagcctgactggctttctgacattccttttatttagaatcctggctctgtcagagttttaagtgatataaaccttaagaaattcatagcttgaactcaggaggtgatccattgtacttatgagatataggattctctatatttgtgcttcttggaatcatcttagagactattggtaacattacgttacaagaaataaagtgaactttgttgataaaaccta

SEQ ID NO: 272850 - DNA, 361 bp, Homo Sapiens
  misc_feature (28)..(28): n is a, c, g, or t
  misc_feature (64)..(64): n is a, c, g, or t
cccccaaagaaacctatccatattgggnaaaatgtaatgtaagaatatgggagacctaataacncctagaatcctgaaagtgtatccaagcaaaaaggcattaaacactgttcctctgggacagcccaagcagcttcagtttcccatagtacgtttcctcagtgctgtgtgagggaaagacatggaaggcacttgctttcaataatccacttgactctgttcttaaaattatagaatgagtgtgagtgcaggaaaggatttcgaggaaatgggattgactgtgaaccaataacttcatgcttggaacaaaccgggaaatgtcatccattggtgagttatttaaccttgtttttcattactt

SEQ ID NO: 272851 - DNA, 466 bp, Homo Sapiens
ttgtccaaatttctgaatccaacagttggtcacagaggtcaagtattatcaaggctcctttgtcagttctcaatcgtgtctgactcatccatccttcaagtacatgcaaggctcaatagttttccagaggcagatgcctggggccatttaagatacagatgaaataggattatgaggtgaacccatttgagtaagaactttatccagccactggagggggccgtgcagatgtatctcaatccagcagggggtgctagtaacatcctggcggtggtattctgctccccagccctaggaaaaacatactggaggtcatttaacttgtttaactcagtggttaaacttattaagtaagaagagttcacataaccaaagactctgattaaagctatgcatctttcctccctgacccccccgcccctggggagaaaaaaacacacatgcacaaacgcacacataatttcgc

SEQ ID NO: 272852 - DNA, 194 bp, Homo Sapiens
ttgattgattgattgatcgattgattttaaaaagccccggagaacatattgcatgtgatgtctcattttggttatcaactggccataaaaatctgtgcccattcaattgggaagggaatcttaggtgccctcttgataaatggaaaagctttcagtgttggcctttcctcctggttaatctttccaaaatattt

SEQ ID NO: 272853 - DNA, 652 bp, Homo Sapiens
  misc_feature (65)..(65): n is a, c, g, or t
  misc_feature (67)..(222): n is a, c, g, or t
  misc_feature (321)..(371): n is a, c, g, or t
agataacctaacaaaatagttttagttgggcaaaattaaagagttgggcaacccatgactgaaancnnnnnnnnnnnnnnnnnnnnnnnnnnnnnnnnnnnnnnnnnnnnnnnnnnnnnnnnnnnnnnnnnnnnnnnnnnnnnnnnnnnnnnnnnnnnnnnnnnnnnnnnnnnnnnnnnnnnnnnnnnnnnnnnnnnnnnnnnnnnnnnnnnnnnnnnnnnnaagtggttaataaggattggttgattgaagattgaaaagggtcagctgggaaaatttttaaaaagactgtttttaaaaaggtgctacaaaataaagtgnnnnnnnnnnnnnnnnnnnnnnnnnnnnnnnnnnnnnnnnnnnnnnnnnnngatgtgaaattcacatataaaattaaccattgtaaagtgaataattcagtggcacttaacagcttcattgacacatccacatatacagttcaatccagtagtttttagtgtattcacagagttgtgcgaccatctgcacagtcaattccagaacattttcagcacccccccacgagaaaccccatacccaggtagcaatcactccccacttccccttctgcaagctcctggcaaccactaaagctgctttcggtctctctggatttggcctaccctgggta

SEQ ID NO: 272854 - DNA, 393 bp, Homo Sapiens
  misc_feature (369)..(369): n is a, c, g, or t
aacagaatacttcagagttctatgtaattagccaaatttaatgtatcatattctataaacctgattgattttagaaggaactgcaagctttacttgaggacaaagccttgcctgcagttgtttaaaatgtcctgaaacaatcagattcccagcctggatgctggtgggagcaagagctgcctgtaggtaccagaaaggtagtgacttctgacatttccataagattatcaagaactttcttcctgtgtacatggcagtaaaaacagttctccaaagagacaaaaccctatgccccactcccaatctgtcttttaaaaaaatttatgggaaaggaaaatagtgaaggatctactttcagggtctctgganttcaatgaggtttcaaggtgaact

SEQ ID NO: 272855 - DNA, 313 bp, Homo Sapiens
ttagagatgtctttaataattaatagaaactctttgttttaatacagtcagatatttattagagtcaccatattttttatcgtgttgaaaaaattctttcctactgtgatgtcataaagattctctgatactgccttacatagttgcctggctgtcacattcaggcacaggaggccatcttttctctgctgatgggtagtgccagtgtcaggtcaccagaggctctttcagagttctccactctggacgtgtctgacgttattgagcagctttagagtagttcccacgccgagccctatgcagtctcaaaaaa

SEQ ID NO: 272856 - DNA, 355 bp, Homo Sapiens
ggaacaggcagtcacctcgagtgtgggaggtcacctgggtccgtcgtcttccttctggtatggtgttgggtttatgtacacactataacacttcctgtgtgagttcatgtacctgtctgtgagtgctttggtgtattgagcctcagtacactccaagggcattaaagtcaagaactagaacctggggtgctgtgcctttcttttttagagatgtgctctcatcgctttctctgacccccactttgccagcaaataatttttatttctgcttaaaatgtggtgtgtttggggatgccccacacaagacaggcttttccctgagaccagcagctggaatttctgccctggaaaggaa

SEQ ID NO: 272857 - DNA, 436 bp, Homo Sapiens
  misc_feature (270)..(271): n is a, c, g, or t
  misc_feature (276)..(288): n is a, c, g, or t
  misc_feature (318)..(318): n is a, c, g, or t
  misc_feature (369)..(369): n is a, c, g, or t
  misc_feature (405)..(405): n is a, c, g, or t
  misc_feature (411)..(411): n is a, c, g, or t
  misc_feature (421)..(421): n is a, c, g, or t
taagttaccattaattgtcgtgaataaaaagttggtctcagtgagttttgcagttgacaacgaaagatgggtgttcgtgtgtgacagcgactcctggtttctcctccactttacctgccgctccacatcaagttttcttctgctggtgccactttctctgctttaccttcaaggttggcatcctccaagtaatggcgattctcattccctatctacgctcttcctatggtctttgctgaattcttggctttaaatatccctgtgccccannaccgnnnnnnnnnnnnnttatttcactaattcatgttttcaagctcntgagctcaggatctgtaattcaggacacctggctttatttctccaagacgncatgtctaataagtcaacgtcaaaactttgccctgntttccncaaaacctgnttcttcctttccaag

SEQ ID NO: 272858 - DNA, 391 bp, Homo Sapiens
  misc_feature (278)..(278): n is a, c, g, or t
  misc_feature (313)..(313): n is a, c, g, or t
  misc_feature (376)..(376): n is a, c, g, or t
atatgcctgcagggtttataaaaaatggcctggagtgacacattttattatacctaatattcactgcatcagtatcacatctagctcccttacttgtccacagataatgtaaacaaaggagggaaaaacttattaaattctccttcgctgctggcttgtactggtttagtgcctgtgtccctgggcagtgtccagtgtgttcacttccagttgaagtatccatgtgtttctgggcagcttttctgctcagtgtgatccttgaagatgggcgtccccgncgccacccagagtgtggtccttggccgcctcctgntcctgcttctgcaaggcctggaaaatgggcttgtctgggagccagggagttagtcctggggtntgttgtgtgcctgcg

SEQ ID NO: 272859 - DNA, 356 bp, Homo Sapiens
  misc_feature (296)..(296): n is a, c, g, or t
  misc_feature (341)..(341): n is a, c, g, or t
gacagggaacagaaccttcgccccccgcctgagcagctggtagactagatatcttccaaacattatctcatttacttccctggagttacaaataggtagatttcatgtccgttgaggggtgagaaagctgaaactttgagacttaagaatcctggccgaggtcagcctcctccgaagcttcatctcttgccaccactttctggtgcacacctaggacagatttcaatccctgagatcccaggatgaaacctatgtttgccaaataccagctactgtgccagaagagatcatggaanccaggtgtggaaagcctgcttgagaagaggagcctaaacatcatngtttgaaccggtcct

SEQ ID NO: 272860 - DNA, 395 bp, Homo Sapiens
  misc_feature (26)..(26): n is a, c, g, or t
ctcctgtcctgtggaaaaactgtccntcccacaaaactggtcccctgatgtccaaaaaggttggggactgctggacgtagaaaaattgaagactaaagtctgttgtaagaaaacctaaacagtggtgggactggaaagaatgagacaaacacggatcccaacacgtatacaggaagaattagtgactgagaagacgaacagggagaacctcactgaggtcagatagtatggatttataatggcccgtcaaccttggtttcaggacagtccaacaggatcagaggaggtaatactcctcacacactactgcttctgaagtctttatgtgttaatacctctaacttattaaaggccaggatcatggcatacttatcattcttccatctacacttcca

SEQ ID NO: 272861 - DNA, 388 bp, Homo Sapiens
  misc_feature (84)..(84): n is a, c, g, or t
  misc_feature (222)..(222): n is a, c, g, or t
  misc_feature (248)..(248): n is a, c, g, or t
  misc_feature (255)..(255): n is a, c, g, or t
  misc_feature (257)..(257): n is a, c, g, or t
  misc_feature (260)..(260): n is a, c, g, or t
gaaacgacctgaactgtctgtgtgctctctggtgtcccatgtcgccctctggccagtgagagcctcaaggaccctggcctttgnttcccagccccacagtgcagggagttgagcagggtccggggtggtggagaccagggccaggctgggctctcccttgggccagcagttcccgcaggtgttgagggtcgggggatgctgcccacttggccgccgccgccncgcgtcatggtctccctgtcgagtgnccggcgncntcngccgggcctcaagtcctctgccacggggtcggcctctgttgagtgagtcccgccttgtcaggctgcgtgggggactggcccagctgactggtctctctctcctgcactaaaaggatcaacaaggaaaa

SEQ ID NO: 272862 - DNA, 319 bp, Homo Sapiens
  misc_feature (255)..(255): n is a, c, g, or t
  misc_feature (271)..(271): n is a, c, g, or t
  misc_feature (305)..(305): n is a, c, g, or t
tactaggaaacacactcgcttcagcctgcaccaaccaaaatgacttgctcaaaaggccatttcaacccctttatcactgtggctcaactttgattttcttcccagttcatccatgattcagacttcttctgtttcaggagctttgcccatgcgttctgccaccttctgccaggggattacacctgtcccatcccgtcggctcctgaatgtccaggggaaagatttatttttcctttggggcttaaaaatgttttntttagggacccttacnggaatgggggttcctggttacaaactatataggnttcccggaacttac

SEQ ID NO: 272863 - DNA, 702 bp, Homo Sapiens
  misc_feature (590)..(590): n is a, c, g, or t
tcagaaatcttgggtaaccaggggcattgtcaataaacagtaatattttgaaaggaatattttctgagcagtaggtcttcaactgtgagcttaaaatattcagtaaaccatgctgtaaacagatgtgctgtaatccaggctttgttgttccattaatagagcacagagtagatttcatataattcttaagggctccaggattttaggaatgataagtattgatttcaaggccccagctgcattaatccgtaacaagagagtcagcttgccctttgaagctttgaagccaggcattgattcctttctatctatgaagtcatggatggcatcttctttcaatagaaggcaattttttcaacattgaaaatctgctttttagtgtagtcttgtcatataccttagctagatcttccagataacttgccatagcttctccatcagcacttgctgcctcaccttccacttttatgttatggagacaacatctttccttaaacttctgctggcttccagctgttctgtgcagcttcttcacttctctcagccttgagataattgaaaagagttagggtcatgctctggattaagcnttggctaagggaatgtttgcagcaggttgatctttcatccacgcgatccaaccttctcggcatcacgaataaactggtttgggtgcttcatcaattgtgtttcactagagta

SEQ ID NO: 272864 - DNA, 336 bp, Homo Sapiens
  misc_feature (278)..(278): n is a, c, g, or t
agtgaggcgacccagtggtgaccaggagcagtggttcggcatgcagtgagggggcagcactccattggccgcagtgagctgccctgctctgagcacttccgtggactgaaggaaccgtaggagcctgctctcagaaggacaatgattcagcatgtgattgcagcaggggtctctgccccctccgctcccaattcctagtcgtgacttcatttctaaaacagagcctgaccaaccttccatgtatctccatcctaccctagttccagccaggggaggantgaggggagttgccccgagaacccacggacatgtttggggctttttggggcaaaaata

SEQ ID NO: 272865 - DNA, 298 bp, Homo Sapiens
agctaagcagaaaggactcagcactgccttcagccttcacttactcaagaaataactcatatctcaacctcaagcaagccccaagcagtagaatgaggcttccctggaaagaggctgagactcacaggctggggatttaagaccctctcaccgtccaccttccttccttctttggtcttggaagatgaaaggctcccatttttaaagggtggagaacagcagatcccctgctactgtgagacaagccagaaaagtgagtcaaggccagactcactatgggtcacccccaaacagcttc

SEQ ID NO: 272866 - DNA, 388 bp, Homo Sapiens
tgtttccaacctcccaacacaatgtgcccgggggacaggcatgcaaagctgccctcccccggcctgcctgaactcccctaactcactgaagccccgcgaggcaccccaggtgacaccgtcggccctgcctgcccatcaactttcccatttccacacatttttggcagtcaagggtggaaggatataagcacagagcaccctgtatttgtgaatgaggtcttcaatgtaaagtgaatactactactaagagggcttaattagcataggctaaacaaccagattgtaattaatttgggaaaaatgcctggttagtgtataatagctaatgttagtttctacagtaattgtacctgattcatggcacctgttttagcagtttttgaaagtt

SEQ ID NO: 272867 - DNA, 510 bp, Homo Sapiens
ctggggctgggtcagagcggtgctgcccgtgccgcctgaagagctgcagccagaacaggtggctgagctgtggggccggggtgaccggatcgaatctctcagcgaccaggtgctgctgctggaggagaggctaggtgcctgctcctgtgaggacaacagcctgggcctcggcgtcaatcatcgataagaagcctctacagcacccctgccccctaatttatacagaaaccggacccactaatcctctgggattggccgactgtgagctgcagataaggctatcagccaccaaagagcaatgaacaatggaaacttcagagagctgaagaaagggggaggcctgtgttcttggcctgcccctgagtcttctggctgggggcaggttgcctgggcaagaactgcttcttcaattccttaacaaatgcaaccaccaacacccagatctctctctctctttattttcagtttttttgctgttatccagataattaataaaaaccaaccacgcaa

SEQ ID NO: 272868 - DNA, 330 bp, Homo Sapiens
  misc_feature (27)..(27): n is a, c, g, or t
cttataggggaattttggccccctcgnggccccaagaattcgggcacgagggagagagctagctgatccttcaacaaacctgacaaaaacaagcaatggggaaatattccctattgaataaatgctgctgggataactgagtagccatttacagaaaattgaaactggaccttttccttaaccatatacaaaaattaactcaagatggattaaagacttaaatataaaacctaaaactataaaaaccctggaagacaacctaggcagtacctttcaggacacaggcacaggcaaagatttcatgatgaagatgccaaaaaaattgcaaaa

SEQ ID NO: 272869 - DNA, 341 bp, Homo Sapiens
  misc_feature (14)..(14): n is a, c, g, or t
  misc_feature (279)..(279): n is a, c, g, or t
ccatgggttgcaanaatatcaagtgggaaaagtgtggtttcccggatggggtagcacaatcactctgccacttcccttggctgggggtgggaggtccccttgccttgggtggctcctgggtaggctgtcactccaccctgctttttctcgcccttcgtgggtcacgccaaccgcctagtcagtcccagtgagaacctggacacctcagatgtggcgcaggattcactcgctgtttttattctgcttggtgggagtctccaaccatagctgtttctagtntgccatcttggccccagaaatgctctttttctagattttgggttatgcagttggggtcccgc

SEQ ID NO: 272870 - DNA, 440 bp, Homo Sapiens
  misc_feature (332)..(332): n is a, c, g, or t
  misc_feature (383)..(383): n is a, c, g, or t
  misc_feature (406)..(406): n is a, c, g, or t
  misc_feature (411)..(411): n is a, c, g, or t
gttaaattacttcgaaactttaattacagatacttttccacgcaacatttctgaaatgaaagctttgattctcccctttttttgcataaaggctgggaaggtggtttggccagaccgtacatctttttgtatatacatatctacacctgtgtctcttctttattaataaaaggtgtcttgatcacagtcccaaaccaactctgcattgggattccagcatataaaactcagagagtaaaacaatttcaaagggaagacaggctgcaaccacagggaaaatgggcagggaaaagttgtaggcttgataggttgtttcttcttaaggtttaacntcagggaatattaattaattaatttaggggggaaaaaatagggggcccctngggtttccatcccctgctacccnacacngctcgtccccggactctgggggctgtctt

SEQ ID NO: 272871 - DNA, 303 bp, Homo Sapiens
  misc_feature (18)..(18): n is a, c, g, or t
  misc_feature (44)..(44): n is a, c, g, or t
cccacgtgggcctcaaanccccggagcctagacaatcctacccngcctgggccctccccaaagtgcggggataatagatgtgagcccactgagctcgacttaaatcctaaattttattttattttattttatggccatgctccctctaataaatctaaattttaaataaataagtccaagtattattgtgtttatgtgtataaacctgcacacacacacaaaagtgtacacaccctgctggtttctattacaagaatgttaagtttggtttgacattcaacagtcaattagtataagtcatct

SEQ ID NO: 272872 - DNA, 792 bp, Homo Sapiens
  misc_feature (290)..(321): n is a, c, g, or t
  misc_feature (331)..(356): n is a, c, g, or t
ctttttaacctcttttttccccctccctctgagacatccgaattgtgggcgagcagtgtgatttctctgtggctggccgtgccacactcacccccagagcacttatgttaacttggaactgtttagagagaatttttttgctttcttgggtcacatggctcagtagccattagccatagcttgattttgcaaactgggcaagggcctgggcacacctttccttccaccaggggcatgggtgtttctgggaagagtttgaagctagatcctggtatgccaaaaaagaagcnnnnnnnnnnnnnnnnnnnnnnnnnnnnnnnnccctcttccnnnnnnnnnnnnnnnnnnnnnnnnnngagcagttccccccctcccacccctgcactattgtcttctcttttgccacatgccctgctgggggaagaaaatggaaggtaagcaaacaggctcctctccaaggagagctcatggcagacagcagagcaggcaagtttgcctctccaaagaggttctgggaaggctggataagttttgacaagagaggagcgtgtttgcaaaagaattgtgccctcagcagagcagtgctaaggagagtctaggtcctggggcctaggtgggtggtggtgtctgtacacggtcttctcttattctacagagcttctgcacttgaaactacattgttcagcctgttttcctgacttaggttgctacagagtgttctgcaagccagcctacagccagcaaatgtttctgaaagtgttttctaggctttggaggaagttttttggagta

SEQ ID NO: 272873 - DNA, 508 bp, Homo Sapiens
  misc_feature (153)..(153): n is a, c, g, or t
  misc_feature (431)..(431): n is a, c, g, or t
  misc_feature (471)..(471): n is a, c, g, or t
atggaacccaacatcaggtacttcctagaggagcaacatagagtactgaagccaggggatctcctgaaagtggctgaggtcagcagccgctttgaggatgttcgaacctttctgcgggctgtgacccaagctaggcttcaaagattgtctccnaaggacctgacccaacagccatttcttcttgtttgatttccaaaagacctggccccctcctggtagggcccaaggctcaagctttcaggccttgcagcttcagccatgtctcatacaagcgcaggtgacctctggatcttccttgaaaggggaggcagatctcaaactccaggctcagaactgtgaagactgtttccagcctggctgtgagccaagacctggttcctggtggaccctgaggacaaagtgtgataaaacctctggctcagacttgcccntactgaaggcttctttggttataagatgcataaagtcacntggggctagctaaacaataaagagtttattgtgaaaa

SEQ ID NO: 272874 - DNA, 305 bp, Homo Sapiens
  misc_feature (21)..(21): n is a, c, g, or t
  misc_feature (27)..(27): n is a, c, g, or t
tccttagcctgggaggaaatnttttantaaatataaattactacctctcaaagtaaaatttacattatatctataacaatatgaaatatcttatttagctacaaccagatactattatttgactgtttagaacacagaacaaaatccttctaaaaccggtaccttggaggatgttgtctttctttgaattaaagccacaactaacaagccaggcacagtggcaagcacctgtagtcccagctacttggaaggttgtggcaatagaatcccttgagcccaggagctccaagcccagtccaggtaac

SEQ ID NO: 272875 - DNA, 321 bp, Homo Sapiens
attcggcacagggaacatgcaggtacctcagtggcccaattttgagaaatagagggaattttttcatcgtaaggatggtagattaggtcctaggtgagtaatgaaaagaaggctgaaaaacaaaattccttattagaaccagaagtgttaacctgacaaacacattcattcaaactctttagcacgtgaaatatatatatgaaatacatatggtactcattttcccttaaaatgagccatgattgaaaaaagaaacaattttacattctcaaggttgggaaatagaggaggatatgcattggcgataatattgatttaaaa

SEQ ID NO: 272876 - DNA, 122 bp, Homo Sapiens
gtctctttttattggaatgtaagtttcatgtaagcaggaactgtatatcactgctataccctcagcatttaaaacaatggctgtacatcatacatactcaataaatatttgttggataaact

SEQ ID NO: 272877 - DNA, 486 bp, Homo Sapiens
ccttgtaaatattatagataaatcacagcaccacagcaccacatctaagcattagtgatgggtagctgatgtcagcttcatgtggattttaagcactctagaaacaatgaagcttcttggcatattttaaggagctcccaaaatgtgttacctattaaattgtaactcagcaagtagaagaccatttgaaaagtcaggtacaaatatcctcaagtggcataaaaatgtagtcagttttctcttttaccagtttttatttccactccaattatttagaactttatttgtacatgtgcagaagaataaggcagctgagaatcttgtttcccccaagagagttttacaggctgagtgttgcaaatgtgttctttgtcctgttatatgtatatcaggaatacaaggatgtgaaataaaactgtaaatttgcataactggatgtacttagataatgtgaaataaacattaaagacaaggtctatttttaat

SEQ ID NO: 272878 - DNA, 585 bp, Homo Sapiens
  misc_feature (533)..(533): n is a, c, g, or t
tgaatgcagactcaacagtgtcttatgaagaaatggaatatttcctcctgtacatctctttttgttagcaagacaacaatttcatggaaaccctccagtttttccctcaggtcctattgattaggattggggtcacttgcctttcttaaaccatctggcaaggggaatgagaccattatgattggcttgaaccaattaggagtcactctcctgggattggggaggccctgcctctaagtagttagctgcctgataattctgcaaaagctggcttctattagcaagggaggaggaggggaatgatgtagaataatgactattgtcaggccacagcatggggcattttacttacatttaaacataaggtaatacttagtttctgctacagaatttctaatacatgtacttaagagttttgctggctgggaacagtggctcatgcctgtggtcccagtgctttcagaggctgaggcaggaggatcgcttaagcccagcctcagacttctgtttgaggctgcagtgagctatgatangtacacactgcgtgccagcctgggcaacagagcaagaccctgtctcaaaatt

SEQ ID NO: 272879 - DNA, 319 bp, Homo Sapiens
  misc_feature (32)..(32): n is a, c, g, or t
tagcaaattgaagcccacaagtgtataaaaanggtaataacatccctagccagcttgagtctgttacaggagggcaaagtcggttcattagaaaatctgttcatataatttaccacattaacagatgagggaagtcaagttattggattatctaaattgatgcaggaaaataaataacactgaatatctgttttatgataaaacacttagcaagttaggaacagaaggggacttctttaacttgatgaatggtatctacagactacaatagatttaacagtcagccctctgtatctgtgggttcaaccaactggatttg

SEQ ID NO: 272880 - DNA, 424 bp, Homo Sapiens
  misc_feature (52)..(52): n is a, c, g, or t
  misc_feature (377)..(377): n is a, c, g, or t
agaacagcttaaactaagacctatttaaactctcaggaagggcgtcaagttnatgtgatcttcaacaaatgaaaaggcagcctaaaaccagcaccagcgtagtccattctgtcacagaaccaatttgtggaagccctggctctaccccttactgaaggaaggcctttcgtatcatcacttagtctcagcttcggtttcctctaagagaggaggcaataattcccctctcacagacgggtgtgaaagtaaaacagtccatgtaacaaatacctagaaatgttcaggccaaagaacgcctaccaacgtcattttcttccctggcccctgctcagtcccacgcagtgctctaagtttataaacacaccactaaaaaaatntcggtctcatagaccttttgcaatttctctctgaaattgcaaattgt

SEQ ID NO: 272881 - DNA, 367 bp, Homo Sapiens
  misc_feature (30)..(30): n is a, c, g, or t
  misc_feature (42)..(43): n is a, c, g, or t
  misc_feature (47)..(47): n is a, c, g, or t
  misc_feature (347)..(347): n is a, c, g, or t
tggatcccaatagctccccgggacatgtgntggagaagcggnncctngcgctcgaattctgaataccgtcccctaaaataatgacagcaactcaaccaggtacagaggcagggagatttcatacagaagacacaaactcccgctgccaagttggtgttatcttcagtttactgacaatgaaacaaaagctcccatggatttcaggaacttgcccaaggtcacagggctagtttagtcacgacgcaggccattctacttgccagaaatacccccaactcccatgaccctcgcctaggactcgcaaacctggtccccgccgccctttcctcgcatcaacttctaccagnaaagcctccgggggccgctc

SEQ ID NO: 272882 - DNA, 411 bp, Homo Sapiens
  misc_feature (29)..(29): n is a, c, g, or t
  misc_feature (43)..(43): n is a, c, g, or t
  misc_feature (51)..(51): n is a, c, g, or t
  misc_feature (68)..(68): n is a, c, g, or t
  misc_feature (100)..(100): n is a, c, g, or t
acctggccccccaggctgccgacagtccngacattggtatggnccccctgncctggcctgtccccccngggcagagattatggtatgggtttggtaattnacctatatggcccctccccaccctagcacagtgtagggcacctcagtaaatatggtgttgaatccacacgggtattataggctagagacagtgaagatcatcctagtcccaagcccctgcctttaccttagcacttcaaaacgatactgtcagtgttaggctgtgcttatatttataaaaattttcttcatatatctctcacaaatgtatcattgaatcacctttatagagcatgctgtaatgtataatcagttttaagagagaggatccacagcttttaaagtaaacatcagaaaaaacatagacaaaaa

SEQ ID NO: 272883 - DNA, 914 bp, Homo Sapiens
  misc_feature (149)..(149): n is a, c, g, or t
  misc_feature (248)..(248): n is a, c, g, or t
tcatgctggccccggagccgttagcttagtcatggctctaaatatgtacctgcaatcggatgttgaggatcaccgagcccgcgacgtagaagtacgggaagttcatgcgcagtgccaggccagctcgaagaaggcgagcagggtgcggngagagccccttgcagaagacgccgtacgaggttctccagcatttggctcaaggccccaagggaacatgtgacaagaaggcgccacttgtttaaacattnggaagttcttctgtgttcagttctgttgacagaacatttacttaacacatcatgaaggctagtttggatgtggaggggaatagactccatctatccatatgagctgctgcagaagaatattttgcctgctggaacctgctgtatctactcaagagtggaagttttcacaggtaacttctacatatcaagtaacacaggatcaaatgaaaacctagcaacacttggtttctgcctgtatcagacaggtgaaattgcaagcagttatacaagtagtgtactacttctcataaagcctctcaaggagggtattgttattgtgtgcgtttacagatggctatcctaggctgatagtagttgtacatatagtctaggtcatatcatatgaacgggtactgggttctgtctgccactcgcttaagacattcctggacgatttgttccactggagaatcatccagggggctattgcgccgtaccttgccgtgggcgaagatttggaaataatgcttttggccgacttcccttgtgggggttttgtccgcgttatgcgtggcttgcccttcgtggccatcgcgggatgagccgctccatctgtagagcctcctgggatgcgggatcccggttttcgggcgaaggtgttccaaagggggatggtagcagttgtcc

SEQ ID NO: 272884 - DNA, 406 bp, Homo Sapiens
  misc_feature (361)..(361): n is a, c, g, or t
  misc_feature (385)..(385): n is a, c, g, or t
  misc_feature (393)..(393): n is a, c, g, or t
gataagattcagtgtgatttaacctgaagtctatgtacctgttaatgcacattcatgaaatacaccccatgctttggagaatgccgtctaccagagctgcagccttggcatccagagtaactcaaggctaggagttgtgtctggaaccatccatatccttcagtctcttcctgaagctcgctcttccttcatgtccaaggaggatgtaatctcctttgtgtcctcccactcagcccagtgaaggaagtagagtttgggttctgctgcttcggttttgagcacaccctagcagacagtcctgggctgcccttccgggcacttggacttttgaatgtggaacacaagggaagggcaagagctngagaacgggcacaggcaagaagtnggtctcangctcgtctcctgc

SEQ ID NO: 272885 - DNA, 435 bp, Homo Sapiens
  misc_feature (17)..(17): n is a, c, g, or t
  misc_feature (40)..(40): n is a, c, g, or t
  misc_feature (49)..(49): n is a, c, g, or t
  misc_feature (62)..(62): n is a, c, g, or t
  misc_feature (99)..(99): n is a, c, g, or t
  misc_feature (136)..(136): n is a, c, g, or t
acccctgggggccattngggggcacaatccaaagggctgncctaaacancaaggtcaacaantttccaaaatccttttaatccccttttccctacccantacccgtcccctttggtccttaaaattatgccccaanggttcctaatggaaaaatctttccagtacccattaccttaggacatagcctttaataacctgtttactatgattccttgaaatctctctctaaagattcctaatagagcagttatttcacaattattacatctaaactgttaggtcacagaaattccgctgtcagccagcccaattatactttgttgttttaggttcctttcaaacagatgctaaaatgtactgtcatgggaactttaccccctctaaaatatttgcagagtttcctacttcttctccactttagaaattataatgtta

SEQ ID NO: 272886 - DNA, 315 bp, Homo Sapiens
  misc_feature (16)..(16): n is a, c, g, or t
  misc_feature (39)..(39): n is a, c, g, or t
gtacggggatgcttcnttgggaggaagggtcttcctttncaccaaaccccaccccggcagcaccgggaaaggggtggactatactgccagggcctgagggcactgaggctgccttcactgtgtagttgtcagaatgtcacagaggtaactgaggtgcaagggcatttttctcatggccttggataaagcctctgtgttggactcattaaacatctacccggggcattgtacaaggttttgggaactcacgactaagacgccatccttgctctcacagaggctgcagtgtggtaagagaaatgggaaggagatgct

SEQ ID NO: 272887 - DNA, 404 bp, Homo Sapiens
cgttcctcacactgtggccacaggacagaagtcgaggctcaggcggggggcctggtaaagacttttgggtttttcctggggacccccaaagttctatcccccaaaagcaaaggtaaaccagcaacagaattgtctttgtggggactgaaagcccagccttaaatcaccctcaagccctgagagaattaaggtgagccgcctcaccgggacacctgtggacagaaaagtacaccttcccctggaggaaggtaaaacaaaacaaaaacagacagaagtcctcactgcacggtgctggaatggatccgggtcaggaaaaattattacaaagtgcatgatggggacattcacaatttggaatatgccttgtacattgtgcaacaaaattctaccaatgataaactcca

SEQ ID NO: 272888 - DNA, 704 bp, Homo Sapiens
  misc_feature (13)..(13): n is a, c, g, or t
  misc_feature (24)..(24): n is a, c, g, or t
  misc_feature (35)..(35): n is a, c, g, or t
  misc_feature (106)..(106): n is a, c, g, or t
  misc_feature (117)..(117): n is a, c, g, or t
cggcctccctatngggaatttggncccctcgaggncccaagaattcgggcacgagcttttgggaaatggagacagaagctggcccactttgcctagagagcaaggnctttgagaccnaaagacattaaagagatagcccaaaaagacacaagcccctgcccaaagatgaactcaaaggggcagcgaatccgtgatcttcaccccaaggggagagatgacacctataatggctacagaaagtgaagtcactgcttttgctgtcttgggatcaagaccagaaagaaattattgatacccaatggagctggagatgcatttgttggaggttttctgtctcaactggtctctgacaagcctctgactgaatgtatccgtgctggccactatgcagcaagcatcataattagacggactggctgcacctttcctgagaagccagacttccactgatggaagagctgaaaacacaagcccaggagtgcagacactgccctaattgcttcctgagaattcccatattaataaagaagaaaattatctgccattttttcctactataataatgctgaatcttaatttagagggtacaagggtatggtaatgcttgtagaatctttattatctcaacaatctaaaaaatgatgtttatttccatagtttgatagtgccacttaaatgccaattaaacaagaatataacatttc

SEQ ID NO: 272889 - DNA, 321 bp, Homo Sapiens
  misc_feature (12)..(12): n is a, c, g, or t
  misc_feature (27)..(27): n is a, c, g, or t
gaaacccccaanccatggggcaaagancccctggcatcccagctgggagggatggggattgctgttgggtgagcagagggctctggctagctcttgagtctaaaaagcaggaccacaaagaaaacagactatttaaatagcaggtgaagccgcttacaaaagagcaaacttgatgcaaattctgtgtggaaaagattgttggtctcattttattgtctttggccatacccataaatctgactcaggaaagacatttatatgtacacaagtgtatacaaataaaagtaaagttttactctattactttccaccccttcatcc

SEQ ID NO: 272890 - DNA, 453 bp, Homo Sapiens
ctttgagcagtgttgatcaagccaggttgaatatttgccatgaaattccagtgaatgtgtagctcaaatgcaaaccctaagtttgctgtcagttattgtatggtccagtaccccagtcctagtacacatattttaaaggttaaagtgaatgtttttgtaacatttaagcatatttcagatgtaaataaaagattgtaaaatatacggtttttaccaaatttaaaagatcctttttagttaatactatgacagtactaaaaatatatgaataacatttcagataccattatattaaaatatttgtgtatgtgtacaaaagcgttgataaatactaatctttaaagtttgtggagttcctttatttgtaatatatgtgctcttaaaagcaatgggatgtgaaattatgaaagtattttattgttcatagaaataaaaaacacagttactttgcaa

SEQ ID NO: 272891 - DNA, 258 bp, Homo Sapiens
  misc_feature (118)..(126): n is a, c, g, or t
tgagccactgcacctagcctggttcaacattatcactatacataaaaggcacaagaaaatatagattgtaatcacattgttatctaaagattacaaataacattaaaatgaaaatgannnnnnnnnctgtcagatgtcttctttacataggaagcagaatgaaaaattgtgcaactacagaagctcactgggcagtaaaatagattttgtttctatttgatgatattttaacagatacacagattccgtactgaaagt

SEQ ID NO: 272892 - DNA, 835 bp, Homo Sapiens
  misc_feature (399)..(399): n is a, c, g, or t
atcacatgagcacgaatttacctgggaacgtgacgtaaggagcctaagctcccctcagtggtgagcctgctctcctggagtctagccgcttcttacagctggtggctgtgacagcccgaaggcctcctccacatacctctgggctgccctgtgggtcctctgtgatggacacctgtagagcacaccctctcaatatttatttcttgtctctggtttagaattcatcagcagtccttggcactcaggctggggatggcagggctgtgcgtagcctgccctcagtcacctcggtacaggagggaccttctgcccatagtgggccgtgtggcttcccctgggcctgtctataggcctgccctggggagtggttttggtttgtggtgcaagggccagaccagncctgcgcaggactctcctggatgcctttgcttggccacttgtctaagtctccggcactgttttcgttaacaacagaccttcttggctctgctcattctcatcattagtgaataacaagaaaggagtcaaaccctaaacatgtggcatggtgaaacctcttcagatgctctcaaagtcttgacatttagatccacatggagccatgtggagaagaggcacctgcacgccgacctctgccccgtgagggcctgccatgtcctccccaaggtagcagcacagaataaacgggaggccagccacgcctactttcctctctgacttcaaaggactcgcttttgtaaaacttagctgcatattgaatattttcaactagaaaacacaaaccaaccagaagcattagttgcagtttttattccaggacattaaaatactatag

SEQ ID NO: 272893 - DNA, 568 bp, Homo Sapiens
ataaaatctttccgctgggaaaataatggcctgtcttgtgtcaggagtgccctatagctaatgggttcccgccaagactgcgcatccatggtgctcatccagatggcaaggctgccgcttcttggcccaggtcctattttttcccagcctcaagctcagggcttggctcttgtttattcattcaaaatctttattaagcacctactatgtaccaaggaacataagtgactgaagtcgcagtttctgttccctggggtttgccatcatttcagttccgtggcatccactcaggagcagccatgtgcaggccctgtttggatgctcaggggccagcaggagagggagggaaagatgcacatgtgtgctgggtgcctggtggtgcctggaacggaactgggcacatcacacatgcacctcctcccaccctcccactgtgcttttgagggagggcttgcttgttcaatgagtgtctgccttccgctgccctgtaggtgctctggggaaacaacaccgacaccggggcctgtaccttctgcaggtaaaaacagccccaggcccagagatttga

SEQ ID NO: 272894 - DNA, 106 bp, Homo Sapiens
acttcttacattattttccaagtagaataatgtgttactttcactgctgtggtattttatttaccataaaattggaactctctccagagtcaagaaattagtcatt

SEQ ID NO: 272895 - DNA, 382 bp, Homo Sapiens
aattccatcaacagaacgtgtccatccatacagtggaatatcatgactcagctttgaaaaggaaggaaattctgacacaggctccagcacggatgacacttgaagacactatgccaagtgaaattagccagccacaaaaggcaaatactgtaggattccacttagaagggatacctcgaggagtctaatccaaaaagacaggcagtggaagggtggttgctgggggatggggagaagcaggggacgtggagttgctatttaatgggtacagttcccattttgcaaaatgaataacgttctggggatggttgatggtgatggttgcacagtagtgtgaatgcacctaatgccactgaactgtgcacttaaaaatggttaagat

SEQ ID NO: 272896 - DNA, 469 bp, Homo Sapiens
gacaccagttggcgctccgaggcaacctttcagttcactgtggagcgcttcagcagactgagtgagtcggtccttagccctccgtgttttgtgcgaaatctgccatggaagattatggtgatgccacgcttttatccagacagaccacaccaaaaaagcgtaggattctttctccagtgcaatgctgaatctgattccacgtaagacagtttaaatgatgcaactacaaacccccacatcgttgtatttcattactggaagccaaatttgatcagcctagtgcaattttatcttaagttatttgctgcctctacatagccttttgattttaaattagattaaatacgtgtttctctttaaaacccactggtatatgtataatatccaagctagaaaagtatatttttatcttgtaagtgaaaaaactaaaaatagtttgttagaatctccagcatcccccctcaaacct

SEQ ID NO: 272897 - DNA, 414 bp, Homo Sapiens
caggcagtctgctctctctcaggatcaccacgcatctcaggattggtctaaacttcaagtctcaaccaagtgtctgaagtgaactttgcattgaataaatttttgccatggaaagaacatcaaacaagccactcatctctacagagataagaaaacaagtttggcagagcaagagacagaagaccgtggagaaatcagaagggggaacagtcagtttagttaaggatggaacctgggaaaggccaccattcctgcttgatggggctctgatttgctcttgctcaagtggaataaaaccccatggtcttcttgacatgattcttgatcttttctccactgagacacacttaagtgatgatccttacaggactgacaccctaatgccaataaaagttgctcattatggactgctaa

SEQ ID NO: 272898 - DNA, 692 bp, Homo Sapiens
ctgaaggtcattaaagacaaaagatgttgctgaacaatgaatataaggcaatgccgttctttacccccttccagggtggcagagatgagcaccagccatctcacccaccgtcatgggccacagctctccagtagatggcaaagctgttccctgtgacatggggagggggttccctgggagggtacaggctggcagctcccatccgccccagccagtgcctgccatgtgcctgccccactcagtcctctcctggcacctgctctctctagctccttgctttgtgagaatgtgcataacaatggcactggctgtttctgtggtgtttggagaagagaggactcagggcttaaggaagcactttagcaagaatccagaaaacccaaggcccccacttgagcaaggctcccaaacttccagtgagaagagaagaggcatcgccctggccccaggctcccagacctgcctatttcacctgtaagtggagcccccgaagactctaatcctaagcacagtctccaccatcagtggcagggtgcagacccccttacacacagcattagttgtttgggtgttcacagtaatgagtgaagtcctataaatagaatatcaccgatgaaatcaaggggaggtgcggtccctatgctgcaggtgggatgggcgtgctgttgacttgctttcccgccatcagcgct

SEQ ID NO: 272899 - DNA, 434 bp, Homo Sapiens
aaggaccatatagtcaatattctatcctttgtggggcatgtgatctctgtcacaaatattgagctcttctgttgtgacaggaaaatagccatggacagtaaatgaacaaatggatgtggctgtgttcaaacaaaactttatatacgaaaatagatggcaggccagatgtgaccccttttttgccagcccctgttctaggatagctgagtaacctgaacataactggagatttatggtcacggtatttgccttatgtaggttttttgctcaaatgtttaatagtatacacaccagtgagtaataaacttatgtagttcttagcatttgaaatgctttaaacatcctggtaaactgtgctttaatactgctttttacagatgatagacttgggtcattcattaaattgaattaaattagaatactaaccaaccctt

SEQ ID NO: 272900 - DNA, 212 bp, Homo Sapiens
ctgcaaatgtaccacaaacattttgtttttaaccatgtccatgtaactttatttgccaatcatttgacatgtgccacaccctctttttgaatttggatgtgctgacttgtgtgtcatgtcatccttttggtataaatcatatccaaaatgcattatccaggatttttagttttaggtttattaaaatttaatgagaacttaacgatacttgc

SEQ ID NO: 272901 - DNA, 444 bp, Homo Sapiens
ctggctttgaattcttttggaacttctttgagccagaaaatatcgactcctagcaggcccagcacaggcgctgttgtacatgctctctgggtctgtactgatcaatgacaattttggtaaacactgcctgaataattcatcatagaaaaaagctttcgaattaaatgatattactggggcttccagcacaaacacacacgtgttcccgaaaagctagtccagctggaagactgcttggaataaccacgatgatacccaagctaagccccccattttataaattgtaatgagtcatctacctaccctaccctcagtcataggaaaatgctgttggagcctcagccaggtgttccagcagcatgcacctggcacatcttgctatggcttctcatggtaaaatgctaccatggttaacccaacgcggcagcatgcagcgatctaaaa

SEQ ID NO: 272902 - DNA, 488 bp, Homo Sapiens
tgagaaacgtaacatctgatggctctcaaaatgtcacacgattatccaagccttgtgaatggccaacaaggaaaagaatggcacaggcagtaaatattaatagaagaggttaaaaatgacagaagcatcaaagccatggctggagcatcagcacattcgtcagtgtaatgtgtaaccaggcgcttgttgtgaacaaacaacacattacatgtgaacagcaatgatacggtagtggaaaaacagacatatacaggtgcctctttgggaaaagagtgtaagaccccaaataagcaggatgggtgtcccctgttcaaaggggtcccatccttttcagcgtgattcacagaacagattcaaaggcgcccaggatttgggaatcccccccgagcaaacccaggcttaccgtacaaaccctcggtggcctttgaaggtcgtttcaacttgctgggtgatgccaagtgtttcccacatccttcctggggacacct

SEQ ID NO: 272903 - DNA, 474 bp, Homo Sapiens
  misc_feature (11)..(11): n is a, c, g, or t
gtgggtcctgnaactaatcctctggataccaagggacgactgtgtttaaaccatcgtttgggtttggagagattaatgacaacagtggctaagcatgggaagggtttctatggtgggactgcattggaccacctctgaatgtgtgtattagcagtttagtaaataaaacaaatctaaattattatttgattggggttagtgggatgcaaataataagatttattcagagtatcctaaaaattcccccagttttatttagttttgtggaattatgtcctctttctaattttgcaacatttccttgcatgttaaaacattcttccctgaacccacaatgagtcttttacaacacatctctgatacaagaaaaaagatatttcaatgaaaaacagagcttgcttttgtacataagctaaaaacaaacaaaacaaacccagaagcatagctgtctgctcattcccttctacccaagag

SEQ ID NO: 272904 - DNA, 489 bp, Homo Sapiens
  misc_feature (410)..(440): n is a, c, g, or t
cactactcgtgataatcaagaggtagaaacaacctatgtgtgcatctatggattaatggataagcaaaatacagtatctacatagaatgaaatattactaagccttaaaaaaggaaattctgacacatgctataacatggatgaatcttgaggacattatgctgagtgaaataagccagttataataaaaagacccatacaatatggttccccttacatgaggtatctaaagtagtcaaattcataaaagcagaaaatagaattgttgtttaatgggtatagagttgcagtttgcaagatgaaaagttctggagattggttgcacaataatgtgaatgtacttaacactactgaactgtacactcagtggttaagatggtaaattttggccaggctcagtggctcattcnnnnnnnnnnnnnnnnnnnnnnnnnnnnnnncagaggattgcttgagcccagttgttcaaaaccagcctgggcaacatag

SEQ ID NO: 272905 - DNA, 365 bp, Homo Sapiens
ctagcaccatagcttcaataccctggtatcagcctctggcacagacccctcagtgctaccctagggactcaggccctttccactccgcagcaccaaaccctcgggcagcccctcccttcctgcaggacatccaactttgactttatatccatctgaaatctcagctctggtacctcttgatgccgcccagagtttgtagccagaaacccagaaggcaagagctaacacacttcttcaaaccaagagcataactttggctttcaatgaagtcctagagaaataaactgtcagtcttctctggacaaagatcgaggctgcaccctaacagcctcttcctgtaggagacagctcaaagaaacaaaaaa

SEQ ID NO: 272906 - DNA, 521 bp, Homo Sapiens
ggttgaataacagtaaatgaagaaacattataacagtaagccccatggtgagggttccttttcattcaaggatcttcaacaacagaaacacctgagactaaaattcaaaatgctaagtacacaaattaatgaccatttatttccaaaggcgactgcagataccatttcggtacaatcaaaaggttttacaagacagagaaaacacattacaaaatgccccaagaggtgagcaaactggtgggggcacagagcacgcaagaaccagcctgacaaaaatcctaagcctgctgctgtttagggagagtacaaagactggttctaagggaagccactgtgtgggggttcaggggagacagtgacgggtctgcccagtgcatagcaatcccagctgggaactgaggaaggacaggggtaggggaagaggggcagaggcatttgctaagctcctgacagaaaccattacagatcagcctatcacattctcttcactacaataacaccaatataaatgaaagattctt

SEQ ID NO: 272907 - DNA, 122 bp, Homo Sapiens
tactccttttacatttatagtcataattgctaaaagtttagaaacaaccaagatgttcttcaagtaggtaaatggatgaagaaactgtggtgccttgaaacaatgcaatgttattaccacta

SEQ ID NO: 272908 - DNA, 546 bp, Homo Sapiens
ccagtatggtgccaggacaggtgtcccttcagtcctctggttatgacctcaagtcctacttgggccctgcagcccagcctgtgttgtaacctctgcgtcctcaagaccacacctggaagattcttcttccctttgaaggagaatcatcattgttgctttatcacttctaagacattttgtacggcacggacaagttaaacagaatgtgcttccctccctggggtctcacacgctcccacgagaatgccacaggggccgtgcactgggcaggcttctctgtagaaccccaggggcttcggcccagaccacagcgtcttgccctgagcctagagcagggagtcccgaacttctgcattcacagaccacctccacaattgttataaccaaaggcctcctgttctgttatttcacttaaatcaacatgctattttgttttcactcacttctgactttagcctcgtgctgagccgtgtatccatgcagtcatgttcacgtgctagttacgtttttcttcttacacatgaaaataaatgcataagtgttaaa

SEQ ID NO: 272909 - DNA, 312 bp, Homo Sapiens
aattgcaaactcaccccttgttgaacaccactgatagacactaatccctaatatcaactaaccaatgaaatgctgtacctcttgttgtatgagaagaagaaacagacatcttctcaagtctatgagaatggcttttaactaatcaacaccttgattaaccagtagaaggcatatttagtgatgattcgcttatgactgcctgtacctcaccgggacaaaattgtggtttgttaaagagtctttagccacaaacagaataacaaccactggcttatattgcaaaaaggatatgggaaattctatagaaactgg

SEQ ID NO: 272910 - DNA, 335 bp, Homo Sapiens
tcttttatttaggaagtaatgtgaagtcagtttcatgaatagatcttactttaagcattcattgaggtttttggcaagaatagagtacggtatatgaaggtgtttcctaatctccctgacaccaggaataatctagggctcattagagatgtcaaagatctgttctagtttcttaacctaaaacaagagtgttttagttccattttataggcggggagtctgagccaaacatgttatgtcactttccaagtctccatagcacagaagtcttctgtctccccatcctgactttcccagctcatagggactgtcaaaggcagcagctctggccggct

SEQ ID NO: 272911 - DNA, 495 bp, Homo Sapiens
agtgggacagaaatactgatgtaaaagtagtgtgatttaaatggaatgagttgagaatctgaattcaccagttttaagttgcctgactgccgccacgtggggcatattgcttaaaacttctcttgagggtgattatatctaacccaggggacatttgggaatgtctagagacactgttgtttgtcagtattggggctgtgtgtttatgtgtgctactggcatgttgtaggtagaggcgggggatgctaatatctgcttgatgtcgtcacaatatacaggacagtattccgtccccttcttcctccctggtgggcccaattatttgtcccaaagtcagcagtgctgaggttgagaaaccctgggataatgcattctgaagtgctatacaagtgttagctaaggtgacattattagttgtagtcaaaactttatatggactataaaagtaaatttatggaatttatattcaacccacttaatgccggaataaaaaaa

SEQ ID NO: 272912 - DNA, 998 bp, Homo Sapiens
ctggtccatgctactgagactgacaggaaaggtagggtgtcagtgagctcactagattggggctggtcctgccccgggtgccactcggcctcccaccgctatcctgtcccctcctggcagccacagccctgagcaggtctgatcagcagtcctggtgcgcctgagtcagagcagggagagcccaccttggaagacaagtagatcatgttcaactccaggcgtgcgtggcatctgtcctccgctggtacaaggtagtgaccccagggcctccagggtccttgaggggctcagcgcatactaagcgcaccacagacagcgccttgagtgatggcatgtcacccagtagtactaaacttaagataacatgcaggtaccttttgattcctttcctgactgctgagtcactctattgttgcagaccattagaccggacttcactcacatactccacaaggaaattcttgaaggtttgttctgtccaggaaccttcaattctgtagcagtggcctcagtttcacagcacacagctgccccaccctaccacgcattcagtgtgctgattgagagggctggaaaagcagggaccgtcccctaatccctaaaacgtcttgttgggtggactctgctagcaaaagagttgtcattcccagtcatgctctggaaaggaggtgctagtgacctgatggggcatggccacagcacccttcactgcctgccctcaaggggccagcaccacctggccggccagtctctccacacgctgctactctttttacgtttaaaaaaatgatttaaaagatgatgtcagagcaatggtgaagtaaattgtggagggaatgaaaacacccccaccttgaaatcctagcccaacccgtttcatttctgtaaaggactctgtccctgtgtttcctcagcacgtttcccaaaacatgtgacccagagtgactcggggaatttctgaattatggaagtagtactaaaaaatatttccattgcag

SEQ ID NO: 272913 - DNA, 903 bp, Homo Sapiens
  misc_feature (315)..(315): n is a, c, g, or t
atgattgggaaccaccactccagtgttagaaaatgtcaaatgacagaaggtgggctatattaagtgggaatttccaaaccccaccccctggaaggaaggaatgcttggtgacaagccttagaggagagagatgcttgtctagcccattgcctgtgtgcccaggaagagatgtgcataccttgagatatagagaagactctagtggggagaagccccaggccagcttgtcagcacagggcatcggaggcccccaaccagctccaagttctgaacagcacacagccttcaaaggcttgtactgctgctcatacccangcagatggccttgcaccaggcctccccatgcaaatcagtgtccccgcagcgtaggtaaaggagctctagctgtgctcccttatggggtgaacagatataccgtgggacactgagagactggaagattgcccaacatttatttactgatctgtgttcaccacagaacctaaggtatttattggtattgtttcaaccagtacgagtgattctttcatttagtggtcatctctgcactccaccacagacttttgggaattacaagatgaaaagggccacatcctcaccctggcatagctcagaaaatttggttggggaagtagggacatagacgtgatcactacaccataatttactaagctgtgagaactggaggtgcatcagtgaccagagtgcatttgagccagaggtagaaggtactggagacaaaaggaacaacatgcgctctaggctgtatcattaggtacaattttctgtccttgggggagtctttttaaccctaagacaaaaattatgaatatagaaagaggccacggttcatctttgcaattctttcaggagaaaatttgctgcaactcactttctaagttt

SEQ ID NO: 272914 - DNA, 584 bp, Homo Sapiens
  misc_feature (365)..(375): n is a, c, g, or t
aagatacctcaggggtgtcattgggttccagctgctctcctccacattgaatgatatcttgttaatttataggcacatttgtggtaatttatatgtctatagagtaagtataagagataattcattagtaataggaattaactgaccccttttggatgggggagagcatcaggctggggtcaggtaagtgtaaatggccttctgagcatgctcttctaggctgactcccagccctgacttgaaaccattagcgctaacttgctctgttttgagaaaaactttccaaacttttgcatgagaaactagaaaaaggaatgtatgccacgtaactggattacagaaatgagttaattgtctctgtgatnnnnnnnnnnntgaaatattttcttattgaattaatatttttgtcttgaagcattttctagtgatagaatgtatttgtcttttttcctggtggtaccctcttagcatatatctttgctatccttaagatcctaaacaaatcatctttgtcagttaagtatagttgcgcaaaaattgttaaatcctttgtctttaccaaagaaaaatttgagtaaaaaaaa

SEQ ID NO: 272915 - DNA, 532 bp, Homo Sapiens
tttttttctccctacaaaggtgtcctttatttatccttctaagtaaaggtgtgtggtactcctcactacctttaccttcatttttgtctgtataatttgacaataaaaaattaagtttccaaaaagccctgtcagggtcctggtttggtagctctctcctcagctgctgattgctccaaaaattaagtttccaaaaagccctgtcagagtcctggttttgtcgctctctcctcagctgctgattgctctgtgatacctagaaattccctgctcatcaattcataaaatatactactcagaatcaccagctgcactttccatttcagaccttgagtaggtcttgtgtaatttttcactttttgtgcatggttagtctttatttgaggatagcttggttggaggcatggctgagaagccaggtgacagaaaatcataaaaccaaggccctagacaggtgtgcatgagtggatcctgtgctgggcatatgagggtctggtatggctcttctgaaaagttgcagataataatacaa

SEQ ID NO: 272916 - DNA, 274 bp, Homo Sapiens
agcctcaattttattttctgttctttgatttccaagaaatctgttcagatgatagtctttttaccccacctcctcatttggttcagtgtgtgttgatgagcagggcttcagacccacatccatcactgatagcaccacatgcagaggactctgaccctactgcagtcattatgaaaaccttccaaaccaaaataagaagggtagccaacaccaccaccacctagccccaggagtcctaactttagaaaaggcagagtgagctgtgcgcagcatg

SEQ ID NO: 272917 - DNA, 462 bp, Homo Sapiens
tctcctgttggcctccatcccttcctcaaccgtccgcagaacacctccttccagcaccttagctcctgcctccctctggacctattcagtcctcaagggtgccctgctaaaggctgggctgaaagctaagaggagaggtggcattcaatgtgtcctgtgtcctccctggggttgattaaggggtcgatgcccaatagagtccttcatcttggcgttcagcccagggtccagctgccaagggaaggcttggcaatcaagggtgatggagataagaatgaaaaggggcaccaccctgtgccaaagctggcatgttgtatatctgagagaggagctgcctattcacagtgtagggttgtcaagctggaggcagggagagaaaagcaagagctttttggttcctcttgaggatagaatctataggaaaatgtaagagggttaaaaataaatttcccatgcatccaa

SEQ ID NO: 272918 - DNA, 426 bp, Homo Sapiens
cctacagctaaccctcacaagcatgaagtgctgtggctgttccttatcctaatgatgcgcttttgtcccgtaaatgttaacactcatgaagcataccccggcctctcagttcttgagggcctccccaccgcagcagcaaggaaagctcacgaaccccaaacctggcaagtcacctgcagcccatggtgagctctgggaagtgtggttgaggccttggggtcactccttttttgcatgtgcaaatgtgctggtcacccttcaacgctcccagacggtcaggaaaactgttccaatcatgaaaaggggggatgattttgtaaaagtggcatttcctggtcagtggtggtcttcaagacgacagctctgtatctgccatgtgaagagaattaacaataaaagtgtgaagagcgattgtgaggaacaaaa

SEQ ID NO: 272919 - DNA, 409 bp, Homo Sapiens
ctgctgacattttcagaggcccgtgcccttcggtcttcaggtgaggctgggcttgagggaggctttgtggaacggtgagaagaacagcgtgactaaggcacagaaggctgagtgatgccctgcagtgcttttgtagggttggaggccagctgggaaagaaggaacccttgcgttagagaatgggaacatgccttaggatatagaaatggcaaatctgagatagtttgaagtgagaatactagaagtgttcccaccaaacaaggtgtgtcttggtgcctgctgtatcccaggctccgtgaggtgccggagtcagcactgaacaaacagagcttcctatgcttgcggaaatgcatttcgttgggggaagggatttttctgctgactctggctattaatagtaacaatcaaa

SEQ ID NO: 272920 - DNA, 431 bp, Homo Sapiens
ggctttttcttctctgttctctggaggcttccctgacctccccgcgttttccatggcgggcttgggtttgggaaaagggaagtaaaaaatcaggctgccccaagtgagatgctggcaactcttgggcctttagatttccaaaacctcattttgagcccttctgcagggtattaccaattaggcgccccctggggccgcgatgacatcttccctgaggatctgaggcaaatgtggtttactcccttgctcgaataaccctggcatatcctttgccaggtatcactggaaggatccccccgcaaaagagagggaaaagccgttaggtgtttgttgtgttctcctggataagggatggaattgggccaaattttcaagttaatttgtgtttaatccaccaacaactcaatccctcccccattaaaaaacaaaca

SEQ ID NO: 272921 - DNA, 463 bp, Homo Sapiens
aacggaagggaaataatcctttaatgtttcatttaccttatgaaaagtgttaaaacattgccaactcaaaataacattatttaatgcatgtgcaaagttaggtcttcccagttgtctcagtgctgaggaacctcatcagagaagcatggaagatgccaaaggatttttggaaggtaaagaaggctgaatagtgaccacatgggcctgttttcagggtcccagcttagttaagtcacccatgcacctggtcattgtgtctcccatgcacatccagcgtttctcagaagcagacccacccttaagttgacaggattgatggaacatgctctcctgctcaaggcacaacctctgggctggagtagaggactctggtgggaaggttttgctgctaatgtatttatggaatgaatgtatttcattcaaatctgtattcctctaggaaggattaaaacccccctttttt

SEQ ID NO: 272922 - DNA, 444 bp, Homo Sapiens
  misc_feature (173)..(199): n is a, c, g, or t
tgagacagggtcttgctcccttgcctgggctggaatgcagtagtgtaatcatggctcactagtcttgaccttctgggtttaggtgatcctcccatctcagcctcctgaatagctgggactacaggtaagtgccaccaacctggctaattttttgtagagacagagttgggagnnnnnnnnnnnnnnnnnnnnnnnnnnnataagtaggaatgatatttctttaatagatacagcactattcagcttatcaatttttaagtgagttttggcggtttgtgtctcttaaggaattggctcctttcatttaagtttaatttatggggtaatttcctcagtcttttgtcctttcatggaaaggagtcaagatactaaatcctgttaccaaaagcagcagtagagatgtaagtatattatctataatcatatagatatgacaagagaaaa

SEQ ID NO: 272923 - DNA, 574 bp, Homo Sapiens
atttataaacaatgagagaatgagagtctaactggttttctttgagatggactgtttcagcccatggatattaacatttattttagacaggtgttatgcactggtgttgatcttttctgtggtgctattatttaagatagcttgaagcattattgtgaatgtgttgttatatgtattcatttagttgatgctgttgtttgtagtaacataaaacatcaataaggatagtagccaaattgtgccagttagccttcattttctggcattataatgaaactatttaaacgtttgtgattctgtagtatgttaacaaaacatactccgttaataaatttaaaactacattttatagttccatttatcttgcttcgtattacagtttatacatatactaccataaattttctatgatttggttatgaaaaacacagtttatattccaaattttaatatcattttcatatatattcatattctcgtaaacttttaacctgatgaaatatatgcatatttttcctaaagttttaacataaagccacatttttttatattaaatttaagaaaaattttaagc

SEQ ID NO: 272924 - DNA, 513 bp, Homo Sapiens
  misc_feature (17)..(17): n is a, c, g, or t
atctggataaccgcggntcaagagaggttcagatccatcactcgcgcctactacaggaactcagtaggtggtcttctcttatttgacattaccaaccgcaggtccttccagaatgtccatgagtggttagaagagaccaaagtacacgttcagccctaccaaattgtatttgttctggtgggtcacaagtgtgacctggatacacagaggcaagtgactcgccacgaggccgagaaactggctgctgcatacggcatgaagtacattgaaacgtcagcccgagatgccattaatgtggagaaagccttcacagacctgacaagagacatatatgagctggttaaaaggggggagattacaatccaggagggctgggaaggggtgaagagtggatttgtaccaaatgtggttcactcttcagaagaggttgtcaaatcagagaggagatgtttgtgctagtcagttcttttatttccaaaacatgctctcctacttgaactgaaaagtaaaaac

SEQ ID NO: 272925 - DNA, 478 bp, Homo Sapiens
gtgatgatataaaggttaaataaagaaatgaataggctgatctaaccacttccttccttcctgtatcaatacaggcatgccacctagcagcgaaccccaagaatgggcccaagaaaaaggaagaacaaaagtggcacaagctaagccatgaaacataggagacaaaagcaaatttaggttttcctggacacttttagacctcctgcattttgtccatcaaggcattatcatcattgagctgcatgtggtgtgaagctggggctgagaggagggcttctccatattacactaactcggccatctaaatgagggtcaagaggggcctgaggcctgagggtcaagagagcccctggaaaacacaagtattctccgctagaccatcatgctacccgtgagacctgattcctcaggctcaagagcccctcttctgaaaatcactgacctgcagttgctcaactccaaccttcagtattcagaa

SEQ ID NO: 272926 - DNA, 672 bp, Homo Sapiens
ctctttctaattaaagcagttagaattaaagctctctgtcattcagcatttggcaacacaataaagacattctctaaattgcaacatttaaacatttattgttttcagccaattcttcaggtaatgatcaaacttcaaggacacaaatcatattctataatttaaaaagtgcaattccaaatattagttgctgaagcttaaaaactgagtcttactaaaactcagtgagaccgcatacgcaaacatgaggtctcacccagttccaacagaacttaaggtaagatgctaggagcttaaagagcagtgctttcatttgaagcttggacagagtatactgtgtccaaaaacaaatcaccaataaaaggattttaaacatggtaaaaagcaaatgttggagaggtaatcaaagtcatatgacaattagcaaatctagctttcctaatttaatataaaccagaacaaaaagtgaaccctctgctgcctccattgccctttccggctcctcaaacaagctatcttagagaaaagcccacaacttccttggctctgtttactccacactgcttcgctacaacctggcttgcctccccacaatctgaatctgcttgtccccatttacaggtgactgaaattgctcccgtggacaccctccgcccttttcttgtttgacct

SEQ ID NO: 272927 - DNA, 232 bp, Homo Sapiens
ttgatttgcatgcctctgattactaattagggtgaaatttttccataacttgtgtttaatatttgcatttccttatgatggtgtctgtttggcctaatcttctgagatccaatagccaattttattaatctagctttttcttatacttgccccttgtctacatcatatgctgcatctattttctcctttttgctcctctgttttggttatgtgagtttaaaactttttaaaa

SEQ ID NO: 272928 - DNA, 471 bp, Homo Sapiens
cattacttgatagttggttgtcctgggcagggaaaggttgcaacccaggttgttagggcctttgctatgtctcttccccaggctgttaggggaagtactgcagtgggccagttgctggaataaagtgaccgcacaggactatacctaaagccagatggttttagtaacagtgaattgaattaaatcaattggaaaagattggtagctgctgtccttatcctgcaggtctgctttaaagaagagtctggcagggagccagggacctgttcctaggaaaggcaggcaagatgctgctggagaggaacaatatgcgttcctctctgagaccatttcctttgaaacatgttctggggcaggagcttgattggctgccaaggcacatgtgagttgggaagcaccatgtcagacatgcaaaccagggaccacctgggccgtgtttattatacgtgttctgactggcccttgttgttt

SEQ ID NO: 272929 - DNA, 433 bp, Homo Sapiens
caggtgaggttctcagccgatgtgttagaggttgagcatcgcctgtgcccagcttgctggctgtcagtgcttgatgtgcccatcctcagctaaaacccagagctggcatgttggtcatccccacctcagacgggacgcccagtccagagctggtgagccctgggccagcctttgggcctggcctgccccattcaccggccagcgccccacctccctggctggagggtcggggaggggctggcagagatggttggtccacagggctagccctgggtggtgggagaggggcccagggtcagggtgagagagagctgggccagggagctgctgcaggatgattttgaggtgtgggggaagcactcttggttggttttggtttgctttttaaaaattgtggtaaaatacataacaaaagtaaccatcgtaacctgaa

SEQ ID NO: 272930 - DNA, 428 bp, Homo Sapiens
aatatatgtatagtacatttgccccaagattcctaccttactgctgacacattactcatccaagatggcaaaaagaaataacattttaccagagctatcacttgttcatccaacttccttatcactaaatggagttagggattaattcttgtgcttaaggttggtcagcaggataaaacctgttcttaccccccaaaaaacgtaaatgctgtcctgatgaaacagtctaggcaccggccgggcgcggtggctcacgcatagcccttttaaaggacttcaaaaagaccaattctaagttcatatctgttgaattttttacatctaaaaacactaaaaaatcatgacagctttgtttaaacaagtagtcatatttatagattgcttataaatataaaagcctatatatactactgtcataacagtggctg

SEQ ID NO: 272931 - DNA, 385 bp, Homo Sapiens
agaactgttgggaggcataaatgaccctcagcacagggtggtgtgtatggaatgtgcatcataagtggcagctattttgataattactaaacatgatgaatgatgataagcgaaataataacacagcttttcaacattttcactcaataagttaaatttataataggcaagcaaaggagtttccagaattaagcatctgatgggagcttagacaggttgacttttacagctcattctaaccctgagtgagggtctgtgattttataagcccttttagggttcgagtgctacttctaatcaagatcctggtatcatgtttttctccattacgtggaacaataatgaatagataaataaaatataactgggaaaggagaacacagaa

SEQ ID NO: 272932 - DNA, 346 bp, Homo Sapiens
  misc_feature (262)..(262): n is a, c, g, or t
  misc_feature (299)..(299): n is a, c, g, or t
  misc_feature (335)..(335): n is a, c, g, or t
aaaaattctgttcctgaagactcataagccatatttcaagtgcttggtagccacgtgtggccaatgggtaccatgtagatggtaaagagtatgaacatttccaccatagcagaaagttctactggacaacactctagaaaaagaataagcaaatatttgaacagcacaaaagaaatactgaacgaacacattataaattttagggagaaagacggaactgttttcagtttgaaatggcactggataaaaatgaaaattcctngccaattacaaggctggaagactccaaacaaatttanctttcccttctgcttcaattattcagactgttaccntacccagattc

SEQ ID NO: 272933 - DNA, 558 bp, Homo Sapiens
tcacgtgccggcttcagcgcaggctgtttaagtgtagtcttgtgaagagagttttaacatagatgctgcatctgggggctccctcctcagctaccaacacttttctgtccctctcttaggctgtgattggtgtggtgccgtcagagggtctctttggaatgtaactataccacttatgctggggtggtggggagtgaaaatatttttaagaccacaagctgagatgggggcaccctcatgttttatgtcagttaagccattgccaaacaactggagatcctaaagagctggcatctgtctttgaaagtcacccaacctattatggggacagtcctctcactaaaatcctgaggccaatggggtcccattcattcattttctcctgccccacctccatctccatgtcgtgtaagtgagaacattatcatcagttcaggagttattgaccgtcagcatacaggacttcagctttcagcaaattcttggctacctcttcctgttttcaagctgacatatatacaaagaatataaatgaatattgaggctaacttaattcag

SEQ ID NO: 272934 - DNA, 607 bp, Homo Sapiens
  misc_feature (410)..(529): n is a, c, g, or t
aattcggcacgcgggaatgtggcgtaatcaaatctggctccttccacttctgagttggtgcaagaaacacttggcagctattaaagtgctattctttgcagttatttggtataatttgccacagaagtaaattccaggagccgggaagatttccagaggattccagaacttgccatcaacccactgggggaccggatcatcaatgccttctttccagagggagaggaccaggtaaacttccgtggattcatgcgaactttggctcatttccgccccattgaggataatgaaaagagcaaagatgtgaatggacccgaaccactcaacagccgaagcaacaaactgcactttgcttttcgactatatgatttggataaagatgaaaagatctcccgtgatgagctgttacnnnnnnnnnnnnnnnnnnnnnnnnnnnnnnnnnnnnnnnnnnnnnnnnnnnnnnnnnnnnnnnnnnnnnnnnnnnnnnnnnnnnnnnnnnnnnnnnnnnnnnnnnnnnnnnnnnnnnnnnccaactgtccattttaaatatgtacagcttattgtatattatttatacttcaataaagatagttactcttctccccaa

SEQ ID NO: 272935 - DNA, 236 bp, Homo Sapiens
aaagtaatttcccccacagtaaaatacactgactcctgagtaaattgattttccagttttatggaattgggagtctgacaagtgaaaccaatttaatgtaaagtatttggctttcaaatggtttctctgtgctattttttggaattctttcagattccagagatatcttacgtctttgattcaatttaaaatttgtacttattttcttttagaaataatgtattgtgtctgtgcag

SEQ ID NO: 272936 - DNA, 400 bp, Homo Sapiens
  misc_feature (94)..(94): n is a, c, g, or t
gagagcactcacaccacgcgcacactcatgaaaccatcccgaacgtcacggcggcgagcactcaccccacgcgcacactcatgaaaccaccccngaacgtcacggcagcgagcactcaccccacgcacacactcatgaaaccaccccaaacgtcacggcagcgagcactcaccccacgcacacactcatgaaaccaccccgaacgtcacggcagcgagcactcaccccacgcacacactcatgaaaccaccccgaacgtcacggcggcgagcactcaccccacgcgcacactcatgaaaccatcccgaccgtcacggcggcgagcactcaccctcaaaggtttatagtcttttattcaaagcagttggaacaacttaaaatgtgacagccttggataggg

SEQ ID NO: 272937 - DNA, 1051 bp, Homo Sapiens
actaagtgactcactcaaggtgtagcaggtagaaagtagtggaattaggatatgagttcagactccagaccctgttattagcccctgtctttggctatgcattagtaaaggagagcacagccaagggtgggacaggcagctgtagtcctctggaccagcttcacatggatggggctgcattgttacaggtggcctaactcagacatggaaactgagtcgctgctgcttaactcatgccatgaaaccattttggcctgcacagcttataacagcactctagctctagctatgacactttatggtgttagtgggtttttttggtggttggtatggaggaggggctgggctacaagttttagattatgtttcttattgcaggtttttaaaaattcttgaattaggcctatttgctcttttgttctctattgagttagcaaattcagtttttccaagatgccctgaaagtatgatcatacatgtatacgaaatggtccttgggtccagctggcaactcctgtgcacccccgacctggattctgccttccttgaagtgagccttggaagaaacaagtgctcatgctccctgacattattagcctgccacgatgaagcctcagtcccaaacaccccagcttcctgtctaactcaagagctaatcctgtgtttaaatcttaagagtgtttagatcttaggccatgccatgaattcccctggttgactgcatttgtgaaaatgagcttcccattattggctcttaagtaatggagatgagggggagtcctgctacacagataagtgcatcataaagttacataattaaaataactgagctctggcctatcaacaggcccatcagcagtccagaatagagtctagaaatggacacaaattaaatgagagtttgaaatatgataaaggtagcagttgaaattagtagagagatgatgatgtactcaaataaatagtgttggacaactggacaaatatatgggaaaccaaattggatttaattactctgtcaaaatcccgataaagcaaggatttaaatgta

SEQ ID NO: 272938 - DNA, 326 bp, Homo Sapiens
cagaatctaatttggtatcttaaaatttgattaatttgtagttaactcttcccaggtcttcccttaagagcaaatacttcccaggtctaagatgaaatactttctcagggtttactcttttgaaactgtacttgatcttgctcttcggtaatatgtttgctaggacatgtacaagtatcccataagagaaaaaaagatattttcaagtagatgaaaaggcaagcacagactgggagaaaacatttgcaaaaacatctgtctaacaaagaaattgtatctagtgtgtgtaaagaactcttacaactccatagtaaggaaacaacaac

SEQ ID NO: 272939 - DNA, 299 bp, Homo Sapiens
atggctttgctgaaactttctcagcaccacactccagtggaaaacggcccccctccccaggcctttcctcctccacaggggtctgccaactctgccaacagcctccagctcccagccccattttcccttgcaggtgtttcccccagtaaatctcttgtacttttaatcctatcttggcatctgttttttggatgacccaaactaacacatagataattattctttttccttcaattccagtatctctgcctttataacatttcacattagtttcaccgaccatcatttaagggggaaaa

SEQ ID NO: 272940 - DNA, 479 bp, Homo Sapiens
agcgcatgtcctgggatcagatttaagaactatttagaaaaaatgtctgtattaacacttagctaaaatacgccactgatttgtaaagatattattattagcatttatacctttcttgtcctcagagtgatttgatgggatatgggcaatattctaaacaatattaaatcaggaaggctttagttttctaacatacaaactctcagagagctaaagactaaaaatttatttttctttgtataaccagtacctggcacaatactaggctattcatgctttgttgaactgagggctaaaactcagaaagttgatatcagagaattaggatgattggggcaagggctggcacacgccatctgcttgaggggttgtgttagtggctgtgcagaactttccattgcatcattacttttgttttttgtcaagaacgaaaggtatataataaaagttggctcaagagaagtgaaactaaaaagaaa

SEQ ID NO: 272941 - DNA, 635 bp, Homo Sapiens
gacaatgttgacataggattcaggaatcaggttgatgacattcgaagctttttggattccagacatcttgaccactacacagtatacaatctgtcacctaagtcttatcgaactgccaagtttcacagccgggtctcagaatgcagttggcccattaggcaggctcccagtctgcacaacctttttgctgtgtgtcggaatatgtataactggctactgcagaatcccaaaaatgtctgtgttgtccactgcttggtgagtaaccttttgttgttggtggtgatggtttggtttggtcaaatatggatgagcctgtacacaatggtagacaggtaacatttgagttcaataggatttactgagcccatatttaggaattgggtaatgtgagagttgtaaaaataagaaagggatttattattcttgacttaaagcttgactactagtgggaaaggcagatgtatacacaactcacatagtgtggggactctagaatgtgctaagtattataaaggaggtagaaacaggagtagtgtgtgcacagctaaaaatgccattgacttttgtgtgaataaagttaacattaacatattggcgtatttattttttcctcctgtttgtgtttgaataaaaaa

SEQ ID NO: 272942 - DNA, 462 bp, Homo Sapiens
tcatgtatctgtggtttccaaatctatattcctaaattccaactcactcctagattccacttttaaatttccagcagccttacagacatcttcacacagatatccccctgggtacctcaaagttgacatgtccttaaccatatgatcttcccaccgtattcctacatgcttaatgacaccagtattcaggctgttagccattccagaaacctcagagccccttagaatccccctatcgccttccctttaccacagtctgacctgttctatagtctccatatctctcagtggccgccccttttcggtctcctcctaggccttattcaaagccccactgatctcttgcctgggatagtaaatcgcatgataacttatctataggactgagcttctcattccatcttatccactgctttacaatagtaattccagtttagtcacaaacccttgaggatagtaatt

SEQ ID NO: 272943 - DNA, 472 bp, Homo Sapiens
  misc_feature (361)..(370): n is a, c, g, or t
ttgttttgatcatttccactgcacatttctcctcaagaaaagcgaaaggacagactgttggctttgtgtttggaggataggagggagagagggaaggggctgaggaaatctctggggtaagagtaaaggcttccagaagacatgctgctatggtcactgaggggttagctttatctgctgttgttgatgcatccgtccaagttcactgccatttattttccctcctcccgtccttgttttagctgttacacacacagtaatacctgaatatccaacggtatagatcacaagggggggatgttaaatgttaatctaaaatatagctaaaaaaagattttgacataaaagagccttgattttnnnnnnnnnngagagagagatgtaatttaaaaagtttattataaattaaattcagcaaaaaaagatttgctacaaagtatagagaagtataaaataacaagttattgtttga

SEQ ID NO: 272944 - DNA, 645 bp, Homo Sapiens
ctcaggtgggttgtagcaagactttctggactcctgtaattatagtcactacccttctctaaacatcttcctcatgcagtgtgtcttttttgataccactgcaaccctggaaggaaggtgtactggcattggccccacattacagataaggaaaccagggctcagactggtgacctcattcctcaatgtcacaaaggtagtaagaggccaggaagggttagcagttcatctggcaaatgagtggctggctaagtaagccagaggcccaaagtggccactgccctgaagccctccccttacctggagcctgaagccagaagccagtgggcctctggggccagggctgaatgggggaggctggtccctgggactttggattgggaagcatcctgcagttacttgtagggccagggctcgttgctctgaaaagccctctgttttatatctcttgacacaagtaagatatagcaggatagctagaaacaaacaaatagagaaagaaggaactagaagacatccttgtgctctggtatccacatgtgtatctttttatataatctagaaatgtatgtatttcaaaggtttttcattctggaaaagtctgaaaccgacgacccttcttttgtaaaataaaggcctttgcgt

SEQ ID NO: 272945 - DNA, 465 bp, Homo Sapiens
ttgacacgacagccaccatatccactttatttttagattatttgtatacatttagggggtacaaatgcagctgtgttacatgaatatattgtgtagcggtgaggtccgggctatttttagattatttgtatacatttagggggtacaagtgcagctgtgttacatgaacatactgggtagcggtgaggtccgggcttttagtgtgcctctaacccaaacagtgtactgtgcacgtaagtagtgtacattgtactcaacaggtaggatttcatacctcatccccctttcatctcccaccttttgaagtctccaatgtctattattccattccgtatccatataccatgtgtactcactgtttagctccctacaacccactttttacatgagtttccaccaagtacactgctgtcttcctgagacctatcatgaatgtaaaaggtgtcatgaaggcacctcaatagg

SEQ ID NO: 272946 - DNA, 354 bp, Homo Sapiens
aagaatgctagtgttgtggagaggttctctctgcctcttggctgcagcacacaggcgctgggtggtcagacctgcttccgaggctggctccacagtgactgtgcaaccgcatgtcatcctgtgaaagggcagatacgtgcctcgtcagagccttgtgggagttagtgaggggacttctctaaggcagctagtactcactcaatacttaatgcatcttaaggcacctcttcacagaaggcggtggaaggctgcttacgtgatggcatgtggatagcgatgccatccgtttgtttttttctcctccatgacagagaagcaggaaaacattcctaaatttatttatagacgttaaaa

SEQ ID NO: 272947 - DNA, 529 bp, Homo Sapiens
atttgggcccaaagctgactaggggcactcagttaaattgttacatagggcacagtagagaggccatggaatagcagtttgctgtagatttggggagttctgggtagggtggcagcccacagctccttgaggctgaggaggagacagtgcagacccagaagacgctgacgcaccgccccctcgcccgcccaattcaatgactggagttcacgtggccctaaagcctctatgcacccgggctgttgggtgcagaaagcactggtgttgaatcatgaaggtgatatgggcttctctgagcctggatcccacatttgcagggctctgggaggcttgtcacctaaatgcacatgctcagggcccttaagaaggccagggttgccctctgctggcagatcatggtttagctcaggagtgcggcttccccctcttccccaggatcagggcccttcttttccccaggaatcaaccctgcctaccggactgaggatgccaatgaggaccccattggggtcctggtgcgcttgttccc

SEQ ID NO: 272948 - DNA, 557 bp, Homo Sapiens
  misc_feature (141)..(141): n is a, c, g, or t
ggtaaagtgtcctgtgcttataactggctttcaaacagacaaacaaaaaaagctggtccaaaatggcagtggcaatggatgcggataccccaagaagtaccaacagcagtgctttgaagtaaaaaagtgaaatgcagtagnctagccctctgggcttgggatgttgtggttaataactgtgccatctgcaggaatcacagcatggatctgcattgaatgtcaagctaaccaagagtctgccacttcagaagtgtgtaccgttgcacggggagcctgtaaccgtgcttttcacttcactgtctctctcactggctcaaaacacaacagctgtgcctgttggacaacagacaataggaattcccaaagtatggacaccagaaaaagaattcttccatcaagcttaactgttttgtgattcatttaatgacttgcccttctgtcacttaattataaattagatagaactgtgtcttttctgctttgtctttgccatttgctgttctcgcagccacattgtattctgtgtcaaataaagtccagttggattctagagcgaa

SEQ ID NO: 272949 - DNA, 401 bp, Homo Sapiens
cagatgagcctcagttacaagactaatagcagagcttgagcgtctgctctctactttacctcgtagcctgttgtcatcacagtggggagagaggcttttataatttcatgggataaactggtggtaattatagatcattggtttaaaatatgaattgatgttaaaatggaatacatgatagaaaaaataaagataggctgggcacggtgtcttatgcctgtaatcccatcattttgggaggtggagatgggaggattgcttaagtctgagaagtttaaaaccagcctgggcaacatagtgagagcttatctctacaaaacaataaaaaaatttgccaggtatgttggtgtatacctgtagttcagctgctcaggaggctgaggccagaggatggtttgagt

SEQ ID NO: 272950 - DNA, 478 bp, Homo Sapiens
  misc_feature (459)..(459): n is a, c, g, or t
tttcctggctgccttccttgtcggttgactttcccagataatcttgaacattccctttcccttcacacttgccagaagcattacccactgtagagaaaacagggataacaaatccagttttccatttatgaactgggtcctcagctctgctgcatccccttgatgggaaaccatcacctgtaacaatctatatgcccttgactaatgatgtgggcacagctccgacctgtggcctccccccattcaagagaacagtctggaaagtagaagtagccgctgcatcgaagtagaggcttcagtggcctgacttttcccacttcctgctcccctgtgagctgaacgtcagtccaaggatgcggtcttgggctgcccatggtgggagacagggcagtttgggggaaggaagttccctttattgctttttctgcatggccctaaaagaatgcagatgagcatccncacctcggcaaaaaggctg

SEQ ID NO: 272951 - DNA, 1091 bp, Homo Sapiens
tgccagtttttatgttggggaagaaaaaatatgaataaacaaataagtaacctatttttggtatcaagtaaatgtgcagcctacagaagggggataattctagaaattggaaacaaagttggccctttcaagttaaaccactagaaatatacaagggctgacatttctgcagatactctaagagacggtgagttccaagggaaaaggggacctcccaaatcaaatcagggcattacaaaatctaatcaaggtgacaaggatatatccccagcataagactgtaactaaagtggaagggggcaggatcattcactcattcattcttgcatatattcatttcaccatttattattaatagcagcaatctgctttgtgtaaagtgctacacagagataaacgagaaataccttgcatttagacagcaacttaaaatttcaaaagcagttttatcatttagagtcgtggcagggaacagatggcaaacctgactctggtaatttaaggagcctttaataaagggactgtttattaaggtgtgggtagagtacagggagaccacaggggccagttactctggggcctttactacctctaggtcctaaggagccagatgagggaggtaattgctccagcagaacctggagatatgaagactgtagagaggacccacttgcagcagctgtgtccttcagtcaagggactctctcatcctagggtgacatgtaggaaggggatggggaaatacatatcaccacccactctcttccctctttctgatcccctgcaggtgctcttcattggttcaacctcacttgaagacaaagggcaagaaggcccactgatgcagcccttaatggtcaacctctagggagtagggaaaaaaggattaagagtagatctggtggcacaaatggaaatttactatttaattttattttggttcttatagagcactatgtggtaggggtgctccttttgcaaatgagaaagctgcaactgggaaatttgcttactataaagataacccagttacatagcagagccagaccttgaacttgggtcttctgaatctaagtctggtgcttatcaca

SEQ ID NO: 272952 - DNA, 534 bp, Homo Sapiens
  misc_feature (103)..(103): n is a, c, g, or t
atgactttctgggagtccagagtatatgccatactctttctgatagtctgacttatcagaaagagtccagattttgggattcagtgagttgtgtttcaaatcncaggtcttccattcatgagtatgccatcttgaataagtaaattttccaaaacctcagtttctgtgtctgtaaaacgggggtaatcataagaccacaacagaactattgaagtaaacattgaatgaattggcagttggcattatcaattttacatggataaaattgggtcatattaactgggtcaagaggctggagatgagataaattggtgaaaatctcctttcatttatatgggaagaagagttagaggactgatggaacatcttggccagaaagatggcttggaactttgaggcagcagcaaatgactggctcttcaccatctctcctgccttttgctatgacagtgtggagaaagataaatggcagaggcacttcctgtgaggcaacaagttccaggataaaccttaccccctcaggcttctgaaaaa

SEQ ID NO: 272953 - DNA, 499 bp, Homo Sapiens
gataaaagttcagaaaagatggggtatggtacaagtcctttaaatcctgagccaaatcgtccaagtctccttctgatgtctgatgaaaaagacctattagagaagaggtgatgttaaagaagacccaattctgtgtctcctcaaaacctagagttcaggaggatgaacgggggggtgaggctgagaatctgccattggtgaatgtaatgtcctttcccagttctgagctggcacaaagggttctgtctgctccccctttccccagcatcctttaccccactcccctttttgctttctgtttcctcctttccacaaccaaatcttatagcagctggttggaaaagggaggagcttgtttttgggttaaggaaagtaaagaatttggcagagaaagatggttagggataattgtcagcatagtaggccttcactctgagtaaaatctgtcatgaccttatttactaattaaaaaaataaaaccaatattttatgaaacata

SEQ ID NO: 272954 - DNA, 312 bp, Homo Sapiens
tggcaggaattgggaccatgatagcacaaacagcaccctggggtagctttgtcttcagtgactcagccctaagaaaattgactcaaaccctggaaacctttgccaccaacacaggtcaggcattaaagggaatttaagagtccttagactctttggaaaatgtagtcctcaatcacaaactagcattggattatttactagttgaacaaggtggagtctgtgcagttaataaaacctgccgcacatatattaacaactctgagcaagttgaaattaacattaaaaaacctggccgggcatggtggctcataa

SEQ ID NO: 272955 - DNA, 920 bp, Homo Sapiens
gccgaacaggaggtcacctcatttcaaagtgttgtggataattttggaagaatgaaaattctccaaatcttctccatgcacaacacagccgaacgcaagaagacattcacctgtcccagcttccccctagccctccacccctgcagaaaaggtgttaacaggaagaagtggaaacagcgatttctattgcagtcagctgacaggaataaaatcaattaagcatttgcagaggagggaacaagagaaataaatatctatttgcttcttcaaaggccaaaagaaaagataatttgaatcagaaaaataatccagattctaaatcccctttgagcgtcagcttcttaaagttactgatttaaaagatatttcctggaaatgccttcgtagttaagtagaaatgtcataagtaataatgattatagcacacatttctctactgacagtatggcccccaaaccctgcttttgagacaaaaatgatggggactgggcagctcccagctgctgttcataagctacccacaaagcaattatctgcagatggttggtgagattatttaaggaatcggctggcaaagcatggaagttcactgtccaaatggtgaaactgaggccccaaaagcgagtccttctcagagacgtggggagcagtcaatatctgaaaagaattcagactactgagccttgttaatgctaagggcattgacccaaaccctactgtgtggccaaggggctggattcaggacacccacaggggcctaagtcctaagggtgtggcctggttcaattactattgagttctgccaggaagaccaggattctttttatcaaaggcaaatagcttgccagaggcattttgatttgataagaacataccaaaatatagcattagctgtccctgacacattactccactgtttg

SEQ ID NO: 272956 - DNA, 508 bp, Homo Sapiens
ttggtccggactctccatcttcttccattggctattcctccaccaagacaaaaaagcagcagagctgaaaggatgttgctttggcttgttgacacccacttccgactctgggattaaactgagtttgcttactaagaacccctcctgaccaccaagcaatgcagttccaggatcagaggtcatcctcttccaatctttgacttccacccggagttgtagataacccttcaggaaaacatgtggtgaaagtcattttgctctgtgagccaacagaaaattggcccttgagatgacttttaacgggattttgtaagccatgagcagaaaagcacgggttccgaccaggcatggaattcagagttgtaatagaaaacatttatttggcttcagctaaacatcctaacacatgttagcatttgctgccaatatgcttcctaattaagaacaacatagaatcataggaaatcctgcatcctgtcttcatgcacttctcatgtatctttagtgc

SEQ ID NO: 272957 - DNA, 474 bp, Homo Sapiens
  misc_feature (124)..(124): n is a, c, g, or t
  misc_feature (371)..(371): n is a, c, g, or t
  misc_feature (432)..(432): n is a, c, g, or t
tctttggcctccatcagcactggagcaatggaagggtaaagaatagagtctgaaggtagggaaagggtgattcctttgagaacactacccatctgctgggaatatttagtgctatcactttccnaggcaggaaggacgaagagataaatggagaacgtctcctgatttacccttgaatgaagtacatataaagtcacccagtcttgggggcaggggaggtctgcaaagccttttcaagcactctgccgataattaagccagcccattacagcagcagtatgctctgagagagtgcttcaggagttggctgagctttagatgagcacccaagccttcattttgcccataggaaaaatataagaacatttttnttaaagacgacatttgtaagcaattcctatagcatctgccaactacagattgcagcccctnccttaggaggctgccacagaagcttcacgatgctgtcttctc

SEQ ID NO: 272958 - DNA, 417 bp, Homo Sapiens
  misc_feature (406)..(406): n is a, c, g, or t
caatcaatcaatccaacatgtggtgcccagtctgaagggaggctggttatcttcacttccatgactaaaaggcttagcaatataaggccttaggaatttgaaacatttaaagatgagtcaaaaacatccccgcctccaggtagtccctgctcccacgcaaacacaaaaggatcacagtccacctttgaatcaggagagcatctgagtgtcaaaaacaataccaggagctggcagttcccactctgccaccacttctgcatgtcctctcccactcccccaccacagtaggctccttactggttctttgtcagtgggacaggggggcaagaaatccaagttcccaccaagcaatcatgttatacctaatcagtatgcataagatgacaaatcctgatacagccgactntgacaaaaaag

SEQ ID NO: 272959 - DNA, 485 bp, Homo Sapiens
gcctccgtaatccggcccattcccacctttgcagcctcatcactcctcactgcctcgtacccgctcccctctatcttggctggctctcagtttttcaaatgcactgggcactttctctctcatgggactttctgctctttcctctgcccagaatcctccctccactccctagatcagagttgggaccttctctgaccaaagactgtgataggaccctctgctgtatgttccttgtctccttttaactttccataataaaaaattcatcacacctcagtgcaattttttatctaaagtctatgttcccaatagcatgaggatggggacaatgtctatcttcttcaactctgtatcccagtgcttagcacagagccacatatatagtggactatcaagaaatatctgtagaatgaatgaatggatgaataaatgaatgaatgtcagagctacttggagggatggcatactggccatcatagcaaagc

SEQ ID NO: 272960 - DNA, 445 bp, Homo Sapiens
ctagaaagataaagggagacccaagccaaaataaatctaaatagaagctgctaaaataaatctaaacagaagtccctctagatggggccaggaagagagtaaagtggcccctgctctttacgagagaagccaaggcaaggcaagatagagcacacacgcagagccagggcacttatgggaccctatctgagtgcactgtggttcatgctggagttagcagaatatctgcaaataatgcatttctcgttttcaagtaattttccagtttttgtctgaaattgtaaactccattgtcccaattgccatgtatgccatggtggtaccgactggtgagcagcacaagcactcttcgttatcctgagtgctgcttcacatcccttcacgatcacgaggctgtggagataattcctaactcagctgttttaaatgtaaggacacgcctcac

SEQ ID NO: 272961 - DNA, 584 bp, Homo Sapiens
  misc_feature (222)..(222): n is a, c, g, or t
ctggtcttgtggtacgacaaggacatcagtcataacaaccattcatggtgccttcttcaaagcgagtgaggtacttcttcgatccgtgagagcagccaacaaacgaaaaaatcaaaaccgcaataaatccagctctcatcaggactcctccagaatgtccagtgttggagattataacacaagtgagcaaaaacaagcctgtaagaagcacgaactctatgntgagcttccgggatctgggatggcaggactggattatagcaccagaaggatacgctgcattttattgtgatggagaatgttcttttccacttaacgcccatatgaatgccaccaaccacgctatagttcagactctggttcatctgatgtttcctgaccacgtaccaaagccttgttgtgctccaaccaaattaaatgccatctctgttctgtactttgatgacagctccaatgtcattttgaaaaaatatagaaatatggtagtacgctcatgtggctgccactaatattaaataatattgataataacaaaaagatctgtattaaggtttatggctgcaataaaaagcatactttcagac

SEQ ID NO: 272962 - DNA, 367 bp, Homo Sapiens
ggttgccccttgtttctgggtaatctctgggatgtgactgaccgcgacattgaccgctacacggaagctctgctgcaaggctggcttggatgcacgccagggccccccttctctactatgtaaaccaggcccgccaagctccccgactcaagtatcttattggggctgcacctaatacctatggcttgcctgtctctctgcggtaaccccatggagctgtcttattgatgctagaagcctcataactgttctacctccaaggttagatttaatccttaggataactcttttaaagtgattttccccagtgttttatatgaaacatttccttttgatttaacctcagtataataaagatacatcattt

SEQ ID NO: 272963 - DNA, 916 bp, Homo Sapiens
  misc_feature (376)..(429): n is a, c, g, or t
tcgtggcgccacaagctcattcactgtgtaggtcccgtttccctctgtgcggcggccggcgggaccataagggcttaactcatatatttaacccccctccaaaaaagcatgttactctgaggtttctgaagcaccagcaaatggattaagtaaaggtctggtgattttcgacagacaaattggtaaaagttggaggtggccagcaggcagaaaaagaagacctttagattggcataagcaaggggttcactttgtccagcaagactgtcatcctttctctgtacctcggaagagaagaacttcctttgccagtgtttggatatcccccctccccagtcaatcctttctgcacctgggggtgcagtgtctctaggannnnnnnnnnnnnnnnnnnnnnnnnnnnnnnnnnnnnnnnnnnnnnnnnnnnnnctaagattcttgaataccatttccagatattctgattgattaggtctgggttgaggtataagaatttacatttctgtggaacaagctgcccgatgctgatattgcaggtcagtggaccacacttttgagtaaggtctagggtcttagcctttatgcgagagtctcagtttcatttcttaaggcccttctgcccctgcatatgtattaaaacccaagttggttttaatacatgggtaacacagcatgttacccatattaatcagtgcactctcagctctgtcctccagattcttcatttctggtacgtgaggcatttcctacctaccttttcagcttagcttgatgtgtgtgtttgttggggaggggagtgggtatacgtgtgcacttatcacatattttatccattatatatagtaataagacttttaagttgtcttcacatacttctctgaatagtttggtcccaccaataaacctatcactgttc

SEQ ID NO: 272964 - DNA, 517 bp, Homo Sapiens
aaaattgcatttacaataccagctatcaatattgaaaggtcagcttgccgatttcattggaacgtgcttcctcaaggaatgctaaacagtgctgccatgtgtcagtatcatgtaaatcaagctttgttccccagtagaaaagaatttcctcattgcaaggttattcattttatggatgatattctaccaccacccccaggggagccagtgcttttaagtttatatacctctgtcataaagaatgcacagctaagtggtttaatcattgcacctgaaaaagcacaaatgtcctctccttggaagtatcttgggtacatacttcctggtcagtaagacctcaaaaggttaaattaaatactagcaacttacacaccttaaatgattatcagaaattactaggtaattttaactggcttcaccccaccttgggcattcctacttataagctgcaaaacctgttttctatcttaaagggtaacacagccctggattctcccagatatttaacccctgcagc

SEQ ID NO: 272965 - DNA, 986 bp, Homo Sapiens
  misc_feature (244)..(256): n is a, c, g, or t
caataccctgctcgaagactatcagtgcttccccttttccaagttcggattcctaatcctactatctaaggttctccctgatccagtcttatctccactaacaccatagaaggtcacaatgttcagatgagtttccatttctagctgttttcctaaacttctcttgcagtttttgactccatcaaaaattctctattagttctcatactgctataaagaaatacctcatactgggtaatttatnnnnnnnnnnnnngaggtttaattggctcatgcactgcaggctgtacaggaagcatgatgctagcatctgctcagctgctggggaggcctcaggaagcttacaatcatggcggaaggtgaagggggagctaggcaattcacatgtccagagcacgagaaagagagaggggaagtgctacacacttttaaacaaccagagctcatgagaactctattgcggggatagcaccaaggggacggtgctaaaccattcatgaaggatccacccccaccatccaaccacctcccaccaggccccacctccaacattggggttatgatttgacacgagatttgagcaggaacacagagtcaaaccctatcagctcttttgactcctcccttctccatctccacctgttagagttatacctttcttcaacatctagctaaaactactttcaccatgatacttctgatttctcctgtcaaaaatgccttgtatgcaaaagcattccgcaccatcccgggagcatttaccatggtctgcaccaacaaagtacatattttatctcctcttttagatcacaagccttgtaagaggagaggctgagcatcaggatttcctggagaacgatgaactttgaaaactaaataaccaggacttgttttcacttcgactgacgctctccggttttaattccctcatctgtaaaaaagaacctacgataattattgagaattgatttgcttacctcagaggt

SEQ ID NO: 272966 - DNA, 391 bp, Homo Sapiens
caaatcatttgacttataggagaaacatttttcttccatcccacctcctccttaagagagagatttatgcagcataagccacataatcggggcattttttactttatatttttatcagctgcctttcaaactgtgctaacactgtggtttctggattttaaagattagttgtttgcacagtcctgttactgatgatgaaaaaaatacataattaagagatcaaccaacccagttgaggccccctgaaagaatactattccaggaagggtgtacaaggtttcttgccctgggagtttcacttcataaatggattaatccttggttcactagaaaattctagaacaatcaacttcccaatttctgatttttttcacaattaatcatgttttaa

SEQ ID NO: 272967 - DNA, 197 bp, Homo Sapiens
aggaaaaaaaaggagggagcagtccctaagttgtttaccaagaatttaaaaaataacagtctatcaattggctgtacattgttctttctatcacaaattccaggaacatgaagatactgggtgagggtcacattgtgcaatgtgtggtaacattttaggtaatttatcagctagtctgaaaccacagggaaggaatg

SEQ ID NO: 272968 - DNA, 448 bp, Homo Sapiens
  misc_feature (389)..(389): n is a, c, g, or t
  misc_feature (399)..(399): n is a, c, g, or t
  misc_feature (430)..(430): n is a, c, g, or t
ctggacgggaggagcaggtttactgttggcaacagcacagccctgtggcacccaagggtagcgggtggggtggcggccgggtctcctggggccccgttctccctcccattctctaggtccctggaggccagacccctgggtgcggcccatcctagcagtggttctggcttgggtctgtcctgggcaggagaggagggtccctggagaggcagtgatggctacagcgtctgtagggagctggggacacttccggccagccatgacaggcccaagcctgctcagctctgcacttctggggatccccttattcctgactctcccccctcccccacctggaagagacctaggccctgcaccctaatgaggaggaccggggtgagggggtgcanagtgtcctgngggggctccgagcgcttggcaggggactcancaaggggagcgtagggcg

SEQ ID NO: 272969 - DNA, 364 bp, Homo Sapiens
  misc_feature (59)..(111): n is a, c, g, or t
agtgcagtggcatgatcataagctcactgtaacctcaaacacctgggctcatgcaagcnnnnnnnnnnnnnnnnnnnnnnnnnnnnnnnnnnnnnnnnnnnnnnnnnnnnnctgcctcacagatatttctttataagaaattcaaaattttagtcacttaagacactggaatttcataagacagaagatggggaaaatcaagttaaatgaagacaacaagtaggccgtgtatactaacaaattgtgccaaatctaatcagtacattgtcttgcagtctaccctaaggtgacagcttcaaactaagttaaacaaacactcattaagtcatactatatactaggaactgtgaaagatataaagatg

SEQ ID NO: 272970 - DNA, 490 bp, Homo Sapiens
tgatttgtattgtgaaggtgtaagttgcattcatccaccttaaatgaagcagagagttttgtcatggtatattaatactcttaagcaacgtaaaacatcaccccaaagagaaaaatcgtcttctgaatcatgtgtttggctgtcagggtgggcctgcagtcactgaatacaggccaggattccatctcttgcattggctgtagaatcagagacttgggtccatgataagccatttgttaaagctcattgagatcctgaaaaccaagcccatctctgctctgccttacagagttcatggcacatgagaagagaaggaaggatctgctcctgtgacctgggccaagatttctagaacccagcttaaaatttataagataagtagaacttgagtcatggtataaagttcctacagggcagttttctaatgagattttttcacttctaacaaagatgttctttagcctctccttgagctccaaatcttatttaa

SEQ ID NO: 272971 - DNA, 786 bp, Homo Sapiens
catcctcctgaaaaaatccacccagaggtggcattgaacaccccgtgcaccacaggattccaatcatcgaggcccgagctttcctccactagttgtcagaccaccatcctatatgctatcttggggccaatatttacaacctctgccaagcacgcactcacctctgtgagcagagggtccagcctcaagatcctctccaaaggaaagcgaggtggacatccatctgttcacactgagtctgagtcttcaagtcttcactccagctaacacagatgtaaaagactttttgttatacgataaataactttttttaagttacacatttttcagcatatacaagactgaccaatattgtacagtttttattgcttgttggatttttgtcttgtgtttctttagtttttgtgaagtttaattgacttatttatataaatttcttttgtttcatattgatgtgtgtctaggcaggacctgtggccaagttcttagttgctgtatgtctcgtggtaggactggagaaaagggaactgaacattccagagcgtgtagtgaatcacgtaaagctagaaatgatccccagctgtttatgcatagataatctctccattcccgtggaacgtttttcctgttcttaagacgtgattttgctgtagaagatggcacttataaccaaagcccaaagtggtatagaaatgctggtttttcagttttcaggagtgggttgatttcagcacctacagtgtacagtcttgtattaagttgttaataaaagtacatgttaaactt

SEQ ID NO: 272972 - DNA, 520 bp, Homo Sapiens
ggcagaaaggagaaggtgagtttagggaagggagggcaaggaatgatgggttggtgaaaagtgaagtctctgagagcaccagggcaaggtgggaataaggtagaaaccccagcctcagtgcctggatggggcagccagagggcagtacaagaatagtgggagcagggagacagggaaaagggaaggaagaagccagacaggtatgggaggtaacgtcaggaaagctcaacaagtggctgatggggctgaatttcagtgatttgtcctcttttaattggatccagcccatggtagctgaactgagggattaatgaatttacctaaggtcacacggctagcacagcacacacctgggtcttggcccaggtctgtctcactcctcccagcaggcttgtaaaaaccacatacacatattgtctcccaacacgtccagctttggtctgagttgctcaagactagagtagacctgatcgtgcaattgaggggatcagtggattcaagagaggcagaagtcacacaa

SEQ ID NO: 272973 - DNA, 915 bp, Homo Sapiens
agagagatgagcttcaataccctggaaaactatctgaaatatgaagtaacatctattttgaaaactctcaacttgtttgttttttctagtaattgctgccaaatatgtgtaatcttctgactactccctcattctgctggatgacagactaccttagtgatagtatattttaagaatgtttattacctttgattatttaaagaacttattctggtccacatatcaaaataggtcttattctacagctcctaccccaaggacacaggctaagctcgtgactggtagtctggagtgccgtgcctgcactctcactacacagcattcccactatattcccaaacccccttgccaatcctcactctgttgggaccaggaataaggcaaggaaagagataactgattattataagacaatccacggcaagccaggtcatcctttctgactaaccacaactcttgtctccttacaccagtatttttcaacctcagcaatagagatttttgggccagatgattctttgtgtggagagctgccctttgcactgtaggatgtttagcagcatccctggctctattcactagataccagtagcaccctctcccagtggtgacaaccaaaaatgtctccagacattgccaaatgtccagtggttggggaggagaagagcatgtcaaaaatcactgcttgaagcccctgtttaagagccactgcctgacgaataacattattaaggccactcaggaaagtttgcttcccctttgccatggttgctgctgcttctcagtctaaagctgactagcacatagtccctcctctttttgtatcaggcatccaaatgcccgctgtctcatggaagaacatatttttgagacaggagcctcgtgtcgccaggctggagcaaaactccgcctcaa

SEQ ID NO: 272974 - DNA, 587 bp, Homo Sapiens
  misc_feature (27)..(27): n is a, c, g, or t
  misc_feature (71)..(71): n is a, c, g, or t
  misc_feature (87)..(87): n is a, c, g, or t
  misc_feature (102)..(102): n is a, c, g, or t
  misc_feature (128)..(128): n is a, c, g, or t
  misc_feature (467)..(480): n is a, c, g, or t
ggtacttcggaccaactggggtgtaanggtgggggaaaaactggaaccggcaccccaggcaaccggacctnattgggaaaccatccngggtggaagtcccangattccaggctccacccctccatttngtagccagaaggccttttcgagcactagcatctgcaccagtgtccaccagttgggcattccacgcaaacggctaaaaccagtcctgaaatcttccatgaacagttgaaaaatggaattgactttcactcctccaggtccagaaggattctaatacacaaaccataagcaagagttgtttctgttattttgtccacagaacagaagctgaaaaagcatattgcttgcatttcaggtggataatttatggtttattcttcagctttaaattagactgattaattcacttcaaggccttaaattatcttcaatgacttctcttgttcatataatactttaannnnnnnnnnnnnngccttgtcattttgaccaaggctatgcaggattgcactagctccataatgcagtaatattgataactgaagatactaagtttcaaaaggatcttccattattttgcg

SEQ ID NO: 272975 - DNA, 328 bp, Homo Sapiens
gccctttaagtagctctctttagtaggaaagggaagaatattgacttgggttagttagttctgatttcaaatttcccctttatcacttacttgccagtatttaaccttttcagagtgtttcactgtcagaaaataggaattcagggttgtgaagattacataaaataaatacataaagcacagtgcttgtgacagagtttctttaacttcattagcaccttccctgtgacttcaagtatagacaggacttttatacattagaatggaatatttgtttaactttgtttatgtctcttgttttctccttccttttgcttccacttaaaaa

SEQ ID NO: 272976 - DNA, 858 bp, Homo Sapiens
  misc_feature (245)..(258): n is a, c, g, or t
aacttactgtatcattacctgtgtgcaccaggcacccttctgaattgcagacagcatgtaggaagatctaactaaactttaaccttacaagtacaaaccacttctaggtgttctcaggtgtgaacaatcagatgcaagcgggaaagagatcagaaacactgacaataataatgcatgaaataatagctcctgtagagttttagaagaaagggttgagctgactatggtgggggaaaaaagggacnnnnnnnnnnnnnnaatgtgtgtgatgttctacagaaacagcaatctgaaagctaactggctgcagctggatggactttcttttgtatggagacgctgcctctagtgtttaggaaaaaatgcacactagaaaatagtgcaacattatggtgccatctgtcttgaaaatgaattattttttattgtctgctttatagtagttcccagacaaaacttgaaaaaacttcaactagctttggtgctattttgcgtatggacagtttcagcaggcagaagcctttaaagttgtatttcaaagcgcctcaggagttatcgatgtgatgtgatgagactgtttgccatataagcctctcaagaggccacagccctaaccccctccccggctccctgggggacaggagagcagatggagtcgtgtttgcatcattcaccgtcctaattgggtttgtgactggctgttagggcatctttctctcagatggcattttcttctttaattcaaagtttcactttctccttagcagcgttctggattgtttttgagggaatgatggcatggatacgcaaatctacagagttagaagaaagagacgagacttgaaggattgttgttct

SEQ ID NO: 272977 - DNA, 421 bp, Homo Sapiens
gtcgttgattatttagacttaagaaagtgatgggaaaaacgttaataacacagtacataagttgtttctgtagccattacactgtgattttcacaaacacttgaacacttgaatagtcttccattatttgaaaactattattcaacttatccaagtgaagtattggcatacaaagaagttgtttcatatttgcattgctcatgaatgtaaacaaaatgtcgatatgtgtgaactatacttgttgatcaattgcaaccataggttggctgcagatgcgagagcttggtaaacatcaacaaaagcattctctgagaatgaattgactatatggaatttgtaggaaagtgtattgtgtattttattattatttgtaaattgtgtattccacatcttttagattagtaaaatttatagtaaacat

SEQ ID NO: 272978 - DNA, 121 bp, Homo Sapiens
aagtctcagttcagtttcatcgcctttgtcaacccagatatttccaggacaactttaaaggtaaaattaggaaaggtatagtactttaaaaatatttcatccctggaacacctttgtaaaa

SEQ ID NO: 272979 - DNA, 352 bp, Homo Sapiens
agcccactttgtgaactccattgtgcttttttctggtgttttatgcaagttgactactaatgactaatgagaacaataatgaatgcattgttgctgcattagtgtaatgtggtgtggttttgcacttaaaagaggtattcatatgctctagttgtaaatgttcatgaaaatccacttctctactagtcgaactgcttttagtgtctcaccagtggttttacatctgcagagttttgagggctgtgctgacctttgagaggatttgaaattgcttcatattgtgatcctaaattttatattcactatattccctaaagtataccttaataaatattttatgatcagaaaaaca

SEQ ID NO: 272980 - DNA, 693 bp, Homo Sapiens
  misc_feature (618)..(627): n is a, c, g, or t
gtctagaatgaaggcttgccaaagctatttaaagactgttaaagttctgtatcatacacaggctctttttgttccagtttaatcctagaaggaagaaatgtgttgaaattgcagctatataaaatccttgatggactgaaactaagggggaaaaagaggaagcaggtgggtttgaaagaaggaaaaaaggagtatctagcattttcttttaaaaatgtcattcttgatttatttggtggcacaaagtgattttcttacgtttctcagactgcttgagtcagtctatatagaggctattcctggatcttagttgaaagctgttgcctttctaattgtttaactgatcacttctgaacgacaattacagttcattggtattccctggtaaaaaaccattgacatccatccaaaagttatagcttacaggtcagggaatatttatgtgatatttatagtctgtgaagaaaaccctggggaactgccagtagggaggattatttaccaatttctttttcttcaagtttgaatttatttgagatttatatccaaaagacattttgtaatcctgtgtaactctgatgtgtgactataattgtgcatgttggtcaagttcaaggnnnnnnnnnntcttttttctttttaatagtgggggctgggaaccctggttgattccactaaaaacatcacagacca

SEQ ID NO: 272981 - DNA, 333 bp, Homo Sapiens
ccccttccttgataccatatctatagaaaaatcaattccatgtggaatatggtttaaatgcgaaaggaaataatgaaacaggagagtgtcttcatgttttggggtaggcaactatttaaaggacataaagcataaaggaacattttaaactaatttgtggtgatagaatcagggtagaggttatcactcgcctggcaaaattaatcaataagaaaagataacttagccagacacagtggctcatgcctgtaatcctagcactgggaggctgaggcatgaggatagcttaagaccaggagttcaagactagcctgggcaacatagtgagacctt

SEQ ID NO: 272982 - DNA, 477 bp, Homo Sapiens
tttttttcctgtgttcactgtgaaagtgattcctgggtgcctgtgaagccttcacccaaaagcaggcttataatggtgaaatttcaggcatggctggaggcctaaagacacagatccttggggaataggagcggctgagttttagaatggctccaggcaggagctctgtgcaggatgtgcagactcagtaaggcacaactcaggggcaccctaacccccggagcggtgcagggaggatacccctcaccccagagcccctgggaggcagaattccgtgctccagtcatataggaagtatggggccttcccagtgctcccttcagcaaatattattttaagagaagagctaaaaaatgaaatgtcagtggagcagccgagggacataactacctattcacccacgtaccctgattctagcccttgtctgttataacattaccttatattataagagtgcgtctatctagaagtccctta

SEQ ID NO: 272983 - DNA, 441 bp, Homo Sapiens
cgtggccctgcacctgggggtgtcctaccgggaggtgcagcgcatccggcacgagttccgggatgatctggatgagcagatccgtcacatgctcttctcatgggctgagcgccaggctgggcagccaggggctgtggggctcctggtgcaggccctggagcagagtgaccggcaggacgtggctgaagaggtgcgcgcagtcttggagctcggccgccgcaagtaccaggacagcatccgacgcatgggcttggcccccaaggaccccgctctgcctggctcctcggctccacagcccccagagcctgcccaggcctaggccccacagacttttaggctggcccagatattccccagtggatgggcagagcccccaccttcaagtctctccagtgtgtggggacgggtccctgtgagcaacaaaactgcactgtttctttc

SEQ ID NO: 272984 - DNA, 469 bp, Homo Sapiens
aaacttcagaaaataccaaaaattcaagagctcctctctcactgtacatactagatgtaatattccattacaataccactaaagtgctaagatgcacaaaaatgagaaaaaagcagactctttatgtaaagatctgtcaactgagaatacaggagggtataagccaggaacaaactttcaaaaacaaaccagtatttaggggaagtatacacacgtctgcactgatggataaacgaatgagcacatatgtggtactgtaagcacagaaaatgttaatggaagaaaactatgggtgttcaatgtaaaattcttataattttctaaatgcttataatttttcataataaaatgtcagaaaaacaaatcatctacctctcacctgtaccaaaggatgcatataaatgaaagctgataacacatgattctgactcaccctctccttgtcaagaataatttcacaggttgagtc

SEQ ID NO: 272985 - DNA, 538 bp, Homo Sapiens
tcaagaactggttcccccagttcgggaaactgttccacagactgcctcacagctttgccacagaaccttctgctcaccacttgtgtttggcaggtgatttcatgtataaatctgctttctgctcgaggatgtcaatctagagtttctggggactgcttaaggcaaattcgtaaataatttggctctcttagtaataaatgagtggctctgcacagactgttgttttgacttggagagaagtctgcccaggattccatcttaatgcacgtgctgatcttctggcatgtcctgagctttagtccatctgttaggggcattgtgcccattgcagaggtagcctgccaacaccaagcatcctgaaatgaagcaagtaaattccattcattgattggtataaaaagtgccatggggtgctcaaagctgcctagtgtgtacccatgtaacagacagtttcattttagaccatgcttagttaataagagaaacattcattcactccctcagaacattttattagtggccaagtgctgtggctcat

SEQ ID NO: 272986 - DNA, 275 bp, Homo Sapiens
gaaaaaaattactagaagatttatttcaacatattaagatataactgtgattaatgggtcataaattggtaagccatgataataaaagattatctagtaacacaggagtaaattcaacataaagatacatccaaatagttgttaaacatttggttataaaacaaaatgcaaacactaaaatcgtttttaaaagaaaaaatacaaatattaaaagaataacttgaaatggctgttaatataatctgtggttgatattaccaatctcactatccaat

SEQ ID NO: 272987 - DNA, 164 bp, Homo Sapiens
gataaggcataaaagaaactcattccttgacatcaactgtaattccatcattccatgtctgcggatacagacaataaaaaaatgttgtgtagtcagtactaattactgacattataagcattctcaaatgcaataaaaatgctggttgtccacgctggtagtaa

SEQ ID NO: 272988 - DNA, 472 bp, Homo Sapiens
  misc_feature (39)..(39): n is a, c, g, or t
gtcaaataaagaacatctataaatatttatagatttcanaattgagaaagaagtatatatggagccacggttgttttgaccatttctccatgctttttgtttggggagagggacacttttttggggggcagggactgtgttcagggaaagtacctgaccaacagaacttcaagtctcttccagagtgcgagactcagcttatctgatcaaggtgaacttgcccttcaatagacttgcccttgttactgcccagtgaggccaccaaggaccaagaacagttgagctctctcagggccttcccctttcaacaatttagttgaacgactcccttccatctatcagtcttactccaaatatatgaaattactatacattgaaatgcctgcaaactatatgcaaaaatgagtatgaggaaatcaaatgtaaatcatatgcaaatattattcaaccaagcttctataaaattgtacgt

SEQ ID NO: 272989 - DNA, 467 bp, Homo Sapiens
cagttgttaaattcattgactacggaaactatgaagaggtgctactgagcaatatcaagcccattcaaacagaggcatgggaggaagaaggcacctacgatcaaactctggagttccgtaggggaggtgatggccagccaagacgatccactcggccaacccaacagttttaccaaccaccccgggctcggaactaataggaaaagtagactctttgtgaagaaacgagccagtgactgaaacaccctggtggaaacctgttgacagaccttccactttctcttcagaataagtagctgtggtggatattattatttgaagaaagaaaaaacagattttagggtggaaaaaacagtcaactcacacaaagaatggaaaaaaatactgagttaaattaagcaaataccttttacaagtgaaaggaagaatttttcttctgccgtcaataaaaccattgtgctattatt

SEQ ID NO: 272990 - DNA, 561 bp, Homo Sapiens
  misc_feature (376)..(411): n is a, c, g, or t
  misc_feature (439)..(439): n is a, c, g, or t
  misc_feature (465)..(465): n is a, c, g, or t
  misc_feature (493)..(493): n is a, c, g, or t
attgttgagtaatattccacaatatagatgtactcaatttttaaactattcactcattgaagtatatctggattgcttccagtttttggtattacaaataaagctgctataaatattcatgtacagatttttgtgtgaatgtaagtcttcatttgtctgagataaatgcccaggggtgcaattgctgggttgtatggtagtcacatgtttagcttttaaagaaattgccaaactgtcagagtggctgtcccattttactttccaccagcaatgtatgagtgatttgtcttttcttcatccttaagcagcatttgggggctattttttatttcagccgttcttacaagtaagtgaatttctttaatagttatagtannnnnnnnnnnnnnnnnnnnnnnnnnnnnnnnnnnngaggagggtcccactctgttgcccaggnctggaaatgtggtgggcaatcacagnctcactgagttcaacctcctaggctcangccttcctcccacctcagccttacaagtagctgggacctcaggtacacatcaccacgctttgcttatt

SEQ ID NO: 272991 - DNA, 612 bp, Homo Sapiens
tgagccaccgcacccaggctgtccagagtttttattggtgtaggtttgatcaactgttcacatggcttatctgtctccagtccctcagtagtttgaatgaatgggcttgcttgtttcgtgtgttgtgtcctggcttgtgtgtttgtccagaaaagttgtttctcctcctttctttcctactggcagggcagtacctggctcagggctgtgcttatggtagaactcagttctatgaattgtccatcctcaaatatccttcattacatgggggaaaagggcaagcatcctcctctagcctcttcccactgcttaataaagtgtctccctttcagtagctgccctaattctggatcctctccattctgacatctggaaattcacaggaggaaggagtgaggaaatgaatcccttctaagtgggtttgtgtgaggtgactgatatgtcagatatctcacaagaaaaacataatagcggtagtttgttgttccatcctttcctgtgattatggaataatgaatgcgacaattcctggggcgtcggtggcttacgcctgtaatctgcgtggatcataggatgtcccataaaataaagctttccattatcacatgaaaa

SEQ ID NO: 272992 - DNA, 787 bp, Homo Sapiens
  misc_feature (698)..(698): n is a, c, g, or t
ttttgcatacagagagccaatttttccatttgttagaaatatttattttatccattgaattgtcttgtcacctttgctgaaaattagttgacaagtataagaatagaccttattctggtctattgatctatatatctatccttacaccaacaccacagtgtcttggtaatagctttatagttagtgttgaatcaggtagtgtaaattctctttgttctttgttttcaagacctctttttcaccaacctctttcacatagccacagccagaagtccttccgacccacaacagttttaaaagtttatatgatgcgtcaattcagagatggctaactggtctgttgcatgagtaaattataataactggtgctaaatctgcatgttttatgggccattattcatttaggtaattacatgaattatctaaatgtagctatactggtataactaattaatatgagtacctttgaatcatctgtattaatatcaacaacaaaaaataaatacatatttgtacctgctgctcccacctggtttgacaagccatatttctctacatgagatgacagtcctaataggaagctgaaaataatgttaggtactaacagaatatgatgatctctttttcttaactgaggttgatatgttttggctgtcttaggaactacatgattacataatgtcaacatagccaaaggnaaatggaggcctaatggagctccagctcctcacctgtggctggtagccaacagtagccacacagcggtgatccacaaaagtgaagatac

SEQ ID NO: 272993 - DNA, 590 bp, Homo Sapiens
attggctttgtcttttatctcccttcctagcgctctcaggaaaggggcatgtgagtctctgcctttctggacgccgggctggtacctgaaaacctttccctacccattctcagaacaatccctagctctgagaaaactccactgtacttcctgttgctctttaaccccctctgcacgccctgggagcctaagtgtaagctcccgaaaatgccagaatcatctcccttgcctaaatggccgagtgttttcattgcggagcctgtgaagctggtagtagctatgtttagtggaagccctaagcactctcctcctagcctaccttggaaaagtcgctcggggcaccaagcaagacaaattttccccttgtcgttagtcctcctagtcccgaggcagtccaatattctggagagtatttagcttttgtatgggagcaaggtattggagaaaagaaaattattaccctgggggatgaagagtttgtgtctggggggaagggagttggggaggaagaagtgagggtggagcttccacctcttaacaacttaaatacttcaggaagtgtttctaaagattggccaagagggtcgctg

SEQ ID NO: 272994 - DNA, 451 bp, Homo Sapiens
ccttcaaaagcgtatattcaaactttgattctagttgcctttcgtctaagtcatgggaagccacgtgagtgatctttgccatctccaggagtggatggttagagggagggaataggaatccccatcagctgagggagcttaacttggctgtaagatgtggtcttggtgcagccaacacgtgggaacatgtgcctggtgctgagaaccttggaaatatgacaagatattgaggaagaacctcttctgtgacctgcagagaatcttttggaacaggccttgaatgaatccccattggacatgtgtgctttgatgcgagggaattctctctactaaaagtaaatgtgggtagtctgagggctatgataaaagaagccctgaaaccctccctccagagcaaaggggaaagggagaagcctgaagaaggactaaaaaatacttaactttggcaatc

SEQ ID NO: 272995 - DNA, 412 bp, Homo Sapiens
gctggggtggtgctgctgctatgagctgcaccatcgagaagatcctgacagacgccaagacgctgctggagaggctacgggagcacgatgcggccgccgagtcgctggtggatcagtcggcggcgctgcaccggcgggtagcagctatgcgggaggcggggacagcgcttccggaccaggtcaggcagagggtaggagtccagtgctctcggattctgggcactgaagggtggagagcgagagctatggatttccttggaggaacaccaggatgctttggaacttatcatgagcaaatatcggaaacagatgttacagttaatggttgctaaaaaagcggtggatgctgaaccagtcctgaaagctcaccagtctcactctgcagtaagaaactttgaataaactcgaaatt

SEQ ID NO: 272996 - DNA, 471 bp, Homo Sapiens
cctgctgtactaatgtattccatctttcaaaaagaaagacatgattttaatattacttaacaatatgttaaaaaagtagccaggcaggcctccgtgttaatacagtcgtacactctataacagacttgatggtgtgagtactgggtgggcttgtttttaactttctcgttctgcaagggatcttacacaagctggctacaagtcagggggatcaaacacaaacagcgcaacgtgtacactcggagacagtagattgtggagaacaaaggaggcctgccccgcccagcccgcctagggtgagacgcaggggcacaggagagctgagtgacggccgataccccggtgaggacacatgacaggacagggcgcaatgcagaggcaacggagccacgtggatgatgcaaactcctatctggccacggcccaggcctccgaggccgcggtggtgggaggacttggcgggaactactg

SEQ ID NO: 272997 - DNA, 183 bp, Homo Sapiens
tatgcacaggcataatcatctcacactgcacccttgacctcctgaactcaagcctcctacctcagcctcagcttccagagtagctgggactacaggaacacgaaactgtgccctgcatactccagtattttaaatgaatggttttcaaccaagggagattttatcccccatccctacctcccc

SEQ ID NO: 272998 - DNA, 177 bp, Homo Sapiens
atttctacctttttaatcttaagtacagatgcttcttgagttatgatgagcttacattctgataaggcaggagtattatttgagtccaggagtttgaggctttagagtgtgattattgcacctgtgaacagccacttcactgcagcctaggcaacatagtgagaccccatctcttta

SEQ ID NO: 272999 - DNA, 431 bp, Homo Sapiens
tgatccaaatgatatgactgacggggtgcaccggtcgctgaactcattggcgatggtctcgatgcccccggcccgggctaccgcgatgtagcagctctgcgagcccacgtccaaccccaccaccgacatggccggctcgcggtccgcctccgcctcgggtctcggtctgcgtcctccggccccctgcctgcttctcctgccgccgctttctgccctggccgcgttctgctccggcccgcggggtctggccgttcctctgacactcagaaggacacacagacagccgcggcctgtcaggagcctcctactcccccggggacagcggcggctggctgataagaaaccctgggagaaagcggggctcagcctccgcaggtcgctccgcacctcgggttgcctgcctcactctgccgcggctcgcacaccggcgc

SEQ ID NO: 273000 - DNA, 582 bp, Homo Sapiens
tgagctgtaaccagaaagacatcaccgaatttaccattgaaatgtcttcatttaagtccgtttctcaacagttgttagccagatccagctggattttatatctgacttgtgatcacggtgaaagaatgcaaaaaggagacacagacttttaaaatgttctgtccagaaaagaataagaacactatctaaaaaaacatgaagttctagtaaaaatgatgcttgagacagaaaaaagaatttaaaaagatacagtgaattaactaaaaataaaagacagttctttgtttggtttaccattctccccccaaaatggagggatatttgtatatttgtatattctgacaggcactttctcttctaagggagggaagtagttagaggccctaggctccactgtagaaatgtcataatggagatgtgcagtgctctagggccaagattagtctccgagacagcattgggtgacattgttttaccgtagtatttttgctttctgttttgagttccttgttggttcacaaatgttctctttttctccaccttttatctaatcagtcacaataaaatgtaactgtcaaccag

SEQ ID NO: 273001 - DNA, 532 bp, Homo Sapiens
  misc_feature (46)..(46): n is a, c, g, or t
tgttaaacattaagacacaaaaacacatgttagtctaggcctgtgnagggttaggatcgtcattatcactggctttcccctccccatgccgtcccactgaaaggtcttcgtggacaataaaccactaacatattcatttgttatcattttcaagtattatgtatttcatgtattgtatgtgcaatacttttatacaactggctgtgcaggtttgtttacaccagcatcactacaaacgtgagtaatgcttccactgtgacattactaggtgatagaaatttttcagctttgtgttattaatgttatgggactactgttgtatatgtggtctcttattgaccaaaacgtcattatgtggcacatgactgtacctgttcccctcactttcccattcttagagtcacataccttaaaaagaatgtctcatcttggggaaaacaccattgcgatgacagaggggtctgttatatctaggcttagaactaagaatgaaagttattacaggattgtataggaaattcctgggagaaaa

SEQ ID NO: 273002 - DNA, 781 bp, Homo Sapiens
tctagttttatttcctcttctgtgaattgtctgtgtgtgtcccttggccgtttctgaatcatttattatgtttaaaccagatcacatcttgggagaggcctcctggctgagggccagatgctggttacttggacacagtggatataatggcttgggtccccagatctccctgcagagttcacccatcccctcttcagctggccttggagggatgatcctctcctagcagcactgtgctcaccatgttttttccagggaatgtaccagaaggaatggccaggttttcataaccaacttggccacctttcaccgagaagttcctactgcagttggatgaggtggtcaccattgacgatgtccaggttgcaaggatggagccccccaaacagaaattatcaatgctcatacgaaggaaactcgctgggctctccctgaaggaagagagtgagaaacccctgattgaacgtggaagcaggaagtggccagggatcaaacccaccgaagtcaccatccaaaacaagattcttctccagccaacatcatcgatttccaccaccaaaaccaccctgggccacctggcggccgtggaagcccgagatgctgtgtacctgaaatatttagcatcatttgaggaggagctaaagaggatccaggatgactgtacatctcagataaaggaggctcagcgctggaaggacagctggaagcagtccctgcacactatccagggcctgtatgtgtgaccctctgccccaccataaataaacactttcttatacag

SEQ ID NO: 273003 - DNA, 507 bp, Homo Sapiens
aaactacattcggccctagcccagaagattccagtgcacacattcatcacagagaatatatgtattccagtgcgtatagtcattatagagaatgatgaatataatgagaatatgagcaacgtggaggcagtgggaatgttaggaacctttgctctaactggaagagccacacaaaatcccaactgcactatgtgactctgagccttacctgtaaaatcagaaaaatatgatataccatagttattaagtttaaaaatgtaatatgaattttctggcacacagtagacaatcaaatattatctctgcttcctaagatacggcttgaaatttgtagaaaattgtatgatcgcttcaatgccagaagacatgtctttataaaacaggaagagaaagccaaattgggaggctaggctggagatgcaagacaaagacaacgtgaaaaaggaaatgggtgaaatctaggactaccaagataatacagattcaactgcagaataaaatacttgc

SEQ ID NO: 273004 - DNA, 478 bp, Homo Sapiens
  misc_feature (63)..(63): n is a, c, g, or t
cagagcaagggtacttggtgctcttcgttggggggatgttgggagaaggggctggagccatcncagggtctccaggctctggaagggagcaccccatgtcctcctctgggtgtggaatagggtgagtgtcttaggggtggagagagaacaggcagagtgtgctctcaccccttagctctgtagtgattttaatgattaaggctactgttcggtctgcatttggacctgagcaacagggacccctgcccagaggtccatccttcagcagggtgcactgcgtccccctccactgcagctgtctctatgagatgaagcatctgtcgccagtgtagccatcaggtccactgcccctgaaatatgactgactaggttcaaatgttgactctgacacttagaagctgtgccaccttggggcaagttacttcatctctctgtgccttactttcttcctttataaaatgggtaaaataataaccac

SEQ ID NO: 273005 - DNA, 464 bp, Homo Sapiens
gcaacaccaaatcagtgataaccgatcgtttccttcaaccagagttaaatgtctgcagaatgcccaccaggcatggtattacagcagagatccccactggaccaacaacctccactgggtccccagcaccgacacatccgaggtaccacaaccggtgactgctgagctgaactaaggatgcaatgggatgaaagccaatggggaaatgtgcctcaaatacttattaacccctggtacaggaggcctggctgctgggattattcctagatcctctgtgacttctctgaccatgtcacacactaaccttcccagtgaaccttctgctctgagcaggcctggccttctgcactcctgcaaatgccagtggcttttctatctctgagctactgggtctgctgctcccccaggctgaaatgccgtccctatgccattcttttctttgtccatccaaatccccagttatt

SEQ ID NO: 273006 - DNA, 379 bp, Homo Sapiens
ccccgggcttaaagtctttctctgctgctgactcacatgttaattattgctttgcataaagtagaattagcagtgctcctgcactcacctgcctgcgtgttatacaactgttttatctgctggacagaactgagtgtgcaggccggcctgccatggtgtcaccagcggccctgtcttcagctgccagggcaatgagcatcgcacagaaaccaaccattgctttagaggctctggggaagaggctgtggggtgtgctctgcttgtcccaggaaaaagagggttaagtgccaagttttgaccaaaatcttataagaatggtccaggagtttcagttccctgtcacctgtcagtgttaatggacagaactggtgtttcacag

SEQ ID NO: 273007 - DNA, 838 bp, Homo Sapiens
ttatctaaactaaggcataatccacagggctttgggaactttgtgtaaatactttcatgtacaattctctttcttgctatcctgagattaagaccacaattatgcaggcttaaacctaaaataaaggaacctttgcaaatgcattatctggccttacatgtttaatcacacagtattctgtgtgctctttaatacctaaactgaagaacaaaggttgtaccctctgatgtttcacaatatgaaagatcttttaagacatatattagacaattggggaaatagaattaatttttaatgacaatagcatagtgtttctccatctaaaaccagaggctatattaaaagcgtcacattctaaagaacttaaaatttcaaaagagtcagtcaccatttcaaaatatctataatacctgacataaaattatgatatgcatgtcagactctcaaaagtaatcctcattaatttccttctcctcatctcttctaatccttcctatccccagataatgtaatgtttttctttttcagtacgttttgagtgcactaaacatatattaaagtgaatgcgagtctgtaaggaaagttggaaaaagaatgtatttggggaggtgtccggctgggaagtggggaagcagatggattgaaggaagggatttgaaatgtgcagactatggcatgcagtgatggagcagatggaatgcatcaccgtcagctatgacagaaatgatttatggaatgacctggctgctcctgcctagtaacaacacaggatgacagagctgagtttccatgacaaccaaagcccacccactaactagattaaacatttcttcactgg

SEQ ID NO: 273008 - DNA, 650 bp, Homo Sapiens
ctaaggcttaaagacatagtatgcctgagaagaggataagaaccagactgtccacagtctgttctcctatgaccttaaaggacatggcaaggaccactgaggttttgtggttccatgagttggggagaagcagaggagcatgatccaccccaaggagctgctgggtagtaaagagcacaacccagagatgaagctgggaggtacactactggtagacctgagggaagcctttcttttcctcacagtgacagaggggtgctgggtaaagctgagcgttgcccaaggtcacccaccacacttgacctgtctggaggccacatgaagccttgatgcgctggcatctgacctgaacatgctgaactggagtgaggcccgtgttgcctccctacccctgacccaagggccatcgcgtaagaagctggatcaattccctctccctccgccagagactgctccccaacattagtccgttctggcttctactgtgtggcggaaggaaaagaggttgaatcagaaatgagattgaagttttaaactggactatacttcaaaaactgaaagtaatcagaatattatagaatgtgtccaaaatgtttcaatgatgagactctggagttcccctatgcatagttgaaagcagtgattagaaa

SEQ ID NO: 273009 - DNA, 842 bp, Homo Sapiens
  misc_feature (24)..(24): n is a, c, g, or t
  misc_feature (182)..(182): n is a, c, g, or t
gaggtaagattttagcacttcaanggtaaaatgcataaaagtattttttattttacccccctgaacttaagaaagaaaagagtttgttcagtttgtgtttttggaaagttctatgcaaaaatatatgttccagtgaataaagtagttttgggttgccttccatcataaggtatcataccgtnggtacttcaggggacggaaaggtgattacaatgagatgagtggcagccagagtctaacaatggttaatgagcacaagacagcagatgtattcaaggtggaatcaagggaggcctgtgagaggcttgagtgctaagaaaaggaagaaaccgtcagtcagttggggatgtggatgttagggcacttgaagttatctgtgctggagattgaatagattttcagtgatggagatctggggagagcattgtccctcagagctgttgaaaagtaaagaatctttctttttcaaaaattaaccactaaagaagtttatgattgttttctctctctttacttcacggatattttgaaaatacagattttagttcttagtttggcaagttgtttagcttctggggagagggtcctgtggacagtggcagcttaggaagcaactggaggtaggcctctaggagtcctgtgtgaggcttctcagaagtgccaggtgatgctctcataccttggaggtgggcatgcagcccccaagattgtgaaggagtggctcagtgggatcagagagacaaaaacactactggacactttcagaaattttctggtcaaatttcatcatgagctatttgcccagattagttttcttcaccacccccaaaaacaagcaaaca

SEQ ID NO: 273010 - DNA, 745 bp, Homo Sapiens
  misc_feature (300)..(300): n is a, c, g, or t
gaggccaccagacagaactgtcagatggagaaccagcaccaaccaacctgcatgttcctttaacagacagagagagcacatttttcccaggctttgcaaatagtttcctaaaacaaatctgccagctgagaaaaacacatataaataccagaacgcttccaatttctgctggtgctgaggctgatatttttggttatttggggtagatcctttattagttctctacccatttaaagaaacagccaatgaatacatcaatatatcttcattaaaatgctttgtttgatcaattcttgatgntttttaaccattgccagaacgccttggtttgggttggggaagaaagtattggaatcaggggaagcagcaggtctgctgggaaataaattggccagatgccccagctgcctctataaacatatccttgctttaggcacttggcaagagagaggacttgtttgagttttggaggtaggagaactttcaaagatctcaaggtggttgcaggacaaagttgcattacatgtcattgcatagatcagcatggttgcctgtggttctagtgtctcttaggagactgggatttgccttccaagacaggcagtcccctccttgtctatttcagcaccaagcatagtgtctgacacacagcaggggcttataatactggttaggtgaatgcatcaacattattcacagggtgacgagtattgccaggcatatgagatttttcaaacagaagata

SEQ ID NO: 273011 - DNA, 345 bp, Homo Sapiens
agaggaagatggagatgtttcctcactcgtggactgcacctcaggaaagataaagccagtgaattgaggattgcggagtattgcacacattcaggtgtcctgcagtggacaccatgacactgactccagcatgcctagaaatcaccatgggggtttaagagagtggcaccccctcagctctgcccccagaatgactggatttttgaacagactcccaggaagttctgatgtatctggttgatggaccacactggtggaacactgtgggaaaggtggggtgtacccctttcccaagcattctctgtcatctgcttttagaaaaataaagtacatgtagaaacaaaa

SEQ ID NO: 273012 - DNA, 362 bp, Homo Sapiens
gcgtttcaatgtagtgtttagctttaatacactgcacttgttttgctatttaataacatcattaccaagttgatcaaaattacattagactcattatatacataaaatatattgtcacattcactagctaaacaaacgttacttccattttaaaagacatacttttgtaccttgaaagtttaaagccccaccttgcaacaggaagaaacatcaatgtcgggttttctactattcaaatataagcaatgttgaaaacaagctccccaattaaacacgaagtcatactctcttggagtgcctaaatctttgtcagtgttttggtatctgtagtgtaacagaatattttttaaagacatcactaa

SEQ ID NO: 273013 - DNA, 401 bp, Homo Sapiens
gccagggtgaaattctttattctggaggtaggaagggggtcagcatgctcaggtgggaagggtccagcccagctcctccagccccccagtgcatgcccagccccaataagttacccagttactcagctgccctccctcctgggtccatctgtccttctgttccaccctagacagggccaacctgactcaacacaagggctgcttgtccccagcctgtgggcagtgccacacggcaggctaggggaggggtgaagcagcaggaccatgccctgggcctggaggggcagaggggccacttctggctccaagggtcaggacttggaaaaccacatcctgggcaggcctggggcccagtcccacaaggtctgtgcctgaaaagaggtggtagttggggtggggcc

SEQ ID NO: 273014 - DNA, 614 bp, Homo Sapiens
  misc_feature (423)..(423): n is a, c, g, or t
  misc_feature (465)..(465): n is a, c, g, or t
ctcttaggtgaggaaactgaggctcaacatggtaaattaaacttgacaaggatacacaactcacaaggtgtggagtcccactagtttcttggacagtttctaaagtctatgatctttccacagcacccagcttgtggcatgctaattgcttaagtgcccctagagtccagatgaagaaagttcagggcacaagactctgagagtacaaagcactccagaaataagccagttgcatttgtcattagctttcctgtccacattcccttttcttagtcaggttcagtccatctagaacttcaatttcaatggaaacagaggaaatgaatgtggtagcagacatcactaagcactctcaaagctttcttgttactttgaaatggtctaaaaagcccattctttctacccactgggtccccaccttcnccgccaagtctgtgttctctgttcggttcattatcagcaccnccacgccagacacgggccaggcggttcacagaagccaaagagcttatcagaaataagtactttatttgacagtgaggccagatgtgcagagagaggcatttcaaggccttcacttctcttctcataattagtcagcttctagcaatgat

SEQ ID NO: 273015 - DNA, 563 bp, Homo Sapiens
  misc_feature (64)..(76): n is a, c, g, or t
ttaattaaatctgtgctttaggtgtactctgggctttttccagcaggctaaactgaaagcctannnnnnnnnnnnngaaagctgcattttaaggccatcaaatttcttcctaatctgtatcaaattgcctttaggtcctggatcctttgtctttattcctgtgtattgggcttaatttagtgacgtttatgtatttatcggtacaattcaaagggctaggagcattgtggtccacaggagaggccttcgctggctgcactggagagaggttttgggctctgctgggcagggtgtgaagaggagagcacaaagcgggccttcgggctcctgcatacggaaaatacatcaccgtctcctgtcttttcagagcaaaatctggagcggcaggtgttacagacacaatgtagacgactggaggcacggcactacagcctcagcctgacggcagagcagctctcacacagcgtgccggagttgaggagccagaaacagaagatggtctcagaactggagctgctccatgcagaacctgaccacttacgaaagtgccttgccttgcctgc

SEQ ID NO: 273016 - DNA, 408 bp, Homo Sapiens
aatgcgcagacgaaagaaggtaagggccgcttggtcttaagatatttggtggctggagagagatactagctagaaggtgcctggcaggaagctaaccgccattatgtctctagtggggactgttcgttctagtactttggatacaactttcattgatagccaaggtttgcagcagttggccttggagtttcactggtttattttatttctgcatacttgggtcatctgtaacaggctaacccaaaacgtggaagcctgattattcttctcgctgttttttaaaatgagggagggaggagagggggatagctatctagactctttgagtgcttgtcttagggcgttttctaacttattttccatcaggagggcaggagagcctgtgcaaagcttgtttgttcaatcagc

SEQ ID NO: 273017 - DNA, 640 bp, Homo Sapiens
  misc_feature (289)..(345): n is a, c, g, or t
gacccggtgtgccctctgccactcacagaccaacacccggtgtgagaagtgccagaaagggtgtccatgccaaatgcttcagggagtaccacatccggtgacatcatgagacatgcttctttggtttataatgagatgtttacagttaaatacagatggcagttgagcacttctgttttgtgttggaaaaaagacctgaatttctaatgacttgattttctattttctccctacccacaatacagttatcttttttattgtgttgtgttatgcctacatgtgatataannnnnnnnnnnnnnnnnnnnnnnnnnnnnnnnnnnnnnnnnnnnnnnnnnnnnnnnngatcactttttattcaaataaaagttttgctttggggtatatttgaatcctagcaagaataatcaaaggaaaacttgcaagaacagtaagaagactttaccattgcatgccatggtttataatctaagataggcaatagtgtataaatatcatgtaaatgtgatggatttcttaatcatatttatttcatattaatccaagtttatcaaacttttgagggataatctgccttgtatttagtcagagggctagaggtgcagatttcatattttcttaatccaaatattttcctaat

SEQ ID NO: 273018 - DNA, 162 bp, Homo Sapiens
tttgctagtgcggagttgtattggctacaaaatagatgcaaaatgatgagaatctgaaggctgcagtaggaaagtagagctttaccctcataaactcgcactttgattagaaaagtgcaatatattaagagcattatgagaagtctggtgagactgttacag

SEQ ID NO: 273019 - DNA, 527 bp, Homo Sapiens
gttgtggaggaagagcaatgaagtaccataaatcacacagaacaagtggctcactgcttttctcctctgagttcattaacgtccagtaactgtccacagggcatgtgcccatactgctcaatgcagagctgagtaggtggaacaggctcccaaagctagaaatccaagtgacagcaaccagttcagaggccctgggaataaacagggtccaagcagtgcagataaaggcagtacaatctacagtatcatttgcttggcttacaagtagtgtgaaggatgacctcgtagcatgtgatattccagaacagcatgaaggtcatatggaagtggagaagcatacccaccaccgtctcaatcttgaggttgagagaactgaatatccaaaggaaacagggtgcagaaaagtcagcaaaaacaaagcacaatagaaggcatactcattgctgatgcccaagcacaggtccagcagaaggtggtaggagaccttgtgcaggagtattcccaagggcaaatgttaaccagactgg

SEQ ID NO: 273020 - DNA, 1002 bp, Homo Sapiens
  misc_feature (143)..(211): n is a, c, g, or t
aaaaaaaagccatatatgcaaaatctaaatgaggcatgtctggccttatactgcctcttactctgtctctgctctgtgctgtgcactgtgcacacacattctctcactgatgctctctctctcactatatatttttcattatnnnnnnnnnnnnnnnnnnnnnnnnnnnnnnnnnnnnnnnnnnnnnnnnnnnnnnnnnnnnnnnnnnnnnccccttattgttttcctctctctctgtcacacacacccacttatacactcatctttaccttaacttccttttattttgccctcacaaaggatactaaggaagctgcaaaacaaaacacagcctggcacgttctagagagacaatgacccattggtgaggtctccagggtaatagtgtcctttatgaatgttgtacagcaattgccaagacaaaagcttcagaacataaaagagttgcagacaagacaaagaactgatgtgggattttctagatgagaagaaaagaggcctggaggctgaggtggctgcttctcaagttccgggtcagggccagaatctagtctctggaaatcccacccagtatctttcatactatgccattttatactatttaatatttatttcttgatgactttggatgtgagattggcttagatttggctacaaatttcaataacttgctagacaaggtccatctccccccacatacatgcagtgtttaagatggaaccacacacccatgacccaagtttacttactagaaaattcctctctcaattctggtccgaaggccttgtccaagaccctgatctccttcagctccttctccttcaccaagaggcggatgatcctctgtcccagaaaccctcctgctcctgtcacaaggcagctccagcccgtcatggccatccaaagtagcaggaatcactcaccaggaaacagaagatgctggggagcagatctgattctagggtgaccctggagagggcattagttagattgttaaaagct

SEQ ID NO: 273021 - DNA, 120 bp, Homo Sapiens
aatttttggatgggatattcgcaaatatctgtattatacactaagctattacaatggtacttaaaataatgtaaatttgaagtcattgttataaaataataaaacggagattacttaagt

SEQ ID NO: 273022 - DNA, 379 bp, Homo Sapiens
atgtctgattctctagacagtcctcgggtttgttaatttattattattttttcctgttctaagaaatgctatttctgcttaagtgctgctggatttggaaatcattttcatgactaaatatttgtctgcctggtgagagcccagcgtagggctgtgctgtccgtagatactcaatactgattaatggatggccgtgcatgtctgtgtgggagtcgtgtgcttaggatctgctcagctctccgaaagcaacagaaatggtgtggggaagaagaaaatcacaggattgtgatccaaccatgatcacggctttctggattggacttcatcttctggagggtccacaaggtccaggtacaggtgcaatgggagtagggagcct

SEQ ID NO: 273023 - DNA, 519 bp, Homo Sapiens
gatgttcctttcattgccaagttacttaaatatcttatcactaggccttccaaactctatggcccagatgtaaaccgtttacccacccctctctctggacctagcccagatcagagatcatagatcgtagatagttgctgcattcaacaactatctcatttgcatctattatcattctataacatcctaacgaaatagaagataaatccaaattagggctagatctcccaacagttataaataagtgccttcaaacatttaaaatgtatatccaaatttacaaatcagataaattaggagaaatttttatccttataagaattacttattttataaaaaattacctcggctctgaagcatttacgctttgagttttcaggtcactaatgaactgccaaagtagcttgcaaggaaggagtggtttatgatctgggccacttcctgctgctaacaactgccctaagatcggaggtcacgagggtgaggaaaggggaacaaagtgggaggaaaaggaaggat

SEQ ID NO: 273024 - DNA, 412 bp, Homo Sapiens
gcacggggctgaaaggaatgtgggtgctccgtctgcagctagtgagctcttggttgcctcactgtttactggaggtgcaaggtgcagaactgtgtgtgtcatatcccatcacttacctgttgattggttggcagagtatgagcgtacacgcatacgcgcatgcacacaaactttcctatttgcttatattacaaaccaaacaaaattaaagaataaaccagaaaccaatgaaaaagggttatagtctatatggggaagatgagatacaaagggtcagatctgaagcctgacttctcttctctgaatgtaccttgttttatagttttttactttgaatcatgtattgctttacataattataaagccaaactaagcccaaatcagaaagctattcttaaaaagcaagaacaaa

SEQ ID NO: 273025 - DNA, 570 bp, Homo Sapiens
  misc_feature (547)..(547): n is a, c, g, or t
gggtctaaaacagttcaattccgtaatgagtgtctgttatgtaactaaaagggaaacacttcaaacctttgttttcacttaacttttcggaaacactcccaagtcagaaactgaagaagaattgtactgtctacccacagcagtcagttaacctttgctaatttctcctacaacttatcctaacaataaaaattggtactgctattagataaacagatgctagggccaggggaatggacagggctgggcttcccgcaaataaggtggcaccacgcaaggcctgcagttcttccaaggtggctaacagcacctgtcatgcaattccctgcactctaagacctcttcagaaaggccttgccggtcctgtgagattacttagtgctactcagggggagcaaggaaggtgcccaagccagaactctctccatcacctccctaaggcgctattgaagataagtgaatttagaggtaacaggtctttattgagaaagaaaagctctttgagggatgatcagttaatacactgctattctttcatctttcttgnggataaatcaaaaaaggaagagt

SEQ ID NO: 273026 - DNA, 463 bp, Homo Sapiens
aggcaagtgaaaatgaatgattgacgtacgttgatttaacaatcttactagattttaattcttaaggatttcaaatgaaaccagaaggtggttatgtaagaggcttaaaatgatcttatgtttaaagagattctgttattagcaccatgaactcgtactatgaaatttttaagccttttatttttctaactatattagtgtaggactggatattaggtgtcatataggaaacacaaaagttattgctgtttgctaaagcaaaatagcagaaaattttgtatatgcaaaactgttgaaggaccatagagaaatgtgtactactgacggggcttttactaggcttcctgcgtgtgtaaaagtcgaggtattgctggcattcagggtgacatgatggtactaaatgttttccattaaagtcttctattttaaaatttagagaaaaataaaatggctttccatcaga

SEQ ID NO: 273027 - DNA, 441 bp, Homo Sapiens
ctctcacatatacacacacactctttctctctcacgttactttcactgtcactttctctctactggataacaggccaaaagtactggcactcatctttcactttcttccagctattcttcctacacatctctcactctcaggtaagttaaacatacaccacttccaaagccccagtctgccacagcacaaagaaaagccatgtctccacaggcagagcatgtacagctgagataagtcctctggggcctcacctttccctttcctctaaggaagagaatttcatctgccccatgagatcgagccctcaggcgttcgggcactcacagatcaacatgttctaaggtagtgcaggggtcagcatcctaaaggcagcaccttggcaagatcccacatgtattttcttctcgaatccctaaaagtttccttgactgttgctcctt

SEQ ID NO: 273028 - DNA, 891 bp, Homo Sapiens
tttgatgaggagatatagcaaagggtcatttgcccctccttcagaaaacttttctccaaatctcctttaaacatactgccttatctttccctccataactccaccagtctctccacatccccctccaaatctctgtatacataggcaagagagggcgattcccagcacaagtctagtcctgggcgaaacttccatctctttcctcgcatacctcctgtctgggtatggggataagggagagtatgggattttgttctccattacatgctttttcaaaatttctgtaatatgtggcacttataaaatcagaacagacaaaatgatatcgggtaaaacatgcaactgagagcaatttgggaaaaatcctcaggccacaaaatgtattactgttaataatgggcttgcagttctgggctctggatatacagtactgtaatttcaggctatgtgtgcttgaatcttaggtcaatgaaccagaaataaacattctggaattccaaatcccctggcagataccaggagtacggtgtgggggttgagtttcacctctgactcagaccccgtgggtgacaagaaggtatcatttggcctgaggagccaccagaggagaaacgagaacccagacgcttgtcttggtggtggctgttggcagacatcactttttgtttgtttcactttagagtgtgcacctacttcctggtgaccaaccaccaaagcgaaggtggaggaaacctttggctctcctccccgccccacttccagagacatgtggggagcacttccaggctcagggacactgtctgagagcacgttcctagaggaaaacagagtttctataacagtccttctcagtcagtgggtcctcagggaaaacaggcatgaagtggcaag

SEQ ID NO: 273029 - DNA, 378 bp, Homo Sapiens
atagttctagtagagtgagtgcagagctgatgacaagttgaaatgagatcaatctatttgtttaaaaatatacaaatattttgcatttaatttcatcggttaaaatgtctaaacattagagtaaacccatttccctatctacatccttactctgaagtccactaatcaaacctactcttccacagctgttctctggtccaccaagggctatgaggctcaccccttggatggtgctcagaaccacaaggaatactgaagaaaccttgcctatgatttcaggtggcatcagacattgggctaattttcaaggtgtctctccttcccaacaggacagtcggagtctggttctttaataaatagctatatgcctcttaaaaa

SEQ ID NO: 273030 - DNA, 593 bp, Homo Sapiens
  misc_feature (463)..(463): n is a, c, g, or t
  misc_feature (469)..(469): n is a, c, g, or t
  misc_feature (487)..(487): n is a, c, g, or t
  misc_feature (523)..(523): n is a, c, g, or t
gagtactttctgtggttagtcaagtcgatatctggaactcactgatatggagtgccaaccctccatgtaacagttgcagtaacttgtttctgtaactggctagtcataaggctgaaataataaatccccttctttccttacacatcccatggttcctcttccctcagccagtagctcagcttctcaggatttatacggggtggggtgtaccaaaacatcattccctaaaggacctcaatcattcccctctttgagactgttatagctgtcccttagaagttagtggcatacatgggaagtgctaaaaatgccctagagaatcctttgggttccagatgcctttctcaccatccactggtgtaggaacgacataaatgcccctttgttgccaggatcacttgcaccagccaaaacagtaacctccagcccgttgggtcagtgctgaaatgactggatagtctcnattccnggtctcaatgggagccantggtgtgtccccagcgggaggactcctcccctgggnactccagagaagcaggaacaatcacccatgagtggggacactccatctacctctgcttgaatccagacgg

SEQ ID NO: 273031 - DNA, 401 bp, Homo Sapiens
cttaaatacttgagatccagtgccaggcaagagggcagaaccaccctgctcagtgggctggcaactccttctgggagggcatcgatatctcttgaccccccgggataaattcttccctggatcctacacaaacctcgtgattgagatgaaacaatttaacatgtgaatccaacagccctgcatttcacagaatgttctgtttcaggcagtgacattctttatggggaactagtatacgcaaagcacgtgcaaggaaagggaagagtttcctaaagtgcattaagatagactgactagtaacaggatgcaaacggccctgacacatacagtagctccataagcagggcaggaggggtggcacgacagaaacctcagccagaccagcaacgttccccgtgttg

SEQ ID NO: 273032 - DNA, 559 bp, Homo Sapiens
actctccttttagtgtgttattttcttggccttcccttttaaaggttaaagtttctaacctaagaattaagtacgcgttcaggaagctgttgtctaggccttccccttgtgaatctgggttcattccaatacggcaagtaagagttggaaactttgagaacacagactataaaggcagcagcccgaacactgtcagactctaattggcgaccctgggaaacagttgccctgctattctttaaagaaagacgtttattctgatgataaaaacagttagccagactgtttttaaagcaactggcgggaagcagaaggttggatccaagcccttgttcagatttggtgcctgataagacaggggtttctctttttgtgacctttattattattattttgttaactgttgtaaccagttagctgttgtgttttaagatagaaaggaacaagactaaaattgtaaatactttgtaaacatcagcatttgtacttgaatagtaggattttaaagggcattgatagcataccaaacaaaaggcaaaataaagtgacctttttatat

SEQ ID NO: 273033 - DNA, 471 bp, Homo Sapiens
ttttctggctgtgttttagagaaagggatttgagctataggctcgcctcctgttctcattctcacaaagctgccttgactgtggcctgcaaccacgagtgccatgctttcaggtcttctgtagcctactggccttcaagacagaggcctgccccagtgtgccacagatccatgtggatggagcctccttcagaggggtcacaggtctttgagactcagcctgggctttaatgtgtaggaaaagccttctggccacccagagagccggagccctgcttgctgtattctctgctcccttcttcctgctgggttttagccataatagggcccggtacgatttgggagtgacatttctgtaaagaagaggaaaaatcatttttctataatttgtaaagttgtgaaagagccactaccacagtttttacattgattattggaacatttcagaataaataaagatattttcttaatg

SEQ ID NO: 273034 - DNA, 452 bp, Homo Sapiens
cacaactgcctcaaaaccatctgagagacctaaaaccacacacagaccagatgcacctcaaattcagcctggttcaaaaccaccaaaacaattacttcctaaaccccaaaccacagcagaaccagacatgccaccaactaaatccgtctctgagcctgttccatttgaaactgaagctccctcaatgaccatagttcccaccacagacattgagcctgtaactgtgagaactgaggctacagtgacaacattagctccaaaaacatcgcaacgaacaagaacacgtcgtccacgtcccaaacataaaaccacgccacgcccagagacactgcagaccaaactagactttggacctattactcctgggacatcttcagctccaacaacaacaacaaaaagaacccgtcgtccacatcccaaacctaaaaccacgccgagccctatgcagtctc

SEQ ID NO: 273035 - DNA, 835 bp, Homo Sapiens
taaaggcctagggtttagtggaatgggttgaagtgtgctggttattggcaggactccatagcgtgttatccactgagtcatttttgtctccagaggtctagcacctccaggagggctcaaagcatggaatgaccagctcctatattcatttcttggacaagccttttaaaactaattttgttggggattccctgtagggctgctgcacgttgctgggggtcaacccactagacactcccacttagcccctagtaatccaggggagcctttcagctgggagaagcaaaatgccctttagggagctgaggaaactcattctctcatttatctatgaaaatgagtttcagttcctcacgcaaatgcccagagaagccaatcaagattaattttgagagaaaaggcaatggagaagactctgtagaatgcacctctgaattagaattaggatcctaaacaacttcctaggtggaaaaaacaaaacagtgaagactgcttcctgtagactgtcctcagtcagctttaactttgtagctctcatccgccagtacacacatcaaggtaaaatcctctcacagtacaaggtaatctctgctactcacaaaagccaaagaggtgaggtaatgtaatacaggaaagcagaactttagacctaagaagaatctgcccatgactcttgaaactccacaaagaaaacagaacacccccaaatggggtgagtggtgcctttgttctgtgttctttaaggggtttgagtcatctctagatttttcttcgtactgagtatggcaaagtggggaaggaggaatagggtagagaaaagtaaatgaaagaacaa

SEQ ID NO: 273036 - DNA, 824 bp, Homo Sapiens
  misc_feature (54)..(88): n is a, c, g, or t
tttctttgagacagggtcttgctctgttacccaggctggaagacttcatctcannnnnnnnnnnnnnnnnnnnnnnnnnnnnnnnnnnggaacatatggatatcacaaaatacatagtccctagtacagtcaactggcctattgtgaccttcattaaaatatttgtctttaaggtcttacaattcttcttggggccacactcagtctcactattccttactgtcaggatcccaaaggactccaagcagccaaagcttcccaccacaattctatccccaccatgcctgtcatctttccgagacaatgctcctatattctacaccccttctaatcacagccagtgcataaaaacttaactctcctggccaggcgcggtggctcacactgtgctctatacatgcttctgctctttttacctcattctttcaattaactattatcttcattgtttaaaactcagcccaagtatcatgtataagtaaccacctctatagcctcaaacctgtgtaaaccctgtgattatctctaatttagctcttaaattgtattaaataatctgtttctttctctttaattgcactagactgtaagagtcttgaaggtagatgctaatccataattctagtaacctggcacacgagttaactcaatctttgttgaactaagccacaatttttctaatctctctcaaaaaggccatataattggggtgaaggagaccgtatcactgaaacataaacaatcttcacatcaatacttaattcttgcctacaaaaatgggcttataaaaaaaactaaaagttttcctcataagatttccttcc

SEQ ID NO: 273037 - DNA, 440 bp, Homo Sapiens
cacatgctcaatggtatattgcagggaggagaggagtagatttagatttgagtaaatgccaatcactttacacatgaaggtgggtgggactttccttccattcatcccttgctctcttggatctgaactcttctggagcctcagctcaggatagctgctggccactcctgtcctgtggattgtgcaggtggcctttcctcccaaaagaaaaggcatcaggctccccaagccccacagctctcctttccaccaaagccaggtttcctggtaaggtcactcgaagataagggatggggatgggggctgactgacaaaaaattttagccccaggtctcagtacctggctggggagggggatatttttccttccttaagtagttttacattgccacagtgtgtatgtgttcactatataaaatgttcctctgctctttgaaagt

SEQ ID NO: 273038 - DNA, 428 bp, Homo Sapiens
gagagcgtttcaaccgtggcatttgctctctgcattccagttagcaaatggggtaaggcgttaggaatttatcaccaaatggaaagaacataatgtgagctgaagcccttgggactgcttccagaggtcctggtgtggcgttcctcccagcaaggccaggtccatccctgtggagagaagcagctgcctagacttgggcttaatgggggagcttctgccctgttgagagcatagcctgggttttcatcttttatgtttcttcagtgactatctacaggcaccatgacagtgttcccaacaaggcagaaatcagcctggtctctccttccctgctcctggttgactgcccgtgacatgacaaaacattggcagtggtggcgcagagatgcaactcgagtgtgaataaagtttagaagcgtttgcttttg

SEQ ID NO: 273039 - DNA, 778 bp, Homo Sapiens
cttacataaaacacagagaagcaatttcagaaagatggcatgtgccaaaaaccacagatattggaatcaatccagacatcgtatcttttaacgagagaatggggtgacatttctccaccaaataaagttccttataaactaagtttcctaactttacgttcagggtgaatcacttgcaatgaagaaacagcaactgtaagaaggaaaaatgggtcttcttcgataagccggacagttcacagaagggggtgggtggggtgggcaggatccaggtgggaaacctaatcttcaaaacagattccttcttttggccagaaaagctcaggtcaaggaactgaagagctggcttcttccttcctcacagtaactgccttgatgactggcagtgtggcccagacagagcacattccatagggctggacagcaggcgtggggccagcaaccgttaaacacacttttgtatcctccactaaaaagaatgtctggaaccaacagcatgtgccttgttctaagaacagatttctcctccagctatttctccagcttacagaagaagtgtttatgcagtgtgcacctacctacactacggttactttatagctgggtgcctcagtgtgagatacttaagaatatccatatttttaaaaagcttggagaatggcatgcttccaacatcagcatgaacctagaccctaaattaagttagcacacatattaagagatacacacaaacttcaagaaaaaacgaaaatcaagtctacacagagtttaaaggtgc

SEQ ID NO: 273040 - DNA, 558 bp, Homo Sapiens
acagtgatagaagaaaagagtcttgtggataccgtatatgcattaaaggatgaagttcaagaattaagacaggacaccaaaaagatgaagaaatctctagaggaagaacagagagcccgcaaagacctggagaagctggtgaggaaagtcctgaagaacatgaatgatcctgcctgggatgagaccaatctataagggacgtcctcagttctttctgttgaagaccagttctgaggtgaagctgggcacccctgacccaagtcggggtgcactcaggaccacagggcagggctgggtggggcgccaccttgctctctgtatatagaaaagctggagcttattctgcgaatggagacgatcaaaccatgactgatgaatccagacaggagggattgactctgaggacctgagctacatcaatccactctgtgaacatctcagttacctcattctgcaataagttcagtgactgactaaaagtcttgtttttccagactttgaattgaatatataaatattatatatacatgtttcttgtaaatatcccattttgaatgc

SEQ ID NO: 273041 - DNA, 273 bp, Homo Sapiens
cctaccagactgtggcctggcgccggccgcgctcaccaggattgtgggcggcagcgcagcgggccgtggggagtggccgtggcaggtagagcctgtggctgcggcgccgggaacaccgttgcggggccgtgctggtggcagagaggtggctgctgtcggcggcgcactgcttcgacgtgtgagttccaaacgctccaaatgcccctacatgtctctgtagctcacccggaaccgaactgttgcccgaaaacgcaccctgaccccctccaccct

SEQ ID NO: 273042 - DNA, 446 bp, Homo Sapiens
  misc_feature (30)..(30): n is a, c, g, or t
  misc_feature (269)..(269): n is a, c, g, or t
aaggtaggttattacaaagcccaaggcgtnatgaacaggccaaagggtaggcacatggacatacagggcaagagcagacaggtatctcttagggtaactcccatagctggatctgtatggccagttgactaagtcacggttttacaggactgttagaaatcaagtgaagtctgtatactagattctattggaagaaaatggtcaaaattaaagtccaaaaaaggattttggaaggaaacctataatgtagcatgtaatgccaatggcangcaaatactcctagataaactgttagagctggatggaatctcagagtcatgttcgaacccaacctgctgttttactgttaaagacacaagaccagacagaaagtgacatgtcccagttcacacagctactgcggcaagtggttgagacttgccttcagcatcctaatgccccagtca

SEQ ID NO: 273043 - DNA, 470 bp, Homo Sapiens
caaaagaatagaaattataagtactgaattattctagttcatatagactgaattattacagttaaaatattatctgttccctttgtgaaaacaagcaatccctgctagccagcccggtggatgtgctcggcccacgtacgctcagcactgcattccggccagtgtttgtgctgtggactgtccaagggcattgttgtctactgccagaacacagggagggtgacaactgggatagagaggaccatggatgagggaaagattaatttgaaagaggggatctgagaaagtaattgtccagtaatagggaaaggaggatgctttgctagccagaagttagaattaagtgcttctcttgcctaataaataatctgttgactgtaggtgctcacagcgtctcacagaaagaggatagtccagcacatctgggctggctggctctgatagcagtatcttcgtcctcattcacaaaa

SEQ ID NO: 273044 - DNA, 210 bp, Homo Sapiens
gccgtagtactttctacctgagggaacctaaatagagtcattgtgtggccatttatggttgccactgttcacataaatatgacactgcacccagacagaaaattccagcctctctgagacactttctctaatatctcacagatatcaataaagggcccactgaagaaatggaatggctggggagcagagtaggtcagggttgaagctcat

SEQ ID NO: 273045 - DNA, 396 bp, Homo Sapiens
aatcagtgttatgtatacacatggtaagtaactccatggtatagaaaaactgatgatggaattcaataggtgcactctgcctttccattcccaagcccacgctctagagcaagcctggtatagcttttgttttcagttcttctgagggttaaataaaacgagtaggtagttttgtgaattaatattgccttataattttaagtatagtacatgacccaggtggagtgctttagatacagatgtatgagtgattagttgcaggaaacacaaactactgtagctagccacatttaaaaggactgtaaaacagggaactggatgcttgcaatattgtcacaagggctaggagtgggttccatactgggtctccagaattaactcccagaaaaacactgc

SEQ ID NO: 273046 - DNA, 523 bp, Homo Sapiens
cacgaagaaccgtaccagaaccactccggccgattcgtctgcactgtacccagctactactacttcatcttccaggtgctgtcctagtgggaaatctgcctgtccatcgtctcctcctcaaggggccaggtccgacgctccctgggcttctgtgacaccaccaacaaggggctcttccaggtggtgtcagggggcatggtgcttcagctgcagcagggtgaccaggtctgggttgaaaaagaccccaaaaagggtcacatttaccagggctctgaggccgacagcgtcttcagcggcttcctcatcttcccatctgcctgagccagggaaggaccccctcccccacccacctctctggcttccattccgcctgtaaaatgggggcgctattgcttcagctgctgaagggagggggctgctctgagagccccaggactggctgccccgtgacacatgctctaagaagctcgtttcttagacctcttcctggaataaacatctgtgtccggtctgcttgaaaaac

SEQ ID NO: 273047 - DNA, 463 bp, Homo Sapiens
ttaataacttgcacacttaacaatattttttatcttcttgggacaacattcttttctccacaaaaacccaattaaggacgttgtgccagtttactcctacttccttcctgttcactgagcttaaagtgggtataggcgagaatgccaaataatgtacataaaatgccaaggcctgattaatggacagtggatccttaaataaaacatatcctccgaataaagtaatgcagaacttgaagtgtccgaacatgttataggtgacaggtgaagtgttcccaatgatccaataaattgataagttcaccatgaaagctattactccagatagcagcaccataagcaaagctgaaactgaccagggaccaaatattcctccttctccaaacactggctcaaagaagggcacagcaaccagcaacatggcagatgacatcggagcctggtagtacagcagctgcattga

SEQ ID NO: 273048 - DNA, 400 bp, Homo Sapiens
  misc_feature (339)..(339): n is a, c, g, or t
ataatcaagtaaaagtgttattataaagacagatacatggggaccatgttgaaaatgatccagttatttgaaatcagggctgtttctctctctcctattgcagcaatgccatatacgtgtttatctttttcaggtggaaatgaccatctggtcaaagtttgggattataatgagggtgaagtgactcacgttggggtgggacacagtggcaacatcacacgcatccgcataagtccaggaaatcaatatattgttagtgtaagtgccgatggagccattttgcgatggaagtacccatatacctcctgaagctgatgagatgtctctgagccttgggtntgcacgcagtcctgttgaagactgagtttagataactccaacactagtcttcatttctcaa

SEQ ID NO: 273049 - DNA, 439 bp, Homo Sapiens
  misc_feature (248)..(256): n is a, c, g, or t
  misc_feature (428)..(428): n is a, c, g, or t
tcttctaaaagtgaaactcggcttcataaattatttaagcctctctgctggatccaccctttggagaaaaagacagaagggaaaatactcccaaagcccaaaacgcttctgatgcttataactgggctctacaatttggttgtctgaaagctgagactaagcttgagagagaagcacgtttaggagctccacagcataggaattctgcaggatccctattcgttcttttcccggttgtaaagagctcnnnnnnnnncccaaagagcacaagagcaaaaaacttaagtgcggaagtcacaaaagcagggaaaactacagcatggccctgagaagaggaactaggtcaagctgctctccctcagagagaggtagtgcctgttcccaggacagctcaggcttcatgacacacagagacagaagcaggctgngagcatggatg

SEQ ID NO: 273050 - DNA, 186 bp, Homo Sapiens
cttcacccctgaatttccagagcacttcatctgctccttcatcacaagtccagttttctgccactagtctgaatttcatgagaagatgccgatttggttcctgtgggtcctcagcactattcagtacagtgcttgatgcacagcaggcactcagaaaatactggaggaaataaaacaccaaagata

SEQ ID NO: 273051 - DNA, 178 bp, Homo Sapiens
gtaaaactggaggtttttgtatttttctttattcatgagctttgtagattagaatggtaatgatgctcatcattttgaatgttgaaatgtgtttgtgactttagctaaatataagtattccatagtactgtgaaatctatgtagttaatctcaataaagaaatcattttggataattt

SEQ ID NO: 273052 - DNA, 406 bp, Homo Sapiens
ttaaggtacttagtaaaacactttacttataattacagaattttaacatgcaagtttcattaacattacctttgcagattgaagaaaaagaatattagtagttactattaatcttaggcaaaagccatttctttgcaagtcttaatgtccagcttaaaccaaaattacatgataaattagattacattaggtggggcacatggctacttagcaactgatggatggtggaaatgccttttggtttcttgtttgtttatttcagtgtttctcattgaaatattaagtcacatctacatatatatatatgatgaacttgacattctcgtcagtgagctccgtgatccacgcggtaggctagttggcatacggcgttgcgccccggtgccaccagcctccatgtcagctc

SEQ ID NO: 273053 - DNA, 424 bp, Homo Sapiens
tcacctcgggcagaataactttgcagaagcccacaggttcttcacagagatcttaaggatggatccaagaaacgcagtggccaacaacaacgctgccgtgtgtctgctctacctgggcaagctcaaggactcactgcggcagctggaggccatggtccagcaggaccccaggcactacctgcacgagagcgtgctcttcaacctgaccaccatgtacgagctggagtctcacggagcatgcagaagaaacaggccctgctggacgtgtcgccggcaaggagggggacagcttcaacacacagtgcctcaagctggcctagctgcctccaacacactacgtcagaaggaccggggtctttgaaactgtgtcttgaagctaatgtattaatgtgacatggaggaactcaataaaactcctgcttca

SEQ ID NO: 273054 - DNA, 426 bp, Homo Sapiens
tctctacttctcccttgagttctattgaattcagtgtggtattcttattccggaatactttctagctgtatttttatggggggagtgatttcggggggctcttcattccaccaccttgccgactgcaaatggtatttaaaataaaacgataccgaactttattcataagcatcgcataaatcaacctacactgagatacatttcccatgtatcagattggtaaaaattcaaaagatcaacaacacatcctattagcaaggttgtggagaaacagccactctcctacattgctgatgggaaagcacagtggttccaccttgtggagggggatttaccaatatctaataaatatacatattcatttactctttgtcccagcagccccaattttagtaatttaccccaaaaatataccttaacaagtac

SEQ ID NO: 273055 - DNA, 428 bp, Homo Sapiens
attgatttaaaccggaaacgagtattcccaggaatcttttctgagccaagaaggctcacatctagattgttaagattcatatgaaaagcccgagcgaaggcgtcccgggggtgtgattgagctcaccttccacacgcacccgtggtgacagcagccgagtggtgtctggtgtgtggaccgaggtacaaagtgggccctgaccgagagaagggcttcttgggaattattcacctgagtcagttgtccttcaccaccttgagctggccccacttcctgtcccccccatccgtgtctgctcctggagttggaaaggaaataataagacagaggattctgggaaaggtggagggtctgttttttccttcaggctccaaaacagctcttcaggcatgtctatgttgatgccaagaagctgccagaaggaaaag

SEQ ID NO: 273056 - DNA, 476 bp, Homo Sapiens
tgggagccagccaagctacattccctgcagacagtcctgctgtctccctgggagcagagcgatccttggggctgggcttattgtccccgaaggtgggctgtccagatgaacgtggagacgatgcccaccacctttgggtatttccgaatgtgggagcccatgagagcagcaggcaccaaactagtaaggaggcaggcagggtggcaggcctgcggcgagaacgccctgggtggggcctgcagaaactggagctctctccttcgaactcatttagaggtgcaggcaggggtcagggagtagaccaggggccgaggtgcccggaggccagccatgtagggccgtgaggctggtgaggtttgagagtcagggaccctgaccttcacgccctttctcagggccctgggagggaccccagaaatgtacttgcagagtcatgtgacataatttacataccttaaataaatacacatatctct

SEQ ID NO: 273057 - DNA, 807 bp, Homo Sapiens
aaatccagccagcacccaagacagaggcatgctcttttctacagcctcctctcagaggagctgcctccccacctgccacatcacccagaagcattgctaggcgcagccccgctccaggggaggggactccgtaggggtgtgcatccctggggccatctcagagctgccaggcagacactgtgatgaggagaatgcagaaggagcagagagtgtcttctggcttcagccccctccagccaggaggaagaggtcagagaccccacacagtccctgtggactccaggtctcacacctgacttagaaaaaagagaaattcttgggccacaccaggggcttcttgtgatttgcttcttcctgctggggcctgagtccctctgaagtgttctgtgagttgtggctgtgttcacgtctctccgtcagccagactgtgggtgccgtgtccctgagcctgggcctccctccggccttttgcgatctgtgcattccctccagacggcagctcctcactcccagggcccctctactggggcaccagcaaggagggaggcagaggggccaggcactgagtaggggaggggctggcagggaccctctacctggccccttgggaaggacacagacccagatggagcctgtcccctcgacacctggcctgggcccctccccagctctgctggaataaatcctcctgtaacaacctcccgctgctgtcccagcgtctggagaatgaacacagctccccataactttccaggcgctatccgatgggacagtttgtaataaaattgcttctaaaaacataaaaaa

SEQ ID NO: 273058 - DNA, 390 bp, Homo Sapiens
acggtgccatctcggggcaggactctactggaactcaccaggatgagacaccctacccaccgtgggggctccgacccatttgtcagcatcccttcgaggcctgagcaggagccagtggcagacagtttccagggctcatctgttctctccttatctgagactgccaaggcccctctccagaatggcctctccataccgctgtcctcgtcagagagctccagcacccgggctgtctccaccagacgtctctgctctgctcgacatctccctgcccggccaacctgaggatgcgctgtcacaggcgagcctgccacacacattagcgactccatcattgagatcgccatcagctccggtcagtacggtgaaggagtccctctttccccagca

SEQ ID NO: 273059 - DNA, 438 bp, Homo Sapiens
gttccccctctgttcctcacaataagtttctaatattttctgatgtgcgaatggccgtttgcccagggtatgcttagtgttctccacacatctgtgggcttctcactaattcttgggagtaaggtccagagagagagagggaagacactgtgtcagcagtactggggtggggaggtccgtcccactgtctgtcaaaagcacccagaacaccgagagagttctgagtttgggccaatcagctgagaatcaggcaggcttcactctagtactgcctaggaccttctcacctttttcttggatgagctgaatctcttgggggaaaactctaaactggagaagaatctgattgggagtactctgataaggatccaattaaaaagaaaacatggaaacatgccatcatttttgtttatttgttgattgtaaatccattttccc

SEQ ID NO: 273060 - DNA, 492 bp, Homo Sapiens
aaacctatgtgtgcaaatgtgtgccaccgtgctttccgctgggctgctggcctgcgccatcatgccctcacccacaccgaccgccaccccttcttttgccgcctctgcaactacaaggccaagcaaaagttccaggtggtcaagcacgtacgcaggcaccaccctgaccaagccgacccaaaccagggtgtgggcaaagaccccaccacccccacagtgcacctgcatgatgtgcagctggaggatcccagccctcctgctcctgccgctccccacactggacctgagggctgaaagcctgccccacctcctgtataggaagagggtatggtctgagatgtgcagactgggaccagcgctagcctgaggagctcagagcctaaggaaagactggcttttggggtacaagggtgactagaaccttcctgggactctggctatagtactttgaaattatcacccatataaaagagggacatggactataacgtt

SEQ ID NO: 273061 - DNA, 667 bp, Homo Sapiens
  misc_feature (216)..(244): n is a, c, g, or t
ctggaggtgagaaaacagagcagcgtatggcaaaatagtctaagaacaagtagtaaaagcatcagcatcaaaaactccaggctataaaagactaggctcagaaagtgcagttttccacccacagctggggtgcttccaatagcatccttgagacagactccgctctagtacctccagcgaggagttcactactgcaacaagcagcccattcttggnnnnnnnnnnnnnnnnnnnnnnnnnnnnncttatacatcaagttctcactcctttatatttgatgacatgcacgttcagaactgctgaatatttccccttttatccatgccttcactgctcaatcacctttatacagtttctttacggcagcagtgaaagaagtgactcagaagacccgtctttgaaaaaacaaactataaaatgtatccactctgaccaaagcaaaaaaagacatattccttcccctctccacacagaaaaattcgggatattgagatctccctaaaggaggtcctaaaaagtcagtatatgttggggtaagaagagaagatgcacgccctaagtagagataaaaagagccagattttaaaactctttgttccctaactccttgtatgtaatgctcttattgaaaatgttaaccgattattttgaatgattatttttttgg

SEQ ID NO: 273062 - DNA, 743 bp, Homo Sapiens
ctaatatataaagtaggcaccatctcatgaatcaaagaggggattcctagagccactgaggatgtctttagaagccagtggtgctgatcccacagctactctcctgtggacagtggaagtgctccccaaagtacattcttaggggaaatggggctgccgccatgaggaggtctcaatagagattagagatggtctttgtgctgtgagagagacctcacatttccaaatgccaagtcctttcttcctcagtcaaatgtaccccctagaacatagatacctacttagctgtagatttttgaggggatacagagctgaatccataagatagtggattattcagataagaatttctgtagatagagagtttccaatcaattatgtaccccaacaatgtgaggtcaactacttagactacctcttagcttctacatttagatgtttcaaagtctgttctgatccttaaatttgacacttctctttaatataaacaaagcccttttagtattctttgggattagcttaccacttaataaattccttccaacactatcttctgtgagtcaacaaacagcttcctcctgtgatttgggcctggctaacaacaagttagacttcagacgaataattactaggctgaggcattttccaggtggtacattcccactttgaggaaacttggtcattttacttttgcatttaagatgtcctttggctgaaaataaactgtcagtgtttgaaatgtc

SEQ ID NO: 273063 - DNA, 620 bp, Homo Sapiens
  misc_feature (29)..(29): n is a, c, g, or t
  misc_feature (73)..(73): n is a, c, g, or t
  misc_feature (91)..(91): n is a, c, g, or t
  misc_feature (129)..(129): n is a, c, g, or t
  misc_feature (201)..(202): n is a, c, g, or t
  misc_feature (270)..(270): n is a, c, g, or t
  misc_feature (297)..(297): n is a, c, g, or t
agcaccccttctttgagcgttgtgaaagnagccaaaccctgaaacttcaccccccgccagctgttccgggtgncagtgtgacagtgctggnctgctgaacgagtgcccctaagcacccatcgtgtacgnccactgaccaagaatgcactgttgagggacccttatgcgctgcggtcagtgcggcacctcatcgacaactgnncttccggctctacgggcactgggtaaagaaaggtgaacagcagaaccgggcggctctctttcacgccnacccgcctgggccttttcccatcatgnggccctgaagaggagggagactctgctgctataactgaggatgaggccgtgcttgtgctgggctaggacctcaaccccagggattcccaggaagcagaactctccagaagaagggttttgatcattccagctcctctgggctcgcgctcaggcccaataatgatcctgctaccctcttgaagaccagcccggtacctctctcccaactggccaggactctgagatcagagctggggtggaagggacccattctgaaccccacgcctggcccggtcagtgctgcatcactgcatatgaaataaaatcctctacacgccagggaa

SEQ ID NO: 273064 - DNA, 976 bp, Homo Sapiens
cctatctggaatttggatgtgatggctggagctccaacagccacattgggccataaggtaactttgaaactggaagccatgttctgaggatggtggaacagaaagaggaaaggatccttgatccttgaagtccatggagccaccataccaatgctgaattacttcggtgtgagaataaacctctactgcataaacttatttgggttttctgctgcatgcaatttgacttggcttgaaagagtggtggcaccatgtgaccattaggagaggagtcaagagaaggaggggctcatgagacggcttccctgggactatgcacactgctggggaggccatttcctggataccagaggacaagttctcaaaacttctcttgggaaggatgatatactaaatcatgatgtaggggacaagcctcctatccttaacattatttaacttccactaatcaattacgaaccatctcatttggcttcttcctcttctccctctctgcttgctcccctttctcagccctaggtgactggcacatgactatacatggctaaaccttacaaggaataggaagcaaacatcttaggacttaccttctttcttccctcccatcatgatgaagttttccctgtagccctcttggggacctggatacagaaatagctcagacacaggagcctgctgagattatgacttatgggaggcagatttctctcatcattattttgtttaaggccaaaaggattccaaacaaaattcctgagcccatctaaatccaaatcagagtggtggtccagggccaatgggagaatggtctctcttgcccagttagtagatgtaagcaagcaagactgttgaagccgagggaccactgtggcatggccaagccatggggagaaaaagatgggtgaaaggaaggaactccctaagggaatggcaagtcaagactgaagatggacagctgctgtcttccttgaaaatt

SEQ ID NO: 273065 - DNA, 620 bp, Homo Sapiens
ttttttaaaaaagagtttatttgagcaaagactgatttatgaattgggcagcatcctgaagcagtagaggttcagagagctccacccaacaatgcaggcaggcagtatttacagaaagaggaagtgacacccagaaacagcttgattggttacagcttagcaattgtctttaatgggcatggtctgatcacttgacagcctgtggttgcctgaagatcagctggtatggctggctgagatggagctacctgttgcaagaatatactcctaagttaggttgcagtttgattactgagtttttggtacctcttagattttgtacctgggacaggttcctcacctcactcaccctggccctgttcctgagacaaggaatagctccttttaagatgctgattatcatgcttctgccttgctgggcacacccacactggttgtaatactcaccatctcttcccattttcacatctggactcttcttctcatgcccctcaacccttaatccctccctttctttgtactcttgcttctcttctgtccaatctttgtgtccatctcccaaggccatctcccatggtatattccccacctccccacgccagccctatgcagtctcaaaa

SEQ ID NO: 273066 - DNA, 815 bp, Homo Sapiens
ttatctacaaagagccaaatattagctcttagtagctattctttatccatgcctgattagggtcagtattatttttggctgtggttcagaaagaagagtcctgccaagcgttggcaaactctctatctgtcgagtttccaaagctttacacgttagagaaattgctgtgaatccagaatttgtttgttttcctccctccagcaaagtgaaatgttcatcccaagagtcctcaaaatctcagaggttacagggtatttttcttcctcagagagcttctgttttatcagcacctcccccacaccagggtcaaagctcaaaaaagttggagcagcccctgggaactgcagtggctgaggacattccagcccctgggctggcctttcttctgatctttggctgcagggcccactcttttggaacctcccacccctagaggtggttccagtgtggtggggaaaggtgtgcttctttactcatttttttaagagccatagccagagtgcttcattctgcaaggacgtgcacatgcacatgcacacagagccttgagggcagggccaagagtgaatttggaattttccaacctgatacccattcccaaaagtaggagcttctctctagtcattttatcctctgagaaactgtcagttctcctcccacaaggctcccagacagccacgggtgaccagggtctccaatcaccccttagagatgcctttgactggctgggcgcagtgactcatgactgtaatcctagcactttgggtggtcaaggtgggagggttgcttgcaacatggcaagaccccgtctctac

SEQ ID NO: 273067 - DNA, 552 bp, Homo Sapiens
tacaggcatgggccactgtgccagcctacttatttatttgtattgctggggagagtgtgagtgcagttccccacatatgaagaaatcgcaggggtcagcacatctggagtgcaatggacgaaccttgccctgggaaaaccacctttgtgatcttggtattttccctgacaggtaaatacgttttgcctgtttaaagtggctgatgacagccccactgtgatggctgtggcagcaaggacaggaaacgctgttgggtaatggggcgcaccgtgtaaagcaggtccttgcctcattccaaccagaaagccctggtgacggggatcttgagagagcatctcctaacggaaggctcccaggaagccagtggagagtcgcctgaagcgggcagtgaaactgctgctggcacctgccagctcctgggccaaactccaagctcccgggcccgccttctccatctgcacgctagcaaagcagcttgtccactgtaacaagtaagagcaacctcagggcagctggcagtccgtcaccctctgagaaattcctcagcctttc

SEQ ID NO: 273068 - DNA, 593 bp, Homo Sapiens
  misc_feature (218)..(218): n is a, c, g, or t
  misc_feature (264)..(264): n is a, c, g, or t
tcctgttgtgcagactcctgtccccttggtttctgtgtttgtctctctgccatcttaggttgccatgagccatggtgtcaacatgcttagccccctctgtaactgcctccctttagttcaatggacagacctcccaaggcaaaaactaccttctgacttgggttgaggctgggttcccctctattgttcccctatcataagagctaggccaagcctantgggaccttgagtcatgcaggatgggatctgtggtcaaaggacagncgaggagctgtgggcgcagggcatgccgccactgccctacatcttctctcttccccatcttgcattggaggtcccagaaaacaattagcttctggcaaagggggtacccacttctttccctgttgactttgctgtttcccaggctcctttttgtgtttttataactgtcaccagttagccactgtttaaattgtatatattgttctgaggcgcctggcctgtcccttcagtgagccatgcccacccttgtgttgtagtgagaagctgttgtcacgactaaccttctgtctctgaaattgtttgtttcaaataaagagttaaaattgtca

SEQ ID NO: 273069 - DNA, 406 bp, Homo Sapiens
tatatactgtagtcacattcagctataaaaaggaataaagtatcgatgcatgccacaacatgggtgaacctagaaaatactgatctaaatgcaagaagccaggcacaaaaggccacatagtatatgttcccatttatgtgaaatgtgcagaataataataaaaatgtatagaatagcaaatctgtagggacagacatgaggtgagtggttgccagaagtggaaatgggagttaactataaattgcacagggtaccttacagagatgatggaaatgtcctaaaactagattatggcaatagttgactacgtgatcagtttattaaaaatcgttgatgtgtgtgtgtaaaatgggtggattttatggtttataaattataccttaataaaggttaacaaaaaaatgtg

SEQ ID NO: 273070 - DNA, 450 bp, Homo Sapiens
atcaaatggcatgcagatctgataaagttcctgccagtcccagtgaagagtcctgtagcagagagcctgttagaggagcactccattgggtgtaaatggcccaggtcctgtactactgccttgctcagttactgtctgggcaagagtgtgaccttgagaagagtgtgaccttggcttgcaagctgaagaggctaacagctggaggttgtctgttccccacagccctgacagatgggcagtgactcttctcttaaaagcaggtctgagctgtacctctccatccatgccacagacgtcttttagtacattgattagtgttggttaattgttttatgtttttaggtcttactcagtaactacagtaaaaccttaagagtcaggaccattaaaaaaactcattctgcaaagcagcgcagtagatttcctattaggttataggttgaataggag

SEQ ID NO: 273071 - DNA, 501 bp, Homo Sapiens
tcacagggagcctgtgtttgttggaggtgttccagaatctctactgacaccacgcttggcccccagcaaacccttcacaggctgcatacgccactttgtgattgatggacacccagtgagcttcagtaaagcagccctggtcagcggcgccgtaagcatcaactcctgtccagcagcctgacatgacagagcacagctgcccaaatacaaagttctttagagcactggaagaaacacaaagccagccaggaggaacagtaactcttctttcgggtggaagctttcatcgagttgaacaggacttaaacgaatcatcagggaccggatatttcttatttctcatttggattcttaaccttgaatccaaagtgtctgcaatggacaacaattgaaggagtggcaaacttacttgtattgagagcacacgcaattcctactggtgaaattactgtttctgtttctaataaaatagaagggattccaaataaacacttgcacaca

SEQ ID NO: 273072 - DNA, 751 bp, Homo Sapiens
tttaattctacgacttcctctgccactcctcaggctttcgactcctcctctgccgtggtcttcatatttgtgagcacagcagtagtagtgttggtgatcttgaccatgacagtactggggcttgtcaagctctgctttcacgaaagcccctcttcccagccaaggaaggagtctatgggcccgccgggcctgtgatgagtgatcctgagcccgctgctttgggctccagttttgcacattgcacaaacaatggggtgaaagtcggggactgtgatctgcgggacagagcagagggtgccttgctggcggagtcccctcttggctctagtgatgcatagggaaacaggggacatgggcactcctgtgaacagtttttcacttttgatgaaacggggaaccaagaggaacttacttgtgtaactgacaatttctgcagaaatcccccttcctctaaattccctttactccactgaggagctaaatcagaactgcacactccttccctgatgatagaggaagtggaagtgcctttaggatggtgatactgggggaccgggtagtgctggggagagatattttcttatgtttattcggagaatttggagaagtgattgaacttttcaagacattggaaacaaatagaacacaatataatttacattaaaaaataatttctaccaaaatggaaaggaaatgttctatgttgttcaggctaggagtatattggttcgaaatcccagggaaaaaaatc

SEQ ID NO: 273073 - DNA, 476 bp, Homo Sapiens
tctagtaaacatttgaaagtgaagtttagcatgtatgttctcttatgtaggaaggggaaataaggccatgagattgcatgagttttctttccaagtttgtgcagatctgcacaaatgattgaaatatttgcaacctgtagagcagcagggtatttatttggcagcaaacagtattgatggattcggggaatgccatttgacagttacaggctcccgtgaggcggtgacagctcctccgagccagggatggagctggggattgagtgacacaagactctttgggtatctctcaaacaatataaatcaccagcaaaatctcactcctacaaggagaacctgcagggagctccgtgggaggcactgctgtttactctcctcattccccactgcaaccacgcaattaaaaccaaggaatggaatctgatgtctaccgcagcggttttttccatctccattccttctgcattgggaggctt

SEQ ID NO: 273074 - DNA, 467 bp, Homo Sapiens
tgggcaacaggcaatatagaactgtgatctcagataaaccaaaacaaattgaacgctaaaatcaccgcagctttctacctggcaatttccagacagctgcacacacaaaaaagtgggaatcaatatatagtctgccattcttactgattccagaactctttaaaggattacaacaaaatctgtcacttaacaatatagtatcacatattcagcatccaattaaaatgagtggacatgagaagaagcaggaaaatgagaccataaccagtagaaacagagaagctgaagtatcagtagtataagcagactaggaattttaaaacacttcttataaatgttataaatgtgctcaaatattttaaaaataacatataatgagataaatggacagtatcaagaagaatcaaatggaacctccacatatgaaaaatatagtatctgaaattaaatgcagatttaaccctgag

SEQ ID NO: 273075 - DNA, 589 bp, Homo Sapiens
agggtcaatcagaaaagagcagattctttccctgtgattcacatattttgcagaagcttctggcttggaatttctatcgcaagtttcaaatctcacagcagaaatgtttacacattgcagtttggctgaattcagaggaagctttcctggatctctgatgagaatgagaattgtggtcatgggaagcatatggccatgacattcatcccttactcaagataagctgaggagcaaggtcaacacattgcctcagacctcaaatgaagactggaacatatcaccctaaccgcatgggactaggatggggtgagcactggggcaggagcagtggtgtgtgatggaggggtggaggaatctttctccactccaagatgggatcagaaatgtaggaggaagccaaaaagagcaagctcaccactcttggcatattttttccaccttgacattgatagctagacctcactcctggttgggaaattttctaagctaccaagaataggaaaaaaatcaaccataactaaagccctttgagatattcttccttgtcttcatgaacaggacaatattaaaacattacagaaagtttgga

SEQ ID NO: 273076 - DNA, 527 bp, Homo Sapiens
  misc_feature (418)..(445): n is a, c, g, or t
cctcttccccctaatccaggcccctcagggacaattttgaagctgcctgaatggaaaaaaacggagaaaaccctaaaagtcatctcagaatgaggtaactgccccctccccagggctcctcccttgaaaccgccaattcttacagcctacacagatggcacatgacctgcaatctcttctgttgactgtgtacattggttggcctttattgagcacctgccgtatgcagaggctaccagccatcccatgcccttgggcagtgggaatgccagcctgttacagtgatttcatttccatgagctcatcccaaactttcaattctgccatatccttttcaaactgtccctgatccttcccatcccactcctggcaagtccggctcctgtgacagggacactgagagcctaagcaaatgatnnnnnnnnnnnnnnnnnnnnnnnnnnnncagagacagagagaacaagaacatgcacaaccctggggcacaggtctcctctccaacacaccagcaagatctattattgatg

SEQ ID NO: 273077 - DNA, 535 bp, Homo Sapiens
cttcctgaagagctgggaacacaagggcttcaagaagagctgcgacaatgtagtggcaggttgggcctataagcccaccttgctgggacagggtgtgcgggcaacgaccatcattgtactcaaaggatggagcacgaagcagcaggaggcagagagaggctcacctcagcgggggcaggggcaagcggtgcgtcccagtggtagccttggggagttggcagcacattgggaacacgggggcttcccagagcgcctttcctcccaccacacctatccttctagccctcttctctccgacacccttttcccagcctgaatgtagaccactgtcccttgtcttggaggtgggaaaaacaaattactgtagtaacaggaaacatgtcctcttctaatgtaaccttagagggggaatcaagcccagtgttttccaacgcatttttagcagcagaatcatgttccaaaaaataataataataatcacatgaaattgtaagctgcaaaaaaattaaaactaggactattgtggcttcaaaaa

SEQ ID NO: 273078 - DNA, 764 bp, Homo Sapiens
atgtgacctcagatgataaacccttggagggcaaggacagcaagtttttcatcattcaatttccagtgcaatatgcagcccggtttcctgccccaagctcctaagctagccctcgtcacaccactagcccagctcctatgggggcgtgggtttccttgactctcccagtgcccagaagtgggcctggcatataagatgtgtaagaccatagtccgcaaaatgggatgtatggacacaaaagacatttttttcctatgttctctttccaacaatccatcagcctgagaaggcacacgctcctgtgaggggatgcagcctctcttcttctatccccaccactgcccccctctcacttcacaaaggcagcctcctctcccccgctcccatctggaaggctaccaggcagcactgccccaggggcactgaacaaggggacaatttaaaacattgacactggtgctgacacagtgcctagctctgaggtcaggatgagaaagactccacaagtcagacattttctgattctctgctttcaacaaaacacaaggaggtcctagtggaagtgtcatctgatagattgcggaaagtcatatctgacgacaaattatacttttggcattattatggaaagaattcaaataactgagtgacactgtaacaaaactatcattcccatctacttactcacgtaaacaaggtttctgggcacttacgtgtttaaaaaaaccatacaatttatttccaataaatgttaagcaaaaatg

SEQ ID NO: 273079 - DNA, 394 bp, Homo Sapiens
acttacatgtgttttttaattctcatgcagtgctcataattaggagatactacatattcaccctcacattatgcttattaagaaccaagctcagagggtagaaaagtgccaacttcattttccataaacttcccatacatatattaagccactgttcttctaattatatacttatggtacattcttctgtaaaatgtataactgtagtcacataaccattgttatgacaaggcggcaacatcatttcagattacaacaaatgagaccaaaagttgaagagaccacagcatataaaagtcatgagaacaccacacacatttcaatattttccactttccagtcaaaaaaacatgcacaaagttttcttagcagatagttgtcagaagtgcataaa

SEQ ID NO: 273080 - DNA, 500 bp, Homo Sapiens
  misc_feature (32)..(32): n is a, c, g, or t
  misc_feature (82)..(82): n is a, c, g, or t
  misc_feature (97)..(97): n is a, c, g, or t
  misc_feature (111)..(111): n is a, c, g, or t
  misc_feature (121)..(121): n is a, c, g, or t
  misc_feature (127)..(127): n is a, c, g, or t
  misc_feature (170)..(170): n is a, c, g, or t
ccccccatcagactctggacacccaggaatcnaaggagaaaggacttttttggtgactcaatcaccagtgtctggtttgggncccaatctacaatgnatccacaaggacanaaccatgttnccaagnaaaatcaacaatagttgctgcaggcggaactgagaccagcctntctgggcgatgaaggacaatggtggtagggccacttagagagcagtagggcacaggctggtgcagcctacatggcacaggatatttccctgcaccagtttcccacctgtcacttgcagcatcagagggtgttgcattaactccattttctccagcagccataaaatgaatggcgtttctctccatatttgcccagaagaggcagttatgattccacttctcctacatttaattatttttaattgagaacaactcatgatcacaattcataaaatccatattttaagacaatagttcttcatgtcacaaacacaatctattctacatgagg

SEQ ID NO: 273081 - DNA, 464 bp, Homo Sapiens
  misc_feature (149)..(285): n is a, c, g, or t
ttggagttcaactggggaaatatgaatgggttgtagattggatattattggacagtggtaatttcttaggtgtgatgatggcaccgtggttgcaaatggggaagtccacactcctgaaagatacctgctgacgtacttaacggtgggcnnnnnnnnnnnnnnnnnnnnnnnnnnnnnnnnnnnnnnnnnnnnnnnnnnnnnnnnnnnnnnnnnnnnnnnnnnnnnnnnnnnnnnnnnnnnnnnnnnnnnnnnnnnnnnnnnnnnnnnnnnnnnnnnnnnnnnnnnctaaagagttaggaggaaacacaccacgtgggtgagttgtgacttattctttgtgtctgtggggccagcctttgctatgtttcccaacctgctccatgatgaaagtgatgcactggtgatagagagaggggcctgctacagtgctcctgatctgcatggcacacatagaaaatcatatt

SEQ ID NO: 273082 - DNA, 376 bp, Homo Sapiens
ttatctttgttacacatttgagtttgcaggcctaaggttactcccgctacactatcatctgtaaccataacgcactcaacattttaagctaactataaggattgttgcttcactcaaagatcctgaggttttattcactaacatttttatttggtgactatagttgacaagaacaaagctgtggggaaccaacaaacactgcaatgcctggcattgtcacctcactagattgtgagttcctctgggacagggtccgtacattttcttagaatccctcacttagccattagcctgcacagtgcttgtacttagtaagtgctcagtaaatgtttgtggaatgaatgcatgatgaacaaaatatatactgaggactctt

SEQ ID NO: 273083 - DNA, 466 bp, Homo Sapiens
ttcagattgggacagtgcaactttaagtaatgagtcactcttggacactgtgtctagatttgttcttgcagctcttctgaaacacacaaatttacttagtcaagcatgtggagaaagccggcaagtaacttaaaactatcctcagacaaatatttgctctcatgatgtcagaaattaggtaacttttctattttggttcttcatttagatatcaacctggtaaacacttatcagaagtgtaccgttgtgtatacaaagttcgaagtcgtttacttgcttgcaagaaccttgaacttattcaaacaaggtcatcatcacgggacagatgggtaaagtttgaaatcaattaatttctatgtttttctgcaagctgtgagagctagctctaaattggtttatgtgagaaaaaaatgtgccttggttattgcatatgttcaatacatgttgagtagttcttttcctagca

SEQ ID NO: 273084 - DNA, 502 bp, Homo Sapiens
cagagcgccagccctgatcgcagccatgcaggaccctgcctatcttgctgctgcttctcgccggagccagttacttcttgtggagacaacagaaggaaataactgctctgtccagtgagatagaaagtgagcaagagatgaaagaaatgggatatgctgcaacagagcgggaaataagcctaagagagagcctccaggaggaactcagtaagttaccattcccccagagatccagacatgtcttcctatcctcgctttgagcaccttgatgactcttccctgttcattccattgcagagaggaaaaaaatccagtacttgactcgtgagtggctttgacattttctctgaattcaaatctgttactctctctctgcttcattattttccagcccataagtcatagcccagggttgaaaagtggtcttggatccctttacccagaaaaagaaaacaagtgtggctctttggagaaaccacccagtgctttttctctctagaaa

SEQ ID NO: 273085 - DNA, 536 bp, Homo Sapiens
taaaatgtcaagcagagccataacattgtacagagtgtagcacgtgtgataaaacctagcctgtaaatcctgatacctcgaaccattactcctgtgaatactttagccctgggatttgggtttttctgttccggtgttgtgtctgttgccggcaatggacacaccatatctgctgctggcccaaggaacgtcattaatttttctttccaaattaagtattatgtgctagtcagtgtatagtaaagcacttctcttttttattactaaaaagctggcattagatttgcattataaatacctctctaggaactttatactccttttccttcttcaacaggtattgcccttaaatcttatcttttggccttgaaagtttatagctattgtttttcagttgttcgttgttttgttttgtttcactttagttctgtagtacctgcccattaatatttttgctttgattctagcaatgtgtatgtatctgtataaaaaataaaataatgaaagcaacctaaaaataggatgcaccgaatagc

SEQ ID NO: 273086 - DNA, 881 bp, Homo Sapiens
  misc_feature (373)..(382): n is a, c, g, or t
aaaattactctagctgtgatgtggtatatggtaagctatgttgggaaaagtgaggcaactgaacacaattatagggctggagggcttggagggatgggatagtacaaacccctcatttaacaaagcccaagaggggctaagaacctcatggtattagtgtcatagctattagtggtgcagcctggtcttgaaccctgttctctatctcccagtctagttctctttattcattttctctgccaaatatgtataaaattattgctttagaacccagcagaaatcctgtctgtgcccagcccctagggcatcacagtcaccagaaagcatgctgagatgaccagacgttttggcaaaggtttgcatcatcttaggnnnnnnnnnnaagccccactggggagatactgaaaggaaatatgtaagaaatgcactgaccatcacttggtccttctttccctgtatcccaaatgaagcttttaatcaagaaatcctttcagccaacatgtgcctaggattgtcagagccttgtcccagcccctggggcagatactgtaactctgcctgctacaggagaagttatgtgtgtggaggaactaattttgcatgtgatgcaatgtaagaaggcccttcttgtcccaagacccagggtatgctggctcctgtggacagttggaagtttgcttagggaaactttaagcaaggagactttagaaacccccaggatgactcatagcaaaacagatatttttcttctacttttagaattttaaagagcattttacaaaagcaaaactcaaagtgtagacatgtcattggcagtgtgataagagtattttcactattctctaccctaaacactactgccagatttttaaaatcttctt

SEQ ID NO: 273087 - DNA, 437 bp, Homo Sapiens
ccggcttggtggagccatctaaattccgttaggccatttgccaatgctgctattaggggcgaaatgtcatgcgcttgatctaaatgtacttaggagaattctcaggacctgatgaattattattcggaattttatggcctcacaggttgcaggcttcataccaactgcagctaatgagctatgggccccgagaaacactgaggacacacggcgttctgcacacagagtgggctgtttctgtctgttctccccctgcacccttctcagatgcaatctcaagtcataggagaacttgtgcaaatgtttctcctggatggtttcctttagagcatgtgtcctataacttgaaatggttgtctgagcagaatgtttttagaagttagatttttttaggggggaaacaggaaccaaagcaaagccaatagagatcttgaaaa

SEQ ID NO: 273088 - DNA, 505 bp, Homo Sapiens
  misc_feature (392)..(406): n is a, c, g, or t
cccttgaagagtgcagactcccacctggcctgggcgtctgctccgcagcagaacacgaagtctgcatctcccaaggggcggccagggggcggaccagggaaaggtagtcctctgcattttgccgtgtgctggaatggtgtagagtgacgatgaggtggcggtaaggggcctgacggctcacgcgaacgcctaagtgaccagaacgactggtgtgaagccgtgatctgactctgtggagcctgggactggtttcagcgagagcctctgtactgctctgtagtctctgctaggacatggacgaaaagggacgcagccgggagagcgacctgcccaggtgggggctggggggacgtaagggaagaattataattatctggctgtgtttttgtttnnnnnnnnnnnnnnnctggtgtaaatctccatagacttcctatcctcgctcccttcacccacccacgcgctcccaagatgcaataagcaaataaaaagactaataacgctgtaa

SEQ ID NO: 273089 - DNA, 260 bp, Homo Sapiens
aagcattatgagtgctatttaagtcacttacggatgatgctatctagggagaacacataaacacagaagagttccaagaatcaaaccctaaggaactccaacatttggagggtggatccagaaagagaaggcaggagagaggagagaaagccagtgcctgaggggagccaggaaggactcacaagacaaacacagcctagaactgtgcttacattgtgcttggaaaaagaaatagacaccagatccctgcttcctgtttc

SEQ ID NO: 273090 - DNA, 285 bp, Homo Sapiens
tataaaataaaaagcagccttttgaataaatatcgccttaaagacctgaaatgtttcactcatctgccatgtagcatctcaagattagagatttacaaagttagaattgatttcgcagtcatctgggctttatctccttattggctttgtcatcctctttctccatttttaaaattttaatttaaattaacaagactacccatttattaagtaacaatgaaagacaactctaccaatgtaactggtatgaataaatccactagaaagataaagttagattagaat

SEQ ID NO: 273091 - DNA, 442 bp, Homo Sapiens
ttggctgtgtgtaatgagaccattgccccacccagggaaggatgtgtgcttctcagacgacagcagggcactttccctggtgtccctggtgcctctttgctggaatgctcccctgggtggaagccccgggctcacagggtgagaacccatatgctctgaatgtggaggtgaaagtgcgtcccattccaaagggtctgtaaggtgatgattcatccagccactccttcagcagacatttaatgagcatcatctgtatgccagacactgtgccaggtgctgggactacaaataagactagtttcttgacccactcagagattaggatttggaattaactgtgaaggacatgatggagatagaatgtgtttctgccagggcattgatttagaaaacctttttttgaatataactgtgcaccctgcatagaaattggagaaaaaaa

SEQ ID NO: 273092 - DNA, 353 bp, Homo Sapiens
gtcaccggaccccttggttgatgcactgcagcatggtggctttctgagtcctgttggccaccaagtgtcagcctcagcactcccgggactattgccaagaaggggcaagggatgagtcaagaaggtgagacccttcccggtgggcacgtgggccaggctgtgtgagatgttggatgtttggtactgtccatgtctgggtgtgtgcctattacctcagcatttctcacaaagtgtactatgtagcatgttttgtgtatataaaagggagggtttttttaaaaatatattcccagattatccttgtaatgacacgaatctgcaataaaagccatcagtgctatttggatgtatct

SEQ ID NO: 273093 - DNA, 484 bp, Homo Sapiens
cggcccagaatttcgcaacgaggttcagtgcgcactggagaagtacgtgagaagcccagtaccccaaaccagcccagccgttttggcaaactgctgctgcgactgccctctctgcgcaccgtgtcctcctccgtcatcgagcagctcttcttcgtccgtttggtagtaaaacccccatcgaaactctcatccgcgatatgttactgtctgggagcagcttcaactggccttacatgtccatccagtgctcctagaccttgggcgcttcccacctgccccgtccccctagagactcagaggacccacctgggccaaggactccaaagccgcggggacaccgggaagtgcagcgggccaggcaggctgggtgggagggaggagggccgagacaggagcagcccacccagcagaaatacaatccgagctacaaagcatgggaaaaagagactcttttaggatcagatctgtgagcacgttggcgagg

SEQ ID NO: 273094 - DNA, 428 bp, Homo Sapiens
agagctatacatctctttctgtaccatctaaacgtctctgttgtgctgcaccccagatggtgtctcagatgctttggggaatctttaacagctgaatttgagtcagtcctcttagctgcacctccagcctctgcagatcccccctcatttcccatggatggtgggaccccattattctctcatctcggcattcagggaacactttccttagcggcccctggtcacatgtcatcgggctgggcaggaagcgtccctgggtgcgtgctccacttctccctctcaggaagcccagtttcatccttagtaccccccctcgtgcccgctgtcggctggttatagcacttccactgctactgtcagataggaagtgatcgaagcagggggcaaagagaaagcccatatttgttctaagcagaaaagcaggaaaa

SEQ ID NO: 273095 - DNA, 444 bp, Homo Sapiens
gctaaggcctccgcttccctcctgaggtctcattaggaaaccctcaccgctattttcaacatttcctcaatcaagtgcctttaaatagagctgcacaaacagattggcggcaaaagcgtagatcttgtcacgattgagaccaatccagtatttcagccttgtttgctttgcaattacgggttggcttgtggctacggtgccaccggggcaaatctgcagccgctcgctttctcctctgcgctccgggcgggtggaggaagcgacccgcggagtcactgcagggaggagagggggacgcgcgcggggggaggcggcggagggcggaggagactcgcttgcaccccagggccgcgggcacgcagagctgtgttgaaggacatacttttcaggttcctgacagtcactgactatacgcaataataaagtgcgtgattcgcgtgtgga

SEQ ID NO: 273096 - DNA, 388 bp, Homo Sapiens
  misc_feature (156)..(156): n is a, c, g, or t
tgttctaaaagtgctcctctcctgcagggtcccagggctggtggttgctttgggtctacagctacgtcttacccacctcctgcctcaacagcctgtgtggtgcaaagccggtgtggggctggggaacgcaggcgttctccaggagggggacccggnctctccttctgcaatgcaggcgaaggcctagatgccagtgtgacctcccacaaggcgtggcttccagactccccggccggaagtgatgcttttttgccttgggccctgggtttgaagcagcctggctttctcttggtaagtggctggtgtcttagcagctgcaatctgagctcagccacctacacaccaccgtggccgacactttcattaaaaagtttcctgagacgaaaaa

SEQ ID NO: 273097 - DNA, 1085 bp, Homo Sapiens
ctgtaactaatcccgtttaagtatgaaattgtatttcctatattaaatgcctacacccacactgtgaataaattttatttatattaatatgtaaagttgtaatgtgagaaatgagcttacgaggttgcatttatgacaagattctgttcactgaagagaaagagtacctcaagtatttctatttaccattaaaagtagaactgatttcaaagatctatattcaagagaacagagaaagaaattttaagataatttctgcaagttaaggttatttgtttttaaatcttaccccaaataatgcaaatgatgccgtgttttcaaattttattttcagtaaatcatcaataactatttccaacaagttatcctgtaaatttcacaattatttgttattattttgcaagaaggtaatatgtgaatttcagatttttatgcacagttggattgtagttgagaaaataaccttaagatcccaaacttcttaatgttgtgactcatacacactcatgtcagaagtgacccaccactgagtctgatggtaccacacttgtctatttcctgtccaacaaggtggattcacccacttggttattaaggaaatgtcaaattgctatatgagtttttaaatgcttactctcaatgtctgtgatatggtttggctggtcaccacccaaatctcatcttgaattcccatgtgttgtgggaggcacccagtgagaggtaattgcatcatggggcaggtctttcccgagctgttcttgtgatagtgagtaagtctcatgaggtttaatgtgtattataaggggaaattttcatacacaaactctctctgcctgctgccatccatgtaagacatgacttgctcctccttgccttccaccatgattgtgagacttccccagccacatggaactgtaagtccaattaaacctctttcttttgtaaattgcccagtctctggtttgtctttatcatacaggtagggggccttaggtaggaaaaagcaatacagtaaataatcttcctcttagtggtaagccacataaaatggagaaacccttttgccgaaaacagctacaaatgcc

SEQ ID NO: 273098 - DNA, 441 bp, Homo Sapiens
tgcttcagattcctggagtagctggactgaaggcagagatgaggggcttgttgacctgggagctctttatagctaatgctgcttggcttcagttcctgaggcctgccgccgtagggcctgcctgcaaacgcactgtcaccaccccccgccgctgcagccccccaggagttacgcttttgcagaagacccagctgcctaagtaaaattaaacaccctcaagctgtttgaggctcttaaaaacattttctcagcactgaacttctctgaagatctgagactattagcacaaaaccaagagttctctctaaactgcttttctctttcccctgaatgcaaatgaacttcccctgctggtttccattcatctgacaggtcataattgtgacgttggtaaaatagagaaagttcccttttgaaaattgagctatgagaacttttttt

SEQ ID NO: 273099 - DNA, 369 bp, Homo Sapiens
ctccttccatcccactccacctctgttaaccatctgtggtagattagattattattcagccaatattcactccctcccccagcctggccaagggaggaatacacctctctccagtgatgttataggcttggctctgtagtttgcttggctgcatggtggttgcagtctactacccactcctaagtctttgggcatgatcatgtgacttgctttggtcaatgcaatcttagcagatgtggcataaccagacatttgaactacgcttatgcagttggccttgacttcttgtacttctgctggtgccttgagaaaagcttatcatggatagccactgccccttcagcctgggccccagaataaggcatacaa

SEQ ID NO: 273100 - DNA, 389 bp, Homo Sapiens
gcaagcaaaactgggaaagaatacaaagaagagactcaatgagcaggttgtccccctctgatcatttctccatgtgtacctaagacactgcgatgtcacttggaaagacggcaggcagacaaccagttctgggtactcccccggaaccctaccctatcctgctgacccccaggccacacatgtacagggacagagtaggctgacttgtcatcagcccgttttctcagcaaaacacactggttgtgagcattcagactttccagaatttggactaagatgtgaagatgtatttgtgctgagcatgcatctttgcagagctcagggctgagtcagggcagaatgaatgaaggagggcaagggttcttctaaacctctccatgctccttgct

SEQ ID NO: 273101 - DNA, 383 bp, Homo Sapiens
agtgcagaggcagacaggtgtatggagtcacctgtaaattgattcaagtgagccaggaaagcagcaaaggaaagagaaacctgagtgacgacgtggtggaggaacagggctggaaagaggctgctggctgtctggcttcgcagctctggcctcctaatcagcctcgctcttgtctctggtgttctctggctcttgtccatctgtctgtgtttctttttgccagctattgactaatctttgctgaagctgagctagaattctggtgtttataagcaggtaactagctgagcactagttgataactttggagttagtggataaccacagggctgggctactaagctttttcagttgccaaataaataaataaataaataaacacc

SEQ ID NO: 273102 - DNA, 352 bp, Homo Sapiens
tgtaatttattgtggttttgggcaaaaagacttagaaataataaaactctgatatcttagtttacaaatatttaaattttcacattaaagagccttaaaagtttatttgaagcacgtaacagtatttttctttaccctgatctgtgaccaaccctatacattcttattcctagaaggaagactcttataggcactatcacagtgatatagagattcatgatgcagactgtaccgaaccaccttacagtatgctgtttgttcattagacacttgtcagcagaaatggttgaagaaacattataaaacacacatgggtcctttcaacaaatgatgtcagttcaacatctacatg

SEQ ID NO: 273103 - DNA, 437 bp, Homo Sapiens
  misc_feature (120)..(120): n is a, c, g, or t
  misc_feature (173)..(173): n is a, c, g, or t
  misc_feature (395)..(395): n is a, c, g, or t
  misc_feature (399)..(399): n is a, c, g, or t
tagacatatcccgctccaactctgcccccgcggcttggaaattacagcgaacaaaacccccagccctgcgctgagcgcagtctgcaagcgccggctgcacgcttaattggttcatccgcnagacaaaacccttccaactccgcagggtcccgggcgcccctcgatcgtccccntactcaaccgccccgccactggccttggagaagagcatttaatggctgcagctctgaggcgcgagatccaggggcaaaagggggaccgggcccctgacaaggaagcgaccctggctaccctgcactctcttggacactcctttcaacggccccttagctgggcgagttagaccccgtctgcggggaaccaggctccccgtagcccctgccccgggctccctntccnggccgccgcatatttaaagagcccaaaaaggaccaggc

SEQ ID NO: 273104 - DNA, 807 bp, Homo Sapiens
gaatatttccgtcaaacttgtcccctgggtttaaccgggatcttaaacccgggccccgggtattttgccaccgaccgggttgaaaataagtgcgtccccaaggccaccgggagatattacggctacactggggcttttcgggtgcctggctgagaatgctggagacgttgcattgttgaaagatgtcactgtcttgcgaaacactgatggaaataacaatgaggcatgggctaaggatttgaagctggcagactttccgctgctgtgcctccatggcaaacggaagcctgtgactgaggctagaagctgccatcttgccatgcccccgaatcatgccgtggtgtctcggatggataaggtggaacgcctgaaacaggtgctgctccaccaacaggctaaatttgggagaaatggatctgactgcccggacaagttttgcttattccagtctgaaaccaaaaaccttctgttcaatgacaacactgagtgtctggccagactccatggcaaaacaacatatgaaaaatatttgggaccacagtatgtcgcaggcattactaatctgaaaaagtgctcaacctcccccctcctggaagcctgtgaattcctcaggaagtaaaaccgaagaagatggcccagctccccaagaaagcctcagccattcactgcccccagctcttctccccaggtgtgttgggccttggcctcccctgctgaaggtggggattgcccatccatctgcttacaattccctgctgtcgtcttagcaagaagtaaaatgagaaattttgttgatattctctcctt

SEQ ID NO: 273105 - DNA, 319 bp, Homo Sapiens
tagtgagccgagatggtgccactttctagcctgggcgaaagagtaacaccgaaaaaagttttcggtggagtgagatgctagggagcaacatttgtcacgtaaatcacatgtgtactctgaggcataaggcctagaaaatgacctgaatttcctaagggtagaattcttcaataagtttggagttgagaagcagaggagctgaagggagagatggagaaggcctttttctttttggcttcattctgcttgttaagcattataaaaacaaaccccaagtaaaggaataaatgtaaatgaaataaaacatttaaaatgagac

SEQ ID NO: 273106 - DNA, 284 bp, Homo Sapiens
  misc_feature (20)..(20): n is a, c, g, or t
  misc_feature (58)..(58): n is a, c, g, or t
atgaacgccccccctggcangggacattgtgagtggacccaagatctccaggatcccnagtttaaaaagaaatggtgtaaaagttcctggtgaatatcgaagaaaggagaacggtgttaatagtcctaggatggatctgactcttgctgaacttcaggaaagggcatctcgccagcagcaacagattgaagcccagcaacaattgctggcaactaaggaacagcgcttaaagtttttgaaacaacaagatcagcgacaactgttgcatgccaagttttttgtgt

SEQ ID NO: 273107 - DNA, 231 bp, Homo Sapiens
gcccgtttaatgaagatactaaaaataatgcactggaaggagtggaagagttggaaaatttgtaaccatcataatacaggtgtaataggtttgggaaagaatcctcaaaaatgttaaagcaagggaggaaagtttgttgagaagcaagatgttcttctctcctgcccgcccccgccgttggttgttggtggtcagaattattgtgtaataaataatagacattttttctta

SEQ ID NO: 273108 - DNA, 907 bp, Homo Sapiens
tagttttaaaaaatcttctctggcttcagagaagattttataaggacttttgtttgggataagctttccagattatccatgtctatttgcatcaaaggggaaagaaatggggcttttggatggctcttccagtgcattcggaacattgcctcttgcctttattcctgcattttatggcaaagcaaaaagaaactcaagttgcaagaacaaaacccagtgactcgttttgatggttcaaaatggtttcctttatggaagtcacttcataaaatgttaagtaaaaagtgggaagtgcttctgtcttctcttttgcatgagttgcttttaggagcaggaagaaggtaggcaaagtaagataaagatgcaacacatttaactacaaaaatcaggttcattttttagtttattagaatttttttgaaatcttaagagggccagcatttctggctacaattttgcacccagaacattgccaaaatgaacattcagtaaatagaaccctgattgaaatttactcctggaagctttcctttgcattttcgggaagtggccacctgccaagcgcaagagttggggggcaggaggggaggactcaaattcagggtgtctggattaaatttcggtgaacatggtgatatctcagtttgaaaactagagggcctatcctgagtatacatcaatgtctctttgatggcctactttcctcagtgaggatctttgggaatacttgagatggaacaacagaaatgtgtgaaaggaagcagaaacttcttgtaaataacgtgacctcccacgacgaactgcctgaggcttcagggttttttcttgcttttaacactcttaaatctcctctgttggttcctaatagatcccagaaaagggaaaaataaagctgcagttaacttaa

SEQ ID NO: 273109 - DNA, 860 bp, Homo Sapiens
ggagctctctgctcttgcagcctgtctctctgtctgcccaagatctctgtgccgttgctccagagctggaggctggggcagtggctcccttctcttggagtgacatccctgcagccttgggtggggtagtagcttggcttgcctctgtcagggtggagcttttgccccacaggtgaactggggcaagagtgagtggggtcctggtgctcctggactgttgtgctaggctggagccttcacttacacatgggttctgggtggaggaaggaagctccagacctctcagctgctcttgcctggaatggagcttctgtacaaggagctgcgggaagagaaatgctggcagaagcctctcctgtggatatactgcagccctgaccaggggctgggggaaggaagtctgtgttcttacaaacccccttccccaagaggagcttccatcaggctgacctgcagcggggcacaggttatagctcaaatgtcaccaactctctcttccttaccaatatttaatagtgtcagtgaacaatgtgcttcatttctcacttgcatatgccttaggacagttcagaagtgttattttaaatattttacagttacgtatttctgtgaaggctgtgctcttatcacactgagtgtactgattgagtcatcacatggagggactacgaaggtagttagctcgttgtgtgtacagtgcatcttccttccaacgtaaaaatattggtaagcggattaagaataaaaattgcgcggcctggggtttgcgggttacggtgatgccatcgtgcgtcggaagcctcctactagggctcgcggtccggtccgtcttgctaagtccgacgccggctagcttttgt

SEQ ID NO: 273110 - DNA, 516 bp, Homo Sapiens
  misc_feature (454)..(474): n is a, c, g, or t
agttatattccttttttatttgttcctttagtttgttttggttcagcagtcagcagttaagtatataacatggcccgcaaggacaatgaatccactcacattgcagaacaattccgaaaatggcaaactactactactactgttcagttttttaaaagttttgaaatgctgcacttacatttaaaaaaacaacaacaacattttttcaacaatttcaacaatgacacaaaaattcacatggaaatggggaagatggtctgttttgacagaaactgacaggaatcaatcaaaacaatcgaattttgaattgagtaaagtgcaatttcattggatagctaaatatctttgtaagatagagattgttgaaaattctatttttgtttttctgtcctttcaccccaggactctaaattattggggtaaaaaacagccttgcaagaaaaaggggagctannnnnnnnnnnnnnnnnnnnnattgttaaacttgtatccctttaaaaactgaaggaaattaat

SEQ ID NO: 273111 - DNA, 415 bp, Homo Sapiens
  misc_feature (265)..(276): n is a, c, g, or t
aatatttcaacatactatcaataactaatagaataagtagataaaatacctttgatttaaaagatttaaacaatataatcagcaaatttgaataggcattatatggaactctatactcccaaacaagaaagaatacttattctttttaaatacaaaagtgaattatttataagtgaataatagtgaaaatacagttattaacacttgaaggaataaagtgagttgcttagagagaaatttatatcccatagagatatagtctctnnnnnnnnnnnnctgccagaatggtagcacacacctgtaattccagctactcaggaagctgaagcgggaagattgcctgaacccaggagttccaggttacagtgacctatgatcatgccacctcctccggcgacagagtgaccttgtctca

SEQ ID NO: 273112 - DNA, 485 bp, Homo Sapiens
aattagggagaccactgtgatggggcaaggaatttggcaagttacgttactaacaaatctttaagctgatgttaacagcggaatctttagaattatttgacaggtttacaatgtttccagacactcaaaaaaccactagtacgttcttatcaggaagtattttacaacgtaataaagtaatgtaagtactgccatcctcagatagctccatgattcattcagcctgacactcagctgtggcaatagtagtggggagcaggaaccagggggagggcccagagaggaagaagatgccactcacagtataattgcactgagaaagctactttcaccagaaatctaagcttctcaaggtcaggagccatcccttattctttcctgaatattcagcagctaggacatgggccaaccagatacaggtatttattcagtgtaaatatttaaaagtcatcccggaatagtccattaacaaatatatgtttcat

SEQ ID NO: 273113 - DNA, 415 bp, Homo Sapiens
aggtaccaaaatggcatatttgacttatgtcaaactaactaaatggagtcaggaggccaggaagaaggagccttcacatatgaatgcctgtaacaggttttattacaagaaattcctgcatgtcttacatgtacccttgtaacagaccttatcatgggaaatttctccaaccagataagctacttgcacaaggacacttgccttgcagtggctgtctccaccactgaactgatgtcagcttctgcaacaagcccctctagccaatggtcttgtttagcttatgtggacttgttttttgtctttaaaagtttcccgttttcccctaaccctcttggatgtacctatagtctgcttatggcaggtttatcctggacttcagtcctctgctattcctgaataaactctttgctttgga

SEQ ID NO: 273114 - DNA, 319 bp, Homo Sapiens
cagcctcccaaaatagctggaactgcagatacaagccaccataccaggcagacatgagttttcttgatcagcaaatgccagtggtgcatctatcatcatgttttggcttcaaaatgagtcttctgagctgaaagggcaagaacttctcccacggtgctacactgaggacccaagaagagtgttagagcctgggaaaagagagggatatttgcttccctttttcttctgtaggaattccattcaaaggaaacaggagcaccaaggagagctatcataaagcatttggatcactcacaacatctgatgagactgtcagcag

SEQ ID NO: 273115 - DNA, 665 bp, Homo Sapiens
aaatagtgtaaacatgccataagtctttatattgttcaaattattaaaatagtaggaaaactgtcatttatgatttcttctgattgttacctcttctatgctttttagtaggcggggccatctttggcccgttttgcatgcactgattctgcctcatcattttggtcatttggagattctgataagctgtctggggctccatagaacagactttacgttctcctcaggcaagcatgatcagtgtctggagccatgcaaagctttgagggagggggagaagcttcaggggcatggaacgttttataaaatttcagttatttggttgggagaactttcaggcaacaaccttttaagcaacaaaacttgtctcaaatttcttttttaaaaatgggatcttgctaaataaaatattgatacattttcctattttggttaacagagtttactaagtcttatcaaaccttttactgccctttcattattatcaccgaagtcagttattctattgtgccagtggatatgaaaggtgtgtatctatggcagggttcttaatctttttctgtgtcatagatgtcttaatgggctggggtagcctgtggactcctcagcataatatttttaaatgcatagaataatagaattacaaagaaaatcaattatattga

SEQ ID NO: 273116 - DNA, 557 bp, Homo Sapiens
  misc_feature (364)..(478): n is a, c, g, or t
ttgctccactccacaaaagctggtggagatgatcatactctggcctgccctccactagatgcttttagataagaacagagagagaatcgtgctgtgtgaatcaccagaatgaaggatgaactgaagtgtctgtgttcgttctctcttcctttgacttcaacaagcaaaacctgcctctcccaagggctgttaagaggaaattataagataaaatcctcaatttcaaatcaatctaaaatcttgtgaaaaaggtacacatttctcacttagaaaagggtattaataactgtaattaaaaattaagtttgaagaactaaaagttgcaaaagataccactaaagggatgcatgcagtggctcacacnnnnnnnnnnnnnnnnnnnnnnnnnnnnnnnnnnnnnnnnnnnnnnnnnnnnnnnnnnnnnnnnnnnnnnnnnnnnnnnnnnnnnnnnnnnnnnnnnnnnnnnnnnnnnnnnnnnttagctgggcatggtggcacatgcttgtgtttggtcccaactactcgaaaagctgaagtgggaagatcgcttgagccca

SEQ ID NO: 273117 - DNA, 430 bp, Homo Sapiens
atgtttgtatttaggaataatcaaaaggtttgaagtaccattgaggcccatttcaaattgtacaagcaatttgtccgtgttcccctcccttatccaaatccacagatacaaaatctaggaaatgtgcaatttgcatcttagaaatagcagcatccccacagcggacctcgtgaggcctggagattcagccccaagagggcaaccccactcctgcctcagcacgaccacagtccaaaccgaagttaagttccatttttttgttaaaacgtttacccagggtaaagaattcccattctacccaaggcttaagtgatagagtatgctgttttctcggtttggtctctcacacctggccatggcaggagatgggaccctcttgcagagtttggctaaagtttcattgtgcctcaaaacaaacaaaaacagggca

SEQ ID NO: 273118 - DNA, 451 bp, Homo Sapiens
agacttgagtgcctgactgggtggttgtgaggatgcaaggagaaaaggctagcaagggcttcctaagtcgggagaccattcctgggagccacgtgactgacccccaccatggctctttccctccaactcgtgctgatagctggccgctgggaggccgtccccagtgagatcctcagaccctgcacagccctgagtggcttcacatctcttggtcagtgtcttcattctccccagtcagggacctgggatgtttgttacttctagaagcccttcctcaccctcataatggaccttagccccttgctggtcccactcacatcccgtctccattgctgtctgagttccaagactgagtttcttcaagcatccacttgtgctaccaggctgagaagttctgaggatgtgaccccatctgggcatcatttaaccaataaaatttctcgaatggacc

SEQ ID NO: 273119 - DNA, 826 bp, Homo Sapiens
caagctttctagaggcaaaactgactgacggcctctcactctcatctcctgtgctcagtgtgacgccaagcccaacctggatttgttctgaatgggggggaagtgaaatgccacaagatcagtagcaagtagcagctgcagcgttttctctcctgggaaccccactgcttagaagcctcctgagtgatgtttgtttaaccaacagctttcaaagtaaacagaagccaatcactccaaagaagttgaaatataacccttacaagaatttggatccaggggtgctggcagaaagaaagtaatttttaaaatgataaagaacccactcccaaataagagtctgccacattgctttaaggagcgcagaattgtcatgaaaatataatttcatcgaaagggctaattacaataagttgacctcgaagaaaatcactcttcgcccacaaagacacacccgcggggatgaggaggttgtcagtgattgaagggacacactactacttgattttatggaagtgggcgaaaacaatcaaagggaagtacattccctgccctggagtagtgaagtgtaggctgggagctcttcgccgccaaccctggctttgcctcaggcaccgaactttccaataccaagatattaacagatggtggtgagcacatggagggctgctacttacataatctagccactccgcccggctgcccagagcccggcgaggaaccggcctagtgccgcgcgcgccttccgaggtgtgcttcctgacataacttgcctttctccaaccccacccatcgttttgagggttagcatttggagaggccgtgattt

SEQ ID NO: 273120 - DNA, 313 bp, Homo Sapiens
ttttttttcccagtccgtttcctgagaatttcccggccgcactcatttgttaaacactttaaatgtcagatttgcccccatcccgcccgcaaaacgtgctttacaacccccccaaacgccacagcacttttttcagaattatcaccagatgtttttctgcctgccgtaacccacgttacagtcgggaaagacgccagccacaagtcccttttttaaaaaatcgcatgtcacctctggctccactcgaaaatggcgccgaaatcgaagaacttcttaaatttcattgcaagctttttgcaaaggtttctgggat

SEQ ID NO: 273121 - DNA, 250 bp, Homo Sapiens
ctcttatgaattctattgagagatattataagtagacattatgtatgtcacttaacataaacagaaacattattttatttgcctccagtctggctaggaaaccagatctggggtaaagtcaatgtacacttcctccttattggaatatttaagttgcatttaaactaaaactagtataatttagtcttttcatgaatgtacatacataaaattatacataaaaatattaaattattcatttcaaagacga

SEQ ID NO: 273122 - DNA, 479 bp, Homo Sapiens
  misc_feature (35)..(35): n is a, c, g, or t
  misc_feature (37)..(37): n is a, c, g, or t
  misc_feature (394)..(439): n is a, c, g, or t
gtcctgactgagctgctgaaacaggaaagaaaganangtgtggacaccacaaaggagagcagcaggaagggctgggagaactcacaagcggaagctatcgggagaccagccagctgccaggacccccaggagcaagaagaagaagaagctgggggccggggaaggtggggaggcctctgtttccccagaaaagacctccacgacttccaaggggaaagcaaagagagacaaagcaagtggtgatgtcaaggagaagaaagggaaggggtctcttggctcccaaggggccaaggacgagccagaagaggagcttcagaaggggatggggacggttgaaggtggagatcaaagcaacccaaagagcaagaaggagaagaagaaatccgacaagagnnnnnnnnnnnnnnnnnnnnnnnnnnnnnnnnnnnnnnnnnnnnnngcctcaaccaaagattctgagtcaccgtcccagaagaaaa

SEQ ID NO: 273123 - DNA, 854 bp, Homo Sapiens
  misc_feature (563)..(563): n is a, c, g, or t
  misc_feature (701)..(701): n is a, c, g, or t
  misc_feature (704)..(704): n is a, c, g, or t
  misc_feature (736)..(736): n is a, c, g, or t
taaagaactctatgaaaggaggcataattcaacagtatttaaaaggtcactttagtttttaatacttaatataatattgaacagttttgaaacttaatacttcatccttaaatactcagtcactacttaatacaactgtttttctccaaaaactgaatgtagagttcatctcgaactcattgtgaatcctgagcttggattctaacacttattcttttagcttttggacttcaggcctattgtttcaacacacttgcgggtgttggtccctggttatcacagctgtgccctagaaccacaagaatttcattttcttgctaagctcttggagatcagtaggggagaagcctttgcttggttttctggctgttagattagcaaaaggccctttggaatttactgacccgtctcccaggcagaagggaaaagtgacaagacaggtacaagcatgtgcgcgcagcaaacactatgaaacttaatggaagaagtgacattcactctgtccctatgtggttcccttagtaatgcctttaactcaggatcagatacaaactgttttacanctgctttgttttaataaaagagcttttatctttcattgtggaacagtgcatcttgaaaacagcatttggccagagggctaggcacggttttaaacttgcatctagagattccttcactacaggcaaccaggactgggnccnccccactccggtgttggccatgagtcgcctcncggcccctctgctgcctatggccagcaacctcggccccagggcttccgcagatcaacactcacagcccctggaaggagtcacactttcatcttctgattttgcaaaggaagacatctt

SEQ ID NO: 273124 - DNA, 419 bp, Homo Sapiens
agctcatactttcctgctgacatatctgatcatctctttcatgcagttgccaatattcataactgaaaataatctggtttatcataagtaaaatgggaaacttgcctctgttttttgcaaggggaggtaaagagtgtttagtaattacctatcttaaatctttctgagttggtagtagattcatgttcaaggaacaggaaaaatggaaaaacataagtttaaatcagttctttttaaataactttttattcttttgtataaataaaatttcacaggcttcaaattctcatgctttacttttaaacccgagattgtttttttcacttatttattcatatcatgccttatggaaatttctttttctgtattttctctctttgctggtattcacctgattaaatattgctctaaaaatcacc

SEQ ID NO: 273125 - DNA, 792 bp, Homo Sapiens
atgccatccctacacgattaatgaaattggtctaatggtagaaatattccgcacaaagctgagggctgtcttttgtatcctgggggccaataccacataacaacattgtagcctcaatcgagtgaaaagaactagaaattcttgtgaacgcctatgataacaaaatggcctcaggcaacatatttggatgtaattttgtgtaagaaatacagactggatgtaccaccaactactacctgtaatgacaggcctgtccaacacatatcccttttccatgactgtggtagccagcatcggaaagaacgctgatttaaagaggtcgcttgggaattttattgacacagtaccatttaatggggaggacaaaatggggcaggggagggagaagtttctgtcgttaaaaacacagatttggaaagactggactctaaagtctgttgattaaagatgagctttgtctacttcaaaagtttgtttgcttacccctccaccctccaattttttaagtgaaaatataactaataacatgtgaaaagaatagaagctaaggtttagataaatattgaccagacctataggaagatggaaccggaatattcccattatgcctgaaatggtttccaaaaaatggtaccccacatacctcagtgagggtaaatattttcctgttgtcaagaatagcattgtaaaagcattttgtaataataaagaatagctttaatgatatgcttgtaactaaaataattttgtaatgtatcaaatacatttaaaacattaaaatataatctctat

SEQ ID NO: 273126 - DNA, 411 bp, Homo Sapiens
caatcctagaagatcatcatgtgcaaactgagaacgaagccgatacagcagcaggcagagtcaggaggagagaaactaagacctgatgatacaactggagccctgcattcaccagtgacctctggactttcccagtatgtgaaccaatccattcctctagtatttaatgtccaatttagctgagagcttttccataagatctcagaggaatgacctggagctgggaggtgaagcaggtgtttttagcagcaaaggtgagctgtccgcatttggagggcccagaaagatggcacccatgcagataaccatccttcttgctaggtgaaaggtggagtgttattttgaggaaacaaacggttacttaagaggccgctgttggtcacagaactggggttggtggagctgctgctc

SEQ ID NO: 273127 - DNA, 654 bp, Homo Sapiens
  misc_feature (470)..(470): n is a, c, g, or t
agttgttttggcagatgcattgtgggcaggaacagcaaatccatatccaacctacaaccagatagctggctgagccccaggagtgttgccatatcaggagctgtagccagattgtccctggcgagtgaaagtccacgttgaccccatgtgtaacctccatccctagccctttattcatgagtccatttggctaagtaaagaggctgactgacatccactaaatgggttattctatccacctcattaaaatcctctgtggaggtcgccctttgataagcactcatgtgggaaataattatcttcacattctgggctgaagtccatccacatacctgtttcctagacctctttgtcaccaacttcctaattatgttcctctcaagtactgaccatccagccaagtcattagccactgctcatgaaaaagtatagatctatacttctaaccaggcaaaatgaacaaccaggcncattactcttatcttcttcccactgggaggatttcccttcaccgccgtccttcagaagcatcccagagtgggattgcagtactgcagctgtccactttcaggtgataccaacagatcatgcagaaccatgagtaaaccaagcccaagagttttcttcttcaggcaacggtcacaggtaattcct

SEQ ID NO: 273128 - DNA, 441 bp, Homo Sapiens
gaacagagcaagagtgttgaactgaagaccaaaatgccctcaaggtgtaaaataatccgaggggaatatttgctgggcgtcaggaaagactcagatgaaatttcaaccctgatggttttcggtgatccaggaagtcagtgagacaatctctctatatgcagagccctttcatgttaattagaatggtatggacaaaccaatgaaaacaagagggaaagtgagaaagatcacccatgattctgtttcactgtttgctttctcctgtcatggttaagagaaatgtgcaattcgatcctcaatcagtgggtggaggataacagggtagattcacttgtgtgcacttgtacagttgtagctgcgagtccagaagtcctctagagcatgtgtactggcactgagttggtgagacagttgtggagtatcccattctgatgagtacag

SEQ ID NO: 273129 - DNA, 712 bp, Homo Sapiens
ttgctggaagcaagagtaatacaggttgaggcggttaatgtatttccaaactctctctggacaagtgagaatgtggctcactggtctgacctgaggcttgggctgagcctatgcagggaggaggactaagcagagttgctctaaaaggaagaattatggacagagctttgcagagaattatttggtcaaattctgcaggggcaagaaggtaaaccacttgattactgggttgctatgtttcatttgaccgttagtctgagctagcagatggtgggtataaactctgaagtcctacacagaaatcccccaactacattccaaattcaggtgacactggagtttacaaaggcacaaaatctcactgaaaattagtgctctggtgcctggtatggttggaaggtgggcacagaattgattcaatcaccaccatgataagatagttatcttcttagggtaggaggaaaggttagagataaaaatctaagataatagtgttccaggaacatttttaatatgaagatagtaaaacttcctgtgaatcacgttcaatgtttttatgatagtcataatgccataaaaagcctttttaaatattatgtcacacaatgaatttttataataatcctgctatcatcatttttaaaatgaagatactgaaatacagcagttcaatgtaattaaagtaatggtaataaaataataaaaacaatgg

SEQ ID NO: 273130 - DNA, 196 bp, Homo Sapiens
cctgtaaattaagtacttaaatgaaatcccaagtcactactccctgggggtcttatttttgttatctcaagacaaaataacactgacctaatttcagcttttaagtggacacccacaaacaccttccaggcagagctattccttggagatgccactctttgaaaagagaaagatgccacattagcttaaaagcacc

SEQ ID NO: 273131 - DNA, 858 bp, Homo Sapiens
attaggtatgaggaagcatctttggtcattcttagttctttgagatatttttcatttaaatgaaaacgtatgcctttttctagatcttgatgcaaacagttgcataaaagtggagcttgtgagtaagaatgcagatagaaaatcatgggaattattcacgtggatgacctgattttattctagtcttacttatgaagtcttcttcctgctccacaacgattgaagagacaggaaacaaacttttaaaattacgtaaataaacgggccaaggggaaatacaagaggacaagcaaagacagacacagctcggcactgcactcatggcttatctcaccatggacgccaaattcaaacctgttggcgactcatcacactggactgacggcacaaaggttcttgggaaatagaatcatgttcagcatcaagtaggaaaaaagtcacaagtacttgcagacaagccaatcaaaattgaaggaaaaatagaatcagcacctagtgtaaattaacttcagaaatatgcagtcaggacttgcttgcggacttgcattctagcttctgagctgaaatttgtgtcattaaactgatatctagatgatgtacatttcttgacttaatacaattcaaaaaaaatgaaacaaattacatgaacacagtggctatcatttcccccttgtgaatggcatagtaccagtctatacaattttggatgttgtctttctgttgactgttagttactttagactacaaatctcagaacatttaaataatgatttgttacattactctaaacctaattattttatattcactcacaccatcccctctgttggttctgaaataaactattcaaaggagtgc

SEQ ID NO: 273132 - DNA, 466 bp, Homo Sapiens
caaaatttaaaatgtcatgcgttcattcttgttgctccctggtatggttttctttttacacttttggaatttgtattgctgcttgtctttggttgttttctcacatccatgtgtagggtggaagtactttgccatctggtcatggggtggggtgacagaattaccttgcaggtacctgtgctccctcccctgaggcatcgcacctgcctgaaaacagctgaggaggccacacatcccatgttctcctggcacaaagccagtgatcttggctcactgcaacctctgcttcccgggttcaagcgattctctgtctcaaaaaagaaagaaagatacacaccaaatcgttaacaatgggcacctctggagaaaagagaagaaattcatgggtagaagatgggagaacttgtactttttcctttataactttttgagaatgaaatgcacttttatacttataaaaattact

SEQ ID NO: 273133 - DNA, 412 bp, Homo Sapiens
acacacttctttggcctaagggcttctctctcaggacctctaatttgaccacaaccaacctggcttcagccacatcagtgggcactggagctggggtgcacatggggcctgctcaccttgctcacacatctccagccagccagggccctgcccagcttcaatttacagacctgactctcctcaccttcccccctgctgtccagagctgaacatagacttgcacttggatgtcacctggagtgtcacatgggagtgttatggcagcatcataccaaggcctactgttgcacatggggccaaaaccagtaaacagccaccttcttggaaagggaatgcaaaggctttgggggtgatggaaaagaccttttacaaatgataccaattaaactgccctggaaagggcataggtggg

SEQ ID NO: 273134 - DNA, 423 bp, Homo Sapiens
agtttgtaagaaaaggggtttaattagctcacaggctatataggaagcgtggcaacatctgcttctagggagtcctcagggaatttttactcatggcagaaggcaaagtgggagcaggcatcttcacgtggccaaagcaggagaaagagagagtggggaggtgctacacacttttaaactaccagatctcacgataactcactgtcatgagaccagcactgaggggacggtgccaaaccattcatgaaggcttcacacccatgatccagtcgcctcccagccggccccacctctaacattggggattacacttcaacgtgagatttggtggggacacagatccaaaccatatcaaaatccaattaaaaatttttttgtttgttttagacacagggtcttgctatattggccaagatggtctca

SEQ ID NO: 273135 - DNA, 682 bp, Homo Sapiens
  misc_feature (212)..(220): n is a, c, g, or t
tctattgctaaatttaatatacatccatttctattgattatcagaggggtctagactcccggccaagagttgcgaaaccagtcattatcccgcaggcaccttcctgctttatctcagaacattcagtcattcattcaaaacaacccaaagcatctgcattcacagagctgccctaacagatgagtttttcttcatctcccaaggtaatgatnnnnnnnnngtgtcagccatgggattttcagtgggaaacgggaaacccaaggcatggtgcattcaatggaaaaattcctcaagctcgtgacctgcataaatctccaaatccttttcaacatcatcctgtttagtgttcggcatgagggtgcctgcagaggaggtgaatccctgcgttttctattctttttttcttccgactggtgtggatcccagacaatttcagggtcctgcagggtttgagaccctctgtgaacactgacccgggaccccgttttgcccatgggaagttgaagccagcgcagcccccggccaggggcactgtctcctcggccccgggatgctggacggaggggacaacgtgcaggggcagctgctgctgggctgtggacctcccggaaccggaggagcccgggaggggctggcccagcagtgagggctccgatgcgcctcaattcatatgctaaggagc

SEQ ID NO: 273136 - DNA, 391 bp, Homo Sapiens
taaacaaatgaaagctgccttccctgcagccctcaggtcacctccagggaggcaggagacacgcggtcacactcagctcgggacctcaggctatgcaactgctccacggctgtgcggtgcgtgttgagcatgcgcctccagtggttggtctcagaggggcctgaagagtactggccaatgacgatcctcccgatgaagtcattgctgctcttcatgttgcggccgaaaactagggagccagagggttgagggcaggagggaggcaagaggaaggaggggaacagaacaggaaggcagggagaagacaagaggccattagtctacacatttgtcaactgcaaacatgggggtcatcgtttagggcacgctgtctttttccttttcttggtga

SEQ ID NO: 273137 - DNA, 389 bp, Homo Sapiens
catatcacacggtcttttaatcggcttcgtaaagccaaagaaaactgcgtacaagaattcctcagccactgcaaatacaacatcgatggagtatgcgtacgtcttccagtaaaaaaggacaatataaataaacatcttcaagaacctctcagggacgtctgcacgtctactgtggggcgcacagcacagatggacgcaggggctggggctccagggcagttgctgcaacacccgccgggtccctaccacactacactcagaaacgtcacacggagttggaaaaaagccacagcttgctcagcttccgacaaagagcggattcacagtccgtttgatctcagagaagtgagtggggcacccacttcatggggccaaccccacttaaaaaa

SEQ ID NO: 273138 - DNA, 457 bp, Homo Sapiens
cctttgtggtatccacaggcttacttgagattaaatgaggctagacacatttgtaaaaggctgcacaacttgtttgaagattacataagcatatgcatagatccacaaagctttcagggaaagtctgttccctatgtagtcaatattttccttttttctatgaatatggagcttgggaatagatgtattaattttgcacccagttccatgttttattccattgaattcgtgaagcttttgttaggctctaagggaaaccaaactggctaggagggatgacaacagaacaatgatgggtacattattattccatgttatttcctcttgttcccacatcactgttacattcctctgattattgcagtctcaaaaaatgtgctgatcactgtgtgtgttaggcaacactgcaagaccgagaagctaatatcgcagatagagtacattatgcatctgatgt

SEQ ID NO: 273139 - DNA, 183 bp, Homo Sapiens
aatcagatgatgatcttcagtagaatttaaggcctaatttgcaaattgaagagcaccaatggagggctctttactggaccatcaaaggttttgtacttaggccagaggactctgtgttttctagtttggtgaagacaaacaactgttaaggcagtgtcatttcactcaacaacttgaaacagg

SEQ ID NO: 273140 - DNA, 468 bp, Homo Sapiens
ccagttcattgaggctttactgtaggcaagctggagaacccccagctctgtgaacatgcagtctgcaatctggataccttttatttaatgtcaagaattccctttgcacggcaaaaaggggtctgaggaaagcggagcagcgtagatgagggcgagggcggaagcaggacgctcgccaaagtggtgccgggtgccggctgcccactgtgatcccggctgggaggaacgccggacccacggcaagggcagggaaagtcatttttgacacaaacaagggtcctggggcataccaccccacccggtgccaggccatgcaagacgctgaaatggagactgtggcccctcgggacgcagcgcccggagctatggagcaggtgcaccaacgtgaaggggaatcctttgggcgcttcccgaggcgcctgcagggtgtggagcacagcagggtctgtatccatgtccgtgagcacg

SEQ ID NO: 273141 - DNA, 726 bp, Homo Sapiens
aataaatagctactgtttatcgagcaccttctgtgctttgggcactctccctacatgattcctaatcttcataataaccctgtgagataactactcttatgactacctcccatttttcagatgagaaaattgaggctctgagaggtgaagtcgttgcccatggccccacagtgagtggcagatctgagactcagcgctagcctttgtgacacataactcgtgaccagcaggtagtgctacccgattgaaaaaatgtgagacttaaagggatgcatgtgtccctatacagtggcaaaaactggtatgacagaagtgatgttttaagctatgttatcctttagttggacatacactggacccacagagctagagtacctggcaggctcttgctggacaatgtttgctgaatcagagaaagtgggctttgttggcatttgcatgtgaaatactgtgcacatacctcaagatctttgctgttccccccctaaagctactagctatgctggaaacagtgaaggggtcagccagacctggggtcaccttgtcctggggtcccaagccaggcctcctgtcaggttcatctgtctctgttccacctgcactcacacccagtcttgctgctgagagatggagcatccacatcctgaatcctgcctccttcccttgacacacttctatggtgggtgcctgcccaactttttcttaataggactaaattccaaatta

SEQ ID NO: 273142 - DNA, 530 bp, Homo Sapiens
aattttagtacgtggtgagagaaagggatccagtttcattcttctgcatatagctagccaggtatcccagcatcatttactgaatggggagttctttcctcatcgcttacttttgccaactttgtcaaagaccagttgcctgtaggcgtgtggctttatttctgggttctctattcggttccattggtctatgtatctgtttttgcactagaatcatgctgttttggttactgtagcctcatattgtagaaaacgaaatactgcatgtttgctgtcacttataagtgtatattcatggagatacagttggcaataatagacaatggggactcctaaaaagggggcaagggttgtaaaactaactattaggtagcttgctcagtaaccagctgatgtgatcaatcataccccaaaccttggcattgcccatattcttatataacaaaactgtacatataccctatgaatctaaaataaaagttgaaattatttttaaaaagtaataaaggttctagctctgtagcaaatag

SEQ ID NO: 273143 - DNA, 356 bp, Homo Sapiens
ttttgtttgaacccagaaatttgtggatagtgttgggaaatatagtgacctgatttatgctctcatagttcttagccatcatagaaacactataaagttaagagggctttatagacacttaggctgctataaaaaattatcccatttttatattcaagtcaatatgttttttcaagtctaaaacagtgtacagtatagaaaagggcaatgaagacagtctcttattttagtgataatcttctgtcctgataacttattaagtggaggggaatgcaagtttttaaaaaatactttgatatttttatttttattgaaaaaaatgttagagacagcatctccctcttgcccaagctcaa

SEQ ID NO: 273144 - DNA, 384 bp, Homo Sapiens
gagaccaggcccccttcttgcctggtgctgtccctgctgtgggagacgtctggccacaggcagtgccccacccagtcttggagagagatgaatgttaaatcagaggttcaaatgctagagaactgagaagccctggtggcaggcatggtctggagtgctgggcagatgctgtttctgggcccgtctgcctggtgggggtgctgtcctcccccctgtgcacacgtgagcatcgtgcatgtggcccctctgcagtgcaggagtcactgattgatgggtgtgccgaccagcagcttcacaaatgtctgctgcaaggggaattgtcagagtccaatgtgtgcctctacagtaatgtgggaaacaaacaccattcttgaaataataaaa

SEQ ID NO: 273145 - DNA, 679 bp, Homo Sapiens
  misc_feature (459)..(467): n is a, c, g, or t
aaaccttcaccatttatccaaggctttgagataaagggaagtctcttcgaggtagagatgaaaggcgttcaagggaaagctgcaaagggtggcctggaggcggggatggagggtagaatggagaaagatctgacagacggaatctaagaactgctgaaaagccctgtctcgccctgatctgtgcctggggagcagagaaatctcattcctctcccagctccaggaagatggagtgtgcacgaatcacccacaaggaaggaaatgaaaaggttacaccaagaattgtcgatattataaatccctgtagtctcgcagcctctctaaatgttttgatagcagaatttgatggattgtaaatcagagcaggcttatcttaaacatttgatagtgccttatttatttatgtatgtgacacataaaaccagaattgattgtttcttctttctgtcttagcaagannnnnnnnnctgctttcagaaacacatcactcttctctaagccctggttttccgtgtttgtgggcgtgtaggtgtgtgtgcttgtacatggtggcagctgttacgattctttccacacggagaaagaatactttgcctgggagaagattataacatcaggaattaacagaaaaaataagaaagccgctatgcttcaaaatatgtcttaatcttattgcttt

SEQ ID NO: 273146 - DNA, 204 bp, Homo Sapiens
cctaaccctagcccattgtaatgccagggatgtcttgacctatgtatttccttcatcccaagatgctgaacatgtcaagacattcggtgagccagagtcaaaaggcattgaggagtcgttctgtttttgcagcagttgcaggcttgagaggctccagggtcagatgctcaagacaaaggaggccctccttcgcatgtgtgagag

SEQ ID NO: 273147 - DNA, 439 bp, Homo Sapiens
  misc_feature (409)..(409): n is a, c, g, or t
  misc_feature (426)..(426): n is a, c, g, or t
cagtggcttaatacaacaatcatttattttcatggatctatgggtcagctgaggattggtcaatctagcataagcatgtctgggaagctcgacgttgctcttgctgtctcttatcttctgctggaagcagcaggctggcctgggcttgttctcatggtgatagcaggagtgagtgagcacaaatgaatgcacactttccaagtttttggtcatacagattaaataattcccagtggccaaaagctaagacacatgactaaacccaacattagggactggagaaatatactccgattcttcagtgggaggaactgcagagacaaatggcagaatcttgggatacaggggaggacacggatccattaatgtaccttaatcaacaacaaccctctaaccaccaataccattnaaataagtatttggttngaatggcacttgt

SEQ ID NO: 273148 - DNA, 463 bp, Homo Sapiens
gagctaaaggacgggctggaagaatctgagaagctaatccaggaaatgactgtgacctgggaggagaaattaaggaaaacggaggagattgcacaggaacgacagaaacagcttgagagtcttggaatatctcttcagtcttcggggaatcaaagttggggatgataaatgcttccttgtgaatctgaatgctgacccagctctgaatgagcttctggtgtactatttaaaggaacatacattgatagggtcagcaaattcccaagatatccaactgtgcggcatgggaattcttcctgaacactgtattatagacatcacgtcagaaggccaggttatgctgactcctcagaagaacaccagaacatttgtaaatgggtcatctgtctccagtccaatacagctacaccatggggacaggatattatggggaaacaatcatttcttcagactcaatttgcct

SEQ ID NO: 273149 - DNA, 863 bp, Homo Sapiens
tggcttcaaaatgctgtgttcaaattttatttactatgatgtggagtggtccattgaatactggctcttgagacaacgcaacctcccagggcttttgcagactttagacccctagctctaaatacttggtatggtttcaatttatttttcaaggtgaatttctaggtataaaatatctgccaacataattcaggacaactgtgcagaaaccagataggcatctcactttggtttgtaaccctataggtttgaaagatacagaaaccagggatccctggttagtttacttttcagtaagactgactagttaactaagtgtgagaaattagtaggaactaggaaccaatacaagaactgcaaagagaacagagaaccatttttaaaaggacacattgtataatcagtcaacaaaaaaaggaacaatcagcagtttctgctttttctatatctgggacctttaacctcttgagtccttgcttctggaatcctctctagatttggtcagtccattatcagccccttcatcatatagagttacctaggagccagtggcttttgcctgtcttcatttttcttaacgttgtgattttctgcaaaccaaaattagaaagagctagtcagaaattaggcaagtcccatttcacacattgcacacatggggcctatatgatcagggacataacactttacatgtgtgttcagaatactctgtgagatttattgcaggaggcctcaggtggtgtctttagagaagtggcctggcaggcttgcctgagcccactggacagggtgttcctgatgtggtgaatcatcaccatgacatcagctgcctgaagcagagcaaaaagtttaaaatgtctttt

SEQ ID NO: 273150 - DNA, 338 bp, Homo Sapiens
gagatggagagcaaggtgagatcaagatgctttggccagagtcaatggctgctgctagacagattaccggacaaaagagagggaagaatagaagatggtcacaggtttcaagcatgagaggccctgcaagatggggccacaaataaggaggaaggactggaagaagaacaggtttgagaagcagggcaagtttgacgtgactattagacatgcgtctggagaaatcaagcaggtgtctgaattacagatcctgagctcagaagctgaaaacatgaattagtgaaataaggggcggtgggggcggtgctggggcacagggatatttaaagccaagaatt

SEQ ID NO: 273151 - DNA, 157 bp, Homo Sapiens
aggcatcagagttaaataccaattataaagataaaattataaatatttaaactgatttagatagcaggaatacttgatatttatatttctttctacctttcttcatattgtctatcattttaaaagtatgtaaattgggcgggttgcagtggtttat

SEQ ID NO: 273152 - DNA, 456 bp, Homo Sapiens
cataaacagatctttataatcatgtaaattaaacaattttgtctttaggagacgtgagaaagaacatagaggtaagagctagaataccagcaatcttaggaaggcaaaattaaatcatcttttgggagaagagagaaaattgtgaggagaaggtgccagtgtcaaagattggcttggcgaggttattttctctctgggagtctgggaggtgatgagctcctaccgctcactgcctcgttgtcttgcctattggttcctttctgggcaaggaagaacgttgtctctcttttagagttttgtaggcctctgtcagtaatccgtggaagacagctgtcctggggcccagaatgggcagtctgtagtgaatgttttctgttgggatgtcatcatggaaaggctcaggtgtagtctggaatttgggttgatgaagactcattcattttcatttcttgacat

SEQ ID NO: 273153 - DNA, 468 bp, Homo Sapiens
atagagaccaggtttcaccatgttgcccagggtggtctcaaactactgagctttaagcaatcaacctgtctcggtctcgtaaaagtgctggggttacaggtgtgggccactgttcccagccaaattcactgttctgaaggcacaatggcaggaaatatcttctttaactgcttagcacagaaaaactaaggactagatctttagggattaatttcactgtaaatcctatgtaccaagaaaggattctgtgttaggtacagtagttcccccttatttgaggttttgctttctaaggtttcagttattggtggtcaactgcagtctgaaaatattaaatggaaaagtccagaaataataattcctaagttttaaattgtacactattctgagtagtgtgataaaagtctcccactatcctgctgctccgtcctgctggggatgtgaatcatcgctttgtccagcctatct

SEQ ID NO: 273154 - DNA, 169 bp, Homo Sapiens
ccgcctccagccttgaccgatagacacttgtgtgcacgctctcgccttctcaccaaatcccagttcctcatgccatttcatctttgtgaagccctacctctaccccaacacctaatatcatccttggcactagcaaataatgaataaatgtttgcagaattaacagttt

SEQ ID NO: 273155 - DNA, 1024 bp, Homo Sapiens
acaaaagaagcgaaccagtttcccagtaaacatcccaccccataactatttttgaggcattcataggcttaagaccagtgaatttttacatcacccccgggggaattgcatttgcaatgacttctgcctacatttaacttttgatctagttctttgtacactgacaaaagttcacagccaaccatttctcttcaggacaagtgtgagaactttctgcatactgctgaaggcaagggagattttgagtttagcaaggttttctctccttaagaaggttatctttttacgagacacaagttattgaaactaggcggggccactttagtcctgtgtacaataatatgtgtagtaatataaatagtaatttaaaaagtcatgcagacttggttggggagaggcatgaagtttgggtgtggtgggggcggggtgaagcggtagaagggttcgcaatcactgctgaaactttcaacatattctaccaacaatatgagccaccagggaattccttgcctcatctctagaacgaatcccattaagcagttgtggctacagatgaatttatctaggttgagagctgattcccaataacatgcctcattgatttgactctaagcagtaatcaggggcccaacagttgttggaccaaccagccttgattttccagagaaggtgatttggtatatggtagtgtctgagggtgagattgccccagatgggagtggagggaagcagaacagttttctctggtgttttactgagtttttgtcttgatcctaaatccaagggttagggtcagaaacacagactcagaggttagatttaacacccatttagtgggttaaacacatcaatggttatgtgaactttgttaaggtttaaaaagctatttagggcctgtttctccctcataggaatttttgcaatcagcctttttagtagatgcccatatagaaagtgaatttgggagggtctaaggtggtattactattaaactttttgaaaaggctgtgtgatagcaatggaa

SEQ ID NO: 273156 - DNA, 515 bp, Homo Sapiens
aggttaataaataataaattcttatttaacattttgtagcacttgagattgtcttatacctaaggtattacatatttggtatataattaagccttataaaacttggtaattgattaagttttaccataatttttcatcctattctgtagtttctaagataagcacagctaccacctctaaatctgcagcagaatgctggccccagggttattaattcacattaccaaaagcatttttagggaactttttataaagaaagaataattgtttgttaggcttcatgtcacttgagtgagtttggcagtgtaacaggatggttcgtacacttactacttttctgtgccgtgcatcatatgcttctggacagtttccaaaggcctccggaaaagtaggcgaggcctgctttttatggcaacttggcatccatagaaaattttaaaattggtgaaggttgcaatactccaaataatgtaaaatgactgccaggctacaatataaagtgagttcagttaatc

SEQ ID NO: 273157 - DNA, 243 bp, Homo Sapiens
gcgacactgtactccgagcctgggcgacgagagtgaaactcccatctcaaaaaacaagcaaacaagacttcgcagtgcatagccctgtaacatgcacatattggatgaatgtacttgcggtggcatatgtcatgttgttaccaaagacacacaattcaaatgatgttatttttggcacaagttatgtttcaaggaaggacaaagccacccacttacattccatctcacactgcacacaatatg

SEQ ID NO: 273158 - DNA, 444 bp, Homo Sapiens
tcaaaatgaggaagtatcaaaatcctcagccactgaaaaattcagttaacttgtttatactcctgtaagctctagttagtcacaagacaaagtatatagtaacactttgtaatgaagtaacattttctgcccacattaattttactaaagacctaaattgttaaaattaattgccaatctctggatatattatgcttagtaagtgttttgaaattaaagaccttaaacatttcagcaagtaaattttggattctagctctgttttaaattgaatcctaattttcaaaccactgctaccccagattcatacctgtttttgaaatcttgtttatggaatggaaatttgacagtatggtaatagtttattgactgattggacaaaggatattctggttttaactgacttttccatttaaataaaattcatttgataattttggttgc

SEQ ID NO: 273159 - DNA, 413 bp, Homo Sapiens
atttgtgcatttactccataggtgaactcaaggttagtcataagcattttgaagaagctttcaagaaagtaagatcatctatatcaaaaaaggatcaaatcatgtatgaacgtttgcaggagtccctcagccggtgatgtctccagcagccggcttagaggagctagcccatcaagccggcagagaatcccccacacgctctgaaggacccactttcagctggacacaggcgcggcctcatgtaaacattttattttcaaatgaatgaggccaagctgaagctgaagctgaagattcttcccatctggccagccttgtgtgaaaatgccttcttcctctttaagaaaaaggacaatttttaaactgctgaaataaaatgactgttacatttttcaaataaaacctttactttg

SEQ ID NO: 273160 - DNA, 458 bp, Homo Sapiens
agaaaggatcattgctccaactattgcagaacactgtagtgaaatcttttcaacctccaatcctggacatctcatgttttgccacagaatttcaagctttgagttccagttgttttttttccctcctttctgctgaggaaagcatcttatcaccacagtcttaagtcttttgaggtacatccggatttaattacaaaagagcaaaaagaccaacacttttttttctccaagtcatttctctggaagtgagattatctgtctctgccctttaggaaaagggaatagtcaattgattttttcagacatttgaatgaaatagcataactggctaacatctaatcagacaaaatacacttaaatgtgtttgtgttcacttgcttagggctgtaccacttggtgagcaccactccacaaaacgaaaatgtttgaaatccaattgttcaaacatttttatagtg

SEQ ID NO: 273161 - DNA, 819 bp, Homo Sapiens
ctttatactaccaagtctgtgttgtgctcttcctgtttggccaaatactctatactataatatttatgtattactcataatacataaatattatgaattatgaattataatatttattgtgaattataattacctttttactcattagtctatgtcatgcttttgactgctctgtgagtgccagggccacgtataacatctttactttaatacttctggtggcgtgcttgttaaaaatagatgtccaataccaggtactgttctatgtgttaaaaatacagcagtaaataagaggctgttctggttgttaactgccgtgtgacaaatggcttcaaaactttgcagcttaaaacaacagtaatatttatttactcatgattttatgatttttgtaggactcattgagggtagtttatcttcgtttcatctggtgtcagctcagtgggggttagattatctacttccaaatggctcacttacatagctggcagtttatgctggctgctgtccaggagctcagctagggctatttactagaggtactaaatgaggccttttcctgtggcctggccatgactggtagtttctaagaaggagtgctctaagaacaagcatttcaagaggcaaaaagtggaaaaacctagtccccttaaaggctaggctaggaactgatagagcattacttctgctgtattttgttggctaagaagacagagtcagcccagattcaagaggaagagaattaaactccatctattggtggagaaaatgacaaagaatttgcaactttacttaatttgctacacaaacttaaaatac

SEQ ID NO: 273162 - DNA, 340 bp, Homo Sapiens
aagggaatctcttgcctgctccatctcataggctaagtcagctgaatcccgatagtactaggtccccttccctccgcatcccgtcagctggaaaaggcctgtggcccagaggcttctccaaagggagggtgacatgctggcttttgtgcccaagctcaccagccctgcgccacctcactgcagtagtgcaccatctcactgcagtagcacgccctcctgggccgtctggcctgtggctaatggaggtgacggcactcccatgtgctgactccccccatccctgccacgctgtggccctgcctggctagtccctgcctgaataaagtaacgcctccgcttc

SEQ ID NO: 273163 - DNA, 525 bp, Homo Sapiens
ggctgctgctgggcatgtcatagatgggatgaatgaccatctggggtatggtgggctgaactccacaaggtcgttggaatgaattttgaaacttctcagaaattaatctgaaatggcaggcagtaagtgcagcagaatctggcaggactgatatttgtgcagtgggcctgccacacaccctctgcctaggaggctgtatgccagagctcatctctagcaaggaatttatcttcaggtgaagaagagaggaagcaggatcccactgagcacctcttgcagaaggcaaggaccaatgtttgaacgtgtttcagatgtcatgtgtttagtttttatatgtgtgtacataattatatatagagatagacttgtgtatacaccttccacaaacacatcctcacggagatacatgtgctcaatgtatattcttgtttctcctgctctcaagttggaacttgcattgtgataagttttggaaattcaaaagtactgcaacgtgttgaaataagaaatacttaatattgtcaa

SEQ ID NO: 273164 - DNA, 754 bp, Homo Sapiens
  misc_feature (351)..(709): n is a, c, g, or t
ggttgttgtagcagaatagatttatttcatattgaacttattatttaaaaaagaatcgattcaagaacaagtgtctcaggctagatttggtattgtataagtaagctttgtgttagaggatgataagaataaatttaaaattttaattgaacaattccaggcaccagaggcaaacttaaagcttaaaatgctaaataaagccagctgccaaaaaggccaagctggtggttacagctgtttaccatcatgcaacaaaaatataaaatctctccatttctgaggtgtcttctccacatggtaggtagactgctcatcatttctgtggcctctgttcaccacttctctactctnnnnnnnnnnnnnnnnnnnnnnnnnnnnnnnnnnnnnnnnnnnnnnnnnnnnnnnnnnnnnnnnnnnnnnnnnnnnnnnnnnnnnnnnnnnnnnnnnnnnnnnnnnnnnnnnnnnnnnnnnnnnnnnnnnnnnnnnnnnnnnnnnnnnnnnnnnnnnnnnnnnnnnnnnnnnnnnnnnnnnnnnnnnnnnnnnnnnnnnnnnnnnnnnnnnnnnnnnnnnnnnnnnnnnnnnnnnnnnnnnnnnnnnnnnnnnnnnnnnnnnnnnnnnnnnnnnnnnnnnnnnnnnnnnnnnnnnnnnnnnnnnnnnnnnnnnnnnnnnnnnnnnnnnnnnnnnnnnnnnnnnnnnnnnnnnnnnnnnnaaccctcagttcgtgaattgcccacccctttcccagaaaattcat

SEQ ID NO: 273165 - DNA, 531 bp, Homo Sapiens
acccaatacaaagtcatgatcccatcctcaatgcctagacctcagccaaagttcagattcagatctcagtgacagaggaggagtccatatccctaggaggaataccctgcaactccgtggaagtaaatgctggcacaattccctcagtccttcagcaaaggaacctatagccatttactcaggagattgtacactggcgaaaggaaagatgcagaactggtcagattattgacactgagtgagagctgacattgatgcccagatgcccacagcactatcatgtctcccatcacagtggggcttacggaggtcagggagtaaacctggacacattacggcccacaatggaactactggatccatagacacagccctggttatcttccaattccctgagtgcataattaacactgatgcactgttaagtggagtcacccccacactgggtccctagtctgtggagtcaggactctcattgtgctgaaagccaaagggaaacctctgacgctgcccacatcctggcaaaaaaaa

SEQ ID NO: 273166 - DNA, 218 bp, Homo Sapiens
tttttttaaatatgagtcacaaggaaggtcagagaaacaaaatttcactttgtcccacattacagacactttctgggcaaggagagccactgccagtaaggggcatggcaccgctgaaggagaatgggctcctgcatggttccgtgtgggagctggggccctttttattaagaacccagattcatgggtgaaaattaatacaggagccacacatagtg

SEQ ID NO: 273167 - DNA, 454 bp, Homo Sapiens
aagttaccatttactcagaaatctcacttctacatatacacccaagagaactgaaagtgttcacatgcaaacttgtacacagattgttcacagtagtattgttcatagtagccaaaaaaacacccaaatgttgaataaattgctgaataaacaaatcatggcatacccatgcaatggaatatttggccattaaaaggaatgaagcactgacgcatgctacagcatggatgtgtcttgaaaacatcatgctaggtgagagaagtcgaacatgatacagcaactccatttatatcaaatgtccaggacaggcaaatctacagaaacagaaagctgcctacggctggggaaaatgggatacactgggaagtgagagctaaagatatgacatttattttcagggtgatgaaatggtctaaaattgattgtggtgatcgctgcacaactctgaatatac

SEQ ID NO: 273168 - DNA, 410 bp, Homo Sapiens
  misc_feature (346)..(366): n is a, c, g, or t
tttttctaactttttgtatttgtttatgatctgtctcttcccacctaggaataactacctagtatacagctgatgctctgtatttgttgaatgaatgaacatatttgttgagtgaatgaacttcattgggtgggatgacgttggagaaagaaatctgaagcaaacccatgggcttctttctcttctgtcttctagaatcttcatgccaaaatccctctcacttctcccaaccttgaaaactcaatgcgcaattctaatacaaattccagatttgttttttgcagaaactcataagactctctaaaattaacagagaataataaaagtctacaattactgaggccannnnnnnnnnnnnnnnnnnnngagacagggtcttgctgtcatccaggctgagtgcagtggcatga

SEQ ID NO: 273169 - DNA, 530 bp, Homo Sapiens
atagaattgctgagtcaaggaatatgattgttttgaattgtacaaggtaaagccatacctcactatccttaccaccttggtccaacatgtcccagcttctgaggggagcaaggactagacgcttcacagcctggagcttcctctttattcatcctctgtctggtggagttggaaagtcgggaacatacacatggagaccaaaagcagagataagtcaaaggatggaaatactgcagagaacctgctcactgttcagaaagtagatattttatacttatttgtgtatttaatttgaaactgaaaatatacacaaatatattttttaaagtagaaatctctccttactggtcactcactatccatactgttctcctcacagcaaatgtctggtatgtccttccaaagatgttttctgttgtaggcatatcaatattttcacaaatggtattcagtaaatgctattttgtagcccagaaaatcatattgtcttttttgaagttttcctacacgggccaaaagagtataaatag

SEQ ID NO: 273170 - DNA, 253 bp, Homo Sapiens
attggcacattgtatttttgtgttgacttgtttttagaaatgatgtgtccacacacgtacccgtgtctcttctgcatttctgtgtcatggttctgtttcttaatcacgtgcggcggtgtctaagtggtgttaccagtgtacgcgcagtgaccttggatgacagtggctctttctcacagcctcccctgagctgtgagaaacagctttctctgtacatatgcaactcctaataaaaggcatatttcttcctgtt

SEQ ID NO: 273171 - DNA, 465 bp, Homo Sapiens
aaatattgcttatgttcagtaaatcatcttccagtgcagtgaaacgaagtaaatggtgtatgcacttcggcgcatgtttctggaggaggaagtccatatctttagtcagaatctctatcgatttagctattgtggaggcagtaggttgctctggataaatctgagcaaaggaatgagaggaaatcagctcatttgaagaatatgggatgcgaagctttgacacgacaatggcgagtaatttagggattcaggttatcccccgcatctgagtaatctgaaggtaattttctagctagagcttctcaaaggtaggaaccttgtgttatcttttttgttcatactgtctgagcacagtgcaggagacataatagggactccaaaaatgttgagttaaattgaaatcactgtatgaatagtgaaagctggactgtagcaccaataataaatgctcttctgtcttcacac

SEQ ID NO: 273172 - DNA, 466 bp, Homo Sapiens
tcaagaaaactcatgggcggggtgagtgcagagaatgttgttatggggataactacacccatttattcagctctttgtagaagtgaactgcctgaaagttccttttccctaaaatactcaggaaatctcccaaatggttgtgttggggtgacagccctggctgacatagggccaaggctggtacttttgggctgggggcctttcgtgctggtcaggaaaggtaagctggcaggtacatctgagttctctgtcctcccgcaatggcaactccagcgagccagtggagtctccctgcctccacttgcccccctctccccaggaaaaaacaggcaggtgagatatgccccatctggtaacttctccagaatgattttgtctccaaattcctttgggtgacacttgggatgtgtggggccagcaagtttcacaagggagagcaggcaagtttcacaaacaggacaaacca

SEQ ID NO: 273173 - DNA, 490 bp, Homo Sapiens
gcaattcatccagctaaatagcctctaatgctatcatgaatgaagactatagaggtttatcaagatgaaaatagcccattaagaattgatctgaaccagtttagagaagcagagcctgagacctggcctgtgcagctttggctagtaaaaattcacttggtgctgggcatataccagctccacaggccccaactttattagtgtggagataagctgattaggtcctgtcaatcaaaggtgcccatatctcaattgagagacacacactctctctcgatttttctttaagcattgaagcaggcaacaaagaaagagatgtgtggtatgcatccctacggttgtcaccatgcagggtgcaagggtcctgtgatgatgtggtgactgtattaaagagtacatcaatttgttttaaagtgttttgattttttatggtggcattaagagagagaacattgtggttgcagctttactagaaagcaaagagttctag

SEQ ID NO: 273174 - DNA, 497 bp, Homo Sapiens
tatactggccccagggtatcccaggattgtcagaaaggcctggccaggattcacctgggagagggatcagcatctctgcaaagttgttggattgaaagaactttcattttgagctacatcattgaagagctttaaatctgaaaataagaaagacgttgaaccctattactcacatctctttgtcatttgaagcagatcccgaaccactcaaaaggacaaaacaaggaaatagcaatgaaattggattcagtgaatggggtaagggtattaagtgtctgaaatataagagataaaaaaattagtttttacctttttttctattttctaaatgttttggtggctagaataagatataccttgaactcaagagcaataaatgttaatatattaaaagtagctttatgaaatatggaaagtatctttatttcaaaatacttcaaagtaatcatctgaatatttatcagaaatattaagacaacttattaaatcctgtatta

SEQ ID NO: 273175 - DNA, 783 bp, Homo Sapiens
  misc_feature (739)..(739): n is a, c, g, or t
ctggaagaggtccttgtggttgacctcgtcaacagccggttcctcagacagatggacgatgaggactccatcctgccccggaagcttcaggtggccctggaacacattctggaacagaggaacgagctggcttgtgagcaggacgaagggcccctagacggcaggcacggtccagagtccagccccttgaacgaggtggtgtctgaagcctttgtccgcttcttcgtggagattgtgggacactactctttgttcctgacgtcgggcgagcgtgaggagagaaccctgcagcgggaggccttccgcaaagctgtctcctccaagagcctccgccacttcctggaggtcttcatggagactcagatgtttcggggcttcatccaggagcgggagctgcgccggcaggatgccaaaggtctgtttgaggtccgagcccaagagtatctggaaacactccccagtggagagcacagcggtgtcaataagttcctgaagggactaggcaataaaatgaaatttctccacaagaaataactctcagcctcaagggaaaacttcctcctagtgcagccctatgctttaaaaacagttcctggtggcctttctgaaaggctgggtcccaggttgtcacggtgcggaactggaggccgcggtggcttctggccgaggctgggctcttccctggatgaggacctgggagccgcctgggaggacagccccagaaagggagcccgagacncaggcgtgtcgccgacatgcaaatgggttgttttggtggttggg

SEQ ID NO: 273176 - DNA, 827 bp, Homo Sapiens
ctgaagaggatggtcataaagtctgtgtggaacagatgtcagagtggaattttcagacttaatggagaggatctaagtaagctctggattttgaaatgagtgaatctatggagctgtgatctcctacaaatcaaatggggaatgtctgtggatgtgtaagagctgagaaagaagaacaatatgtagatcctgccaaaactcctttgaaccctgaaaaatactctcctggaagaaaatatttcagaagaaaaccgatcaaaaaaactggaggtgacaaagagtcagttggggcaaacaatgaaaatgaaggcaagaagaagagcagcagtcagccttcaaaagaacagccagctcctttatccaggggactggtacagcaggaatctgttaccctaaactctgcactgggagatggtattcagcaaaagaagacagaagttgtagctgacagcgttaaacagaaacttctgccgagtgctgtaagcagttggtctgactgtgtgaacacttctcctgctaaagacagtgaaacagaagtaaaagttagtgaactggatgaaaggatttcagaaaaagacagcactccatattgcgcaaagaggaagaaacatttagatgatgtcaacacaagcgaaataacattccaggaaaaaactgatgttttttctttccgaaaggcagccagcttaagctctattccctcgggtatagaaagatcactcgaaaaaagtgggtttcctgaagacccaccaaaaagttatagcagtattcaagaaaagcaaaacactgagagattttgccctcatgcaacacagcattttcagttt

SEQ ID NO: 273177 - DNA, 771 bp, Homo Sapiens
aattttaatgtgtgtgaatttgctgtgaacctgagtatagtagaattggggttgaattcctgtcataactaggatggggcttcccaaatggtctggtgctgagtgtgctttgaaaagcactggcttatcacctcctgtcccacttctggtgtaatgtccagccgcagcatgccttctcatgcgtttggcctgtgctggctccttgtatctgtacatgcacatgaacataagacctgcagagagcccccggctgtaaacagaagtgacgcagagcccttctctccccgacaggagcattgtccgtgatgccagccgtgcacaccttctctctctttgcgggattggcagtcttcattgactttcttctgcagattacctgtttcgtgagtctcttggggttagacattaaacgtcaagaggtaagttggtgccaggattatagtctatttaatttgagtctagaatctagaggaagcagctagcgggtataacctttgtttccctctgtcccctcagaaaaatcggctagacatcttttgctgtgtcagaggtgctgaagatggaacaagcgtccaggcctcagagagctgtttgtttcgcttcttcaaaaactcctattctccacttctgctaaaggactggatgagaccaattgtggtatgcgcttatctgtggtttttctctttcctctcactgaaacagattatcacatgccttctaagaagccagacagcctgggaaggagattcttaaagctgttaaaatgtatct

SEQ ID NO: 273178 - DNA, 415 bp, Homo Sapiens
atttagagacagggtctcaccgtgttgtccaggctggtttcaaactcctgggcttaagcaatccccctgccttgacctccaaaatgctgggatcacaggtgtaagccactgcacccggcctcaagatcatcaatttcttaggccagatttctattctttatccttcatgtttgtcagtttctcaccattttataaatcttttttccttttttctcagtattttgtgagaacttccaatatcatcctttatgtcaatggttccatttcctacagtattaattctatgttttactgcttcctatcagattttaactgtgctatatactcagtttccttacaattccacttatcattggtctctccatctcagattgctgttttcacattttagagtgttcaattcttgggctttttt

SEQ ID NO: 273179 - DNA, 717 bp, Homo Sapiens
agaggccccatagatgacaggcccaggtgctttagttgggcaggacctgggagtcagtgaggaactcgccccgagaacagagaaaaggtaggcaaggagaggagatgctgatggcatctggaaacaagtcttagagatggtctgcacccagagggaataaggggagacatccccaactggaatgtgtcctggagcagctgcctgggaagaagtcctcgagtttcctcaaggtgggggacagaggtcaaggatgaggccgagctaaatggaagggcgacagtgaggcaggtgggctttaaggctgtggattcgtcatgctggcggctgccagcagcactttcaggttccttggggcttgtaggggatggggacttgtcagtggaaagacgggagggatgatgtttttggacttcagtacgggtgtgatgtcccaggaagtgggtgtggctccccatcctgtatgaaataagcagtaaagcttgctcatggctgttgcacatctctgtgactcttgtttctggcaggccccactcctggcagctgagtgctgcacctgccttctcgatcacgagcctgagaactgcacgggggagcagcccagactggctggaaaccatgttttcagagtgcagggtcaagtggcgtgtaggactctgtcaaaagaatgacccctttccccaccacatacccacaactgcacaggttaaacagaaatct

SEQ ID NO: 273180 - DNA, 623 bp, Homo Sapiens
  misc_feature (57)..(141): n is a, c, g, or t
aggcgtgcaccaccaggtccacttaattttttattcttggtagagatgaggtctcgnnnnnnnnnnnnnnnnnnnnnnnnnnnnnnnnnnnnnnnnnnnnnnnnnnnnnnnnnnnnnnnnnnnnnnnnnnnnnnnnnnnnnaatcagacacgagctgcagtagcttcttgatgcttcattcaccaggatgggtaactttaaagacaagttttataactggcatcccatctggtttcagagtcttgggggcttttttcatacagctttgtctgatatttagagacattcagattcagaagccatgagttcagttagctcatgggccgggcacgtgcactgactcactggctgcagcagaacacattgagggagtcttggtgcacttaggtcactgtaaggtctaagggctgggagctgggatttgaaccaggatctgtcagcgcagccccagtgctgtgcttgaagcctcgtgccacactggctttgaggtagcacgctgcaagttagtgagtggagttgcccaagtctggggcttatgaaatgacctggtatttttatgttcctgttagaaatggtgtggctttcacaaattaagtgccaggctgggcacaatggctcgtgct

SEQ ID NO: 273181 - DNA, 498 bp, Homo Sapiens
agtagagttggggaacgggacatataaatactttttgcatagtccagctgcttctgcaatggaaaataatttttaaccaatacaaaggcttctggaaaaagaaccaagttagcatctgagatgcgcaaagcagtaaaggcacagataagactggggccaggcaccagctcagcctccacactgagggctggtacccaggagggcagtggtttggggtccgccacgagcacaaggctcaaccctgggattaggcagctgagtcttggaacctgagcccaggctggacctggcaaaggcgctcagtggtaggagtgccttgtgtcatctcatcccaggtggctcaatagctcccaacagaggtgggtttgtgacagacagccctgtgggtgggagcctcaactggggtgggagcacctgtgaaaacctgaggtggaacaggaggctttaggcaccgaagttcttgggagggagttggggtgtgggttcggctgaacttct

SEQ ID NO: 273182 - DNA, 919 bp, Homo Sapiens
  misc_feature (44)..(106): n is a, c, g, or t
  misc_feature (131)..(155): n is a, c, g, or t
  misc_feature (158)..(246): n is a, c, g, or t
tctttaagagagacagggtcttgctctgtcatagctcactgcannnnnnnnnnnnnnnnnnnnnnnnnnnnnnnnnnnnnnnnnnnnnnnnnnnnnnnnnnnnnnngtgcgtgccaccattcccagtcaannnnnnnnnnnnnnnnnnnnnnnnnaannnnnnnnnnnnnnnnnnnnnnnnnnnnnnnnnnnnnnnnnnnnnnnnnnnnnnnnnnnnnnnnnnnnnnnnnnnnnnnnnnnnnnnnnagtgagtgaccatgtctggcccatgcgcttttatatgttgattgctgacgcacttttaagtgctgatcactgacccaaacaccctatcaatgaaagtcaaaagcttccttaaattccaggatatttgcttgttgaacaaatgataatctacatccctaaggttttgtgacaaaattcttctcttatatgacatgctacatggaatctcaatattccatgtacactgaatacaataataaagcaatactttattgttgcatactaacgttattaatatttcttacacttaagttaatcaatgagactaactcacaatgcacatgtacatattaaagccaccgaaaagttcagaagtaacataacctgtttatgtgataaattttccaaacttatttaggcttggatatcgattaacatctgagagtgcagaacatattgagagaaatgctgatacagttaggatagtctagatctctgtcatataactacacagtatttttcatgagtcagacttttcttagtttgcattttatagtcaaataaagaaagggaatctttattttctaggcttttcacccaaccacatgacccagatgtagccaagctcgttaaaccagttggcttcattcatagcacctgtgctcatgtaatgtacttataagaacctcagcat

SEQ ID NO: 273183 - DNA, 555 bp, Homo Sapiens
atgcttccaaagacagaaggaccttggcacctaaactgaccagccctgtgatcctgcaccccacaggagtaactcatcaggacttaccagactgctgcttttgggcatcatctgctgggttgatgatttggtttggccaagagtcttgccaagactttaatctatgcctcttgttctacatgaattcttgggaattactcacgttccataggaagagtgcatccccaggtgatggtttttggttatggtatgatcctttcacaccgaggatttcattgtttaaaacggtgtttctttaaaagaagccttgataacgagagtgggggaaggaggcagcagactttgaagactgtggcctttggtgttctggagtagggggagggaaggagaaacatgttttccacatcatcgcaagtgtgtgccctttgccccttttcaggatccttagagttgcctccctccctccaccccgacagttttgcaataatgtgccttatcagttgtgagtttacaggtgaagcaatttcccaaataaatggatgtaagtgttcaaaa

SEQ ID NO: 273184 - DNA, 412 bp, Homo Sapiens
  misc_feature (117)..(177): n is a, c, g, or t
  misc_feature (192)..(210): n is a, c, g, or t
  misc_feature (347)..(347): n is a, c, g, or t
gcgtgagccacggaacccagctggaatttatccttttttaaaaatgtgcaaaaataactacacagatgttcattatagcacagtttatgatagtggcagatatctcggtgtcttaannnnnnnnnnnnnnnnnnnnnnnnnnnnnnnnnnnnnnnnnnnnnnnnnnnnnnnnnnnnntgaagttgttaaagnnnnnnnnnnnnnnnnnnnaagaaatggaaaaatatagaaaagtacaaaggcagcctacacccatatcttctctatatgtagaattaacttatgttaattgttagcattggtagtcatatttgcttccaaactaaaggactctttgattaccaccntgccacgccctccatctccccttccccagacgtaacaccgtcatggacctggtacatccttccaa

SEQ ID NO: 273185 - DNA, 732 bp, Homo Sapiens
ccttgcaaaacaaacaaaaaatacattttctattcataatattctttacatctctcttttctactcactggttcactcatgttttgaacctcccatttagtaacttccggattagacaaaaaattttttctcaataaagaatacatttctttagcacattttatggaaacctaggaaggaagaagtcatgaacttcacactagacattgtcattctatagctgagaaccattctaccattttatgattttaaaccacacattaagcatatcccatttacgtgtatttaattatttcacttttaactttatctagatcaccgagaaccaaggtaccatgcaaagctggtcaccatttaaagccattttaaccattttaaagcctatgaacatcagtgacttacctaggtaaaaatcctaaagttaaattttagaagatacaagattctcttcaaactaataagctttcagtagtcttatttgttgaatgtatgagtgttcttttatctataagccagtttgacagcacgctagatgtaacacacatcacaatacatgtacatatacccaaaaacatattaaataaaatgacctatacaagacaactggattcaagttatttacagaactgggacccatctacctggccaaattttgtttgccccgataggtatggaaaacaggaaaaggcaggacagggaatcccatagcatcaactaaaaaggggaggaagc

SEQ ID NO: 273186 - DNA, 645 bp, Homo Sapiens
cgtgcggggcgaacctccagctgccagtcccgaggcttccacgtgtcagagcaaatgtgatgacccggaagaggagctctgtcacaggagagaggccagggctttcagtgaaggggagcaggagaagtgtggttccgagacccatcacaccaggaggaactctaggtgggacaagaggacactggagcaggaggacagcagttccaagaaaagaaagcttttataggaaagcccagtgacatgggccagcagccacagcatattgtaaactgaagatgaccagctcgtgggaccatctagataagcttgttttttgtaaggagtttgtgtgctgttggaaaacatggaaaatgcatccttaacacctgagcctctggtcatcttcagtattttctgtcatttgcaaaagctttcagagggcattgtgtatccgtaataatgtccttgaagtcagagactggaaatgttgatctcttagtcttctatagacaaggaggtcagactggagtgaatgttgtaaaagttgaaatgtatatttgtatagcaaataacaaaatccttttaaaatttaatctagtagaccgcttttctttccccctgtttaaaatgttaatcagttttcaacagaacaaactttatattacc

SEQ ID NO: 273187 - DNA, 150 bp, Homo Sapiens
agcatagaaactaaataattttttagtttaagaaatttttttaacttaatctaaatttaaaactttgggtcttcaaaagatctgttaagatgaagagacaatctatagtctaggagaaaatatttgaaaaatatatatctgattaaaaaa

SEQ ID NO: 273188 - DNA, 613 bp, Homo Sapiens
aactggtatcatcacacatcagtttggttcactgatttgtgaaaataaaccatttatacttgtttcctaagctttcctgcatttgccaccttaagcagagtcaagttcagttctcctggtgccctccaggtatcttaggctggattcccctctgacaaccacattgtggtttccataacaagcagctctgactagttctgtatccccaggcactagcatggtccccagtggctggcagcttaaactatgtgtgggtggtttctgggccagagtacctagaaggcttgggccttaaccctgtagcactcagttgcctttggtagactactcattctggtcttcaaccaccagttggctggagcacctcagcatttgcgttgagtttagcaggttaggactagccagagtgttaaactgcaagaaaaggaagcttaagcacacagtttagaagataaagggttatacgcaaaaatccaacatactccactttagagggccagactgtaacttgccaggtttcttgcccatggtcgtaacgctagcagggaaagcagaaccaaaatcagaacatggataacttgccttggcaacacagtgagaccccttctctacc

SEQ ID NO: 273189 - DNA, 578 bp, Homo Sapiens
aactgataaatgtccatgaaatcttcacaatttatgttcctctgccacggctccagccggtccctccatttggggtccctgacttcccgcaacatataaggaaacaaaatacccccagctccttaccccagacccttgtccagatagaaatttagacttattaatatattgaattgttcaagtgtccatatactaagaattacatcagcgatgtggaactatggataggcttccttgggttcctggctccacactataaccaccgccccccaccccttaaatttctgtatagcagacttaagagtgaatatcaccatatgcagttgttcatgtacttcttcccctttctcttctagctcttgacaaaattctcagggaaaactctccagctctggatgtctccctttttgtggatcaaacacaaagggcatcattctaaaatatatacagaaccataaaagccccaaatagccaaagcaaccctgagcaaaaagaacaaggctggaagcatcacactaccagacttcaaaatttactacaaagctttaaaacctaaaataacatggtactggcattaa

SEQ ID NO: 273190 - DNA, 335 bp, Homo Sapiens
ggagagggtcccagcaaaggctatatgctgtagtagcaaaacgtcaatgtgtgtatgtgctgtgtcgggaggggcagggttctgggcctttccagtcacagtgaagagattacactaaagcaaagaggggtgataaacagatgcttctccagcatactccagcccaatgctgccccacgcaaatacaatgtgagcttcaaatgtgagccccgtatgtaaagttaaattttccaacagtacatttaaaaagtaaaaagaaatgggtaaaattcattttaataatatatttgattcaacccaatatacccaaactactatttcagtatgtaaccatt

SEQ ID NO: 273191 - DNA, 322 bp, Homo Sapiens
tgagccatcatcatgcctggcagatattttctattctattatttaaaaattcccagcattggctcactcaatttctttcacaactcaacaagtgggtcctgatagacgcttgatgaaagactagactacaacaaagggctgtccagcttccccatcatcatacagatttctggattggagctttctaatgcacttctctccactaattatgtaccatgtgccagacactgttctgaaggttttaaaaataaaaagaaatctctgacgaagattcaaacttcaaagagtctttaagtttagtaatggactaaaaacctatact

SEQ ID NO: 273192 - DNA, 410 bp, Homo Sapiens
tgtttataagaagtagcctcaagccttgctcatggttactgacctgacagggatctaggaaagagtgagcaggagaatgggatgaggcaggaccctccgccccagccctgctttctctgcccagacaccgcctgccttgcagacccaaccccaccccagatggtttcctttccagtcacccagctgctagttctccaggttactggtctcactccaggttcctcctgttagagaagcatcccagagacattcattcctggcaaggacacaggcctgcggacctgaaggtcaggtgggcagagccacataagatctggtgccccatcctccatttaaaaaattatactttccaacggcattgggataaaggtgaatatattaaaatcatacattaaaacattttctttgaa

SEQ ID NO: 273193 - DNA, 305 bp, Homo Sapiens
gagtgggccaccatgttcagcccctatgtaatatttttaaaaacatatacacacatcttacaatgtcattttgtcaagaagatgaaacacgtctagcaatttctacacccttctgcatgcacactcttctcttccaagagaagacactgagccgagccttccaggttcttcccctcaaggaagggcaggccctctcccccaaggcggtgaaaactgaattgctaaccagggaggggatttgtggcctcactggaaatcagtaggcctggctttggggccgcaggcgttctccagggaaagaatga

SEQ ID NO: 273194 - DNA, 443 bp, Homo Sapiens
aagatgatggctatcctgaggacatggatcaagataagcatgatgacagtactgatgacagtgacaccgacaaatcagatggagaaagtgacggggatgaatttgtgcaccgtgataatggtgagagagacaacaatgaagaaaagaagtcaggtatgtgcagatgaaggattcatggtattgatcaataaagagaaaacaagctgaaggtcctaatttattaatgaatctgtgagagtactctgaaatctttggaagtcgggatcatagctgtgttcatcttatatattaaaattttgaaagtttttgacacagtaagtactcagtggatgtttatgaggaaaagcattaaactgtatgtaataaaaatgtctatgtaataaagttcactttggggtaaaaggtataactattcaacagcataaacgtattatgggtatgag

SEQ ID NO: 273195 - DNA, 638 bp, Homo Sapiens
aaattaagttattcatccaaaggtacatataaggtaagtaggggagcctcagtatatggacctatctgactccagagcctgtgcctaacttctatcttccattacctcccagcaccgcactggaagcctggcagaacctagccaccactagggatatttaattaaattcatatacattcagttcaattcaaatcagcatatatttgctaaatgctttctctttgccaggcattgcagctgcatctggaggagggttgagctatttcaccatatagatctcctacgactttgagactgtgatgtaaagaaataggcaactgtgatggttattttatttgacaacttggctgggctgtggtacccagatatttggttaaacgttattctggatgttttggtgaaggtgtttttggatgagattaacattttaaccagtggattttaagtaaagcagattactttccataatatggacgggcctcatcaatcggttgaaggccttcataaatcaaagactgacctccccagagaaggaaggaattctgccagcaggttgcctttggactcaagcagaaactgagtccccacaatcatgtgtgccaattccttaaaataaacatctatatctataatatcta

SEQ ID NO: 273196 - DNA, 896 bp, Homo Sapiens
  misc_feature (389)..(402): n is a, c, g, or t
  misc_feature (731)..(744): n is a, c, g, or t
aagactttcacagtgagagtagaaggtagatttggaatcatgcattttagcaagtggacttgttgaaacaggaagcaagggccttcagtgtagcccattcttgatccagagctgttgcctgtgacagcggtttctctggatgtcaaaggcagctgcctggctgcccagcttgcttctcgactggtggcccctatgggtcgggtgtgcgatggaaatgtgttcctgccggagtctgaggcaccagggtgtgctcaaaggctggccctggtggtggactggcacctgtgcagaagtgccgtgtgcttgtggtgcgccatctgaagcaagagtccagcgttctgccgtgtctgtcccccaccatgccccctacaggcggtactgatggcgcnnnnnnnnnnnnnnctgtcaggaaaacaatgttggcctgtgggccgcccacaacatatccttccctcactacctgtgtgaccaaggttggcttctgttgacctttaaaaaagaaaccctcaactcaaattgctataattagacacttgcttctgtcttgcctcctgtctgcagctgtgaatagtcatttgactgtgactgttgcccttagccagccagatgcgcctgtgaaccaaagcttcgtgcacatgtgttcccctaaaggttggggagcctcgctgtgtcttgctgttcccaggcaccaccacagcaggtgctgccatactcttgtggtctctgtgcgnnnnnnnnnnnnnnacccgtctgccaagcatgggtatgaatcgtgcacacagccatgcttcaaggccggggcaggggagcctgtgctgatgccatccagagcactgggctgtgcctggaaggcgagccttgattgtctgaacacataaagcaaactgtccagaaaa

SEQ ID NO: 273197 - DNA, 301 bp, Homo Sapiens
tatttaaaatgttctttttttatttgtcgtttaaaaacaaacttggaagaagcaaaatccaaaacttgccctttgcctctcgcaacataaatatgtacagttcagaatgatcgctgatacaaaacatgccaaggacaggggcgctgagggtggagggagagagggcgctttaaaaaagggaaccatttcatccgttgttacgaaggaccaaccttgctgtacaggatacacacaacacaaaataaagtcttcacgggattcacacttgtcagcgatttattttttaaaaagggggagggtc

SEQ ID NO: 273198 - DNA, 344 bp, Homo Sapiens
taagctgtctattcccatgaatatttctccgttcatttcctgaatcatttttttcccttgcactgggctttgcctttctccagtccttccctgattggcttaataactaacctcctgaattcttttttaggtaaatcaggaatttcttcttggttggacccattgctggtgaactagtatgattttgagggggtgttgaagagccttgttttgtcatattactagggttgtttttccggttccttctcatttgggtaggctgtctgaaggaaggcctaggactgaaggctgttgttcagattcttttgtcccacgggatgtaccccttgatgtagtactctccc

SEQ ID NO: 273199 - DNA, 439 bp, Homo Sapiens
tgctgccaaaaagaaaagcaacatagagtttaagtatccagtagtgatttgtaaacttgtttttcatttgaagctgaatatatacgtagtcatgtttatgttgagaactaaggatattctttagcaagagaaaatattttccccttatccccactgctgtggaggtttctgtacctcgcttggatgcctgtaaggatcccgggagccttgccgcactgccttgtgggtgcttggcgctcgtgattgcttcctgtgaacgcctcccaaggacgagcccagtgtagttgtgtggcgtgaactctgcccgtgtgttctcaaattccccagcttgggaaatagcccttggtgtgggttttatctctggtttgtgttctccgtggtggaattgaccgaaagctctatgttttcgttaataaagggcaacttagccaagtttaaa

SEQ ID NO: 273200 - DNA, 640 bp, Homo Sapiens
tgttatgcaccattatagcaaaaaaattgcacactgataaaagtaactgttccctcgttggcttcaccagctttcccaagaattgtttaatcccattccctgtataaaatcactctctgctgagaatcctttttctgagaaaagaattctgagaattttttttctgcttgaggcagaccaacactcattccaagaacaactggaaaggctgaataaaacacagaaaactttttaaaaaagtttttggaaagcttcccagttaacaaacatttgaagggtcataatctcaaaagaagaaaaaacacaaggaggcaagctggccctctgtgaactacttttcccttcaggaaacgtgctgattttagctaagaggccgagcatttgggcagacggccatagctaagaggcagcaaaggcagcagagtcttcagctggagagacaagaaatggagactgaggttgtcaaggcagctggaactgaaggggccaagatatcatgtagaagggagacacagaaaaggaacactttccccttgaggcatctgctgagttaagctatgcagaaaggctatgaaaagcagcaggttttggcagtgtcatattaatgagataaaagttggagttcaggacccaccaagga

SEQ ID NO: 273201 - DNA, 501 bp, Homo Sapiens
  misc_feature (48)..(48): n is a, c, g, or t
ctcgcctgagtgcttgttagatatgcatgatgtcaggcttgctgcgancctactgaacaagaagctgcagtgtcacaagatcctcaggtgtttcttgtgtgcattaaagtctgagaagccctgatctagaaaataacgtctcaactcatctgtgatgccaatattcttgtcagattgttgctggggtaggatttcagcttttggtgaacagagaatgaatcaattatctatttggtttagtgccaactataataataatatcatagagtgagctgtcatctggcattgttgggagatggagtacaggtgaacaatttgtcagctcgggcaaggtcaatagcctgctttgagaaaccttggtgggcaccacggttactatttcagagccagagagaagaaggcagagggcaacatttttcttgggatataatttttcttcccttcttaaaataccgtgagtaatgtacggggtgagggaaagatgggaaggggtcaaagttg

SEQ ID NO: 273202 - DNA, 490 bp, Homo Sapiens
ctgttttccttctgataatgaaatgggtgaaatccagaaaggctgcctggaggaggtgtcacgtgaaagttaaacaagagcttattccctcaccaatcccttctgcttagctttgaatcctttgcagcccacaccccacctccagtgccaactcctccacttccttccattttcttactccaagaactcaacccctcaaccctttgatgtcaagaaatgggtgagtagggactgtggccatggggaaaggtctgcagggcaaaatagtaaacaggatcatcctcaatgagtgtggggtgagctgggaactgcagtgtacacagagccacttgtgcacacacactcacggttttcagagccagcatggctaccccttggaggctcatgttatctctcctccttgcattttcctgcttgtgccctctgcctgtcccccttggccatttacaaacctattgctcttgctcgttctcccttgcccagactagag

SEQ ID NO: 273203 - DNA, 435 bp, Homo Sapiens
aggggaagaaaaaaggtaggagctggagatgaagaggctgctagaagcagcaggaagcctgcccttctgccctctcccctccctgcccctgtgtgagtcttttgggagggtgctggaaggtgccccccgtcccacctttttcctgtgctctaggtgggctaagtgcctccctagaggactccatggctgagaggctcctgggcagatggggtcaaggctgggccagcccagatgaagcctatgggagtcaggaccctctccactctccctctccactccccttcctgttctcacctggctgtggctggccctgtgtggggtgggtacactggaaaacaagaaggttggagttggtctaggacattggttttaaatgacagttctgtgaactggtccaaggagttctgttattaaagtgatatatggtcttggtcc

SEQ ID NO: 273204 - DNA, 385 bp, Homo Sapiens
aactaaagatgaggtgggtgtattagactccaaaatttcttaagtcggccagggggtagaattgagctaccaagagaatgagagactaccctgttgtaacagatttggatcgcgcttagaaaaacagggagaaagctggatgatgttcaacttaatgtcttgcatttcagacgattatcgaatggacggggataaataaaaacgatgttacagatagccctctaagtgtggatagtaaatattttgatttacaattaagcctaccttgaggtgcaggccctaaccaacggatagttgagtaataggggcctagacgccaatggaaagaaaatgggactttaagctttgtttgaacatatattctgttaataaagaagtttaaatc

SEQ ID NO: 273205 - DNA, 855 bp, Homo Sapiens
  misc_feature (610)..(610): n is a, c, g, or t
gggtttaattcaactttctccctcttggcatttattcttctagattctgggaaatgtgaagacagggcaaaatgaaatcctgtaggcttgggagtcaaatgcaagaaggagaaactgaaggccagctgtcttttctggctgccctccctatcaccccaccttcccttccatgcagaaaacctgctgagagctggcgtgcttggcccagggcaacacagggccttcctgctagtgggatgttcaagagcgcttaggtgggaaggtttccattcagcatcagggaggtaggtggggtcttggagaccacgcgacgtggaataaaggctccatctggcacaggctttcaagctttgtgtgggctcctctttctatagcttctccccagaatgaatcttctgatggcgaatcaggtgcgagctcccccggaaggacttgccgcacagattgcacacgtagggcttctctctggtgtgggttttatagtgctcaatgagggctgaccggtgccggaaggctttgccacactcgcaggtgtagggcttcttgccggtgtggattctctggtgctggatcagcgcagagctgtggcaaaaggccttgccacactganagcactcgtagggcttctcaccggtgtggatgcgctggtgctcaatgagggaggagctctggctgaaggctttcccacacttctggcatttgtagggcttctcgccagtgtgggtcttgcggtgctcaatgaggttggagctctggctgaaggccttcccgcactcatcgcatttgtatggtttcttcccagtgtggatccgctggtgtcggatgaggtgtgacctgtgacaaaaggctttccca

SEQ ID NO: 273206 - DNA, 434 bp, Homo Sapiens
ttaagatacagggtctcaccctgtcgctcagtctggaggtgtggcatacagccttgaactactggcctcaagctagtctcctgctgcagcctcccaaagcactgagattacaggtgtcagccattgcacctggcctttctctatccttctttaagaatggtaatttactgctccagggaattttgggaaaaacaggtgatttttggtgagttacggatcactgggaagagaccctaaacacatatacacgcatgcattcgagcacacacacgcacacatgtgcatagacaaataaaattaggcaaggagacaaaatattattgaaaacaaagtacccacacagacaaaaacagatgcagcacatctttgtgtggctttccatgctaccaagtccccaatggggacttcacaactgctgatgacacaagcccaag

SEQ ID NO: 273207 - DNA, 511 bp, Homo Sapiens
attaaatagggacaccataatgtttaactggtataggtgctgaaggtctagttatcaacatctatcagcttgtctctgtaggtgggcaaactttaaataactagtttttgtaccctgattttcttttcctcttaaagtagatactcattcttgaagacaatctgtttctttcaatgctaatgtaagtgcttataaccacttgtgacatgttctctacccaccgatccactaaaaatgatgagagtttcgaagattcgggtcatgtcttagttgcttcttcagagcctagcctggtcccatgatgggtgcctgttggttgctgaattgaaagcttctaggctgggcatggtggcccatgtgtgtattctcagctactcagcctacttaggaggctatggcaggaggcgcttttgagcccaggtgtttgggattttagtgtgcaatgattgctcctgtgaataaccactgcatctagcctgggtgacatagcaagacccatctctatgtaaaa

SEQ ID NO: 273208 - DNA, 340 bp, Homo Sapiens
tttttgctgctgctgttaaagaaagagcattttacctttcataatgttgctacattggggtaacaaacaaaaacccaggcattttcctttctcatatattcattcaaaaacaaagcagttcctatcaagtggaatatatccaagtgaaatatatataatgtttatacaacacacacacacctgcataaccaaataataagttgtagtttgcaaactatatgctaacatttttgtttttccaggaaacaatatatctttccttaagcaggagacggggaaagagaacaacaattttacacaaaactagtggctgaggagcgtgggcttgctgtcacacaaa

SEQ ID NO: 273209 - DNA, 525 bp, Homo Sapiens
ggttgagcccctgaatccttcctggcgaggcagccctcaggtgttagtccaaggtgaggtctattgcagagctgcctgcccttcaacccacacacacctctgaagccgccagggcagtgccccaaacacagcggctgtcgtgaaacagtcaatgaccagtaccccccaaacctgggctgtgcacaacagaccaagaaaaaggtgttccagtaagaaaacagatatatgcggtattttaaaaactgattttacaaaatccagccatgagatgtacaactcattccctaggaaacagcccaggaatggccatcttctccagccccgtacgctctccccagtagcccagggcacccagcaaccatcccctaggagaagcaggcaaggaccctcgtgggaagatcgccaccacagcaacacctttcttcaggacgggctctcgtccgcaatgtgtgagtcaagacaatccattccattcaagaccgaatttactctcaaattttgccaacacagaaatattagccttaa

SEQ ID NO: 273210 - DNA, 445 bp, Homo Sapiens
  misc_feature (68)..(84): n is a, c, g, or t
cattagaattctattagaaatcaaaacaagatcttcaaatatctggaggaaaaatttcccaaatagtnnnnnnnnnnnnnnnnntaaacttaacccattgatcaaagaagttgtcacaagggatattcgaagctactttgaacagaaataaaatgaaaccgtaacttaatgaaatttgtggggttccactagagttgttcttagaaggaaatatgtagttttaaatgtttatattagaaaagaaaaaatgtctaaagtgaatcatctaggcttccagttataactagaataaaaagaacatgttaaaccctacaagtagatagaaaagaggaaatattaaagatgaaagcaaaagtcagtgacagaaaaaactagagaaaaattaatgaaaccagtagttgtttatgtggtaaataaaattagtaataatacctctaagtagact

SEQ ID NO: 273211 - DNA, 745 bp, Homo Sapiens
  misc_feature (262)..(262): n is a, c, g, or t
ttgacacatatacatacttgaatgaataacttaattcttaggagacacttaaataagaattatttctgttattgaaacacagttccagttacagggtctttgaaatcatgagagagttgtacagttatatttctgtatagtgtgaagagctatcttattttttgcagattacttactttgttaatatacctccccctcctttaaccaattgggtccattattattgtaagcgtattacaaagaatactcctttggaagtcangaagaatgatacctaatctttaatttcttatcaggaactaggttttcattgtatgatggacacgatgtaacccctaaagacagaaaaagaagtgaaaaatagtcctcattctcatggatttatagctgtagtagaagaaaagatagattaaaaagggcataagttcctctaatgtttattgcaatgtgaagctagatagaaaaatagaagaaaacagagagaatcatgatcatggcaataaagagagagtagctaactcagctggaattggcctggagaaaacgatggtgagaactcccggagaacgttagaactgagctgaagcttgcagaatgcataggagtctggcaggcagatgaggcagggaggacattaaaggcaggaggaatagcacatgatagtgggctgcaggctgggctgtagtttgaggggctgtaattcaatacaggcggatgcaggggaaaagcaggcggtgaagtgaaa

SEQ ID NO: 273212 - DNA, 536 bp, Homo Sapiens
  misc_feature (413)..(421): n is a, c, g, or t
gaccactatgccctcagcccacctgcacttgtctgcagctgaggctagtcccaggcaggctgaatttcttgcctgaacatttccctctaggagctaggctgaatacaggtgtatcctgtaagaagtttggacgtggagttgattctgtgctcaaccctcagccaaggagggacgggagttgatagataaatgctccacctcgctgtccccagttgtgtcacttctgaggtgtgtgccatggagtgcctcaaagggttccagcaggaccatgccctggatgtccaagaggtaacttgctcattcatgcaccctcaaacaggcctgggactacttctcaaataaacgacccgcagccttttctcaggatctgcttttgggggagccctaagacaccatcacatagacataaatcnnnnnnnnnctaaactccaaataatataatcaggctctatggatttttaagccaaggaatcaatctttccatgtgagttttccttgctataatacagaaacaacttctctttgaatttagcttt

SEQ ID NO: 273213 - DNA, 463 bp, Homo Sapiens
tcttgatgatatcttaagccctaaaaattacaggtgcttcacccttaggagtaaaacacaaatatgaaccattcaaacacctgggtctgtctctgttcaaccttaacaaggttgatccgaattgctgggaaagacagagagatctttattatcaacacatacaactaggttgataggatttttttgaactaaatacacattttccttgctacctctgactttcttattcaacaatcttctattccatggatatttcaccatcctctacacccacactcaaaaaaattgtgaaatctggttggaataaaaagccagaaaatagtacctttgtataaaactgctttggttgactacaggtagcagatgtggatgaagaagtctatcagttatccatggctggataacaaatgacaccaaaagacagtagcttagaacaagattccttatgccacagttcctatag

SEQ ID NO: 273214 - DNA, 543 bp, Homo Sapiens
tctcttcactgctagaacaactatcaatttgcaattcagtacaattaggtgggcttacatttctactgactactagttcaagcgcatgaatatgcatggtagaagacttcctcctcagcctattctttttaggtgcttttgaattgtggatatttaattcgagttccatattgcttatactgctgcttataggttcagctttcgttttgaaagcagattctttttcgagtgattctattgggttaggatttttctcattccgaatagaatcaccttttgttttattctcatgaccactattagtaatattcatcacttgaccattctgctccggttggatagttccccgaatttatcatttcaggagtcttttgaaccgccaaaactggcgttcttgataaaatcctcacgatgaaggcctgatgtaggtcaccttttacgcgtgaatttatttgaaaggggacgctctggtattatctgtggctcagtaacaaatgctcctaaaattagattgtcagttacatggcttaagtcgacgaggct

SEQ ID NO: 273215 - DNA, 668 bp, Homo Sapiens
  misc_feature (12)..(12): n is a, c, g, or t
  misc_feature (65)..(65): n is a, c, g, or t
gattcggcacgnggaggaagggcaactcgaggaggcacattttaggaaactgcccacggagccantttcgattctccaaacctcgtcagcatgcagaggctccctgactcggcagcaaggagggcctcatcagccgacccccatgcccggcacccccttcaccagtggcagggtcctgaaaactccagagagcagtgccctgtgcattaaacacagactgcgcccttgtactcaggaggatgcaattctctctctaaagtcgagagctcaccaccccgggcgttcgtcactgcagacatcactgcagacacagagacggccattagagctcaccaccccgggcgttcgtcactgcagacatcactgcagacacagagaaggccattagagctcaccaccccgggcgttcgtcactgcagacatcactgcagacacagagacggccattatgcagcctcacgtggtcactcctgggggcggtaggatattttatcctaaagagaaaacaccttaaattctcacatcagccacccccatggcgactcttaacaccttaatgtagcaccttccaacttttcctgggcatttatgtacaaattgtaataaaattgggttcttaactgcatacgctgcttgctggtttctaaataaaattgggttcttactat

SEQ ID NO: 273216 - DNA, 458 bp, Homo Sapiens
  misc_feature (307)..(307): n is a, c, g, or t
ggcccgcgggccaggggcagtcccgggggctgcagaagcgcacgcgcgcgtcaccgtcaagtatgaccggcgggagctgcagcggcggctggacgtggagaagtggatcgacgggcgcctggaggagctgtaccgcggcatggaggcagacatgcccgatgagatcaacattgatgaattgttggagttagagagtgaagaggagagaagccggaaaatccagggactcctgaagtcatgtgggaaacctgtcgaggacttcatccaggagctgctggcaaagcttcaaggcctccacaggcagccncgcctccgccagccaagcccctcccacgacggcagcctcagccccctccaggaacgggcccggactgctcacccctgaccctcttgcactctccctgccccccggacgccgcccagcttgcttgtgtataagttgtatttaatggttctgt

SEQ ID NO: 273217 - DNA, 461 bp, Homo Sapiens
atatcagtaatcactgattatgatcagtgtggaattctgggaagcaggagcaagttaaagggaaacgtgtgctgtaaattatagactgaaagtttggtatcagtccccaaagtattattcagatggtttgtgagcatttagagtacctaaagagcaaatcatggatttcataaacatgggagagactagaagcattctgcagcaataagtggaaaacatccttggccaggggcaaatggttgatgaatctaacagggtgataagtaataggaataaatctaaatccttcctgtatggttcaaaaaagccaagagtactggcttggaattagagtaatacaatttagcagcaatatgtatgaagaagagattgaggatttggcttcaatgcaaatgaatctacaatatcatccatcttgtataaattatccctgtgatgttagtgcctcaccatcccctgct

SEQ ID NO: 273218 - DNA, 202 bp, Homo Sapiens
ggttactattataagctcacatatggtggtaatctatctttaagaattctttgaagccagggttgaggtatattccaccagggatgatctgagttggcatctcgcaggtgcctggaagcgctatcaacttggatctagtgtgtaaaaaagatgtcaatgtgtatatatatatatttaactttggaagcagaaaatacatttt

SEQ ID NO: 273219 - DNA, 870 bp, Homo Sapiens
  misc_feature (478)..(547): n is a, c, g, or t
  misc_feature (590)..(708): n is a, c, g, or t
caaaaacaacatttgccaactgaggagaaacaagagttgtgaaattctgggggtggtgttgctttagtgtggcaaacagaactactcataaattatccctgctcaagtgctgggtccaagaagaatttcagtctctctctactctgcacctgtgttcaggctgtatttcttggcaattgtcaccttataaattctaccaaatgtataattgtataagaactgtggtataaaaagcaatttgtttctagtgggaaaccttagaactgggcctaaagcaaaataaagtgaattttgtcctaaggcagacagccccagtagagaattactgcctccaaactttcagcctcctggaatagccttggcatgtcaaatttcatttagttcatgatgtaagagacattttattcaaagttagaagaactacttagagcaaaagtaaataaaaactatttgtcatctaagtccgtggttctcaacnnnnnnnnnnnnnnnnnnnnnnnnnnnnnnnnnnnnnnnnnnnnnnnnnnnnnnnnnnnnnnnnnnnnnngtatgtcccatcctggcagggcagggcgggaggctgaggaagnnnnnnnnnnnnnnnnnnnnnnnnnnnnnnnnnnnnnnnnnnnnnnnnnnnnnnnnnnnnnnnnnnnnnnnnnnnnnnnnnnnnnnnnnnnnnnnnnnnnnnnnnnnnnnnnnnnnnnnaaataaagaattggaatgaatccatttcgtgatgacccaaggaaccatcttatgctccaggaaaatttgggcttcaataagcaaggaagtctggtggccgttgagcacttgggggttgttttgtgtttggaatcagtctgatttcagctagtcatggctgct

SEQ ID NO: 273220 - DNA, 822 bp, Homo Sapiens
  misc_feature (164)..(244): n is a, c, g, or t
  misc_feature (312)..(334): n is a, c, g, or t
attgaatcaaataaactctgtaagaacttaaatttatgggaaaggataacagttaatggtttgtaattgagtataattggcttccttaaaaaatcctttgagactacttataacaaaagacataaagtcaaaatcacatggccttttaaatataccatgtgcannnnnnnnnnnnnnnnnnnnnnnnnnnnnnnnnnnnnnnnnnnnnnnnnnnnnnnnnnnnnnnnnnnnnnnnnnnnnnnnnaggggtggagtgagcggtgaccacagcacagcaatcccagctggatgatatagtgagaccctgcctcnnnnnnnnnnnnnnnnnnnnnnnctatatgtcgtgggcgtgactagttggggccagtgtcacgggctgtaaaggaatttaccaagacagtcataggtaaaggcagatttattggagaaagtgtgaaaatatgttgcaaggttgcagtgagcagcacagcagagaaggggaagtctgcaaagacgcagcggcttgagggacgttttacatggtcctgctggaggggactgcttgcagaatgtagccgtgctcctggggctacctgtaggaggtcatctctcagagtaattactcattgttctcccccacctgggccccttcctctttgttgcttacttaccttgtcaggacttacttatcttatcaggactacacactatgtgctaggccactttatctcagaaaatttattatttaaaaacaacactagtatcatcctgaaagctagaagaatttaagtgtagtctccttacaaataaaagcaaaatctacaagagcctactccaaaactt

SEQ ID NO: 273221 - DNA, 440 bp, Homo Sapiens
cacttgcctggatactggagagctgagaaggaatgcgacaggcaagtcctactctcacagtgtatacattcaggaggaacaagacacacagtgccaagtaaataaagtagctgaacttcatcaaatgattttattcttaaagtcattaaagcatgtaatgttcccctttttttgtttcaggggtgtacagattgaagaagtgtaggtgtttatgtggttttagtgacaaaccccatgtgctttcattgattttatgttttatgttaaaacatcaaccgcaaggtaaaatgcatattgtatgttgttggatacgtacttaactggtatgcatcccatgtctttgggtactagtgtatgaattctaatctctgtaaatgaaatgttgtatgtgttaatatatttaatagatgtaacttaataaactggcattgaagactgaa

SEQ ID NO: 273222 - DNA, 476 bp, Homo Sapiens
ctccagtagttcgaggaccacccggcgaaagaagtagctgtgttctcccagctgcacgtcctgagagggccaggtcgccgggagtgctgctgctccggcaggacaggacccagccactgtgccttaactgaccctgcagggccaggcacaggttggggggctgcccctggggtttgcagggtgctgcattgagggctccaggccccacccccacgccaaccatgcccctccccaggactcccactattgcctctgtgattggcccaggaggaaaacacgaccaagctcaaaacccttcccctgccctgggctgtgggggtctgagtctaaagcccccaaccctaggccccgtgccaaaggggaaaaggctgactcccaggggaaaaggggaagcactgtcatcttccacgtcatcttcacaccagcccatcctgccctttagatctgggcaccaataaaggcgtcttttgtgcttg

SEQ ID NO: 273223 - DNA, 442 bp, Homo Sapiens
  misc_feature (143)..(152): n is a, c, g, or t
tcaataatcaaaagttgaactttaattttcaccctttgttggttgttagcttttttacatagaaacacactcaccatgatggcagtaagagcagaagtcataagatctaacaattactgaccactagctaccagcatcctaannnnnnnnnnaacacatcatctttttcattcattacatgacagagggatgtagatgtaattattatcctcaggattcacgtgagaaaacagagacccagggaggcagccagctattagaactcaaactgttaagtttgtctccagggctgtgcttctgacccctgccggactacctaccatagagacacgattcgttcaccaaacaaatactaaactgaaaatctcctgtgtgcagagttctccctgttaggcacatcaagcgaaaagatgggcaccccaaggaaaaagtataagtgtgc

SEQ ID NO: 273224 - DNA, 461 bp, Homo Sapiens
gtaatatttacataaagactgtgctgagaagcagtataagcctttttaaccttccaagactgaagactgcacaggtgacaagcgtcacttctcctgctgctcctgtttgtctgatgtggcacaaaggccctctggagggctggtggccacgaggttaaagaagctgcatgttaagtgccattactactgtacacggaccatcgcctctgtctcctccgtgtctcgcgcgactgagaaccgtgacatcagcgtagtgttttgacctttctaggttcaaaagaagttgtagtgttatcaggcgtcccataccttgtttttaatctcctgtttgttgagtgcactgactgtgaaacctttaccttttttgttgttgttggcaagctgcaggtttgtaatgcaaaaggctgattactgaaatttaagaaaaaggttcttttttcaataaatggtttattttagga

SEQ ID NO: 273225 - DNA, 204 bp, Homo Sapiens
acattgtttttgtcttaactagcttttgcatttgtaatattttgaaagcagtacacaagttatttttccctcctttttaaagatcaaagagatgaaaatttaatttttcaaaggaaagtaagaatgagttctgttgtatttttactgaaatattcttgaaagacactgttttatggatagatgagacgtaagagaaagtaaagg

SEQ ID NO: 273226 - DNA, 318 bp, Homo Sapiens
  misc_feature (182)..(250): n is a, c, g, or t
ttgtgagattgtgcccagcccttctgctttaattttcactctgggctcctcaacatggtccttgtcccaagcccagggactggcttctctttctctgagtgtagttatgtatctgggttctaaccagtaaggttataactgtggctaattcacataacttctctgagtctgaatttcctgcnnnnnnnnnnnnnnnnnnnnnnnnnnnnnnnnnnnnnnnnnnnnnnnnnnnnnnnnnnnnnnnnnnnnnacacctttcccgataacccatactaccctcattatgactcttaacattagagagggctaaacaagggc

SEQ ID NO: 273227 - DNA, 432 bp, Homo Sapiens
tcccctccctgcctgccaacacacttgatgtgtgcaaacagccctcaagtatctgtcagatgacctatataaggtattgaataaggtattcttgtcagtttagaaatggactggataaaacttacttggttgtcattattttatctcatttgtcctgttacatgccctatgttaagataattatattgccactaataatcaagatgctaaatgagtattacaactggctaatatcattttttatatacaagggtatgtgtatatttggaattgatatgagaaactcatttgtacccatttgagtgatattgcacaacaaacacagatacctacagactccgttttcattttctcgtgttctttatgataatgatctttgtagattggttattctgtactttatctgtaataaactttgtagatcctgtgaaa

SEQ ID NO: 273228 - DNA, 503 bp, Homo Sapiens
taagttctaaaagcgaatgtgtcattagtctggtttttgattatagagattcaaacttacaaaacgctccttcatattacttctcagctttgcaacgcagggccatgtcacttaaggaaaacaccttatatctcacaagaggccttctagaattgtagtcacctgccgaatttccaagatccacagactaatcctcacagggtcaacaaaacaatctattaatgaacagagccatctctggagtcagtttcaaagaactgaaccattggactaaaaccaaaatgccaactcgacaatgttaagtgaaaattataacctcagagaccaggagatgttagaatcctggggccgatgtatgtgcccctcccacaagccccacaaacaagtcatgttggaaactgatataaaccaaagggacccagatgatgaaatcattggctcagtgtgttccctccatgtaggcatgccacacagcaaaccagctgtaatccaatgtttattga

SEQ ID NO: 273229 - DNA, 452 bp, Homo Sapiens
gctgttccatcaaagatgataccttaaactcccactgcaagcccatgaacttcccagagagtggaacggcttgctcttctttctagaatgtccatgcacttgggttttaatcagcagttccctattattctgattttaagctgttcctgtgatgaacttagagacagcatcggtgtctgctgctgtgtccccaggtcttgtgtgggtggcacagatctgggcagttagatagtgctctgtgcctaaggtgaagccacactagggtgaagcctcacttccctgtttgagcaatgcagtgcctgctgcccgtgtgcatgaaggtacagccattcagataagtggaactattgagttacataaagaaaatagatttgcatttgtcaggcagacgtttatacaacaccacggtgcttttatacattgtgcttattttaataaaactgaaattctaa

SEQ ID NO: 273230 - DNA, 1049 bp, Homo Sapiens
  misc_feature (635)..(658): n is a, c, g, or t
accacattaaagccaagacccgtttggagcgaactgccttgttctttgctgtgtggaaggttctgtccctactgctgaactccagttcctccccaagcaccctggcctcagaaatcctggcttccccaagttagtgctgtctgacctgagccaggccactgcttggtgcctctacaggccactgtgcatgttgagaattgcccaaaaggattagtgaagctcctgaccctggcgaggccataatgaacactgaagtgcacaggccaagggatgtaattgaaaggcatttatttttgtgaagatgctgtaaaattagcatttaaatatcccattcccttctcttggcctcctcctatccccctatggtatttctcctcctctcctcaaggccaggctttttgtgaaaggcattggctcatctttgtcagcgtgggtcctgacgttcacctctgggctgctggagaggactgagagatgtgtggtttggtaggaagggggtgtgtgtgggggttagtggggaatcccatttttttgcatcactgtgaggtagcttcaggccctgtccctggagaaataattgctgcgcagaagtcacaggccatactgggcagttctggtacaaacctgcccttatnnnnnnnnnnnnnnnnnnnnnnnnctccatttgcatagaactgtcactcattcctgccagtctgctgtccctaccctggttttttgctggccccaaccactggccttgttgagtatcgatgggccctgagctcttctgtttgcttttggagctcttcagatgctgtcccccctgagaataccctaactctggggaaagagcagccaaaatcccaatacagtaaaactccacacaatcttgttagcaacagtgacccagaaaattttgagaagtccaatttcaccagaagaggcccagggctccctgtggtcacattttctacccagccattcttggcattgcaacctccatttctagctccagttgaattttctccacccagaccccaaaaataaatggatccatgatgataatt

SEQ ID NO: 273231 - DNA, 450 bp, Homo Sapiens
caatgggctgcaaattgctctccaccccttctgattcctgagctgggtgtggcagcagattgttatttctcataaagaaataaaattaaataatgcattacctcttttagttatggacttctgccagaaattcagtgcacccaaccctcgcagttatgttacatttactcacttgatttagacccgaaggaaatggtttcctccttaagcaggtagcaggctgcgtgtggatttcttaatgaaacagttgttgtcatctttatgttttaaaaggaagccccaggtctctaaggaaattttcacatcagcaaaccaacttataagaatgttcattcatgtttgccaaccattgtgggaaaggagatgggatgacactcccagaccaccttccatctgcctaggtttgaataataggtgactatatttggaaaattacatgtatgtagtaaa

SEQ ID NO: 273232 - DNA, 129 bp, Homo Sapiens
aaataaaccctagggtggtaggagatacctgcagctatgggggatccttttatgcccatgaggggagagcctggctgagagtgacactaacacagaatgagaaataaacatagttgcaacaccctcaaa

SEQ ID NO: 273233 - DNA, 246 bp, Homo Sapiens
tgagccaccgcactcggccaaggccactattttaacccacatctgcctgaatctaaagcctaggctctttccaaacaccacgcggactcccctgcaacagtctagcactaactgaaccaggaacaggagaaaaccgtaggctatggaaatccctgtagacatatttatcctgcagtccttagcacagggcactctctagctctccctgtgtgcatatttacctatatagcctacacttcatagaca

SEQ ID NO: 273234 - DNA, 934 bp, Homo Sapiens
  misc_feature (35)..(35): n is a, c, g, or t
gagcgcgcagagtccagactggcggcagggccganggctcgacccgcagcgtccctggtctctccagccctcactcggaaccgcactgacaataccctcccctcccttgggctggacccctctctacagctaggagccaatggagaagacaaaaccaaaccgagtgagttggaccaagggaagtatgatgctgatgacaacgtgaagatcatctgcctgggagacagcgcagtgggcaaatccaaactcatggagagatttctcatggatggctttcagcacagcagctgtccacgtacgccctgaccctgtacaagcacacagccacggtagatggaaggaccatccttgtggacttttgggacacggcaggccaggaacggttccagagcatgcatgcctcctactaccacaaggcccacgcctgcatcatggtgtttgatgtacagaggaaagtcacctataggaacctgagcacctggtatacagagcttcgggagttcaggccagagatcccatgcatcgtggtggccaataaaattgatggtggggccatccctgcacctgggtgttagcaattcactggggacctgccctcatacatttcctcctccattccccgggcaggcaaccttcagtgattggtcctccctcccacgataagatacaacccttggttggttgcttgcattcttcccaccttataaagaagccagctaagccgacctgccctctttccaagacacagatccctattaactgagctctttctaggacctgtttcccaatcatccctgcctatcccactttctggaatgaaggcctccagtggcccccccctccaaaccttcttcccttcccttgacagacagaccaatgtcctaccttctctctacagcagacataaacgtgacccaaaaaagcttcaattttg

SEQ ID NO: 273235 - DNA, 452 bp, Homo Sapiens
tctttttgtttcccaacactcaaagctccactctttccctagaaatctgaacacaccatttccagaggggttaccttgttggcacaaactacaaatataatattttccatgtttccatgaggtccaagctcttgcttcatttctgccagccacgcatcaagggcgtcaaaggagtctttctgcccaacatcatagaccagtatcacaccctgtgtgtccttgtaaaactcatttcgaaccttcaaataaaaggacagatacacaaaacgtagtttttgtgatgttataagaatgtatctcacagtcattaacctggcaaagtgtgttcttttgtgtattcttagtgtttgctattgtatctgtttctactggtcattagagggttttttatagaatcaaagtaatgtcattctaaaaatgtattagcatagaaggacttacaatggaaaaca

SEQ ID NO: 273236 - DNA, 620 bp, Homo Sapiens
  misc_feature (373)..(390): n is a, c, g, or t
gtatgagtgaaaaggagccattcccacggcgggtgaggggcaggcaggttgaggagaaggtgccccagcctggatgcccgtggtcccaggagatgaagttacccctggagaagtgtctcggggacgtccgcccagcacaaagctcattcaccatccttaaagaccacatcaggactacaggcttaaaagcaaagtttattcctaaaggtgcctgcaaaatagctatacctatttgccttttcaccgtaagcagctttagggtgcaaatgcacaccaggaccccctcagttttggagcagaagagccatgttttccccttggctgttatacattcgcaagaagcaaaataaccgtgactatctgagtatgcaannnnnnnnnnnnnnnnnnaacagggatcaaggaaaatgcatccgaagcttcccttttcctttccttttcagggcatcgatggctcggtctcactagcgggacatcacacagttaaattgtgcacacgccacgctgctttacggcgacgtcgtttctgcgtctttagaaaaagcacccccgcgctcatgttcacggcttacggttagaaagatggcgttaccgttggcgggaaggttaggtgaacgctg

SEQ ID NO: 273237 - DNA, 1186 bp, Homo Sapiens
agaattcaatctttccccctctcctttatggaatgtgtgtttcctctatttgtacacttaaccttttgtcctaagtttttatttttatggatactaatgagtaactttgaggttgacactagacccaaacagatgcaaacagccactttctgtcctcttgtgacacagttgaaacactttatctcttgtctgctgtttggagtgtcctgaaagaaacactgaagtggcagtcaacagagcaagggtaacaggatctttaaataatttaaagttgtctgatcttgacataaaagtgaaccctttctttaaaatttctagcaactgctcttaagtcataggttcctcattttttctttgctggtagtgggagaaaatagttgatctgtgatttttgttttcatctccccaaactatgttataaaggcagtaatttgatgctgaagattatgattagaaatcctcagatgggttatatattggggctttatcttttaatattaaaaagaatgtctttcctggactactttattcagtagtaagcactattcattctatgtatattccttattcagccttgcagactcctgtgggatctgatctcttcctgcttcaactcagtaccatactcaccaaggcttagtatgtcttcacccactctcccttctcttgcattcctcaaacatgctgagtttattccagccttaagcctttgatctacgcatcagaaatgttgggccccacttcagatcttctctgccctgccttctactccagtcactgctgtggtaactaattccatgaagtctttgaccaggttctcagagaatatgatagtacctctctttggattctagctgtatacctttcacttcagcctccctgacgtggaatgtctgcagaacttgtttggtactcccaattgcacagcccaaaggtgcaggggagttaggtgcccatggggccatccttgacctaggtggaaagttgctagtggataactgattactcttttcatcacctgggcagacagttctgaaatgcatttcgtaagtctcctcaaaagaggaggagacttctgtggcgggtttggcaataaccatccttatattggctttcctcttttgtttcactcctgtgcatctctcttgcatcctgggatcgcttctcaaataaatgactttcattc

SEQ ID NO: 273238 - DNA, 585 bp, Homo Sapiens
  misc_feature (386)..(503): n is a, c, g, or t
actgaattcaaatttatgattacatccaatattttgaaacacatttgttgtcatctaaaagttcgacagactataaacacagttgttcagaatgtctccgatttatgaagtgtttcttgagcatttattgtatgccaggactgtgctaaatatgctacttgctacctctttcttttcataacaatcatatgtggtaggtgtaacttttatccccattttatggatgaagaacttaaggcttggtgaggttgtcacactctcgtgggttttggtagtagagctggaagtcaaagccaagtcagtctttttattggctatactaaccacagaattttcattaaatcagtctttaaaaatgtttttgggccaggagtggtggttcaccnnnnnnnnnnnnnnnnnnnnnnnnnnnnnnnnnnnnnnnnnnnnnnnnnnnnnnnnnnnnnnnnnnnnnnnnnnnnnnnnnnnnnnnnnnnnnnnnnnnnnnnnnnnnnnnnnnnnnnaggtgtggtagtacgtacctgtggtcccagttattccagaggctgaggatttggcttgagcccaggaggtcaagacctcaat

SEQ ID NO: 273239 - DNA, 599 bp, Homo Sapiens
gggctagtagtagaatgccaacaagaaagatcacagataaaaaataaagaaatagcctttcgtgtgttgagagctagactctaccagcagattattgagaaagacaagcgtcagcaacaaagtgctagaaaactgcaggtgggaacaagagcccagtcagagcgaattcggacatataatttcacccaggatagagtcagtgaccacaggatagcatatgaagttcgtgatattaaggctcagtctcattccacgggtggtagtcgtgaccctgcacattccacattcctatccttggattctgtgagatcacctggtattctcattatgacttcttctgttaggaatttttatgtggtgggaagggcctggatcagctaattcagagactgcttcaatcagcagatgaagaagccattgctgaacttttggatgaacaccttaaatcagcaaaataaatactaacttattattatttatgattatataaatgaaatggacctatatcaagaggcagactgaagcttggaaatcattatgaatatttgtaaattacagctttaagaacacattacacataaatatatgttttgtaatta

SEQ ID NO: 273240 - DNA, 872 bp, Homo Sapiens
caagcctccacagcccccatgggaccatgctgctcgtgggcctagatgttacacctccctagacacatgcaagggtgtttctagggtacctccttctctgtccagcctcctgcacccaagaggccagacctgtctggaccctcagtccctgagagcagccctggctgcctgctaccacctctcctgcctgagcccctagctcacctgggcctgctccaccccacctccacaggctgcctgcccacctctgccctccaggtcactcgccttcccctgcagagtttggagtagatgcagggaaggaccaaagcaggcttcacccaacaagcttccagagttagagcccagaggcagggataataataccaacttggccatttgctgaagaccacttcctgggcttactgacttcaatgtgcagtttcattcatcctcacaacctcctaatgaggtgcagattatggtcctcctggtgtagatgagaaaacaggcctagggaggtggcacagaagggtacagccgagcttgaattcaaactgaacctgtgctctctgcatcacagtgagatgacccaggaggatatcatgttcagcctgcgggcagggtggggcagggcatgagcatggaccccctctgccagctttgcctctgtggtcctcaccctcccacatctgcatccagaggaagaattatgcttgcatttgctgagtgcgttatacatcatctcctttaattcccaggtcctagccaggtactgttatttgtcccgtgttacagatgtggtgacgagctcacttgctgacttttagtagtggaaccaggatttgagtctgtgtgactctctatcctgagttcttaacaaccatgcattt

SEQ ID NO: 273241 - DNA, 913 bp, Homo Sapiens
ttacatcccaatagccaatccagtagcaagtcctctacattttgccacttccgtccacctctcaatttctcatcccttcatctctcactctgacgactgtaactgcccctaactgccttcctgcctccgttgtgggaagagagtgggagtgggctgtgcaaaacatgaatttcattgtggtattccctttctttaacttctccaatggctccccattgcacttagaatcaaagcctaccttctcacctgtggcttacagggccctacatgagcctggcctcacggcccttatctctttccagtctctccttttgattctcctattctgcaaacataccactttgtacacacctcatgaccccaaatttgtgaaaaattctagatggacagatagagacagacggatttatataggaaggataaagaccattaatatcctttatctctggcagatgggggtataggtaattttattttcttctttatacttgactgttttacaaaattttgaaaatgaacatgtattagttcagaggtttcatgcagaaaggacttcagacatattctaggagactacaaagagcagaactaggacttttaggtgcaagctcactaaggacattaagatttgtgtctttaagttccatagaacagggatgttcaagttttagttatctgcaggtctttcacagtgactggccaatcaaaacatctgttgagtagctatgctctgattcctttcccctgaaatgtgaacaaagggcacttggagccagcatgaagcaatgcagataaagcacagctgctgaaaacagcagtcagaattagagagagactctgaaatgggttagcaagcatctggtaatattaacaaataccgtacttgaatgttttcctctttccaaccagattg

SEQ ID NO: 273242 - DNA, 507 bp, Homo Sapiens
  misc_feature (71)..(96): n is a, c, g, or t
  misc_feature (106)..(173): n is a, c, g, or t
ctgctgctggaagcgtctcctttcccatctataaactgagaatcagaaaaactggcgtagaagataacacnnnnnnnnnnnnnnnnnnnnnnnnnntggagtttcnnnnnnnnnnnnnnnnnnnnnnnnnnnnnnnnnnnnnnnnnnnnnnnnnnnnnnnnnnnnnnnnnnnngtgcagttagtatatttccattttcatctgcgcaaacagattcaggaactttgtaatttacataaggtcacattcatcctaattcacaaaatcaagatttcacacctattcctttttctttccagtgcctgtgctttttctctcataccaaggagaagtaataagcctaacgttttaaacctcacaaaagtacatacagaaaagtaaatagcctaattttgcaactaatacaaatggcgctgtacttctttggtgatggtagatttataatttttgaagtatggtagattcaaatgaaccactgaaaaggcatttagtttcttgtcccaaataa

SEQ ID NO: 273243 - DNA, 176 bp, Homo Sapiens
gtctgtcttggtcactgttgtatctcaaaagcctggaataaaaagaatatctctgaaatgaatgagttgcttaaggacctatatacaagacattcaagaagaaagagagaaagctcacacttccaggacctgaacaatatctgtgagttaaaatgtgaatgcagaaaagatctatg

SEQ ID NO: 273244 - DNA, 502 bp, Homo Sapiens
ctgtaagaatgccagtttgtaagtactgactttggaaaagatcatcgcctctatcagacacttagggtcctggtctggcaattttggcctgatgtgatgccacaagacccaacagagagagacacagagtccaggataatgttgacagtggtgtagccctttaggagaaatggcgctccctgcggctggtattaggttaccattggcaccgaaggaaccaggaggataagaatatccataatttcagagctgccctggcacagtacctgccccgtcggaggctctcactggcaaatgacagctctgtgcaaggagcactcccaagtataaaaattattacacagttttattctgaagaacattttgcattttaataaaaaaggatttatgtcaggaaagagtcatttacaaaccttgaagtgtttttgcctggatcagagtaagaatgtcttaagaagaggtttgtaaggtcttcataacaaagtggtgtttgttatttaca

SEQ ID NO: 273245 - DNA, 550 bp, Homo Sapiens
  misc_feature (77)..(158): n is a, c, g, or t
  misc_feature (311)..(319): n is a, c, g, or t
ctgcgaagccctaaaacaggccaaagaaacatctggtgagaagtcaggatagcgatgatcttagtgctctgggggannnnnnnnnnnnnnnnnnnnnnnnnnnnnnnnnnnnnnnnnnnnnnnnnnnnnnnnnnnnnnnnnnnnnnnnnnnnnnnnnnccctctggggactggtggcttctctgtatgaatattacacttcaattaaaataacaaaaacctaacagtcaaagtactgggattacaggtgtgagccaccgcgcccggctgagattttcataatgtgtttgagacatgctgtttatttcttcnnnnnnnnnacttttaattgaaatattgtatacatagcaaaaagtcattcctgtcataaatgtacagctcaaaattttcatgaaatttaatcattaaccagattgaaatgaaaaccacaacaaaacccatgactggaagccatccccgataagtcttctgcggccagcttcctgtggtgagcctccccatcaagggtaactgcagcctccttggaaataaaggagatcaggactccaaaa

SEQ ID NO: 273246 - DNA, 256 bp, Homo Sapiens
cccattttgtaactgccttattgaaaagtaagtgcccttccattccaggcctcctcatattgtacttgtttcctgccaaatctgggggatcatttgtattttaactttgtaatctatggctctgtactgttgaaaggctctcaattctgtggggtctccttagtatgtatgtgacttttcatgttgcaatatcacacgatgggatggcccgacttttgctcttaataaataatctgaatgagtaagagaaaaaaaa

SEQ ID NO: 273247 - DNA, 679 bp, Homo Sapiens
  misc_feature (11)..(11): n is a, c, g, or t
atttcggcacnaggaatatagtttccatttccctaggataaagacctagtagtgtgaaagttgggtcatgtgctgaactgttttccgaagtggctgttttagtttgcattcccactggcaatctgtcacgtttctgttgctctgtgtctttgttagcacttggtgttatcagtgttttttagttgagccattctaacaagtctagtgggatctcattgtggttttaatttgcacttccgtaatggctaagaatgctgaatatcgtgttcttctttgccactcttgtatcctctgtgaagtttctgttcagatcttttgcacggaaaaagctgtatcatggaaccagtaaaataaccaaggagaggttgattaaagttctgtttataaccctagaagattcctgccctagggatatgggatggctgaacgtaggacaccgacactggacagatgaaatagcagtttattagtcacgcatgctcacagccctggggtgggggacaccgcatgccattcagttaatcatgtgtgttgtaacttttcggggagggacatttgcagagactaatggtatgacattctgaaaagcggtgacagattaagaaattttttaattctgcagatggtagtgtcgaaccaagtggaacaaagaaagaagatctgaatgacaaagagaaaa

SEQ ID NO: 273248 - DNA, 695 bp, Homo Sapiens
acttggatctctcaagtcaaccacttggccctcttccatgagtactttacttcctttcattcctgctctaaaacttttaaataaactcccactcccgctcttaaactttcctcggtctctcactctggcatatgcccctcagccaaattccttcctccgaggaggcaagaatcaagtttgctgcagacccccccagatccgccactgctagcatactgtcagccactctaggtccctctaaggggcatgtagaacttttggacgttgccccttgcctctcagatgtcataagagcctattgggtggggggatgctatctcaagccctccctgcctagacctgccttattcccacttatgctgtacagctactctccaaagcagggctaggggacttctctaaagcattgccaccccctcaggctttatctggggaggaagctacacagctcctctattcttgggttgccctccctgtctgggctccggtctgctatcatctatcccttccaggcttattcccaggcaggcagacagggccaggcctgcctctgggtctgactggcagctaagctcccttatccttctctgaagcttctctttacccaggctgtcactttccattcccaatatatagagggaattaactgtatacctggctttctgcagagttttagcctttgaaacttaaaaaaa

SEQ ID NO: 273249 - DNA, 412 bp, Homo Sapiens
  misc_feature (99)..(109): n is a, c, g, or t
tgaacccctgggctcaagcaatcctccaactgcagcctccccaagtagctaggactacaggtgacatcacagttggctactttaaattattttatttcnnnnnnnnnnnatagagacaaggtctcactatgttgctcaggctggaaaatattagagattttttaaaaatgcacttaccccatctggactgttgaccccagaaatgagggtatgcagtagtcagcagctgccaatgtgtatggtgggcgagcagcagaatcgtcccagtaaatgtccttcttcatcttgggtaagctcatgtgcatttcgtccacagctaaaagagagacctaaaatcattgttatattgttagaataactcagatgtaaattaaataaaaaggagaagtttttttgggcagatgagagttag

SEQ ID NO: 273250 - DNA, 1122 bp, Homo Sapiens
  misc_feature (120)..(169): n is a, c, g, or t
tcatgacgtacgactgctgttaagatacatcctgtgtctacagaaaataactcataagtgctcgttatggaataatgtataagattgcaggaaaacccaagagaattggtttaggccttnnnnnnnnnnnnnnnnnnnnnnnnnnnnnnnnnnnnnnnnnnnnnnnnnnctttggcatgtttttaggtaggagatagaaggtattccctcttctgaaggatccaagtactcctcatagctcctgccactccctgggtgactgaaacatttgtcaccatcttcctgaacctcagtttcttcatttgtagataattcttagagttgacagcattttatgaggaacaacaaataaaaatgctttcaaagtgctttgcaagcctacagtactctgtaaatgcttaatgataataatatacagtagggcatcttcccttgaaaacagcaggagtgtttccttccataatgacctgacagatgggttatggtatctaatccccttaaacccccaaagctctttgatagtggatgttgtaaaaggccagattagagcacatgctgctcttttattgagccctttctttcagtatctatgccatgttcaattgcttccttctgtaagtacgttacatgttaacctactacctgcaggaacaattaggagcaaaaatagagactaaaggacagtgcactccagtaggaaaaattagttaatgcttgttgtcccccaatattaaaaatccactttggccttcacatgtggtttttatggaaggttcctgccctcctaaatcctgactattaatctcaagctgtgggtatttgtcgatggtgaacacaggctttttttgtgagatagtcctgtatgtggtgagaatggagctttagtgatattaattctaaaccagtgaggcttaggaaaatcacaggcagtttaggatatttgtagcacttatgtaagagttggagctttcaatcagttcaaaatgaggaaaggatgattaacagttagtctactgtaacttttactcagccctgaacctcgattggaccaagaagttttttacatttccactttttgctgtacttttcttttgagaataactattaaagttatcagtttct

SEQ ID NO: 273251 - DNA, 124 bp, Homo Sapiens
gtgtttgtattttgggttggtttacactcgcacatactcagttttcagttttcccctttacagtcttctcccctcacctccaggaccctccccctttttaaaaaataaatcgctgacaagtgtg

SEQ ID NO: 273252 - DNA, 436 bp, Homo Sapiens
atttcagaatttagagagtttaatgaatgtgcccttgtttaagtataaaagtacagttcaagtttgtaactccatactttgtccaaagactggacgggaaaaaagaaagtcaccggaaaaccggttcctgagaaagctcctcaaaccagacatagaaagagaaagacttaaggcagttaatagtatcatatctatcgtttttggtactcgaagaattgcctgggctcaccttgatcgtaagttgacagtgctggactggcagcaaagtgaccgttggagtttaatgagaggaatatactcatcatcagtctatttagaagaggtaaggcagttgcacctccagattcctacctgctagagctccttgtgtagtttaatcttctggtcccaaaaggaatgtaataaaatagtaaagatgggttttcttctggtaaaa

SEQ ID NO: 273253 - DNA, 441 bp, Homo Sapiens
gccatgtggataagaacagaggagcgggttttaagggggacgtcctgaaatgctgctcatgtcgtatcagttccatagaccacaggaaatgcaggtgagagggcagcccggtgggaaggaaggaagagggtggtggtgagccaggtgagtgtggagccgcccagggcaccgtgctgtgcgatagctcaggcatcgggtgcttctgccaaacccttcagcagctggtttggggccaaacgtccttcctgtgtgagagaaggcagagcctaggcagcattccaaaccccatccagatgggaggctgagtgcagagcaaacggagcccagcactccagagccgtgtcccttcactgccatgatcacatcacaaacagcgaggcttggagaggacttaagagctccttcaatgccatcttccatccactgcgtgagccagaatag

SEQ ID NO: 273254 - DNA, 477 bp, Homo Sapiens
gagactgcatagggctcggcgtggtcattgagcacaagtcgacgagagatcccgagtacatatacagtcagccgtacggtaagcttgtgagctcggaagaagctagggtaataatggggcaaactaaaagtaaaatttaaaagtaaatatgcctctttatctcagctttattaaaattcctttaaaaagagggggagttaaagtatctacaaaaaaatctaatcaagctatttcaaataatagaacaattttgcccatggattccagaacaaggaactttagatctaaaagactggaaaagaattggtaaggaactaaaacaagcaggtaggaagggtaatatcattccacttatagcatggaatgattgggccattattaaagcagctttagaaccatttcacacagaagaagatagcgtttcagttcctgacgaccctagaagctgtatagtagattgtaatgataagacaagga

SEQ ID NO: 273255 - DNA, 442 bp, Homo Sapiens
ccccttttcctttcccatgaaccctggagggtggtccccaccagctctttggaagtgagcagatgctgcggctggctttctgtcagcaggccggcctggcagtgggacaatcgccacagggtggggctggcagaacaccatctccagcctcagctttgacctgtctcatttcccatattccttcacacccagcttctggaaggcatggggtggctgggatttaaggacttctgggggaccaagacatcctcaagaaaacaggggcatccagggctccctggatgaatagaatgcaattcattcagaagctcagaagctaagaataagcctttgaaatacctcattgcatttccccttgggcttcggcttggggagatggatcaagctcaaagactggcagtgagagcccagaaggacctgtataaaatgaatctggagcttt

SEQ ID NO: 273256 - DNA, 452 bp, Homo Sapiens
gccaagtcatcagaaggggttgggcttccagacatgtgtatttcctggtccctcacccccatggccacaggaccacagcgtgggaactcactttcccttgtgtcaagacatttatataactcctgccattattatggtgctactacatgaaggggtcagtgcagcagaggacagtctggagaaggtattagaaaagcaaaaggctgagaaggaacagggaacattggagctgactgttcttgctaaatgactacctgcaaattgctaccgagaaggttggaggtggggaaggctttgtataatcccacccacctcaccaaaacgatgaagttatgctgtcatggtcctttctggaagtttctggtgccatttctgaactgttacaacttgtatttccaaacctggttcatatttatactttgcaatccaaataaagataacccttattccat

SEQ ID NO: 273257 - DNA, 552 bp, Homo Sapiens
atgatgccagttacattacgcctagttaatcttcattcagactggaaggacctgcccccagttgtttctttctgaatagattctactctccttcaacacttccaaagtctcctgccccaaagaggcttagttagtcctgtggctggatgtgactccaacttccttttttgtaccatcacatctttcatatctttctggcatctgccatacatcataagaggctttgaccactgtcctccactgaatagcccattacagctagcacctaatagttactcaggaaataaatacatgtttaacaggccaggtcgtagagattattttgctttctctgccttttcatgtgctgctttcagaacagagggctggattggatagattagtatgatctatcctggagattcatttcttgcattaagagcttattttgtgtgatattatttataatccctgactatgtcaattataaacttttaaattatgtcttatatttgaagttcttacctacatatcagaggaaaatataatgtttatttctaggtggtaaaaaaa

SEQ ID NO: 273258 - DNA, 1026 bp, Homo Sapiens
  misc_feature (293)..(293): n is a, c, g, or t
cctttgtcattcagcaacatgtagtgagtggtcgctatgtccaaagtgctgtggacgctgagccaccatgcaaacatgaataagaacagctccttgtttaaatgtgcgcccattcaggtgtcttttctattcatcacagaaagattgagtagaaagctaccgaggtcacccctataaagaaatatttctttacatccattagaatgataacagtaagcgctgacatctcttggagctcctaccatgtgctagccatgattctagactcttgacacattattaactcacaacangccctatgagggaggtgctctttgttatctcatttcataggcaaggacactgaggcatagaggtgttagataagatgcttattcatagatggcagaaatggaactcaaactccagcagtcttgctgatgaaggccctcctagatttattcttttgggtctaagtcttgtttatcttcaggagccttccagtaaaataccaccaccaactagtcctttattcattaataattcttcatgaatgagtttcagatactttgaggcagagaaactagctgagaatgggaccttcgagacgaacgggtgtggtggaaacgtgtgtttggagagaagacctggcagagtaggtaaagcaatgggaagatgcagttagaaggatgagaaaagcactgaaaagaaaactaaggaaataccaaataatctcactctagagttttgcctgggatttgctatgtgccatgtttgattcttgatcttaaaaagataaaaataagtaatttcttgagcccaggaaatttgagaccagcctgggcaatgtggcaagaccccttttctacacaaaaacacaagaattagccaggcatggtggcacatacctgtagccgctgctactcggaggctgaggtgagaggatcgcctgagtctgggaagttgaggttacatttaggtgtaattgcattccagcctgggagacagagtgagatcctgtctcaagaaaaacagaaaaagaaagga

SEQ ID NO: 273259 - DNA, 377 bp, Homo Sapiens
tttaatgttgttttgagctagagaatctaggagtggccaacccggagatttgttccttgtttgtgaggagtatttgagcccccaagcccgtttcatgggacatgggctgtacagggaactgaggccctgagttttgggttaaaaaaaggttcccaggtaaaggtccttgggggaaggttaagtgaaaatgctatataaactgcatgctgtttataagtggtgatggttttcctgccccacctgggccgtgggctgtgttgttcaaccgctgccactgaaccatctgtttctgtacgaaaagcagttctcctgtccagcctgccgcctctggactgttcccctgtatgtaagcccctaataaagcccacatcctgttt

SEQ ID NO: 273260 - DNA, 449 bp, Homo Sapiens
cagagagtgtgcctacctcatttaatcattgtgaggattaagtaagatactataagtaaagcacttagttagtgcttagcaaatgggaggcagttttgtatttaagcattagcttcacccactttccccaccttctcaggccgacttggccatgtgtttagcgtgctaaagtcgctggaactcatctgtgtgctcattgtcctctgttctgttaccacattctgtcctgtttgacaggggctttaggagattccagccggaggtccaaccttcgcagccagtggctctggagggcctgagtgacagcggcagtcctgtttgtttgaggtttaaaacaattcaattacaaaagcggcagcagccaatgcacgcccctgcatgcagccctcccgcccgcccttcgtgtctgtctctgctgtaccgaggtgttttttacatttaagaaaaaa

SEQ ID NO: 273261 - DNA, 674 bp, Homo Sapiens
  misc_feature (485)..(589): n is a, c, g, or t
cttcataaggagggacccgtgtcttcccccttcccctcacctgttggtgtgagtcagcggggcctgcaagcattccgccttctctggaatcctcctccagctgttccagctcctgggacagttgtgtgcatttatcttcatagggagggacccctggcttcattaggccaccgacttcatcagggttggaagcgacaagaatgacgggagtctaccaatggtagacttacctgctccctgaagaccagtcatctgtccatccaggtgaaggcccagctcacactagtgggttccagcctgctcttggtctcccccattccacatccatcttgctttcttgactcttgctttgtgagccttaagctccagcataaaacatgaagaacagccttgcagatatgaagaaatacagataaacagtgactctgcttttctgattgaacccagctgatacacaagcctacctgcatatacaaataagaacnnnnnnnnnnnnnnnnnnnnnnnnnnnnnnnnnnnnnnnnnnnnnnnnnnnnnnnnnnnnnnnnnnnnnnnnnnnnnnnnnnnnnnnnnnnnnnnnnnnnnnnnntgcttatatgtacaaacagaaacatatgtaaatgtatttgaaatgttaaaagaaatcaaataaattgttaacaattattaaacct

SEQ ID NO: 273262 - DNA, 446 bp, Homo Sapiens
tgaacaacaagatgacatgcttctgtctgataaattggtattaaggaggcttcggaccataataagaaaaaaacagaagatccaaaataacaaaaatcattaataaggctcttaagtatttcagtgtatctgcatctttgtgactatctgcagtgaaactttgcttgtttgaagtcctgtggattccaaagccaaatacattttataaatgattttggaattagatgtcagtttggattacttaaattacaactctttaatgttgactctagtcattgggcattgacgtgtaacttgtctttctactgtttctaatatctattaattagatcataaggtacctgaggccagggatcttgtgtctgttgtgcctgaatttggcgtgtctaataaaggcccatgcacactataggcactcaataaaacttacatttttatgaaaaaaa

SEQ ID NO: 273263 - DNA, 152 bp, Homo Sapiens
ggagggtgggtggcgctgttccacatgttttatcttacttcaagttctttttcccactcagacttcacctcctattcctactttacagaaacagtgaatgcttcccaggagaactccctcaaacacccttcccccccaaaaaaattttaaaa

SEQ ID NO: 273264 - DNA, 704 bp, Homo Sapiens
  misc_feature (37)..(38): n is a, c, g, or t
  misc_feature (60)..(60): n is a, c, g, or t
gtcaacactatcaacccgggaagccggcttcatgacnncaggcattgtatgatgccgggnaggccatcatcccaggctcggtctatgatcggagcagccaggcccggccttccagcatgtacttcaagacccatgaccagattggcatgatcagtgcgggccctagccacgtggctgccatgaacattcccatccccttcaacctggtcatgccacccatgccaccgcctggctattttggacaagccaacgggcctgctgcagggcgaggcaccccgaaaggcaagactggtcgtgggggacgccagaagaaccgctttgggcttcctggacccagccagactaacctccccaacagccaagccagccaggatgtggcgtcacagcccttctctcagggcgccctgacgcagggctacatctccatgagccagccttcccagatgagccagcccggcctctcccagccggagctgtcccaggacagttaccttggtgacgagtttaaatcacaaatcgacgtggcgctctcacaggactccacgtaccagggagagcgggcttaccagcatggcggggtgacggggctgtcccagtattaaaaggtggcggcggaagagctaagcaacgtggcttagtccatcagcatcttattctgggtaataaaaaataaaaataaacggatacctgttttccactgctaa

SEQ ID NO: 273265 - DNA, 444 bp, Homo Sapiens
caagaccccattctcccagtactagttaaggatcaaggccccacagtcctacagcctccaaagaatcaaggtcgtatagtccctgaacctctgaagaatcaagttcctatagtcccagtgcctctgaaggatcaagatcctctggtgccagtaccagcaaaggaccaaggtcctgcagtccctgaacctctgaagactcaaggtcccagggaccctcagctacctactgtctcacctctaccccgagtcatgatcccaactgccccccatacggaatacattgagagctccccttgacactcaccccttgacacaccaatgaaggagctgacagtgagagtgctcccctcccaggggcagtgaagacacatatttaatctgcatgaaacatgtacagtagtcttgctggaatctaataaaaatggtccctctggctcagcaaaa

SEQ ID NO: 273266 - DNA, 427 bp, Homo Sapiens
agctatttgcagaaagctatttgcagagggattccaacaggtttaaaaatagaccttctggacctgaagtacagtactcacatttttctcttgtagagagggaatccagttttagagacaacaaatacaacttaatgaacattttacaatttaggtagaaaattaccggaatttttcatagaaatatccttgagaaactagaatttctgtattaaaagccttgtttgcactttgaatcaatagattatatattagcgtgcatacacatctgtaacaaatgtttgtttaaaaagtatgttaatcctggtaatctttttttaaagcaagacgtatttgtctatatagacaattgtgtatgtgtgtgtcgtaatgtatgtagataacaaagactggtggttacttctagatcattaaaaatgtcttccct

SEQ ID NO: 273267 - DNA, 427 bp, Homo Sapiens; identical to SEQ ID NO: 61921

SEQ ID NO: 273268 - DNA, 434 bp, Homo Sapiens
  misc_feature (111)..(111): n is a, c, g, or t
ctttagctgcagtatatcttttttccagattcccccatgcaagcatgtccacaaaagacaataaaatgacatgtgtgcaggccacacacaccaaatggcaggttccccacnagtgccccacatggggccaagacctacgtgcatgactcactctggttttgttttgttttgcttattctctgtggtgtaaagatactgttacaaatgccaaaaaggcctgcagatacccttatgggtaatagtaataagaaaaatgaagcatttgtgtttatatataacagagaaagtcaagcggctggagaaactggacagtggtgtaaatgtgaaatgtcttacaaaagaatagggtgttgggatcattatatatatgacctgaagaaacagaaacatgaactgttgaagttctatgttgaaaggataaagagaagtcagtg

SEQ ID NO: 273269 - DNA, 376 bp, Homo Sapiens
  misc_feature (28)..(28): n is a, c, g, or t
ggcatagttggttccacctacggtgttnggctatttaggagtgctttaccttgcagtctgatggtaacactagaatggtgactaaattcagaaggaggccagtgtatccagttctgtgatcagagtcgatgttgacacctggaagctaagaagagaagcatgtgtatgtctcacaggtgttgtcatgaaccccacatagggcgggtagcctcaacgttaccatcaccttactgtttgtcgcctgatggaaaaagctgggtggaaatgtgactggaaagtaatgacaatgtgaacgtgcatccaaggttgtatctatgaagccaagatggcggtcttcacgggtgtagccctcaccttacgcttaggcccttccctt

SEQ ID NO: 273270 - DNA, 401 bp, Homo Sapiens
  misc_feature (386)..(386): n is a, c, g, or t
ggccgcttaattaatttcagcatgtgtgtacatgccccaaacacacaattccaagcaaatcatgtatctttgactgggttgggaagtcaaggaatcggatagtagagacctgaaactctaaaggtgtggggatagaagaagggcaattatttgatactggtaggatttgctaagatctacttgaatgctaagcaaaaaactgcgaaacatatatagtatggttcttcctccaagaaacttactaaatgagacacaaaaattttaaaagagattataatctggagaggaaaattatgagggactaatggtataaaataaccaactgagtagttttatttttgtattagcataatagtaacatgtttatctagaaaaatttctaaaanagggagacaaggaga

SEQ ID NO: 273271 - DNA, 207 bp, Homo Sapiens
gaatttgtttttccctaattaaaatcagattgaggactttgccatgggaaatatttttgaagtgcttatttaattttatgtcagttttctgttgatctgccctttttattattaatataaaggaattctttataaatcagtgatgcacgtccgttgttaagttccctgttttcaaataacttttgctgctccatgactttttcaaaa

SEQ ID NO: 273272 - DNA, 453 bp, Homo Sapiens
agagctaccggtgaatgaaaggaaatcatgtcagtgaaaaatcatggtggaaagcccctggcatcacatgtgcatgctgtaggcaggacctgagctgcctccgctgcaggttcagatgcaccgctgcagctgtccttcagttagttcacagggctgcaagaggaggacacatccctccagaaaacagcctgagccgggaactggctgtgctaaagagcactgctatcaagttgaggagagagggcttccgtgtactcaggatgtagagtcattgctcagaagtgaacaaaaaatcaaaaacaaaagtcttctcaagggactgatcggccaagtatgcttttctttagagcaatgttttgccctagagaattgtaaaatttatgtcatgactcagtacatatgtgttcgtacatatatgattggaataaaatgtttatgaaatatttactcata

SEQ ID NO: 273273 - DNA, 607 bp, Homo Sapiens
  misc_feature (321)..(322): n is a, c, g, or t
catgtggaacctgagcacctgtttatgcactgcagtcgtgagtgagatagaatcatgtgaggagtggacagtctgccttacagcccatgctcagtacatatcctaatgaggaattggtccctggctgtcgttgtctccacgcccttgagttggacaatgctccgtcccaaggatgtgacagattctttcatttatgactatgccacgctcagcccatctaacctcaaatctaacctaatcctggtggccctcccaccttcccagcacacaggagcaagcagagaacatgggcaaaaagggggttttccccaaaaagtcaannaaggaaaggatggcctacagatgctgttctgtgaggacagtgtccaaaccagaaagtcaagatgcctctttgaggatccgtctgaaaacaaacaaaatacgtgaaatccaggagagctggagtagaaaacgccgtgaaggtagcgtggagagcatcagggagcagctgctatttcaacacagtggggacttcacacctgggcctgagggagcctcactgtttcactgaatttatgttcatatatttatgataataaatatgttcatacacttacgttcaaaaaaa

SEQ ID NO: 273274 - DNA, 351 bp, Homo Sapiens
ctgagaggttagtacattattattgagctctcacagaaagcttaatcatagatataattaacctgatccaaatgagtaaagtggaccttagaaaggctaagtgatctttctctggctatccagctagtagtaatgaagtcaggtcttgaaccccggttctgctgactgaattggatgcactatagtacaggcttttagcaccgaagtgtggtcctcagaccagtgcctgccaaccagatgttactggtctgtgaggaaataagtacagatactgacaggaagcttttataaacaatttattggagtgtttttgtttctgttgggtctaattaaaaaaattggagcttgtaa

SEQ ID NO: 273275 - DNA, 605 bp, Homo Sapiens
  misc_feature (302)..(302): n is a, c, g, or t
  misc_feature (306)..(306): n is a, c, g, or t
  misc_feature (309)..(309): n is a, c, g, or t
  misc_feature (311)..(312): n is a, c, g, or t
  misc_feature (318)..(319): n is a, c, g, or t
gagccccatacagtacttacaatgtctttaatggacttgattctgtttaatttttgttttatattaggcacactgtattaattttccaaaatgttataccacactatgttcttggtcctgacctattgctctggaggaaagagttgtataagaacatggctcatgtgaacttttgctagcttcatttgaggacctgagaatcatggggaaagggaaggtaatgttttcattgaaatcatcacagtgatttttattccctgggaacacagcgtgtactaaaaatacattgggggaaaaggggngaanaanannatagcnnatgtatatgaaagctattctcaaaagtcacctgagctcaccatcttcatagccaaccctaccagttataaagatggcagctctatcacttgattaagtgggaggtggtcaaacattttggtgcctcattttcttcatctgtgagatgggaactgttatgcctggcttactaagagtcttgtgagagactgagaagttgattttgttcatatccaatctgtaaatgcgaagtcaggggaagtaatgtccctgaaataaacgggttcatgccatctagggaaaaaaaa

SEQ ID NO: 273276 - DNA, 672 bp, Homo Sapiens
gcccaagtgattcttcaatccacctgcctgagcttcaagttctgggattataggtgtgagccaccatgcccggcctccctttaaaatgttgtcccatctacccttacagaaaaataccaggaaaatatcaatactattatttaacattgtcctggaagtactagccaatgaattagacaagataactaactacaacgtgtgaatattagaaataataagttattattactgcaggtgatactgtatatctataaagtaaaaaatgtaaaatcagaaaactataaaagtaaaattcttttcacatgttggagtaactggtactagacttggccttctgctataaacaattagaaaaactgaacaaaatacatgaaaaaaattgttttcagacaatgaaatcagtgagtatgcgactgtgatccctgagagaatgaaaccaagtgaggtatgtcctactatcactttggctttctggactggaatacaggaagagaaaatcacactgaatggagcagagatcagtgttcaggaacatgaggtgcctggaagtttgaggcaaagtaccagagaagaagcaactatgcaaagagatcaataactcttcacaggagtcctgagtttctatgagcagaaaaattcccagagctcacacagagttggaagatatttaag

SEQ ID NO: 273277 - DNA, 430 bp, Homo Sapiens
gacgacagtggctacgtgagcgcctacaagaatgcaggcacctacgatgccaaggtgaagaagtgaggcttgggaagaccgccctgccaagtgcggctgcccctgccagaggctcaggcctgggtctaaggggcacgtggagcaagagatcctggtcccctccctgctggacctgccacccagagcttcctgcctagtcccactgggctggcccaccaggcctctgacccaggctgctctgcggccccttcctcctcctcttcctgctccaacttctgtccacctggggacagtctgtgcctgtagcctcatgaccccaacccagccccaggcatggctaacccctgactgcttgcctcatatttaagctgctgctctggccaagtgcctaattttaacccagacctcaataaagacaccttttgtacca

SEQ ID NO: 273278 - DNA, 346 bp, Homo Sapiens
ttaaagttcatatccgtacacacacacaactatcacattgtaagcgtaactccaacagagacctttgttggagactctacaataaaaaatactactttttaatgtaaagtattatgtttccacagttttccaacctgtcccttataacagttgcatcatggaggtagtattaacatagttgtagccattcctcatgttaaaacacttagttatttccaattttatgccagtaagaatatgaaatctgttaaatatagatacagatggttacatatagaaatatttgtagatatatatgcatatgcaggttagtatacacacatttcgttctttactctgttggcca

SEQ ID NO: 273279 - DNA, 231 bp, Homo Sapiens
cagtaaaagcagccacgtgcaaacagctgcacactatttctggaaatggtgaggtgatggatagaggatagaaaacaaaccagtggtttccacggactggggttgaggaggggttaaccacaagagagcacaaaggaattctgggtggtggtgaagatgttcaatgtctggaatgtggtagtggcacaattgtatgtttttgtcaagcccaagaactatacactaaaagag

SEQ ID NO: 273280 - DNA, 485 bp, Homo Sapiens
gactctagcttctgacaccatcacctatgaactgtgtgacccatgtaattcatgtaagctgctgtgtcttagagtccatgcctctaaagtaagaatcatcatgatgcttagttcacagagaattaagtgagctgacataggagagtgcctgatataacgcaggactcagtaattgttagtttcctttctcttttggtagatgaaccacagtttacaagcagagtctgagaaggttcttagaggagacaggcactcgtgcttgtccctgactaagctcagaccattgtctctgtagacactaaagatcaccaagtgcagccctgcacagcccatcccagtgagtactaggctaggtttttaatcctagctcaggcacttattagctgtaggagtttgagcagttttttaatctccttggattcagttttctcatctgtaaaattgggttaaggataattctttcattagagtaagaaaaggaaagg

SEQ ID NO: 273281 - DNA, 470 bp, Homo Sapiens
tgtgtcaagtagttctcctactcagaatagaagctttgcgaattatcattcccacctctagattttaaatgaatgtagagttgtctaacattatatgggtgggaggctctttgcctctgtgatcagtagggtacctgcctctgaggtgctactgcctggagggatcactcccatcaaaagactggtgagttggaagctaagagcacatgcgcatagccagctcctctcccaggctggcagtcatgattacgagcatcattccagaatctttggcttctagaaccaactccattctgaagaacattttaacatctatgaataccttggtaataatcttttatacacaggagttttgtagcatgactttatgactaaacttattgtgaattaagttatttagaaatgttgagtttctgaatgttattttgtgatttgtttcaaaatggtaataaattgtgttattttgtaaa

SEQ ID NO: 273282 - DNA, 532 bp, Homo Sapiens
ccttctctgctctggaacaaaatcagtaattggcttgaggccacttataaacccccctggtctcaggtggctaattagcaagtaagaaacaaggcagcacacttttactcttcttgtgctatggttttcatcagctgagaggtcacaaatccacttacatgcagactcagagcagcaggagaacattaattattaagaagtggaaaggcacagtctcctctcctcacaccatctccctaggcctccagctcttcatttccctcctcctctcctggtaatttgtcactgaagattctaggcccagaatcctgccttggttgaaaatggttgttattattagtgcagcacccttcatctcttttccttctaatccgcagttagggggcttcatctagagtaattatgtggatttcctctgtctggttaactttgccatctggttaacattgaacacttgggaggagtgcaggagtcagataatgaacaagcgggtaaggtaattgccagccgaaataaggtctctgaaaaaaaa

SEQ ID NO: 273283 - DNA, 426 bp, Homo Sapiens
catgcagcctaccagcacccttgctagcctagtcctcttcctgtgcttctttttgaaagatcaagaatgaagaggaagagatgaggagtgggggtcctttacctaaaggaccctcgtggttcattgcttctctttaactgactttttaaaaaaactccctcttccacactccttgctgtgattctgtcctaatcatttttcttgagaatgtcatgtagagataaatgtgtgtcacagtgaagccagaaggtgaattaacaactaagacaaatccagcatgctcttgcctgccctgcatatgtgctcatttggggaaggacggaggacacagagcatcgacacaaattctacagctcctcagagaacacagcagagactcagatgagctgtaaaatccattaaggaaaaataaatggcatgatttgg

SEQ ID NO: 273284 - DNA, 649 bp, Homo Sapiens
  misc_feature (59)..(95): n is a, c, g, or t
  misc_feature (241)..(274): n is a, c, g, or t
gagagagagtcttgctctgtcacccaggctggagtgctggagtgcagtggtgcgatctnnnnnnnnnnnnnnnnnnnnnnnnnnnnnnnnnnnnnactgttccgagagttccataaaacataaggaacgtaagtcacacatgattctcacgagcagccgacgttttccacgtacatttcaaaggtgcttgtgataaaaaataaactttgaattttaattgcacgtttatatcaaaacactnnnnnnnnnnnnnnnnnnnnnnnnnnnnnnnnnnattctgtatgtctgttaacaacattgctaaattgctgtgtaacttctacctgggtataaaacagtagaacaatgtaccttgggactcatcatcaggcagctcattgccaggggctgctgcaggaccactctagggaccccaggaccctgcagtcgagcatctctgaggggtccaggtccaccctacagctcagggagaaaatgacatcactacttgtcttgaaatctacagaggaacaccaaccacagaattagggtctagattgggtgcctgtaggtaactcagttaattaaaaacagctctgaaacccagacaacctgattatgaaatccttaccttattttgtcaaatgagcaacacagtatgaataataac

SEQ ID NO: 273285 - DNA, 700 bp, Homo Sapiens
  misc_feature (31)..(31): n is a, c, g, or t
agtactaggattacaagcatgagccatcatncctcggcctggctttcttgattataagtgtgtttgtatagaaaatcacaaaacaggcatttgtaggtatatgctagacttagttcggcttccttctccccttccccatctctcctctgatggaaaggcagatcagagctaggagggaaaatgaggggtagcgttcaatctcagaattactctgtcaccaaggttcctcttccaatcttttaagagccagtaatcaagtaaagatatactgtgtatatataaccatataaagatatacacaatgtttagagatacgctgcataatccagctttgctggcaccaaagtgaagaagagatgaacagaggaaggtctattccctaaggccacccatccacctgcctgacaagaactgggaaataagaaactgctatcaaggcatgtccctgttacatgtcagacccctccacacactcccacacttccgcagcacttggcacctgctgcagcaagaaaaatgcccaaaagccaactaaacaagcagtagcatttgaaggataaggggcccaatggctgggaaactgctgatgtgagaaagaccgcacagttacactcacatttgcagcaggtagtagagcgccatgagcagcttaataatgaaattttcctatagccttaagggagaaaataaaaacctgcag

SEQ ID NO: 273286 - DNA, 406 bp, Homo Sapiens
tccccaagaaggctcttcaaaatcctcttaccaaaaagtaagcacttcttcaccttttgggtttgctgtagtaaaaattgcccagggatgacaaagggaagggctttatacagtctagaaggatttctcttactaagagcagctgtgcatgttgaatattacatttccctgtttgctaaaggctggggctgtgctagccaatacaagcctgctggcagcatgtggctactggctgctgggaatgcagctggtccaaagggagaggtgctggaagtaaaatgcacactggctcttgaagacttggtacaggcaaaagaaggtaaaaacagcgaattaatactttttatggtgttttaaatatacgtttttttaaatacttgtaacattaaatataaattataatttt

SEQ ID NO: 273287 - DNA, 519 bp, Homo Sapiens
agatgttcttttctttctttctaagttgaacctggttctaatgttatagaaaaacacttcaacgtaaagtattcagtgaataccctaaatgtctaaaaccccaaaggggaagccagtggggctctcacagtattgatggagtgaatttaaggcactgtctaaatgccttgtgcagtgtgggctgtgtgggaggtgcacagtgggtgctggctccctctgttggggtcacagaacacaggggcaggaattctacattgctgaccggaacaatctcctcagccacctctgccttggtctgtactgccgctctcgcactttctctttagggaatacagtcattgctctctagtgatgcccaccacacaaggaatcatattcacagaggtgtcttgtttcatagctaaaacagtcatttgtaacacggatcagctggttttcacagaaaacaatggtaagcacacctaggtctcagtttacttagcagagagcaacagctaaatatattcaattctgatacca

SEQ ID NO: 273288 - DNA, 464 bp, Homo Sapiens
  misc_feature (57)..(65): n is a, c, g, or t
aggtagaagtgactatgaaactagtagacagggcaggatagtttttcaaaagaaggnnnnnnnnntatactgccactcaaaatgagtcttcaaacaaaaatcctacacataagataaagacaaatgctaacaaaatcagcaactgggagataagtttacctaaagactaaaacactacaacaatctgaaatttagtttaaaattagtgcattgaggaagcttaaagtgataatgaaaggaagaatacctcctccctcaaatactaaacaaaaacaatcaaacagagaattagtaagttaaacgcagtgctaagaaattgatctgggacacaatacagggagaaaaattcattaaaaatgtaccagagcagttgagaaatgtataggataagttgtgagggttttataatatacaacaggagccccaaggggagagaagagaagaaatgagagagaagcaatact

SEQ ID NO: 273289 - DNA, 938 bp, Homo Sapiens
  misc_feature (340)..(382): n is a, c, g, or t
ctaacagggtaaactgttaatttagtgtgatccacatgcaacgtcatgccaggaaaaatgtaaaacagaatgcataatcaaacatagagtttgggtaaattaaaattattttaatttcaaattttagaggtaattgcaacataacttgatgcttgttccaactttaactaaacaaattatttttggaactggtccactcagccttgcatatgttaagaaagacaattcttaggagatgtgcttgggcgtaatctgctaggcttaccctatatattcatacacagttcctgttattcctctgttttataagaagagttggtatctttttctgacttcccannnnnnnnnnnnnnnnnnnnnnnnnnnnnnnnnnnnnnnnnnntccgtattttaaattaaactgaaacattcctcagttgtactagatgtgaagtactccttagtcctttgtggttggtagctctggtgttggatagcatggatggggacatctccactgttgcagaaggctctgttacacagtgccgcacttggttcagttacatctgtcgttaaatgcagtgactttccacaggagagagatgggagaagcgataactcccagggaggacatcgtgaaatttctgtgattggatggagagcttgcatcttcattcccttcccacttgaagttctgatgcttttctcggaagacatgtcttccagctgtctgttgagaattagtgttccatagtaagttaattgtgggaaagaaaattggtgccaatagcttttcagggttggactattactgataattggtgaggtccatacatagttaaacagcacctatatataacggtaaatgctgctgttcaatttcggctccagagcgtttagtaacattagttacagcaagtgctgatgattacattgaagctttgtaaaatgataaaaaa

SEQ ID NO: 273290 - DNA, 459 bp, Homo Sapiens
gtcttgggttgtgaagccttcacctcaggaagacgttactttgaagtggatgttggcgaaggaaccggatgggatttaggagtttgtatggaaaatgtgcagaggggcactggcatgaagcaagagcctcagtctggattctggaccctcaggctgtgcaaaaagaaaggctatgtagcacttacttctcccccaacttcccttcatctgcatgagcagcccctgcttgtgggaatttttctggactatgaggccggagttgtatccttttataacgggaatactggctgccacatctttactttcccgaaggcttccttctctgatactctccggccctatttccaggtttatcaatattctcctttgtttctgcctcccccaggtgactaaggaaaagagcagaagctccttggtttaaccagcacagagaaaataatataaatcccataagggcaa

SEQ ID NO: 273291 - DNA, 529 bp, Homo Sapiens
aattttagaactgaaaaatacaataacagaaactttaagaactcactggataggctcaagagcagaatggatatgacagaggaatgagtcagtgaacttgaggatagagcaatagaagttacccaattcaaactgcagcgagtaaaaatattttataatgccaagagccttagagactgtgggaaaataccgaaagatctaactaacagtcatgtcccagaaggagaagagaaagaatgtattactaaacaaatatttggataaataatggctgaaaacttctcaaattctgtgaaatgcataaacctaccaattcaacagatcggcaaacctcaaatgagagaaatccaaggaaacacaatcccacacgttataaacacactctgaaaactatagacaaaaaaaagtcttgaaagcagtcaaagaaaaacagtgcattacttataggggaaaaatggttcagataactgcagatttcttatcaaaactgtgaagtccaaaggaagtgcaaaacattgttaaaatgctg

SEQ ID NO: 273292 - DNA, 489 bp, Homo Sapiens
atgatttaagtctgactgtgagcctgcccaacttttaccaagttagtgggatattcaatttcagccatcactgtggctccatatgctactactgggtcaagggaggggctttggagatcttacacagggataaacattttaaaaatctttcatagtctttttctttcttctccttgggtcttaactctccttaactccaaagatgctcacttcttttccacaatatgtaaacaaacctaggaagaaaaattctgtcctagactttcaaactccctggagccaacagagtaaaaagatttggcaggaacaaaatgcaaattagtacatcaataaatactcccaccacatttgaaatgttaaattgctaatgttaaccttccattcttactaaatgactcagaaatgttgaaacagcagtatttttctttagtcattatttccttggaattgtaacctagagtagagcagtaatctgtgctccatgcaaaa

SEQ ID NO: 273293 - DNA, 817 bp, Homo Sapiens
  misc_feature (273)..(312): n is a, c, g, or t
agtaggctggaaggagtcaggaagcctcaaatccccagcctctgacttacaaagcacccagacctccctcaggactagacagagcagccatttcacccagagctgcctccattccagcactgggatgtggttggtaatgtgagattctcactatccaatgccgcaatcagagccatatgcggctatttaaacctcaatttaaatgaattaaaattaaataaagtttaaaaaccagttcctcatccacactagccacattttaagtgctcatgnnnnnnnnnnnnnnnnnnnnnnnnnnnnnnnnnnnnnnnngttcagaacacctccgtcatcacagggctctcttggcaggatttatgggtcccctttacgctgagctgtctacccctgttgcctaaatgcctttcctacctaacagtagctgttcagtgggtgcattggccctacagactctcccaagcttctttctccaccagtagaagtagctatgtggccttgtgaggtctcccttctagaaagaacaggtagcatgcctctgacaaccacgttgaccaggtgacctgcaagcatccccaggatcaactagcaacctaagatttgctgcccaaactaatgcttctccctgtccagtggacacttctcaactaggctgcccttctgtgtcactgctgctacttagtcactcgttgactttggaagaagaggcccttcagaggctccaatgaccaagaacattcccttccctactcctcagtgtcacgccccgcctcctcccaagcatcaccatcaccaaaaataaaactgccttggtatcctt

SEQ ID NO: 273294 - DNA, 1092 bp, Homo Sapiens
tgcgaatgaaaatttcacattctaattatcacatttgataaaataagatacaattctcagtttgctaacctatcattagtaaactatagtaaaaattatttctaaattatgtattttcaatgattgctacatataaaatgcaatgaaattatgtttacattgaaacactttattcttaaaggggaaggaatcaaatatttactgagcaccatctatgtaacaggtattgtacatacttcataactaaaaactataagtgagttttctataattattttagtaataaaagtgaggtctgtattccaagtaaggagtaagattcattgtcaaaactttccccacaagttatcattatatctcaaggaatattctcaggatggtccagagtttgtgtaaagaaatcaaactttcagaacaacagtagtaagatggaagaattctccaactaagacagtaacttaataacaatatattagccaaaaagctttaccaggacttcagaaaccagcttagaagttgccataccccaggcatgcaccaagccaagaacaactgaaatgaaacaattaagaaaagctactgtatttcattcatgatagccctccacaaaccagcacagcttggtgcaataaagaaaaaatgcccaaaacacagcttctgtcttgggagagagaaagaaaggggaacacacatccaatgttctggcttttcatggggctgcctgaggaattggtttctgtctcacctgactcagagcagtgatggagatatagcatactttggatgcctaggggtcactaagaacaaaggagagctctggagtttgtggaagcaccagagaaaccacagtaccacagataggtgctagaagaagcaagttattacaagattctgaaaaaggaccaaacatacatctctaattggaaatttatatgcacaattccagagaaaatgcatgcccccaaaaagtttgaaaggtacccagaataattagctgggatgataggtgaaagtcttctcttgtatgaaaccagtccatgaagactgggagagatggctactttatcaaatacccaaatctcagaaaaaaaa

SEQ ID NO: 273295 - DNA, 469 bp, Homo Sapiens
tcaaaagaaatgaaactgcacgtccccaccaaacctgcacgcaaacgtctgaagtggcttcactcacaacagcccacatgcccatccacaggtgaacccgtgagcaactgtggtacctccacctgtcccacaacctacaactcagcagtaccaagggctggacgctggtgccaccacacgggtcccgcgaagcctgctgccaagtgaaggaagccagacacaaaagtctccaacctgcgggagtcactcacaggacaattctggaggacgcaaagctgtaggagcgaggagagacaggtcgtggctgggggcccggaaggggcctgaatgcagaggggcaaaaatgtgggctgcctctgctcggcgcagaagtgcccaactctagacccttaccaagtcgtcggctgtacatcgaaaacgggtgagccttatgtgtgtacgtgataccgcaataaacctgacttgtaaa

SEQ ID NO: 273296 - DNA, 930 bp, Homo Sapiens
agggccagtttttccagtgctttctgtgagaatacttcattatttgctgatgacgcacttttccttgacctctgtagagactcttgaagacaactctgaaaagtgggctgtgactcccgatgcaggggatggtgtggtcaagccctcgtctagagcagacccagcccagacctctgacacattagccttgaacaaccagatggtgacccagaacaggactccacacagcgtttgccaccagaaaccacaagcaaaatctggatcttgggacctccaaacttatagcgctgaccaacgcacaacaggaaactgggaatctcataggaagagccaggacatgaagaaaaggaaatatgatccatcttaactgaggctcaggccacataattggactctgtcacaaagggactttggaaaactactttttggtcatgaaattgttcatcgctgctggagaatgaacgtcattgcaatttatcttgcttcattctgaaccttatcaagaggatctgactgagagcccactgcagttagagctgagcacttttgaaaagcttgtccatcactctagtagggagaggctctggacagatgaataccttttcttcggcttgtgaggcttcccactatttattactgaactattatgttaatgaagatggacattttaggaatcaccaatggctccttgccctcaagcaatataggccagacttggtcctaagcacctgcctcagcaattgtctacattcagttgttttgcataacgtctgccttctttcctttacggtccatgcctttaatgttgcccacattaagcactgtggatcacgacaggaaaaaggttggagcagtgcttttcactactttgtatcaatccaggctacaatcttcatttaatataaataatttatgcatttatgacattac

SEQ ID NO: 273297 - DNA, 593 bp, Homo Sapiens
taataatctttctaatctttctacgctcagattttccactttgagaagtttgcaaggtgtctcttcagatagacctggttagatagtggtcccaactacttttcagctgtgaggctttgggctcaagttacttaatatccctgcacttccattttctcatatgtaaaattaggattttttcttcttagagctgttatgaggattaaatgagataaagtatataaagtgtctcagctgctgatgtaaatttagttattatcattagacgtgtccaatgtctacctcattagtggcaacactaggaccaaaatcctagtctccaaattcatttacagctttcttggcactgtactaataagtgacagtggtgacttaaggatggatggtaacaaagagatgatctcaggtattggaaggcctgttatgtgctgtgtgtacatccaggctagacttggtgcaggtaagggagagggtggcaggttgcacaaccatattggacattgtctagttagttcctttcctgggaacttgtcttcttcactccttaatctctcctcctacttggcttgtgtttcaggagctacagaaggccc

SEQ ID NO: 273298 - DNA, 782 bp, Homo Sapiens
  misc_feature (505)..(505): n is a, c, g, or t
ctcacaactgaggaggatgaggacaggcctgaggtgcacaagcccatcagtggaagatatgaggtatttgaccaggtcactcaggagggcgctggacatgacccagcccctgagggccaagcagactatgatcccgtcactccatatgtcacggaagttgagtctgtggttggagagaacaccatgtatgcacaagtgttcaacttacagggaaagaccccagtttctcagaaggaagagagctcagccacaatctactgctccatacggaaacctcaggtggtgccaccaccacaacagaatgatcttgagattcctgaaagtcctacctatgaaaatttcacctgaaaggaaaagcagctgctgcctctctcctgggaccgtggggttggaaagtcagctggacctcatggggcctggggctcacagacagaagcacctcagaatttccttcagtgcctcagagatgcctggatgtggcccctccccctccttctcacccttnaaggactcccaaacccattaatagttcagacacaggctccttcttggagcctatgggcttcagatgtctttgccccatttgtcacctcgcacacttatagcgtttcctcctcgaaattctaccaagactggtcaaatgttgctgaggggcctggaccagctgtcctttacaccaccttctcaacactgctgaaaagaacccaagagaattgtcacacatgacacaagatgtacataatatcatgctcactgcagtgttatttaaaataaaaggcagg

SEQ ID NO: 273299 - DNA, 666 bp, Homo Sapiens
  misc_feature (183)..(183): n is a, c, g, or t
  misc_feature (328)..(328): n is a, c, g, or t
aggttctcggaccccagcctgctggccctggggcgcggggcgtcgtgggggtcgttgtcgttgagggtcgttgccgtgtgtggcgtcttagcctggcccctgggttgtgccacaccgacgcagtcgacacctctgagcgcctcgggagccccgaatagcagctgggagaaggggcgaggactngagcctcgctgcccgctgccggccgggctagagatacgggcgtgccccccattgtgcgcctcccgccccccggtcccctcaccctgcggccacctggggcgtggggcggtgctcctgcccgtgcacgtagccgctgcgagcgganggcctgctcacctggtgcctgctactcactccccccgggccggtgggcgaaggacacccgcaggaactcggcagaggagaaattcagacggctcccgagggtaggaaaagaccccggcccaccgtggaatctgaaacacccgaccactctgccatcccatgtttcaccagtcagacccccagggcagggcgaggggaagcagaatgcaaactggggcaccgtttccctgaagcgtgttggccgcgtttgtcgtagtgctagaggtgcatacccttggaccccgaaaacccattcctgggaatttgctccaaggaagtaaagatgttacaaagatggaa

SEQ ID NO: 273300 - DNA, 432 bp, Homo Sapiens
attccagaacaaagaatactgcgagaaaaagtaggctcaggctggggaccccaaaatcacgcatttccctttctccctgaagccagctctcactgcacctagtaggtatacaagagtgcattcatgtgcctacacaaatatgcacacacaaaactaaagaaaggatgtcacttgagcacacagcttcctgccccctccaggagtcctaactgctcagcagagaaaaatagcttagaggagcataaagagacccaagaactcttcctcttggctttcccagtaacttctggaattacatttggaaagtcacttcacccccaagacctgaatctcatcatttataaaaggactgaggctgcaatatgtgaaagatcaggattttcaagctatgttctgagcaaccaaaaggttctgagtgctataaaactctgc

SEQ ID NO: 273301 - DNA, 639 bp, Homo Sapiens
cccaactattaccatatgttcatttatttatatcagttactaaatgctatcttagtgggtgaatttcaccaggggcaagaaaccagaggctgcagctacagggatgacatagcacaggccactgtgagactgcctcccaaagaaagactttcctggagagctaaaattgtagagttatgagtggcccaaaagccacaagcagtaatcaatcaactaatcataattccaaagggtgagataatgttcccacagtgtatcattagtgtgatgagtttatctctttaaagcctcacaacctgctgatatgctgtggtttttcttggtcctatctctttatcttttaccacctctgatctctttaaacccaccctgtttccattttcctccccgcccattgtttcctcatttttccttaacacttcttccttagattaacctttaaatacaaatggaaataataatcggattattttttgtaaggaaaccacctttctgtttcattattcataactagaataatgaaataaagctgtttatagaaatgcatctagaacatgagacaaaattgatatagaccaaacattgttcttgaatagtggtatcaaatataaaattataaataaaatcttaaaagacaaa

SEQ ID NO: 273302 - DNA, 422 bp, Homo Sapiens
agaggcgtaagggaaggaggtcaccaaggggcaggccaggctttatgtgaatagtgctgttgtgagccaagtacttgagtacttcgaggtccccttctactgcagacatcttccctatggttcctgtgacccaggtttgtctcagagtggggttagcacacggtaccatctccatcccctttaaaagtatttattacatttttctggaaatggaagtctgggaattatatttccctgatagtcttatgagcaggattccaggttgattctgccaaatgtgaggcactcaggtgagactagaaagcagaaagatggtttaaaaaatcatcgttttcttcctttgactctgcacttatgacagcaggatgctcgagactcttgcagtaatttgggcaaagatttccacagtgcaaaatagaaaa

SEQ ID NO: 273303 - DNA, 424 bp, Homo Sapiens
agcggtttcacctcgaagactggacatcattgtaaaaaccagacgcagtctaaaagtgacaatgacaactgtgcaaaaatagaaggaaaaaaaggagaaagctgaaagtaaatcaagtctgtctataggactctcacaggagagcatgaatcatcaaagaggttccagagttacaaccaagaagtatttatggcgatcagtggtgcaaagggtaataatacaaacataataaagaagagaaaggaaagcatactagagataaaggaggcctagcattaaatgaatagggagataagcttaatgattatgctcaaatgactgagctattgatggcaaaatggctgagctttggaactgctttttaaaactggcctttaagaagataaataaggataattaaacagtaatgaagacccgtttcatt

SEQ ID NO: 273304 - DNA, 404 bp, Homo Sapiens
ttttttttgagatggagtctcaaaaatttaaaaaatatatatttttttaagcatcagataagcttgctctgcaaagatcttagatctttgtagtcaaaaatacctagaattgtttgaattccaattgtgacaattagttgtaggaaccttaaacaagttatttaaaaccccagtcttagctaaaaatggaatctgaggctgcaaagatgacagaagatcataatataaactgcatggtgtacagtctagaacacagtcttagtttcccacaatttattaaaccccaaagaaagaaaagatgggagaggaatgcactttcctttaactcccttcacaaactggtgaatgatgacacccaatgatgactacaacattctcaaatgagggaaattaaaacgaagaag

SEQ ID NO: 273305 - DNA, 451 bp, Homo Sapiens
agaagtggttgatgagttcatctgaagaaattcatgccccacctccccaccctgcccctccctgctcccttttgatggtggcctctgggtactcgggcagagtccttgggacaccagcctctctggggttctcaggccatcccgttgggtgtcgcccaggcctaagtgagtcgtgtgcctctattggaggatggctgttcccctggtggttgcatccaagtatctgtctttctttatggaccacgaagggaagcccaccttcctggaggcaggacttcggcctaagaaacacaggccctggtgctatctgacctggggtccagcgaggtgggaatcccagtgtgtgagcgacaggccttcttctattgacttacaatattctagaaggacctacgtgtggggacacagttttccaaactgaggaaaatgttgcaataaaagaatatgttgt

SEQ ID NO: 273306 - DNA, 653 bp, Homo Sapiens
acaaagatgaaccagacacagtcttcaagaacttcagggatcagggaaggtttatcctgattgtaatccctccagaggttttgatcatttctctaatcacttattaggcctcttgcttcctgtaggaatttgttctctatattagattgaaatctgcctgttctaatttcaacttcctttcttctggccctggctagtcctcagtgtacagaattgccattggtacctgctggtcaaggccaagtgttgtgagccaaggtttctaaccttggctgcagttacacttaactgctcctctccgaagctggatttagcagagatttgatggaagccctgcaaacctcgattcaaatcaaagttcaaacctagtgactggttgagtgaactgctttaataataacagtgcaaaaattgaatttaaaataatccttttagggatgcaagatgcagtggtttagccttttattaatattcttttctttccactaataaagattttaagtcaacatctccttaaatttgattaattccattaggatcactccaaaaaaaggtttatcagtggctttgaaatccaaatgggatgaagaaaaaatcatttatatggcaaaatctcagttacactaactaaaataaagcccttctgctgaatt

SEQ ID NO: 273307 - DNA, 554 bp, Homo Sapiens
cacttctggaagggcattctgggtggggaaggaggcccagactctgcttcggccatgatttgtgactgcccaggactctcaggttgggctggccctactcaggattacactgaaagtaatggcctcgtaagtacaggtgatggttttggacacgtcaggaattcctaaaggctgaaagagtgtatccaagtaaggtctgaacctccgactgccttttatttgggggaacacaaaaccaaacagcagatgttttggacttgatctgtgtacgtacatggggacctgtctgcatatacacacggggaatgccagaagaaggcccagtctgcaccaggcgtctggtcaacttagcacaagggcagtgcctggacggacccggagcccccgcatatcagcagttcacccagtactcctcagagactggtttccctctaaacccatcccgggcacataccacccctgttttgcatgtatttctcatttcattttagggatgacaaacatttgtgaaaccagtgagagaaggcttgatgtgtataaaagacgtgatgtgc

SEQ ID NO: 273308 - DNA, 907 bp, Homo Sapiens
gattactgactcaaaactctctcactgctgggcgaaaagaatgagccagaaacttaaatgcttttagaatttggcccatggccctttgatttgcgagtattctttatggtttaaaatctcctcctagtagctcataaacatgtatttccatattgatttggggctcttggtaacccaatttgtgtgattttaaagctgcagaggctgataggatttatctttggatgacatgttggcatgtgcgtggcttgcgcctggtcatggatacggtgtcccacagggtatttggaggcaggaaaggatcatggagagaggcctgtatgttagccctgtagccagcggccttgacaaggctcagaggcatcttaaggacacctcaagagcttttcagcaaagatgtcacatttgccttaggattgctgcccccgggcctcacacccagttcacccaagagggctctcgggaagcgctgcccggggtagtgtggtggtggtatgcaggggtcggggggaaccactcttggagaaccaactgtgctaagaccatggagcctgcagtgagttgcccaggttcacaagcaagctctgtcgctttctagtgtctgacctcaggcagctcttcccctccccaagccatagctcctgcatctgtaagatggggagaacctgtctcagaaggctgctgtgagaatgaggtgaagtgctgtatgtacagtgctcgcatggtggctggcacctagaagaaagtgcctgttacatgttagctgtctttattgttataattagtgtccaagctcacccaggaacagagatgctcagaccaacataaattctggatctccatgtaactctgggcaagttagtaggtaacatatttaagtcttggtttcctcctctgtaaaaaaccc

SEQ ID NO: 273309 - DNA, 401 bp, Homo Sapiens
cttctgtcctttgacataactagaacctggcacatggtagtacttactgaaaaagtgaattgcagacattttcttgttctcacttggccttgccttagtgtgtttctctgccattcactgttccaacatactaactcatggcaggaggctaaagttaaggatattttatcagattctggttgtttatggtcctcactctcttatcccttcctggaactatgaaaataaattaatagactattctgtttcttccttgtcctaaatttaatgcaaggattctgtgcaattatatataatagagttttcaagtctttcaatttttacatacaactgtaataattgttccttgcttggaaaaatcaaaaacttaagttcaggatgatggatagcaacttcatcaa

SEQ ID NO: 273310 - DNA, 1150 bp, Homo Sapiens
  misc_feature (891)..(899): n is a, c, g, or t
ttttaggtattaagtaaaataaaataggaagaaaaggggggaaggtaagcaggaggctttaaacatcactcagcccaagcttaatatgaaatatggaaccaaagcaattatgctgataatttatgatgaaagaaatatcatttttaaaaatcaatgattaggacacttcaggaaaaaagtagttttgtgattggaattacctgaattaatgacttaactgtccacttgatctttttaatgtagtaaaaagagagaaccagttttcaaggagacaagctcaattgtatttaattttatgtcctccttacacttcaggcttgtacccagagttgtccctttaaaagtccacagtggcactgccaacttctactgcagctgcctccagccacacagtcctcccctgcatgctgttatactcagttatcaggtagcatcctgctgcctgctcacgtttatcacagagtttcagtctatcctctggacattatccagacactacttacctatctttactatgaaactgagagttctgtaatttttttccaacatacacagaacaaaatgggataattagcattctattctgttaactacattttatcttacggcactgccttcctgtggccaattaaaaccaccattttaggtcttattcatacatatttttaccttgaagacaaaagcaagtaggctcttcagtagagataaacactaacctggccagcaacttgcattatgcaacattttctgtctctatcttggcagcctgctcttaaacccgtcagtaactgcactgcaaagagacgaccacctcacaaaataattttaatatctttcattatgatttctgatttggcagcaaaacttctgccaagaactccttgtaaatgnnnnnnnnncctgaaatctgcttttcttgatgttgctgcctgcattcatctacgtgcttgaagcctataaaaagcacagatatcctactgtcccaacacagaaatttctgcgataaggccccatcccaaaagatttctacctaccatgcgtcactctattcttctaaataatacactgtgcctctgacccatagtaaaccatggtcacacctggcagtgaccaaagagaactgcagaatcaccaaaccaacaggtttctg

SEQ ID NO: 273311 - DNA, 461 bp, Homo Sapiens
aaagaagaaaaacatgtgaatacgatacaggaccaggccccacatcctgataacatgcagtgcctcttcaccagccatgccttttgcctcaccctttctgttgctatgttctctatcctgcgttggacaaagagtgacaggcgaggttttctaggcatctccatcaaaatgagaaggaaaaacctccatctctcagcacttattaacctaaaagataagttgcactttctacttttcttaggtggggattacatgagccccaccagtcatcacggacacatcgtttgtacctatcagatgtatcagtagagatggggacattaatttgtgtaggggtgtcagcagtgctctggggagaaagagatattggcatacacagtggtctggagcatgtcttcacaaaatagtgtttgtggggagccagagattcctaaaagaacagtgaatagcacagtctcatt

SEQ ID NO: 273312 - DNA, 771 bp, Homo Sapiens
  misc_feature (308)..(308): n is a, c, g, or t
  misc_feature (524)..(583): n is a, c, g, or t
cttttattgtggtaaaatatacataaaataaaatatgccattttaactatatttaagtgtacagttctgtggcattaggtacaacccttgatttgcttttaaaggcattctgaagataatggtttactatttagaccgcagttggccgaactttcacttcagttgtttttctggatacagatttataacttaatactactttatttaaatttcaaacatatcaacccaaaattccttaaggcacaagcatagaaaagtggtagaaaaccataatgaataaactattatagattaccagtttaaactancttgtggtaataaaaaatgattaaggcaatttactgttcttccacaggggagtgaacaatttatatgtaaaagcagggggagtggaagcttcactctaacttccctcccagggatgaagaggagccccctttctgtgcctcacactgtgcctggtgatttaggttggtcatcccgtctaatccccttattacactctgaagttgatcttcccactnnnnnnnnnnnnnnnnnnnnnnnnnnnnnnnnnnnnnnnnnnnnnnnnnnnnnnnnnnnntagtagaaatgagaattgaactgtctgcctgcaaacacatactctgttcaagatggcaaatgcttgggttagaatatttttatatgtttgacaggacaaacaatggtaatgatgttcttttggctaatggtaacttcaaaaattgcttttcaaagcataaccttactgtagttttaaagtagaaaagg

SEQ ID NO: 273313 - DNA, 563 bp, Homo Sapiens
caggaaaaaattaaaatatactgaaaactgtcctcttcccctcccctcccttcaattcattttctgttccattatggaaaaaaaaccccaaatttggaattttaatgttgtttttcctccattggttgtttagttagtgattttgccgacttcctggatgttcatttctggttctgcacaaaagagtcacatttccttttggaatcagggccaggaagacagaagcggactcgggaactgtgagtgccccccggtcttccccggcgcctctgaccccttcctccatctcgcagccttccctgccttcagcgcggagttccctttctccagggcttcttgtctgaactcaccccctcggctctcagcaccattctccacttttaggaaaagaaactctacaatttctatgcaaacatcggataagaaggggagggggagtgactttgattttcattttaagactctgaaagacggagaaagtaagcagaagcgggctggtgtatttcagaggctcccagtgagtccctactaaatttacctaataaaatgaatttttaaaaaaa

SEQ ID NO: 273314 - DNA, 523 bp, Homo Sapiens
  misc_feature (38)..(38): n is a, c, g, or t
  misc_feature (191)..(191): n is a, c, g, or t
  misc_feature (195)..(195): n is a, c, g, or t
tgcatgagggtgatggtgggagtcatcatcctctatgnccatgtccaccctgtgggagctttctcaagacatcaagatcgatatgaaaggctgcataaaagtttgaaaggagcaggccccagacagtgtggaggggctgctaaatgccctcaggttcactacaaagcacttgaacgatgaatcaacttcanaacnagattcgagcaatgcttcagtagagctctgctcaaagaagaggatctatgtgctgacctcagaagatgtatatgtttacataatttaatacagattgatgttaatacttgtgtatttacataaccgtttccttcttgtcactgaaatatatggaccttaatttgtatcctgactgactcaacccagcagagcataaattgacttgagagccttacctttgatgtctgaaatgaaacccccttctccaaaggcaaaattcggagactttgatctttgctactggagtcctttaacaacacctataacgataaaaaattcctaattgtta

SEQ ID NO: 273315 - DNA, 467 bp, Homo Sapiens
ctccattcttgtgacagaacaggtgtgggcgtgttcattgacttccaacccccttcatgcatggctgacgcatgggatgttgctgtcatgcacgtgtaactgaatggagcggttccctcacggtgttctaggcaatggcacgatattagagacgccctgaggcagaaaaaaattgatgcagctgaagtgaagtgctgtcagtttcacctgtgtggagctcgttgccatagcagtggttacagtaaaactgggtccagaggatgtgaacgagggccaggagatgtacaatataaggcagaaaaatggctgaattgttatcatactcttaaataaggaaagccaaaataaactgctttattgggtcttggctaattaaaaaaatagaggtttaaggatatatttcttaagaacataaaaggtaatcattagtagaatccaaaataatatgtacaccccaagctaactgg

SEQ ID NO: 273316 - DNA, 346 bp, Homo Sapiens
aaaactgtctcaaataatgataataaataaaaattaaaaatcctctaaattttataacagtgtaagattatagctatgacaaaattgctataagtttaaccttttgcaaaagtattgcaaaaattaacacttttactaaaggaaaagtgttagtttttctaaaagatgaaacagtactagtcttcatctagccctaaatgtaaactaggaaattaattacataaaattttggcaaattgtatgcttaatctgtaagtcacacaaaatgcattctcaaatatctgccacatgggtagtatcctagagtacactaatttggccacgttaaagacaatacattctcaaa

SEQ ID NO: 273317 - DNA, 753 bp, Homo Sapiens
  misc_feature (229)..(229): n is a, c, g, or t
  misc_feature (487)..(487): n is a, c, g, or t
  misc_feature (521)..(521): n is a, c, g, or t
  misc_feature (525)..(525): n is a, c, g, or t
  misc_feature (537)..(537): n is a, c, g, or t
  misc_feature (539)..(539): n is a, c, g, or t
  misc_feature (542)..(542): n is a, c, g, or t
  misc_feature (636)..(636): n is a, c, g, or t
  misc_feature (638)..(638): n is a, c, g, or t
gagtaaaagtgatcgtcatttgagagttatttggctgctttgggcttcaaggctggagaagcaggtaatggcacagtatctcactcactgttcttcctgccctggggttggcagcaccaccagaatgcccagaccactgagttggaattgtcttcccagatttccaactcaggtaaaagaacaaaagccaacaggaaccaatggcttaaggaggagcaacatgtaaaancagtggtgtaaaaagaagaaaatccaaccgtaagagggcaggagagaagtcaagataatggagccgagtggtggcccagaaatgtgagtagctctgtgatgactagcgtccagtgtaaaacaaatttaaggaaagcaagcattatgaggtctcaagataatgggagccacctgaaaacggagataaaagacttgtctaaagcttgagggctccacatgaagagtatgagatggaaagactataattcagtcaggaacntccatgcacggcccaccaaaagccaggacaatgnactnacaaacatggtntnatnttaccagtgccagacaccctgcatgccagcttcctgttctctgcctggcagaaggctgcctagaggcagtcaccgttacacagcccctctcccntnagtatcttcctcaggttagtttatggtttcacatagggaagtccaacttgatgaccaggcctctgtcggatcacacaggggcccaggaagtactctgaaatcgtacaatctgtgg

SEQ ID NO: 273318 - DNA, 379 bp, Homo Sapiens
gcccaccccctccttggctcaggggtaaattgctctcccaggcagccacacaagccaccaattcagccaatatccacagagaaagctggcgagtcactgggatttgaaaggttcaacaggtgggggtcaggacagagattctgtactgggaggggcaggcatcagggctgcaggactcctgcctgtccctatgctctggcctctgagaccccagccctctttcctctggaggatgaaaggcccttcccttcacagctctgtgccagtgtgaggaatccatctggccaggcccgagagttcaattctcccttgttctcaccccaagagatgcctcatttcctcttccagagacagcaatacaaaaacatgctcaaccttt

SEQ ID NO: 273319 - DNA, 465 bp, Homo Sapiens
aaatgctaacgaagtaggtacatgttgctaggaaaatggcactgatagacatgctggacacagggctgccacaaaccttcaatttgctaaaaactcagtatctgcaaagcatggcaaagcaaagtacaataaaacgaggtatgcctgtacttaattctattttatgatgatactcctgcctcaaaatagagtataaaatctaatataatataaaactttacaataattaaatactcacatagttttagtatgttctaaaatactataattacttaacttggaggattttgttttgcatattgtataccatttaagacttggttactctcaagtagattagaagttaatgccctttgaagagtcagatgatctcagtacctaagccattcaccgactctaaatcaggcacattgctaggagcgctaatatcaacccgctgttctaagtcttccaaaaaagtttact

SEQ ID NO: 273320 - DNA, 691 bp, Homo Sapiens
acgtgatgcttgtgattctagactcctttttgagtttggcggatctcctctaatgatgggatggacacagggcagctaaggattctcttgtctgtgtaagccactgctctgtgagtggactcgtcatccacaggtcacattgccagaggccagaggtcaccgtgctggttacgcaccactgccatgcttatcccagggcacggcccatgccaggccccaggtagacacttcatgtctggaatgcataaatgtggatgatgacatgtttgagatgaacaagcacctcacgtacttgagaagcatcatcactttgggggaacttttccctgcagacccggggtgtaagagtagccagaccagtgccctcaggactggacttttctcctggttctcataccagagaaaactaattgttgggtgtgaatgcattgccttgggggttgtgactgggtacagccatcttagaaagcaaagcggtcatatgaataaaaagtcataaggatggattcccactctggaaagttcatcgaaataaaaaatacatacacataaaggagttcatcccaatgacataaatgcaaagagaatttttttggggaagaaattccttgatgtgatgtgtaagaatagactctgggctttcctcagctcctaagtgttggaaaaattgcctacatgagaaaaagaaaaa

SEQ ID NO: 273321 - DNA, 522 bp, Homo Sapiens
  misc_feature (104)..(104): n is a, c, g, or t
  misc_feature (118)..(118): n is a, c, g, or t
  misc_feature (144)..(144): n is a, c, g, or t
  misc_feature (153)..(153): n is a, c, g, or t
  misc_feature (165)..(165): n is a, c, g, or t
  misc_feature (184)..(184): n is a, c, g, or t
  misc_feature (192)..(192): n is a, c, g, or t
  misc_feature (199)..(199): n is a, c, g, or t
  misc_feature (209)..(209): n is a, c, g, or t
  misc_feature (211)..(211): n is a, c, g, or t
  misc_feature (224)..(224): n is a, c, g, or t
  misc_feature (235)..(235): n is a, c, g, or t
  misc_feature (241)..(241): n is a, c, g, or t
  misc_feature (244)..(246): n is a, c, g, or t
  misc_feature (251)..(251): n is a, c, g, or t
  misc_feature (262)..(262): n is a, c, g, or t
  misc_feature (270)..(270): n is a, c, g, or t
  misc_feature (280)..(280): n is a, c, g, or t
  misc_feature (282)..(282): n is a, c, g, or t
  misc_feature (297)..(301): n is a, c, g, or t
  misc_feature (304)..(304): n is a, c, g, or t
  misc_feature (307)..(307): n is a, c, g, or t
  misc_feature (309)..(309): n is a, c, g, or t
  misc_feature (317)..(318): n is a, c, g, or t
  misc_feature (321)..(322): n is a, c, g, or t
  misc_feature (324)..(324): n is a, c, g, or t
  misc_feature (326)..(326): n is a, c, g, or t
  misc_feature (335)..(335): n is a, c, g, or t
  misc_feature (337)..(337): n is a, c, g, or t
  misc_feature (339)..(339): n is a, c, g, or t
  misc_feature (343)..(343): n is a, c, g, or t
  misc_feature (345)..(345): n is a, c, g, or t
  misc_feature (352)..(352): n is a, c, g, or t
ttaaccctctgtcttcaaaatggaggtagagtgaaccttcttacatattcttatcacctattccttccccatttaaaacctctatgccccaacctggcaactcnagggagacctttcncccttataactcatagccctagtcancaggattcnccaacctattcntcttaccaataaagtagcntcaggaancggccanaatatttctntnaaagtttcccaantgctagagganaacagnatnnncaccntcaccaggtanaaaggcanccagggaccntnacaaaattacaaccnnnnnggncgngnacgaccgnnctnncncngttctttanancntccntnccccccngacctgggaggacactcactcacccccagatttctctcattgtggccaaaaggaagcctttgagagccctggccatgaaataaaagaccccacctgtgtaggatgacagacatcaactaagggcacctcctttggggacaatccgcctgccttcccacaacttcaaaagc

SEQ ID NO: 273322 - DNA, 454 bp, Homo Sapiens
ggcttctcagcttttgatattgggtgaaaggaaggatgagaaagtgttacgtctgtcatcagaggagcctgggatgcgtgtgagcttctttgttacccttgtctaatggcttattcttggaacccaggcctgtacactagtataaaactgttaccacctgactagctgtggtctctaaataagaaagtggaaccagaaaatctttccccatccctctatcacaattaatgacagttctttgtggaagcccaggactgccattcccctttcctctttgaatgggtatcagagatttgcagcactatttgcttaaggttttttcttcatgttctgctaacctcctttcacggtctgaataagtgagtgggaattcctctaggataggaaaatatattaaaaagtcaaaatttaaagagatacctgtcaaaatatatggctgaaaatgacacgatga

SEQ ID NO: 273323 - DNA, 460 bp, Homo Sapiens
ggccctcatgctctctaccttctacttctgctggggcccagcctcaagggcatgagaccatacacccacatagcaccacatcctcagaaggtggccctcatcagtggcttatgattttctactcataatcttaaaattttgtataactgtctttgcatttgtattttgctggtgaagtccaatgggtcaatgaacatgtgtcaggggctgggaccctctgttcatgcatggacctacctgccaccacctgttcaccaccttgggataagtttttacctgtctgctccctcacctctactaaaaaaatcactgctgcccttcacctgcactgaatcctggagaaacacacaagatgatcgaggttgggcacctgcacttcaagtcatgagctatgggtgtctacaccaacctcaagagtaccctggagccacagggagcatctcagcaataaatagccaat

SEQ ID NO: 273324 - DNA, 873 bp, Homo Sapiens
cgctaacaaaagtactttgtgctgaaaataataatgcattatcattaaattaatattaaacaaaagaattaatgatatcccaaactggttgcttcatgacttgtagggaaaataatagatgcctattaaaatcatccaaaggattaagtgcaggttgctctactaatgaaccaaaaaaagccataacaggcattttttaaaaggtatctttttaaatgcaggacaagtcaatttgccatccaaaaatatgaactaatttccttagcatataatagtgacttgctattggaatgacgccttttcccctaattaatcattatctaaaccacatcttacatgctcatttaatttctcacaaatcaagataggaatacagatgaaagaaatggctgcattaaaaaccggtggggaaagtgatgattgctggcgaaagaaatcatcttagggaacccagctgaaggttacccttctgttatttagcctgaaagaacatgactttgcagagggcgcacctgggtatcaggagctcagactttaaatcaaagaccgtgcctggggccaccatggactctgcctctgtaaaaggcaggccaaaatgtcactaccacactggagtactgggagtttaaagcaaccgtggagataagccattctctaagcccgaaaattaaagaaagaattacctttatctctactgccaactgtcaattaactgcctatcatttcatgcccagtaaaggttgaatccccagatcactacactctcccataaagaggttcttcctggaccactttaccaaccagtggtcaacatgtgctctgagaatacaaattcactggattatatccaccttgccaaagtggtgaacaatt

SEQ ID NO: 273325 - DNA, 452 bp, Homo Sapiens
tgtgaccttgagcaattgcttaacttttccaaagcctccaatagtcttcactctaaaataaaagataatcatatgagatattgtatgcagggtatttacaaggagcctggtacttggtgtacctaatgtatgttagttattattattaaattagaggagcaaaaatttctctagcattgactgctcctgacataatcacaccgaagaggggatacacgatgataaaaccttcctgcagtagtggctatagaaatgatgacggggagaagatctggaaaatattccaaagaaggctacagatagatacattttttccattggaattaggcaatggagttaaacagaagttacaatatggttgaaataaatgtatttttttaaaaaaagatttctctttccttaattattaaaaaatatacaattttgtagaaaattttaaacaaagtataaaa

SEQ ID NO: 273326 - DNA, 341 bp, Homo Sapiens
gccaggtgctggtcttgggccagttctcccacgacggctcaccctcccctccatctgcgttgatgctcagaatcgcctacctgtgcctgcgtgtaaaccacagcctcagaccagctatggggagaggacaacacggaggatatccagcttccccggtctggggtgaggagtgtggggagcttgggcatcctcctccagcctcctccaccccacaggcagtgccttacctgtggtgcccagaaaagtgcccctaggttggtgggtctacaggagcctcagccaggcagcccaacccaccctggggccctgcctcaccaaggaaataaagactcaaagaagcc

SEQ ID NO: 273327 - DNA, 265 bp, Homo Sapiens
  misc_feature (135)..(165): n is a, c, g, or t
cttatgtcagctctatgtatccaattagttcagtcagttgcctcccctcttcagtggaagattttgtttttagttcagtttaggaaggaagatttcctttcaggaggccaggtgtggtggctcacacctgtaatnnnnnnnnnnnnnnnnnnnnnnnnnnnnnnnagcccagaatttccagaccagtctgggcgacatagtgagacaccctgtctttacaaaaaaaattaaaacaatatagctgagtgtggtggagaatgcatac

SEQ ID NO: 273328 - DNA, 429 bp, Homo Sapiens
agagaattgtagaggaaatttaatgtcaaaatatgccagaaaacccatccttgaacaaaggtatagataggggcaacaatttattagtggactggaaatgaacagattgaaaatgaattacctgtattttatccccaagtggaaaatttgtattctcccaatttgcttataattatgatttaaagattgcatctctttcacaatattttcttttgaatgtgacctcaaaatattaaaaattaaggatttggcaaaaataatggggcataaaacacattttctatataaaaggatgtgatttaagaaaattttaaaagtggataacatatatcaacaaaaatttgtaaatgggattgagtccctaaaacctggaaaaactgacatgggctagctatttattcactcatcgagttacttattccttcgtaa

SEQ ID NO: 273329 - DNA, 665 bp, Homo Sapiens
  misc_feature (600)..(610): n is a, c, g, or t
gagaagatgaacgagagctacttgattgtgaactagtaacgaccacttggagtcgcagtgtgtctgtaaaatgatgatgacagtgacatcatagaggacatagtgcaagtgaacagtttgatactgagcttggagcctcagtagttctggataagtgagagctgtacgggaggttgtaaccatgagctaccctggttggcagttgacatccgaggaccagcactggtcatcgcacagaaagaaaactttacaccttgagatccctccattcttcttaaacttccaagtgtatgtttgatgggagaagaggggaagggatcaacatttaaaggctctggaaggagtcagataactgtttttggcttcaaatgtagaatgaatccctagattttcctctactgagagaatgaaatcttaacccattccgttcccttgttggtactcagaaacggataccccaaagatgcattttgacatgctgaaaggccttagaagctgccttagaagatctgtctaaccttgtcttgttggtgtgtggaagtgggaatgcccacaggtgcacagggagggagtttctgaaattatctgaccgagaaagcnnnnnnnnnnntcaattgtcttaaacccggtttctagggatctcattaaagaactaggaaaaaaaa

SEQ ID NO: 273330 - DNA, 463 bp, Homo Sapiens
  misc_feature (65)..(65): n is a, c, g, or t
atcattattcctcatgcatcatttgccatttaactgtatttttttcctttttcatgtaacctgcntatagtttacatttttaaatcagaaatgcctgcacattttaaaacgaagactcttatgctctagcctttgaggtcatgcttggaaagtcctttctcacacaaagattatttacactttcatctctttttctctgagtacgtttcagtgtttaattgaccaggaatgtatttcgaggtgtgatatgagacaaggatctgaaatcgtcgcccactgaatcatcatgcactgaccgaaatgccacctgtatgagtgctaaaatcattgtcgctggacctgtgtctgcactgtttaattttagtgttgtttctcacatcagcttctgttgttttcatggttgtggttctcatacttttaatatctgttggagcaaataaagactcgtttctcatcttttcca

SEQ ID NO: 273331 - DNA, 420 bp, Homo Sapiens
agtttatattgctgctaccgctgtgtaaaaacagtacgtgcagtatactgtactcatagccatttcataatataggacctagactctcatttgtaaacgttctaaccctagtttataatgggggaaattattcagatatcatttttaaatgaattcctacaaatacaatggttttaaaattgggtttgctgaatatatatacatcttttccttctttgtgtatggatagaccacggtatgcatatctatcgacactataaatatatataaatccttagaagaattgttcttttttaaaggtctattattggattcacaatgcactttgagtttgattgtttagatatacaattcagagcagaagttggcagataccacgggaaaaactttctgaaatttctgtaacaaatgttttgcaat

SEQ ID NO: 273332 - DNA, 484 bp, Homo Sapiens
gttcctaagatgcacaagcgttttacaccagtggtgattaactcaactaaaaccccactgtaggaagttagcttccccagacagctaatgccgagatcttctaccagcgtagagttgacagaagcaggccagcgaggaggtgtgggacataatagcctgagtgcttgggttaccatggagactggagtgtgtgaggccacagcctgtgctaaagagccatggagccctcccctggccatgtctggggacagatagaacctgttgggggaaatattccctcaccccagggttatttctgcagagcaagggttgcctttgtcctatccctgagcttgctcaacaagagaaacaaggtttcttaagtgttttggttaaagttttcattcttatttgactatgtatatgtaattgtaaagaaacgatcctatgcattgtctttcttttatattcttgtaatattctgaaattaaaattgttttgtttc

SEQ ID NO: 273333 - DNA, 887 bp, Homo Sapiens
tacattattcaatgttaagatacgaagagcttcactacttacaatagaaatatatcttctgcttgttaagataatagaaagagtgatagccctctctcagatggcagaaacagtcatagcccaattttgtggcactctagaaggctccctaaaagatgttccctttgagcaagtttaagtatcacccactagtctctacttgaatccctcagcccacccacatcacattctgcaggaagtgatgaaaagtcagggagtttaggttatgtaaggcctgtggacccattgagccaaactgcaaaatgtgcatcagtgagctccacaacctccccagccccaacccactgcaggaaagtgtctggggatggggcagccaagagttagtcactggaacatgtctgatgctataaaatgctacctgtgatacccagatcccaggttcttttcttctgggttctgatcaaaacacagtagcctgcctgcgatggagcaactagaggaaacaggttccaggtgtgggaagccatgggttaaaaggcaacttgccaaactatgggaaatattctagttgacgctgaagccttaatgcttgactctaatggaggagtcactccattttctcataaaaatgctaagtagatttctgctttctcaagaagctaaatccttttgtggctttatgacttactcctacaaccaagagcttcttaagctattaacagccaagtgtcacagccttaaagatttgcaccgtttgctcatctcaggcatgcccccagtcacaaattcctgcaaaataaaccttggttggacagattgcagaaaaacaaaaaggaaagaaaacataaaacctcattatggttgacaaagaacctgtacaaagctta

SEQ ID NO: 273334 - DNA, 362 bp, Homo Sapiens
  misc_feature (26)..(26): n is a, c, g, or t
ctcaggagcacttaggacctgggttntgggaccagtaggtgggctgcatctggcacccccctccccatgtgtaccaggctgctcgcatagccacgccctgcccctctttaccccgctgttgtccggggctcaagggtggtgacagcagagtggtgacagctgaaatgagcacgcacattcacagtgcgcaggagagggcctggcgcgtcagcagaccccggtcaacaccagcggcagcatcatccgtatcaggattgtgatgtttatctgcttcaacctttctacatatattctgggttgaaatgtttcttttcttaaagaacgttttccttgcgaagatgccatgcaaataaaactaaagt

SEQ ID NO: 273335 - DNA, 470 bp, Homo Sapiens
gaaactcgtgattcatttctgaaccaaatgaaccttggtacagggtaagtataggtatagctcaaactgttacacaatagggctgtgatgcatttatgtagggaatgtaatcacagtgccttccatggcaaggatgattaagcattagaaaaatctttcagtgtggtttaccacataaagtggtgaagagtgaaaaagtatcagtagataaagaacaagcactggataaaatttaaaattttacatgtatacgcacatgtaaagttcttggaaaacttagaaggaaacttgcttaatcaaatatctatcaaagtcttatgttttatgctgaaatttaaaatgcgttaccatcaagatatattgaaacaggagcagttagggcatgatagctatcaccatagctctttgacgttgtactaaagaatccagccaatgcaagatgacaggaaaaagaaatgaagtgtgattag

SEQ ID NO: 273336 - DNA, 796 bp, Homo Sapiens
  misc_feature (546)..(559): n is a, c, g, or t
cgacgagggcgacccctctgagaagctggagctggtgacaggcaccaacgtgtacatcacaagggcgcagctgatgaactgccacgtcagcgcaggcacgcggcacaaggtcctactgcggcggctcctggcctccttctttgaccggaacacgctggccaacagctgcggcaccggcatccgctcttctaccaacgatccccgtcggaagcccctggacagccgcgtgctccacgctgtcaagtactactgccagaacttcgcccccaacttcaaggagagcgagatgaatgccatcgcggccgacatgtgcaccaacgcccgccgcgtcgtgcgcaagagctggatgcccaaggtcaaggtgctcaaggctgaggatgacgcctacaccaccttcatcagtgaaacgggcaagatcgagccggacatgatgggtgtggagcatggcttcgagaccgccagccacgagggcgaggcgggtccctcggctgaagccctgcagtaacccgcccagcctcccgcggggccgcacacttcccctcccannnnnnnnnnnnnnctgccatcttggtcatgagctactgtctgtccctccccaggacccgcggtgggtgctgcatgttcccggccctctgcccctcctgtcctaccccctttccccaccgagagctgggccgggagaggaccgcagggcaggtggcgtgaggtccgtgttgccttctttaacacacactcgtgcagtgggggagttctggctccccaacctaacccctagccgtcatctccacctaaaaaa

SEQ ID NO: 273337 - DNA, 377 bp, Homo Sapiens
  misc_feature (42)..(42): n is a, c, g, or t
  misc_feature (69)..(69): n is a, c, g, or t
  misc_feature (119)..(119): n is a, c, g, or t
  misc_feature (138)..(138): n is a, c, g, or t
  misc_feature (142)..(142): n is a, c, g, or t
  misc_feature (231)..(272): n is a, c, g, or t
actgttgcctacaaattaatgattttctatttcaaacacagngtcaaagcaaaagcaagtttatctgcnaggaaatgccctacttccatacattcaagatctgaataatagatatagangctacagagtattttcatntccngagagataagacatataaaattctgactcacagctcttcttttggaaggattcatcaatgatatatatctgacattttgtactcattcnnnnnnnnnnnnnnnnnnnnnnnnnnnnnnnnnnnnnnnnnnggtgggatctgctgagctagatcacttggctccctggcttcagccccctttccaggggagtgaacggttctgtcccactggtgttccaggcaccacttggatatg

SEQ ID NO: 273338 - DNA, 504 bp, Homo Sapiens
ttactttttctgtaggtttttaataaagaatatgggtgctttgatgctagtaatagtgaactttgaaataattattgtgaatcctgaatgagaaacctgtttttttctccaaaatttgaaaaatatcttgaagagagtcttgctttagagacaaattggaaggagatcctgatttgcttttgtggccgtatccaagaggaattgagtgcaggtggggtgcagggaaaacacagtccactccccaccaccactccgctccttccacagcaaatggggactgctcagaaaaccctgtcctttcttttcctctcttcaaaggcaggcatgtgattgaggatgtgatggtgacttctggcctgttttattttgtggtaacttcactttagtcagggaaataattggaatatctttaatctgatgtagtttgacctttagaaattgaaagtgaaacagctattgttgataattcacaaagtattaataaaacttctattacctgtaaaa

SEQ ID NO: 273339 - DNA, 388 bp, Homo Sapiens
tcaaaaccacactatcaccttaccctattcagaatggctatgattaaaacaaacaaacaaacaaaacagatgttgggatggatgtggagaaaggagagctcttatacaccctgattggaaagtaaatagtataaactctatggaaaacagtatgatttctcaaagaactaaaactcgattactattcaatctagcaatcttactactgtatctatgcagaggaaatgaaatcagtatatgaaaaataaatctgcacttctatgtttattgaaacaccatacacaacagcaaagatatggcatcaacctaagtaaccatcaatggatactaatgggtttgtaggtaaagaaatcgtgatatttacacaatgcaatactactctgcaaaa

SEQ ID NO: 273340 - DNA, 417 bp, Homo Sapiens
gggaactgggcaaccctctcctaggactggatttccgcacctttctggactgcaccctaagagggcctgcgtggattgtgcttaaagaacttggccaactctagctgtcatgggtcctttatggggctcccaggagagcgtgtctgttcctccactgctgctctaaaggttgctcagcttggacctcaggtggcaccagcttgtgggctggcctggaggtgggaggcccaaccaggcctctccgcaacccttctgcacaggctttggattctaccacccagtgttcctcccttcccactcaaaacctgatctgcagaccatatctcatcacagcttttctcatgaggatttactgctttcatcttagtccttgggaaagaagttctgcctctgtttagttgggaggaaggcattaag

SEQ ID NO: 273341 - DNA, 438 bp, Homo Sapiens
cacagaatgttatccttacgtcctgagccggtttaagtctgtggaaaaggaagcacggaagaaatccacgtaacctttgctttctttttaagggaagcggttccgccgtgaacttggaaccctcagctccgggtgttctcggcagaagggcagctggaagggacacagtggggcaggctttggggttgctccctgttctgccccgaggccggggacgcagggcagcccacgcctccgtgggctccattctgtagcattgccagcgttctcttcacgtctctaacaatccttcgcttttcctcactcacgtggaaatgtgaactgtcccggctctgtcttcatttttatttttaagccatcgttcccctcctgaacggttgccccttatttaatgctgtaaagttggactgttgttcaataaaccagagcaatgcatta

SEQ ID NO: 273342 - DNA, 427 bp, Homo Sapiens
cctgcttagcttcagaggtcagacaagatctggcatgttcaggatggtatggctgtagaccaggctgggttctggccagagctgttgcactaggcaatgctgccagagatgaggaggcatcagggcagtcatcccttctgctgtttgccccaagaatgccatacaaacctggggatgacccttaaaagtctcccgtcacccccagtattggggggaagctgactattcctcagatgatagcccagtcacttgaagaacaggacaagactattctgtgtctagggggctcaagcactgtgtgtgggtctaacgaatgcattttgtggaaatgggctcagactccccaaagggccatccaacctatgggagtgtctggccttctgaggtcctgaaatgtctcttttgtcagtaaacagctaataccctc

SEQ ID NO: 273343 - DNA, 797 bp, Homo Sapiens
  misc_feature (275)..(275): n is a, c, g, or t
  misc_feature (476)..(484): n is a, c, g, or t
aggacgcagagaaacatagtatctcaaaaggcgtcagctaagcccctacctatgaacggcctgggcctgggtggtacaaagcatgtggtcttttcctcatggaaccgggcgactttagaagtagcattgatggttgtttgctgtgacacctgtgtgagtgttaacatgaacagtcaacagagtggccgcagcgtgtagccccatttaggggtgtaatagagtgtcactcaatattagctcctcacaggcaaagaacggttttcactgaaagtaangagagtgcacttcctggtgctaccttcatttcctgccctgggtcccatgttttaggtgagacacattcttaaattgcccagctgtctatgtgatagggctgagacagatcatctttctgatcttccggattatcgtgtctattgcctttccattacactaaaaatccctcctctgccatactcttagtaggaaagggtgannnnnnnnnccccgaaaggaaaagggagcctataaataaaccgtattatcttcctatccccttctgctaaccaaacacccaagagccacactgagagaggaaatggaaggagaattgtcagttcccaaatgtgaggtgaaagctgtgcttttctttctattatctggtctgattttgagttctctaccctgggatgttacccagtattaccagctgtttctcacagtgaccgattgtggtcatgaatccttggggattcatgatatttttataatacatgcactcagggaaactcagtaaaacacattagtgttaataagca

SEQ ID NO: 273344 - DNA, 433 bp, Homo Sapiens
aaaaattaagaatttcaagataatgatggtacaaaccaagtgcagggcccttctgtgcaatgcaggtcacaggcccaggaaggctcattcccatgcacagaatgacacagagcagggtatttataatagctaagtcagggggttagaaggaaggtggggagggaataaggactcttctctagttaaaccgaacacaatttctgggatttactaaggtagctggtagggatgttggtaccctacagcaaagctctctgtatatgggaatttgggagacccccagtttaacagtaggcttcctgtcagcttactctaaagcaaagtctctaggcagttttatgcttcattcttaaacatgaaaaggacaataattaatcaccagatatttgacaatattctttcacatgacaagaaagagcaagctaaaaaaata

SEQ ID NO: 273345 - DNA, 786 bp, Homo Sapiens
tgtgaaaatctagagtagagagttgatgtgccccagatgttacagctagccattagtagaccaaggttcaaacccaggtcttctgatgtgaaagcccttgcttgtcctactaccccttgctactgtggccatctagtagatcctaggactgtgcattaggtcatctgggactctgaaaataattaagtcagactctctgcagatggggcccagactgccttgggaagagctgcaaagcaggtcagcttcccctccagtagtgttgggacagcctccctcactgtcagtcatcccggggcccactgtgggtctaagcagaatcaccagctcccttgctgttccttccccatccctgccatcaagacagagccatttgctgctgtccatccatgttatggctcaagggctcagacatggtatagggaagatgggagcagggaaagacatgaactgctgtgctgtgtgacaaggccaggggtgtcactgaggatgcaacaggaagcaggcaggtaggtgagagaagctggggaggcgggagatagagagttattctagcacagcagtgaatgaattcagtttgaatgaagcacagaagtaaatgtttggacagcggaaccaggtttcatgatctttgagttgtcctcataacatgttggaactaggtattgaaaagtctgaggtaatctgaagcttagaaaggcacaatctatcaagttaacttaaaggaaaggaaggtgttaacaaaattagaaagtgctgttttagaaacagccctagatattttcc

SEQ ID NO: 273346 - DNA, 637 bp, Homo Sapiens
ttaaacagtagtgtttaattgagcacctcatctccaccctgactctcagggctgtgacagctgcacccacagcaacctgggcacggaggcaaggggggcccacaagtgagggagggcacacagagtcagagggcagcaaggaggctgaggggcagtgggagtgccaggagcagggtcctggatggggctggcacggccagggcctgcccgttgaggcagtcccagatccagtgttggtaggaggagacctgtaggtagatgggtggggcctcgctcttctggcagcctgcaccccagctcaccaatcccaccaggtaccacgtgccctccatggagcagaccaagggctctccagttagctcatagcagaacttctccctgtgggtgtcctccgcacacatcatctgggacttgatgatctgaaccagagtggggattttggtgaagttgtggtagaaattgtcacactctttgttggtcaggatgatgacttccttctcctgaatggtccggaactgaggccacatgccgtcagccttggaaagtccccagcccgtcacagtgcagcgggaatggtccttcaacacatagtccgtgccaggcaggcagatgggccgcacgtaattgctgtacttga

SEQ ID NO: 273347 - DNA, 775 bp, Homo Sapiens
  misc_feature (182)..(195): n is a, c, g, or t
ccatgcatctataagccaaggaacctctcctgttttttatctctccttttccctcctataacactcctgaggctgcctctcaaatgtaggaaccaataggtgagaaccatgtaagatcttcgtatatactcctgaaccctgaattaagttaaggaatagccatagcctgtatttattttgcnnnnnnnnnnnnnncaagcactatactagcattatcttatgtcatcttgaaaactattattatcatcatccccatttcacaatgaggagaatgaagctcagaaacgttaaatgatttgcctaagatcacccaggtgtcagggccaagatttgaaccaaggtaggcttattctagagactatgcttcacatacctcatactgcttccactggcagaaatgaagttttgggaagtatagagggaaataatagaattttgtccagtagcaagaatgaggaacacactgtttattgcctgggctagaggagtcagagtgtgaggagtgtcaggccttggagagtgtttggctgagagctgaagttggcgtgggatttccatgttccatggctggtgtttggcatatatttctgcttttctgggcaaatagcctaaatctcctctttacttctcttggatagggtcttaggccaaaaatgccatactgcccccattccgttcttgcctcaaatctgtcacttagctcatttcagtggcttaaacctgcaattttttgatgtttactgaatgcaaataaagctgattcttgaccccgagg

SEQ ID NO: 273348 - DNA, 263 bp, Homo Sapiens
gcatgagcactgcacccagccaggaccagttaattattaaagatgacctttaaagaagaaaacagaatctggaaactacttttaagagttacaaaataaaataaaatgaatagcatctttactatgctacctgccctaagtaagaataattttacccttagattttttcactggttctgctaacttgactctagccagctactattgtcaaaaaagttaaattaaaagaaaaccttcttcatctttgggggaagtgcacacta

SEQ ID NO: 273349 - DNA, 344 bp, Homo Sapiens
gaccttggcaaaagcaaccccaatggcatgggaatgaatgtttaccaagatgatgccagtatagctagtgagatgcagcaccccatcctcagccccctcgcctctggaagagacaccagactgcaaagggcaccgcgtacagaagctaacggaacttgaatgacaagacaaaaagagcagaatcagttagtgtgacacaacattctaacatgcctgattcttacatcaaatatggtaactttggggttggtagggggagacaaacaaggagaatccacttgggaacaatatgatgaagtttgaaaatcaaaactttacccccaaattaacaacagcttgtatgg

SEQ ID NO: 273350 - DNA, 468 bp, Homo Sapiens
  misc_feature (404)..(404): n is a, c, g, or t
  misc_feature (429)..(429): n is a, c, g, or t
  misc_feature (452)..(452): n is a, c, g, or t
atttatccaaacaaagtaattataaaaacaaaacagctatttaaaaaatgcctcagcttctagaatgtccatatttttctggtctgtttattttgcctgatatttaaaggctcatccactgctctttgtgtgatattcatactgcctattttttttaagtgggaaatgttgtattgaacttgtcagagcagtttaaagagaccaaaaaaatacaataagcaggtagcaattccaaaagtttctttagaacagaaaaggcacagaagacttacactagagggtgaaacaagcctctgagatgctctgttctccccactgctccccgaagcacaggttctgttcaggcctgtgtcccttcagtctcacaaaagatcgccgggtttaagaaagctccccacggccangtgcaggtttggcctttggccttgnagaagcctccccttccttctcanggttaacggaatcaca

SEQ ID NO: 273351 - DNA, 748 bp, Homo Sapiens
  misc_feature (54)..(77): n is a, c, g, or t
atgtctaaagaatggctgttgatgataaaataaaaatcagctttcatttttccnnnnnnnnnnnnnnnnnnnnnnnnccgcaaactgattgccttgtagctggagcctagaagtctgaaatcagtttcagtaggctgaagtcagggtgttggcagggctggtttctcgtagcggtttcgaggaggaacccatttccttgcatggtctaggttctggaggcccccacatttctgggttgatggccccttcctcacatcactctgtgtcatgcttctgttacatctccttcttctgcctgactctgtcctctcctttgcccctgttgtaaggacccctgtgattgcatcaggccccctggataatccacgatcatctcctctatccaaagatccttcacttgatcgcatctgcaaagtttcctttgctgtagaaggtaacatatttgtaggttacggatattaggatgtgggcgtcttcgggggttgttattcagctactgcacggtcctgtggaggaattggtgcagttggcaaagaaagagacccccacgtgcctctagaggtaggtggctcaggagggcaaagctaaaccaaatattacagccttacctgttccaacaatgcctatttccttggaaatgagggaagaggcttcgagatgaaatttggtggcctctcccctcccccaaataatgtgacattattttgtgaaattgtattttggtgaggcccaaagagtcatacttgag

SEQ ID NO: 273352 - DNA, 493 bp, Homo Sapiens
  misc_feature (386)..(408): n is a, c, g, or t
caattgttgccttcttactgaagcctatcctgtccatactatttaatactgcagctgtctaccttccagatcgagaaatcccatacccctttcacctgctctatgtttttcatatcacctatcaccctagatacttcacatatttgtgtttattgtttactgttgtttcccctggctataatgtaagctccatgtgggcaggggcctttgtttttttcactgatatatcacaagtgcctaaaacagtgcctgacacgcagaagggactcagtaaatatgtattgaatggttttgatttgaactgaattgaactatgtatccatgatgcaagtaaagaaatgtaatccatatactttcctacctacattttatatgtgaggaaatannnnnnnnnnnnnnnnnnnnnnntgtgcaagtggaccaatatttgagaatcgtatacctttgagaatcatagctgatatactttaagataaaagggtatttctgtgtt

SEQ ID NO: 273353 - DNA, 771 bp, Homo Sapiens
  misc_feature (705)..(705): n is a, c, g, or t
cttaattcctttgcatttcctgggaacttttaaaaatagactgtcttccaaagtttttctttttcaggatcctccatgtcagttttagtaatctccattgcagtgtggacttccctgttaattcaagagccagtccattatgaacctcagcatgtcaaagcaagtttgaatacatcacttccatgcttaaaatcctccaaaggctctccactgtttcaacacacagttccagttccatactgtgggcacagcccttcgagacggccatgaaccccttcctctccataccgcagcagctccccaaacactccacattccctttggtctcaaggcctctcccaaaaccactgcctccaatggagtgccccctgcaatgtctcctatatttcccattcttccatctttcgggactcactctatcatactttagagtaacatctgactactcatatcccacttcaactacgctataagagtgactggtatgtaacagtcttcaataaatataaaagtctaccaaacgaatgaacttgtttcttcccttttaacgatgaagtgctctattattaaacaacctgaagaacattcctccaataaatctttaacatgcaggaaaacatgacgaaaacttatctctaaaaagaaacaggaacatctccatttcccagtacttctcactaataccaaggattgtctttaaaaaanaaaattattctgttgggccataaatggcatttctttttattgcgtaattaaaatatccctcgtgcc

SEQ ID NO: 273354 - DNA, 615 bp, Homo Sapiens
cctgtctgtgtatggatccacccgaaagataagaagaagtccctggaagggtagagaacatcagggaagaggggacctcaggtagggctgggcctgggtgagaatcaaggagccaggccccctgctccaaggtaccacgggatcgtgctgggcagtctctttactgcctggtgtttaccctgccctagagcagtctgagccccagaactgaggtattgatgtctgagccacctctccaggagcccacacggggtagggcccatcataggctttcaggaaatgctaaagctaaatgcagaggcgagagtaaatcacttaaactgaatggcagctgctgttagcaaaagagagtgacttgctagagtcctccaggatagcactggatgaaagtgccagctgtgcctgggcctctgttgtgatcgtcagaccgtagaccagaggcacgtcgacctactcctgggcacaaatggtttccatctgtttagaacctttgtcaattaaacgaaggtacataggatcatgaccaggggcatctgcctgtgcaaaatgattttaaaatctgtgtgtattaaatagaaagataaagttgatatttttatatcttttcttcaaatg

SEQ ID NO: 273355 - DNA, 686 bp, Homo Sapiens
ggtgccaaccttctacctcctcttccaccttcttatgatcctgattatatcgaatgtccatattgtcagaggagattcaatgaaaatgcagctgatagacatataaatttctgtaaagaacaggcagcacgtattagtaatgaaggggaattttctacagataccaaaggaaaaccatcttctcggacacaggtgtataagccacccgcacttaaaaagtcaaattctcctggaactgcatcatcaggatcttcacgattaccgcagccaagtggcgctggcaaaactgttgtaggtgttccttcaggtaaagtgtcttcaagtagcagctctttgggaaacaaacttcagaccttgtctccctctcataaagggatagcagcccctcatgcaggagctaatgtcaaaccccgaaattccacaccacctagtttggcaagaaatcctgccccaggtgtgcttacaaacaaaagaaaaacatatactgagagctacatagccaggccagatggggactgtgcatcttcccttaatggtggaaatattaaaggcattgaaggacattcacctggaaacttaccaaaattctgccatgagtgtgggactaaataccctgtagaatgggccaaattttgctgtgaatgtggcattcgaagaatgattctatgaatagaatctcaaaaaaa

SEQ ID NO: 273356 - DNA, 450 bp, Homo Sapiens
  misc_feature (326)..(367): n is a, c, g, or t
ggtaatatatctcaagggatccatcgcaagtgcaccaaatgtggttaagcgggatgctacaggagtaggtcagcaggcctgacctacttcccaatgggtgaagaggaagtctaaagccaggggttctcaaaacatggtccttggaccagccatgtcaccatcacctgaggacttgctagaaatgcatattcacagtcccaccccagacctactaaatcaagctctggaagtgggcccaagcaatctgtttaatttgattttgatatacattaaagtttgagaaccactggcctacagaaactaacatttaagctgagctctaaagnnnnnnnnnnnnnnnnnnnnnnnnnnnnnnnnnnnnnnnnnnggagcacttgaaatgtggctggttcacattgagatatgctttcattataaagtacacatccagattcacaaagacatactgtg

SEQ ID NO: 273357 - DNA, 161 bp, Homo Sapiens
tttaatctgactatgagtaaatgccacaaggctttatgggaaacacaactgaaaatatggctcttggttccccttacctgctgtacttttctctaggcacttaaacatttccatatttcattactcattgtatttatggtctgcccccttgcactagaaaa

SEQ ID NO: 273358 - DNA, 546 bp, Homo Sapiens
caataggtaagtagataggtctgaatgcatggcacctcacatggtccacttcttcttgcctccattcaaaatggttacatttaatttgtgaaagtaaagcactatagattggaggcttgaagtcgcaatggtacagtggttctctgaaatatttgctctccctggatccataaaagagactgcattaaagtacttcagttcttttgcccagtaattgatctgattgggtcatccactgagcctggttgatctgtagatgcctgtttgggtcaagtgtctgctcctagaccagtgagttgcatagggtgtcagtcacatggcaaagcatgggaccatttttcttagaagaatataagtgatgggcattttgagactacacatcctattcaaggttgagtgaatgatgaattttaagagatttcacagaaatattcattgccttctagaataccaaagtattgctttctctttctctactgtcttctctgcagaaactatttatggtgtctaagtataccaagtctttttaatcctttttgattagca

SEQ ID NO: 273359 - DNA, 814 bp, Homo Sapiens
ctgggctacagtttaggcgttgggagctttaaagcttcctgggtgattttagcttgcagcctagttaatcacaacactctaggcagtgcttctcaagtgtaatgtgcacacaaatcacctgggtatcttgctaaagtgcggattctgatgagtaggtctacgccctgagattctgcacatgtaacaagctcccaggtgaagccagagtggctggcccctgaatcagttactgagccctcccttccttcctgagcttcaacttgccaacggcctattccctgcctaccaccactgaggcccctggggcaggagcaagacctgtccatgagcagtgggctttggctgagggcagaacttcagtgtgtggaaggaaaaacaaaaatgttacaggaaaaatgccagatcaacttattaatggacaggcaaacatacactgaaggccagaagtgaactgtcaattatataaaaatgttttggaaaggttaaaaataactgtgaaagccaagagagtcttttgttgatttcaggtgtttcaacagtgcctacggattttacagatgtcacgttccctgtcatccgcatgctctttagatcagtggttctttaactgcgatgcccttaacagcctcgtggggatcctttaaaactccctatgtccagtctagcctcaaacaattaaatcagactctaggattggaccaggcagccagactattttcatcctgattgtgcacagctgggagcctctgctttctgtgggatgtgtaagctcacattgtgtaatgtcatatgaggagtacacttaataacaaag

SEQ ID NO: 273360 - DNA, 670 bp, Homo Sapiens
  misc_feature (530)..(530): n is a, c, g, or t
atacatacgtgtatatgtgtgagtgtgtgtatatataaaattaaaaggtgaatgaggtaaatatatgaaggggaaattcagccttgaacttcccttgggtcacagagatggatcctctgagctgtggggtgttagtgagtgtgtatgcgtaagcatgtctgcatctgcctggtctgtctgggtcagagtatgtccatgaactttacgagcgttcagttcaataccactcagtgcagaatccgcgttcctgttttacagcccagcagccgccagccggcccatctgttaaaacataacatgtacacttcagtccgaccactggggtggagccctgggtagggggcaactcttagcagaaacaacatgctacaaacaaagcctgcctctcaagttctattttcattcaatatttggcctgaacttgaagttttggtgagggagaaggaagtgtttgtctctagaaatggcaaactgcattttgtgaaataattatagccacggcttggggagggggagcttgtaggagagcnaaaaaaatccctccagaaatgtggtgcttgtcacatcaccatgcaacacgggtttacagctttgcagtatggcatgtatatcagaaactgtttgcttttgcttgttaaaataatgcattaaaactgaatcattttgcacc

SEQ ID NO: 273361 - DNA, 765 bp, Homo Sapiens
  misc_feature (531)..(562): n is a, c, g, or t
  misc_feature (678)..(696): n is a, c, g, or t
caattaactactcgacaaactatgatttatcagttagtaacaataaaaaagcaataaaaacaacaatgaaaagcatcactgtatttttctttgtactttcttccaaggccttaacagtacctagacttcttttattcctcctgcaaaattctgaaatctttcttcttgtttgaaaaataaacctaaagcctacttgaggctgctgtctgagttttctgaataaatctgaaaaactcaggactgaaatcagaagtgaacataatgaaaacaattaggcttcagtcaacaaatcactgatataacaaaactttatactattatgaattatttttatgaagggatagcaacatatttaggcttcaatctgtgtactacctcatgagagattcgccgctgttcaatatacgccataaactgtgaactaaggctgtctgggtctggtcccttgggctgtctcacctcggcctcctcttcctctgcggtgcagctgtctatgtagtcaatctgatccagatcatgttccactgtatnnnnnnnnnnnnnnnnnnnnnnnnnnnnnnnnagaaaaaaacattcaaattagatagccaataaaagacatttacttatttccttttccccatgattttctattttgaaagtgggagggatgataaaaactttaaattacttaagtcnnnnnnnnnnnnnnnnnnnaacccattttatgtccaaggttggtggctcacgcctgtaatcccagcacacaagtgtttattatttagt

SEQ ID NO: 273362 - DNA, 928 bp, Homo Sapiens
  misc_feature (252)..(252): n is a, c, g, or t
  misc_feature (356)..(356): n is a, c, g, or t
tcgacctgttaaaaaaatcttaacatccatcaaactagtggtcaaacaaatgagaatgcagctgttctcagagtaatttttaagttgtcatttccctgtgttgcctcccaattggaagaagttaaggtttaccaaatgcatttctatttcaagggtatctgaaacgtaaacattcaaaactgaaggctgactgacttgagatgttttgcaggtggctggagagaagagggaaggtaatatgagacaacttangtcccatgggagcgcagaaccggtgtcaggttctttctcctgtcccattagtgacctcagtaacatgcagggtacgtctggcttctgcatggccagtgctgacnactagcacagctgttcttctccttctgttgaacctcatcttctgaagaaaggccaagtggccctttgtccatacacttagctgcattaggatgaatatcacgcgtctcacatctttaatccagcctttcgtgacatgttggaaagatacatgtgaaacctacccagttaccctttctgaattgggaggaaaaccaaccaatgtatgtatgagaaactcagaagtctgaatagaaaaacaaagtaaatggcagaagattctcgagtttatgcccgcgtaggtttggagtgttgaaaaagctaaaatgtttagtttcacttggccctgaggtatggttgagaaggctgactgccagcagttgaggattgagtccgaccatgtttacatgcagggttcccaacaccagtggtgacactgggaagcagccccagcactttcctctcctgagtcctccagacccaaaatccttaatgtcaaaccaggtcagtgtttcttactgtgtttcaagtcgttaaaaagactgagagtagaggcactttatgctgctataggtggggttctgtcagcgttagg

SEQ ID NO: 273363 - DNA, 553 bp, Homo Sapiens
agttaggaaacttagctgattctctgagatacttcccacttcctcatacattctacaatgagatgcctctcttcatgggcctggggaaaggatgaatgagtgtggctggacttttgacctttaatgtccctgagcagttcttggcccttggggagaagtagggggaggatctggctgactcagccccaaccgaggggtagcagctgcagcccagccaagcagaacaccctggccctacagacctgtgtctgagcaggctttggaggaaaggccacttctgagtcctctgtctcaggagaagccaggcctaggtgcttgacctggtgatctgagctgtgtttgtcctagtatgggtggcagtcacctctgaacacactggccttggcttagaggaggcttgtgacttcagctgtgccagctggggctggatgctggactctgattccctcagagagacagaagatcgggcagaggtcaaccagaaggccacacagggcagtggacaacagtggagggtataccaaatagaaataaaatgcaggaaacctctctg

SEQ ID NO: 273364 - DNA, 467 bp, Homo Sapiens
cggtcgtatgggagggcatagcaaagacacggcaggtgtgtgaacgggaagtatagcacaagctgaggaagtctggcatttgaaaagtatcgcctttaaacatgcacgtataaattcctgcctgtaaaagaaagaaaaaattttaagatgcatttataagttttagataatctggttatattttataaatctatatataagtatagatgtttactaatctagatttgtttcaaaactcaatctctgcatttgaatcaaaaataaacttttacggctgagtagcaggtgaaatgatggggaaaccagaaaacagaaactgctaattcgattaataataagccagtcacacaatttctaaactgcctctaatccaaaaaacctctaccttttctaatctcatactgattattctacgagatgacaaactctcaatatgacctcctcctatcctcaacaattcttgaagg

SEQ ID NO: 273365 - DNA, 440 bp, Homo Sapiens
taaaaatagactattgatccaaaagtattcgtgatggattttcatggccgatgttcactcaacttaaactccatgaaactgtttccagtgctcatatttacgctgaagtacaatgaggagccacttttgaagaagtattagaatggtacttttaaacaaatcttcacgtgtttcaataaaaacaacaacaacaaaaaactcagaagctattggtggcacagagagcaaatgaagggttgctatttttaagaggtcttcttgtgagtcagcttggtttcgcagtgtctagcaacttaacaccaatcagcaatgtagtcaaaatctctgaacatttcctgctcctcttccgaaagtatccttggttctcgaggtggagtcagaataggtgcttctgaggtaaattcatcatcaaaattactaacatcttctcgtcctcttat

SEQ ID NO: 273366 - DNA, 353 bp, Homo Sapiens
ccataacatcaatgcttcgtctgaatatcatcatcgttcaagagttgggggaagaacgacttcatatgcacagggccgggtggggaatgtttgttttggctgtttgctgcctccattcagattttcctatcgcagctcagctggtgacctgaaggcgagcaacaggcacaaggatccccagggccttccggatggccgctttcacctcctgcctgggccaccgagtctctacacagaaaaatgagtcacccgactcaaaaggggtgggggtagaggcaaggacaaggcaagaaaaccacagataaccaaggtgtttcttccaagtggtcagtttaaaacaaacaactgccacc

SEQ ID NO: 273367 - DNA, 142 bp, Homo Sapiens
ctttgctggggggttgaggggtaacaagatatcatctgtataaagtgcagtttgtgtcactcaaaatatgcactgtatggctacacaaaagcagcttgatgaacaaatcaccccatggctcattaaagaacaaagcttccag

SEQ ID NO: 273368 - DNA, 394 bp, Homo Sapiens
  misc_feature (78)..(136): n is a, c, g, or t
tgaatttcacatattggcttacccagagtgagcacacctccagggcatgtggctgacactgggtcaatgtctgcatcnnnnnnnnnnnnnnnnnnnnnnnnnnnnnnnnnnnnnnnnnnnnnnnnnnnnnnnnnnngccactccccaggctggtgctctcctcctgtgcccagtgactgcccagtggcagctcagctgcccttcactcccgcctgctgccaaagtccctgtgctaatgggattacaaatacaaaaagtggaaaaaaattttcgtaaactttgttttatattaaaagaaaaatccataagtctgtgtgtgttaaacatgaggttctgcctctgtggctgtgtttgaaaaaataaagttttattagaataatccattttcccaagc

SEQ ID NO: 273369 - DNA, 590 bp, Homo Sapiens
  misc_feature (99)..(99): n is a, c, g, or t
  misc_feature (208)..(208): n is a, c, g, or t
agagtatctatagcaaaataggttacatgtagtttgaaataaggtatcctgagttactttggcaacaagttcttttacccttacccgtggtatttgaanaaaaatcaaggtaactgtctgaatactttaatatcagcttgttttgtgaattctctgaatactgtcaacactcttatctaagtttgcctttatggatgcagtggcagcnattttgaattacttttcaaagaatactgttcatatgcattgtttttgtgtttcaaactaaatacaggcagttttgtgccagctgtgatattgtgcataccatatggaccattttaaagaaaattttaaaatttcaaatagattcaacaattacattacttgctttcacattttaaaggcactttaaaaaaatctacttctcttgtaggttttgcggctagttggctattcaagaaacctcgcccctctgaatgtcatactgtaatctttaaggaagaaagctacatgaattaattgtactctatgggaaaatttctttggaaagatattttgtaaaacttttttttccaagtaaaaactttatgaaacttggtgcctctggt

SEQ ID NO: 273370 - DNA, 460 bp, Homo Sapiens
aaatgcaataaaaagtatcagaccaagcaacaaaagtaacataccatcagaagttctgttcatcatgggtgagcctctggacatggtgttttgataactcacaggggtcctccgtgcactggtgtcatcataaatcccagggctcagttgtgctttgggagcttcatgcagtgtggacctaagaacggaggggccagagcttaccaactgacgtgtgccgggaacgcacggtctcgcctgctttcacatcctcatattttccccgttctaccacttttatgttctctggcacaatttccagcggaggcattccacgggatagtttgctaggccccgtgattaaggatttgacattgtgtttgatggcagattgacctgagttgttgtcaaactttattggtgtgccctgggaaatggaaccctcaattatcggccgtgtgctctggaccacttctggagt

SEQ ID NO: 273371 - DNA, 468 bp, Homo Sapiens
gctaataccctgtttttgagtttattttgtttctgtctatgtcacagtgttcctctacgacccgacctctctatgtaagcacacatgcgcacacacacttgcattcatgaatctgatataaagtgccagtaatccgccaagagggggtgcgaagggggcatgtcacgacagctccgccaccccccattgcccacccgcactttcccgagcaccgcgccccgtgggctgtgggtgagccgcgctccctgcactgagcgggtttaggggctcgcccacatgcatgcaggccaagacagcaaatgccagccgggcacgacgcccgtgtgcccaggcctcgggggtctcagagccgcctctcacccccgaccctccacccaggggtctccccgtcgggagtggaggcgttggtcctggaagctgactcatcggagagggaaataccaaataaacatccgaggttgcaaaaaa

SEQ ID NO: 273372 - DNA, 536 bp, Homo Sapiens
ctctttaatgatgtactgtaaactaacccaagtaataccaacctaatgtgataggagtaaatagcaacggaaactaaaacacagttatgccttccttattgatatatgaataccaacgtctctttttaaatgccttctattgagaataaataagaaggtataacaaaatgcctactaggttaaaatacatcattttcctttttaaataacatattaacatttgtttaaagtttacatgtttggaggagctgtaggaaaagcttatttgatttgaaactcataataattccttaaaacaaagcagatttgattatccttgtttcacagatgagaaaattcagaaccaattaaatgtatggatgactgagactgagctcatcaaatatccatgtgcttcctgtttgttttccagcttctccagcagtgaagttggagccttgtgacctgtgcccgacagactgtactgtgagcagaagcagtgtgttttcctgagctaaggcagttcccacgagtgaacctccctgagctgtagagac

SEQ ID NO: 273373 - DNA, 710 bp, Homo Sapiens
tccactacttctcagcaagtcaaactcattgccttaactcaagccctcacccttgcaaaggactacgtgtcaaatatttatactgactctaataatgcctcccatatcttgcaccaccatactgttatatgggctaaaagaggtttcctcactacgcaagggtcctccatcattaatgcctctttaataaaaactcttctcaaggccactttacttccaaaggaagctggattcattcactgcaagggccatcaaaaggcgtcagatcccatcgctcagggcaacacttatgctgataaggtagctaaaaaagcagctagcattccaacttctgtccctcatggccagtttttctccttctcatcggtcactcccacctactcccccactgaaacttccacctatcaatctcttcccacacaaggcaaatggttcttagaccaaggaaaatatctccttccagcctcacaggcccattctattctgtcatcatttcatagcctcttccatgtaggttacaagccgctagcccacctcttagaacctctcatttcctttccatcatgaaaatctatcctcaaggaaatcacttctcagtgttccgtctgctattctactcctcctcagggattgttcaggccccctccaagtcctcccatttcattaccacttggctagccctgtgattattaaattctttctttgctgcc

SEQ ID NO: 273374 - DNA, 174 bp, Homo Sapiens
tttttttaacaagggggcagtcatttaatgcagaaatccagttaacataaagagacagaggttgaacaacaggtcttcaaacaatactgcatagtgtcacgagttagctcttaagcacgtttgatctgtttatcttatgatttcgattccagtacaaagacagagaagagactt

SEQ ID NO: 273375 - DNA, 496 bp, Homo Sapiens
taactctcatttgagtctgaccaacagacagggtagatgagctctctcaagattctcagctttatgttttttgttccctctcaatacctttatgcaaatgaaactgaaaccaccataagaaatccttgttaaggggaaaagaggcaaaaagacctctaaatatagtcaaggttaaccctagttctcaatttcctaatctgtgacaaaagaggggcaggaatctctaccctaaattgatgttgaggtatcgatgctaaagagtcatttcctgttactatcgttgggaaggaatgagacagctgcagagagcttcaccagaacctcaatgatgggagaggtagtcatttgaaaaaataagacaacttgacggaaggaaaacaaaatactgaatgggcagatgagaaacagaattatcatcagagtcttgctacaaacagggaaaaacacaaaccagatgacacacggacatggtagatttaacattcctccccacctt

SEQ ID NO: 273376 - DNA, 451 bp, Homo Sapiens
gatttggaaaaactggatctagttataaaatacatgaaaaggctgatgcagcaatcggtggaatcggtttggaatatggcatttgactttattcttgacaatgtccaggtggttttacaacaaacttatggaagcacattaaaagttacataaatattaccagagagcctgatgctctctgatagctgtgccataagtgcttgtgaggtatttgcaaagtgcatgatagtaatgctcggagtttttataattttaaatttcttttaaagcaagtgttttgtacatttcttttcaaaaagtgccaaatttgtcagtattgcatgtaaataattgtgttaattattttactgtagcatagattctatttacaaaatgtttgtttataaagttttatggatttttacagtgaagtgtttacagttgtttaataaagaactgtatgtatattttg

SEQ ID NO: 273377 - DNA, 464 bp, Homo Sapiens
tggatctctctgattcatagcaggcttacagctggttatggaggccacagaattcaagatcaaggccccaggaggaaaaggtcaggaaaaggtgagcaaaagctagccagggagtcagaacccagctatatgaactgaagttaagtcaggactccagtgaggtatatgcaaatatccataggctcagtggggaacactgtagaatctggaacatgaatgatgagaactcactgagcaagtgttgcaggtagcaagaataactcatagccacagccactggtggaagaggctttgtctggattaaccaaacaactttggaacccacagttgaaagccttcaaggctgagaaagactgaatagaacccaaactaaaattgggatgtatgaatgtgaacttgtaatatgaaagttttccgaacttctaacctaaattcccttatctgagtgtaatggtatatattac

SEQ ID NO: 273378 - DNA, 466 bp, Homo Sapiens
gaggcaagtgccccatccggcctctgatgtagggttctaggtgttggcatacttcaaggcctcgcgtcccttctcccaattcctcccttggggtgggctgcctgcacacacactggcctgctagcacttgggagggagcatgcgtagtgtgtttactggagcatgcgcatgctcacctgaggcgatcttcccttcccggtgtaaagtacctggaaggtcacacaccagttaaactccaccattctgtgccttagtgcacatgcttgagcccacttgcccaattcctgagatcttatcgggaagctgctgatcaccagcttcagtttccctggtgctggctatgaccaattattattttagagaggcagtgtgacaactgcctaaccatcacctgatggtcacctgacatccctggtggatggaggaggccctcccctgccctgctcacacctgactagctacccac

SEQ ID NO: 273379 - DNA, 647 bp, Homo Sapiens
taataatgaacagccctcaaatctcagtggctgaactcattgaattttatttcttgctcacttacacagccaccacgggatgttgggggagtactgtttatctgagtcattctgggacccaggaggatgggcattcagcccaacgtaattaccatatctggcagcggtggctgcgaaggcttctccttggatgcgatgccgcagctccctcccactcacacttgattggccaaagcaagtcacatgacactgcttacctgcaagggggcagggaggtgcaacgctactaagtgcccgggagagggagaactgcaatttcttggcaagcggcaaaagataaccacagggtactgtttcatcaagggccgcccaaagccctgtctgaatatggggctcgtgtttcccctgctatgtagttacacaggcctcctgcagcttagtttcagcttttctagtttttcatggctcccagagggaatattttctatgccgtatagcctgttttcacatgaagccattttggggtgttatagtaacagctggtgacttgattttatttatgttgctatgtgctgaaagctttatgaatgctctcgctgtgccagttactagctgtgggacatggaacaagttatgaacaacctaaa

SEQ ID NO: 273380 - DNA, 747 bp, Homo Sapiens
tgttcagggacctctgtttacctgaggccaggacaagggcctggaatgtgagcaggagcaagggagtgctcgggaaatggaaacaatgaatgaatcaatcagtcaatcagtgagtaaatgaactggagatttccttccccccaaccacagctaatgaccccatgtgagaaattttcagacactatcctgctccaagttctgcatttttgccccctgcccactggccttcctgtgtctcctctctgtggctaaagccgtaacttgcagctgggcttcatccactcgtgagcttctcctctcaagcccagccagtgcccactcaccttggaaccaggaggtccatagaatccctgctttccagggggtccctagaggaaagcaaaagtcagaggtgaagtccgggcagcatctctgaggctccctggggaggcaggtgcagtgaagaggccccttccacagcctgaggcccccaggtgtgtccagcccggctctgtgtgagaaaggagcgcagcctccctgcccagctggaagggaaaataatgtcctctggggcatggccttgtttaagcatgttggctgcgcccccatcacagatgaagagaggcgagaagtcagaatgagagggccagtctgtggcatactggggggcctggaaagacctggtacccaggagatgtttgtttggaatttattattatcattattattgttgttgttgttgtttctttttgaccaggtacagggttt

SEQ ID NO: 273381 - DNA, 697 bp, Homo Sapiens
aactgcctgggcaaggccagggaacgaggccgagatggggccatagatctgggatatgaccttctgatgaccatggctgggatgtcaggggggcctatgggtctagcgatcagtgctgcacttaaacctgcattaaggtctggggttcagcagttgatccagtattaccaagatcagaaagacgcaaacatctctcagccggagaccaccaaggagggtttgagggccatctcagatgtgagtgacttggaagaaacaactactctggcttctttcatatcagaagtagtaagttcagctccctactgggggtgggccataatcaagagctatgacttagatcctggggctgggagccctgagatataaaagaatgtggtaacccacagaattaataactgtactacccctgacaagctatatacatgtcttcaaaattttaatctgatttatcccaggaggaaggctgtacagtaaaacgtaagaacgtaaatgtttgggtgttgaagtcacagggtttggtttcgaatctaggctccacttgttagagcctcggtgatcactgaatagtaacttctttcttgaactaagatcagttttgaagtttctaaaggagatagaatgattttaacctcaatgagttgccctgtaaatttaaaatgatacaatgaatctaaaatgcttatcacagtacttt

SEQ ID NO: 273382 - DNA, 418 bp, Homo Sapiens
taaaagtttaatataaagaatgaaataatttcaggtcaagtttattatacagaaattatattaatgggtgggataaatactttacaggagagggtcacactctcagacactttggctcccaaagggcttggagcttttgtgaggctgagcatcttccaaccaggtgcatgcactggtttgccaacatcctcaccacgcccaatccagccccttcacacactgacatcgcctacctgggccctccttgtggccttaagttttatctaaccagtgtacacaacatatttataaccaattaatacgtgtgagtcatgatttgtttaaaatgtcagcttttgtgaactgaaggggatgggcagaaggcaggatgctgtccttggtcaggaatgtgacccagattttaacactgctcctaggg

SEQ ID NO: 273383 - DNA, 459 bp, Homo Sapiens
atcaggaaccagcagaaggagagcctgagctgtcacaatatctcacaatcccttgatctgatgggttggaatggctcttaaggttgtcccagtttagacagaggggatcaggtctttttacacccctcacattgatgagtccttgaatgcaagatgcagctctggatgggaaggggaataatcttgggccaggtggctcttttgggctgagggtgctgcccagatggtgactcatctggcagctgacattcaccaaaacgatcaagagctggaagagtgagtgtccagtcccaaacagggcacctagtgatgcaccagtgtaccatcacatgtgcatatataatattatttgcattcattatgaatgtctcgatttgttttgtaatagatctcccaggctcagattgagaaaaacataaaacaatttttattacaataccaaaattaactggctaatta

SEQ ID NO: 273384 - DNA, 398 bp, Homo Sapiens
gttacctatacaacaagaaagagaccaagtccctccacgtcacctacaaccagaaactgcagcagcagctgtggtctaagagttgtgagatgactggggtccttgatgtgaccctgtgatatcctgtctcaggatagctgctgccccaagaaacacattgcacccgccaatagcttgtgggtctgtgaagactgcggtgtttaagtttctcacacccacctgcccacagggctctgtcctctagttttgagacagctgcctcaacctctgcagaacttcaagaagccaaataaacattttggaggataatcaccccaagtggtcttcaaccataaactttgtgattccaaagtgcccagttgtcacaggtgccataaataattacattttccaacata

SEQ ID NO: 273385 - DNA, 1067 bp, Homo Sapiens
cttaaccataacagcagaagagagaaggaaactaatttctatgaggagctcatgcaaaccagacactgtactaggtgctttgcatatagaatctcatttcatccttgcaaaaaccttgtggagtaggcgatgttttacattttacaagtgaagacactctagttcagacaagctaagtctgtctgtagttcagacaagctaccctgcaagtgaaaagtagagggaatattacaatctagccttctctgattccaagtctcatgttctatctgctgtcccacatggcttcctcttgccctttgcagggtatcttacagtaataaagaaaagaatgccttggatacatggcaatacagaggggagggggaaaaagctggagtactgccatctccttttcctgacaacagccagaaaagagagaactcactcccttgtctttcctctaaagatcatggaactgttgacacatgtcctgatagaagtttgaacttgtaactaagtggaactaaggtaaacctaaatggggcaatctgtaagtattttagtggctccttgaaggaggaccagttcgtagacatcaccctctcctggagcaagttagaaagctgcttggaaagagctgtgcttctctcttggaaagacccgtgagactgggggaagagcgcccagcccagtgaagtcaggacttctgtgttctggcgctggtttctacctctcactctagccaggtgacccgaggctggtaagtcacttcacttctctggattcctccacttgtaaaacatgagaagtgaactggatggtcctcccagcaactgcagtttcattctttatctttaaagaaatgtattttttaaaaaaaacaatgtgagaatgatgaaaagcttctcgctactcaatgtccttgccaatgatagtttgatagggaacctaaagttaatagctcccacagctctgactctttaaggaaattaagaggccagaaggcagcgttctaatcagatttgtgggtaagatggttatcgatagtagttaatgatggatgaagtgcactgagactctgtgtc

SEQ ID NO: 273386 - DNA, 935 bp, Homo Sapiens
  misc_feature (88)..(88): n is a, c, g, or t
  misc_feature (99)..(99): n is a, c, g, or t
  misc_feature (176)..(176): n is a, c, g, or t
  misc_feature (336)..(336): n is a, c, g, or t
  misc_feature (439)..(439): n is a, c, g, or t
ggttctgtatccctacttccattaccctcggctcctcccactcctcgggggctccgtgctttccgcgggtctgtccgggggctccggnccatcggcgcngtgagttgatggcttccggagaactggcatagctgcagaatatgagtagtgtcccaagaagagtgctttgcctttgnacaaaggatcagaataaagttatttgccatacagtaaccagagacctccaactaggggcccccaaactgtatcctgcctgtagaacctgccaggtaaaggtatatttttgctttttaatttagccagaagcaatttttaaaagaaaatatgtctcctctnaagatacatggtcctatcagaattccgaagtatgcagactgggattacaaagtggaaagaaaggatcctttgaaattgtagaaaaagagaataaagtcagccntagtagttcactaccaatactggaggaactccaaggatatttcagctaagtcataacattaaaaatgtggtgcttcgacccagtggagcgaaacaaagccgcctaatgttaactctgcaagataacagcttcttgtctattgacaaagtaccaagtaaggatgcagaggaaatgaggttgtttctagatgcagtccatcaaaacagacttcctgcagccatgaaaccgtctcaggggtctggtagttttggagccattctgggcagcaggacctcacagaaggaaaccagcaggcagctttcttactcagacaatcaggcttctgcaaaaagaggaagtttggaaactaaagatgatattccgatttcgaaaagttcttggtaatccgggtagaggatcgattaagactgtagcaggaagtggaataactcggacgattccttctttgacatctacttcaacacctcttagatcaaggttgctagaaaatcgtact

SEQ ID NO: 273387 - DNA, 208 bp, Homo Sapiens
gtactgtgtcctcaaatttaatggattaatgtgtcttgtatatataaaaagaaaacctctaccttccagcctctgcctattcttgctccgtctaggacatcctcaatttcgtcgatgaccagcttggtgaataagtattactgtaccaactgggcctcctctagcaggcccctgaaggcagtggaataaaatgaaatcttcgcccttt

SEQ ID NO: 273388 - DNA, 620 bp, Homo Sapiens
  misc_feature (15)..(15): n is a, c, g, or t
  misc_feature (28)..(28): n is a, c, g, or t
  misc_feature (45)..(45): n is a, c, g, or t
  misc_feature (85)..(85): n is a, c, g, or t
  misc_feature (125)..(125): n is a, c, g, or t
ctagttcccccaaancaggtttctcctnggaatttccatcccctnctcactgaccattcagcttacaatccagttcggcctttcnccaggattagagactggagtaaatgggaaatgaaggtttngagcagagctgaaacaggttggaaggattcctgaattagaagacaacgttagcattacccagtaaggaaaatgagtgcagggcccaggggaacccgtgaggatcactctcaaatgagattaaaaacaaggaagcagagaatggtcagagaatgggattcagattgggaacttgtggggatgagagtgaccaggttgaacttgggaagtggaaaaaggagtttgagtcactggcacctagaagcctgcccacgattccttaggaaggctggcagacaccctggaaccctggggagctactggcaaactctcctggattgggcctgatttttttggtgggaaaggctgccctggggatcaactttccttcctgtgtgtggctcagcagttcttccgcagagatggcgccatctttcctcctcctggcatgtcatgctcccaaccatttgaactcttcattacaaaagaaataaaaatattaacgttcactatgctga

SEQ ID NO: 273389 - DNA, 574 bp, Homo Sapiens
gttcaagcaattcatgcaactgacaaacacataaaagttcacaatgatgctggagaaaaaaagagaaccccttccctacccccaaacaaaccctcaactctggtcaacatttggagtaagctccaactctctatcctgaaaattagtcatcaaaaggaacagttaagcattaaactgcctttctcgtaccatacttcaaggtaacaaactagtcctggaagatggaaagttcttcacagaagaattacagctcatcaatgtgaaacgaaagttagaaaagtgagccatggtttactgattgggaaaatagaggtaatatccactacttcagcaggtggagccaaggattaaagataagaaatgtcacaaatccagctagaccacattaagacctcaataaatatttacttttcctttctaactcgagtctggaagaatcgcactggcctcctcctcaccgcaggcacttgcattcatttataacacattctctgaaggcagaccctgcaggtggcaaaaagattcgacgtggagtaaatggaaacagagaccagggaggaactgagctgcacag

SEQ ID NO: 273390 - DNA, 559 bp, Homo Sapiens
tgaaggattgatacttgttctctgaagatgggcaatgtggcggcattgtgaggagctgtgctctggagccaccttgcctaggtttgaatcccggctttgccacttgctagctgtgtaatgttgggcaagtgccttgggttctttaaatgcaaagtggggataataatagtacctacaagatgggtttttataagaagtaaatgaattggcatttagaaagttagaagagtactcagtgcataattatgatccaaaaagtattaaataaaaatgaagttctctttcctaatggcacaagtggtaacccctaattctctagcctgcagccctgaaggctcaccctctacttggtttaatattgatctggaaggaggcagtttcagatagaatctgtatgtggattttgctgtattattgttggagtaaagttgacaaaatctggattttggctttcagtatgggtacaacaatggcaaattatccaaaagagctctatgttgaacatgtctttttatctctaactttttactctgaaaatattccaatttatcaaaaaaaa

SEQ ID NO: 273391 - DNA, 366 bp, Homo Sapiens
caaaatacttaatctttgatgacaaatttaaaagagcataagtcatctcatgactcatgagagtactatagtacttacagatatattaatgccggcagttccaagagctacggatcttcaacagctgtcagaggattgtgattgagaattctgataaaaatgcaatgaaattaaaattacctgcattttcaatgtgtgaaactgcatcaaaagcttatattcattttttgttatggaacttttaggttaaaaaaatcattttctgtttttacctaataaatcaccattagaatctgtaaagcactattcctgtgggaactacctaggtctctagaagatagaggagagaaagaggggaagaaatag

SEQ ID NO: 273392 - DNA, 373 bp, Homo Sapiens
tgcccagccccgcgcccctgcccctgcctttttccgggagcgcgccgcgccgcacccgctacggccgcttgaccccatctttgagcccggccccaagctctgggaccgtcgtgcccctcatcaaggaagagccaaggaccccaaggagaagagaaaggagttcatgaaggcagaaatgcctggggcccacgaacatcccagtgtggccctggacgggacatcatgctgggcaacacagctaaaatgcgggtgaagaccagatttcttgcacatggcggtgacgggatgctccctagagagcttcaagtggattctttgctttttattttctctcttaataaaaatgtatgatgtttacattgtcagagaacaa

SEQ ID NO: 273393 - DNA, 570 bp, Homo Sapiens
  misc_feature (54)..(92): n is a, c, g, or t
taagcctctaatcatgccttgatctttcaggtgaccagtccccatcttaaagtnnnnnnnnnnnnnnnnnnnnnnnnnnnnnnnnnnnnnnntatatcattttggagatttattaggaatttagagttgtatgccaggaaatggggttgaggaccaaatgtctattttacaatgtcacaatacagtattatgcattacagtagttgccatgctgtgcggtagatcaccagaacctattcttcctgtctgaaactttgtactttgaccatcatcaccccttccctgttcactcctccctcccccagcctctggtgactatttttctactctctactaatgtgagttcagcttttttagattacatatgtaagtgagataatgtgttatttgtctttctttgtttgacttattcacttagcacacacagtgtcctcttaaaatgacatttaatatcccatttctagttcgttattatttaagtaatttgcaagtacattctcattttaaaagattaaacgaaaggaacatgtaaagaataaagctgggggctgggcttggtggcttatactg

SEQ ID NO: 273394 - DNA, 597 bp, Homo Sapiens
tcctgaatttccttagatatttctaacatggatagtaagcagaaagtaaaactgtgattccttgtcacgtcaggctgtggttaccagggaggtctatgaaggtggcccagttcatgtggctggaacccagtgtggatgtacacgcaggcaaagttacaagctttgaacctgcatgggaaaatttaaatcacaccattctgcagccccaggctatacctctaatccctgccatgatatagaggattgcctttgctcaaagcagagattagatgagctcagcaacacacatcaccactcctggaaacgccataaaagtgcatgtcctactaacagcaggtcagcagcatcaattcagcataagaaaggtggtgtgactttatttatacagaaccatcagacgtcacctctggggaagaaataaagtcttgctgttgaatttatccagcaatgcctctaagcttgtgatccaccttttgaaagagggtcactaaatcctttcttcctagttctaacagcagaagaaacaggtactgaaattaacagcagtttgtatcctgggcacaacaaagtggccaagttcagctctttattagctgc

SEQ ID NO: 273395 - DNA, 360 bp, Homo Sapiens
cctcattctactggtcaaaccgcatcataaggctaaattcaaggagagggaactagggatgctatttttgatgggaggagtgacattgagcattgagaggtgggaagaatttttggtgattggatttgtagaaactgtggttaaatagttgacggattatttgtatataagtctgtgtcccttccatggtagttccataatgttttctgcctggagcaactagtcttgaccgtatctgctatgcatagcacagtacctggtacacaaaaagatttcagtaattgattgttgaatgaattaataactgtcttgccattttcagtactttaattatttttccaaaaagtggatcaaatgttc

SEQ ID NO: 273396 - DNA, 438 bp, Homo Sapiens
gatgaggagttgcttctcatgaatcagcagagaaagtggtttttttgaggtggagtgtcttcctggtgatgatgacatgagcattgtgaaaatgaccacaaaggatacagaatattacaaaaacttaggtgataaagcagcagcagtatcgggaggattaactccaattttgaaagcagttcagagggtaaaatgttatcaaacagcattgcatgctagaaaaatcttttgtgaaaggaagagtccatcaatacagcaattttattgctgtctcagcttaagaaattgccacagccaccccggccttcagcaaccaccaccctgatcagtcagcagccatcaaccttgaggcaagaccctccaccaacaaaaaaattacaaattattgaaggtcagataatctttagtattttttatcaataaacctttttttaaagt

SEQ ID NO: 273397 - DNA, 443 bp, Homo Sapiens
  misc_feature (55)..(55): n is a, c, g, or t
taatgaaataaacgaggtaaagaatgtttgatgtttgttcccaatggttccttcnatttgtgattacttcaattctataggtggaagtccaaggttcttaaagcatcatgttgctgctattactgtaaacattatcaaaattgtacgtaattttatgcttaacactgtgggttttggtttcgtaaagtgagaaaattgttaggattccagccctacactgacaatcatcttttaaataagtgcaattattgaaataccagtatttttactttatagaacagatgtcgaatttccacagagggccagagggtaaatactttcggctttgtgggccatatggtgtctgtcaaggctacttaactccaaaagtagccacagatagtatgtaaataaaatgagtgtgctatattccaataaaacttgatttatggacactgaaaaaa

SEQ ID NO: 273398 - DNA, 430 bp, Homo Sapiens
cagtatctaggaacaccaccctttccagatatcaacagatgccaagtagaggaactggacttctactttgatctaacagaaataaggcaatgtcccttctttttagttggagcattgtcacaggaggcctgctaaaacataagatccagagtcttacaatgctaggtctcaatttttaaaaaaggcattgtaatccaaagaatcaggaagatttgagaaaagacaagagaagccaacactgaaatggaacggatgttacaattatctggcaaggactttaaagcagtcatataaatgcttcagcaagcaattatgaacatgctggaaacgaatgaagaaaagttgtctcaggaaaaaataagagatgtaaagaagaaccaaatggacattttggaactaaaaaataaagtaactggtccacacaaaaaaa

SEQ ID NO: 273399 - DNA, 483 bp, Homo Sapiens
agcagttagtgcccagagaagaataaatacagctgccaggaggctagggtttgagccaggctgctgctactttgaagctgtgtaatgttagtcacttaactcctcagaacctaagtgtttccatgggtagaaatagaaagacacttgtccggtttacctcaaagactttgtgattgtgtgaggataagatatgttgatagatgtcagtactgtttgtgactcacatggagctagttgagtaagtccctgggatactgcacaaggttctggcctggctcacatcagtgtgggatctgtacatggcttagctctttttcctatgttgagccccagtcttctcccttagctaatgtgagtttcaactgaataattccttcctggactatacccatccttactgcattttcctcttctctttataggatagtatcctggtgttgcttgacctggcccccctggccacgccgagccctatgcagtctc

SEQ ID NO: 273400 - DNA, 509 bp, Homo Sapiens
tgcctcggggttacgagtcggctgctatagctttcagaatcacactcacactaccacattcaaacgcaggaaatgtgagtggcagcaaaaagaggctttcttcacagaactgtctcccattctgatcaaaaaagaaaatctttccaagaaccctcccccaggagactttctttgattggccagaaccaattagatgagaccagtctatgccagtcactgggattactaaagaattatcatgaaaggtttaagccaatgttaatacctcccctaagtgcattgttgcttactcaatatctgaacaaaattacggttcttgagcatgaaagaagcaggcacaagggaagactatcagttaggtaaccagtaatgcctgcctcactggccaacagaccagaaagtcgattcttgataaaaccaaagaatagtagaattcattctatttaatgggacgatcacacagatatcacagaaaacatgctccccttaagagctaacagccaggtgcg

SEQ ID NO: 273401 - DNA, 485 bp, Homo Sapiens
  misc_feature (68)..(68): n is a, c, g, or t
gccaaggctcctcttatagccaggcaagcagttgtttagggctagacctgttgtccccgctcgcgtgngggtgaacgccccgcagtggatactgtcctcctgtgctctgggcgaggcgtcatagggtgagcacaagtcagcagtgccatggaagtgaacaggcatgtccccgcagaaacaatgcttccctctgaaaaatagagccaggctaggaacctgtaccctcttggtagaagcactttggtcttcactctcttgggtgggtgcagttggaggcaccgattggaggagagcaaggttgagtcaggtgtcagggtctggcaaatcttttgccaatgccctagcaatggagtttctctccgggcattgtcttaccttgggggaaggaaacaaaaccaatgggaaaacagtttctgtaaataataaaccttgaaagacaaatgctcacctagtggccaggaggtgcgctctgtctggttgagagc

SEQ ID NO: 273402 - DNA, 421 bp, Homo Sapiens
tggggacccctggttggggaacaggtgagttctatttgagacttccagccctagaaagctgcctccgtccagaaatgcctctcacaccaggagctcggccctctctttgtagctgtgactgtcaccctctcaggctttgtctcatccttcattctgaataagatggcagtgttctcctctggggcctgatccacctctacaccagcccaggaagccccatctgtgcctgccctcaggtggtccaccagtctccccctttggttcccttccagtctcttccccctttctatcccaatcaccaatagaaatgctaacatccctgcctggtagccagactagcccactaaagctcccctgtaaatgggggctccattagttctgctgccgagactaataaagatttggttggctctagcagtaa

SEQ ID NO: 273403 - DNA, 525 bp, Homo Sapiens
  misc_feature (97)..(257): n is a, c, g, or t
aaaaatctataaacaaacccagtgaagattatattgtaatatcatttaataaaaattattattagctatctaaacttgggcaaactcttcacttttnnnnnnnnnnnnnnnnnnnnnnnnnnnnnnnnnnnnnnnnnnnnnnnnnnnnnnnnnnnnnnnnnnnnnnnnnnnnnnnnnnnnnnnnnnnnnnnnnnnnnnnnnnnnnnnnnnnnnnnnnnnnnnnnnnnnnnnnnnnnnnnnnnnnnnnnnnnnnnnnnccaggtcgccatgggttgggcagatcctgaagagaaccaacttgagtctgacagtccttccagaacacggcacccacctccaccatataacacagccaagtgaaacactaaggaggctctgtaaggcatgactctgaagaaggccactatcttttactgccgtgacaccatttctcagaacacatcacatggcccctgagtggtcaggagtccagagaaaaacagtcaagccctcctttaatagtaaaatttttgtctgaccctctca

SEQ ID NO: 273404 - DNA, 810 bp, Homo Sapiens
  misc_feature (93)..(122): n is a, c, g, or t
  misc_feature (489)..(497): n is a, c, g, or t
ctgggtacaggcatgagtcacggtgcccagccaggtttggaatttttaccattaacttcaacttattctatttcaatcccagttttcttattnnnnnnnnnnnnnnnnnnnnnnnnnnnnnnttatacaacacacctatatatcccactatctttctgctatatccaggaggataagcgactagatttaacccagaaaactactatctctgattaagtgtatcagaatgaaagcactgtagggtgaaaagactgcatacacaaagaacttctacaggtgggttctggacacattaacacaaaagcagaaagtcttattcaagtaagtttttcataatagccacaggttttgttaactggtacatttttacatagatttggctcataactttacaccatcagtgtcttatcaatatctaacattctcccaagatgatgtcattaaggtagtaagagggccaagataaactttaaagatttttgagatacnnnnnnnnntggtgggtgaaaaataactttcatggatttaaagactatcagttttattaggtttgccaacctgtcttcaggccacagttaatttgtcatgtagaggaagtgagagctatagattagttttcatgaatggtatagagagaatgaaattatttgatgaatctgaatcactgggactagaaacaattttcataccaaaggttcacagtttcagggtttatgggtacaagagagggcttcggatttttagtacttactgatcattagaaagtatcaaggttttaaaatgtttttctaacatcgattatgtttgaat

SEQ ID NO: 273405 - DNA, 748 bp, Homo Sapiens
  misc_feature (218)..(218): n is a, c, g, or t
  misc_feature (236)..(255): n is a, c, g, or t
gtctgtctctcggagaaacctgtcttcaaacagtttcttctcgtctctggtggtggtctgtgggtagagtgggcatgtaaagttggaaaggcccatcccttctccagtgacgtctcgtccttccaagtccagtcggctaaagaagctgcctagagccaaagcaggcatatgttgtcgggcgcgattcttacaagatctgtcgaaaagccatgttgccnggtctttgagaatgagtnnnnnnnnnnnnnnnnnnnntgccaagaagcacagaagtggtccatctcccgaattcgctgttaccgcctgtctctttaagggcatgccttgtgctgttaatagatcttagggtgaaccacttcattctgcagggttctccctcccaccttaaagaagttccccttatgtgggttgcctggtgaatggccttccttcccgccagagggcttgtgaacagaccggagaggacagtggattgtttatactccagtgtacatagtgtaatgtagcgtgtttacatgtgtagcctatgttgtggtccatcagcccctcacattcctaggggtttgagatgctgtaggtggtatgtgacaccaaagccacctctgtcatttgttgtgatgtcttttcttggcaaaagccttgtgtatatttgtatattacacatttgtacagaattttggaagattttcagtctagttgccaaatctggctcctttacaaaagaaataccttgagaaatgggaaaaaa

SEQ ID NO: 273406 - DNA, 532 bp, Homo Sapiens
ttatcttcatgtttagcactaggttctggatagggaaaattcttcccaggcttttggagttcttcaattccaacttcataagttggatcagcaatttcttttgcagtgcacaggttaatggagttgccagagtgtctcagatatgaaattgttgcctcgtaattatgtggttcttcaaattctgcattgaaaagcctctctggagacagggagccctcttccacagtcacttccccctgagtcttgggaacagcagctggctgcctctgaaaggcctggaggttcacgatgggaggtcttgaaggctttgggggaggaggacccagggagtcgatggagggcaatggctttgttttgggaaggtggtgatgcctgacatctggctgtttttctggggcctgactggcaagctcacactcatagatgggctggcaagggctgcttgccgggctcctctcaggaggtgggttttcccagctttttctgatatgttgagaaattacaaaagagggatcttcagagacgttatgta

SEQ ID NO: 273407 - DNA, 1068 bp, Homo Sapiens
  misc_feature (335)..(365): n is a, c, g, or t
ccgcaggctgaaaaggagctgttggcatttcattaagaagctggcactgttccctgaatcagaattaaatctctgttcagggcaatgtagtactgcctggggagttttataaactcagctaaaaaataagggacactaggtatggctcacccatctatttagaagaactctccaaagatatccacaagaattttgtggaaatgcttcccacccaaaatctccagtgggaaaatgggaccagtcttatccataagtaggccagcctgaaattcttagttactactcatctgaaccatagcatacagggccaccacaaaactattaaagagtctatnnnnnnnnnnnnnnnnnnnnnnnnnnnnnnntcagggattaatttttatcagattagctagctgattgatcccttgggtcttgaaaaggcaaaagtctggagagataatttggaaaatgtggactgtgataaaaattcagaagattaagagaagaaaggcaatttaacaaacacatgataagccagcagctactgtatgccaggcatttttggtacacaaactctctgagttctcacaacaatcttaggtgacaaggatgaagaacataaggttcaggaagtctagtaactctcccaggatcacacaggtggttccaagacatacacacatgctctgaacttcatactgggagctggagaggcttagtaagaccaaggtctgaggtcacgtcatcaagagatggagaaatcaaatggaaactaaacagatctagccctttttcccgccagatggctcaatgttgggccaggccaactcaactcactgaggtagactgtccttggtcttgaaagggccagagcctgttgattcaggtctggtcttccgttgtccttctgtattttgtcagggcagtaccctctgaaaggacttgggtccctcttagtgagcttcaatgtcccttccagcttctggaaggtcttatcctggtgtcctttcagattcctttatcagagtcttcttcccttcctgaagcctgagatctggtcctggtagagaggacacactttaaaaa

SEQ ID NO: 273408 - DNA, 405 bp, Homo Sapiens
cctttgcttaaattcatgctgttctaaaaactagatcgatttgtacatctttcacaaattctagttaacaattttattttgtattcttgcagttttaagtggatgctaattttaggggcataagccttttatggccctcttgcagatcttctgaactatgcacatttgtgctttttttgtaagtttggaccaacttttatgtaacaaacagcccctccccacctccagttttacaacaatcagaaagggcactgatttatttggtatttttctttttacaaagctacctttagtcaaaggtcactgtcagtctttgcacctgctttcagtgttattgtgaaaggtgtactttgtgctcatttcagaaaataaaacacaacctttctcttgatgcaacagttttat

SEQ ID NO: 273409 - DNA, 449 bp, Homo Sapiens
cctttttgctttttaaaccataaatacttgtcttaaaaatcaatattagccctggttagattagattgagtgtggtaaagcagaaataacaatgaattgggaatcaggacctatgaattctagccccaaatggctgtacacatgaatgtgctggggaggaaaggtttggctgatcacataacttttcctggcctcatgttcttcatgtagaaaatgaaggggttggattagattagtggttctcacagtagtggtccatggacctttttagggtcacaaaacaccttttaggcagtctgtgaaggccttttctttttgtactgtgtcaatatttgcactcatggtacaaaagcaatggtgagtgtacttgctaggttcctaccacatatcaaagccatgtcaccagatgactaacagttattctattcttcagtgttatgtactcattt

SEQ ID NO: 273410 - DNA, 655 bp, Homo Sapiens
ccttaaataatagataagattcaggtagtcagaaaggggaggtgctggggtagagtgagctgcagctgaagaacaaacaggaggataggctgcatcgtcagagggcacaggctgggttttgccttgtaacaagagcagagggtttgggcactcattcatttgacaaacctttatttaatcacctcttctctgctagtcacctgtgtaactagttgcgctggagattcaagaaaacaaaaacaggtaagagatggttgataccctctggttgttcacagtctacttgaggaaacagataagcatgtaaaccggacttgcagtaagagcacagtgaatgaagtaagtctagaggagatggggggtcctggcactaaggaaggttctctagcgatgaatgaggcagagcatgaggcagagaggagtggccgaggccttcacttgggaaactcttgctattacaaagtgccttctagcgagggctggaaaagctagagtaaggctggttatacttggaagaaggaagaaaaactcgataaaaatattcacatttatacaatttctcctcaaatcctcatgaagtctggtcttacaaactacaaatgggattatataaattttcaagtgccctagaaagagtaatgaagtaaatgaatcc

SEQ ID NO: 273411 - DNA, 514 bp, Homo Sapiens
ccagaatgttccgacaacagtgcccccctcccctttcctactgacaaagccatctttgttactcctgggtgtgaaatccatttcagaaatgaggatggtgcaggctcaggagtcggcttgcaaggatggggaggggcttgggaggaaggtgtccccatcttgctcagggccccctgagtggacagcctgctcccccacacccctctagcctcatttgggcccagaatgctctggaattggcagtgttttttggaactgtgtggagctgcatttccgctgagaaaccctatcagtcaacgtcaccttccatcccttactgtcgtcacacgtacacaagaggcataatgcccagcgctggcctggctgcaggcaagcaagcagtcccagaggacactggtgggagtgttcatgattgctgccttgggggaaaatacattggcagtgtctttaaaaataaaaacccacgataccctttgattcagttcctttaggaacttctcctatagaaacaaga

SEQ ID NO: 273412 - DNA, 938 bp, Homo Sapiens
  misc_feature (388)..(388): n is a, c, g, or t
  misc_feature (561)..(561): n is a, c, g, or t
ttgcttccaaatcttagctattataaacagtgctgccacaaacttacaagtgcagatatctttttgagatactgatttcctttcttttgggtatatacccaaacgtgaggtttgtaactcacatagtgattttttattgcaggtaattccagtggagaagctagtgaaaggacgtttccaggacaacctggattttattcaatggtttaagaaattctatgatgctaactacgatgggaaggagtatgatcctgtagaggcacgacaagggcaagatgcaatacctcctcctgaccctggtgaacagatcttcaacctgccaaaaaagtctcaccatgcaaactcccccacagcaggtattgtcacaatgagattgcgggagttgctntcatctttgataatggctcagacccttctgttatttactgtgtgtttctgactgattcttctcaacagtcaatattttaatgccttcggatgatttctactgttgtctgtttcaccacatttatcttcctgtgacccatttgtcattagtctaaccatcttcatttaaactcntaaaaaggcagagctatttgcattgtatcactgaagctggtagtgaaaataatgctcccaggatagatttctttttccttttagtttttccgagaaatttcaagtagccctgtttagattttgactgaagtatttttactgattaattgctggcagtacagaccagcatatgaactgaactctgttgttaaatatggatcatcgtctctaacccttcaaaggaaattcgtgaactgtacatcctacctcctctgtaggcagtggcaatttttatgcagtaacattcagcaataccctatttatccagctttgtccaaaagtgaagtcgttgaggaaaaatatctggaacattaaaacttttaaaacttctgtggata

SEQ ID NO: 273413 - DNA, 447 bp, Homo Sapiens
agttcctgcagctgagccacacaactcacttggcaaagcagctcggcgtctcagcctcatgctgcatggcctcgtgacccccagcctcccttagctgctaagcctgccttgcccaggggtgggatggcactgaaggccagcagacaggcctaggctggggcagggtcacggctggcctttacctgctcaggcacccatctctggggtgtttgggggtcagggagcagggagcactggccgtggtctacagcgtgtggtagtcagaaggtttagctggcccagggcaggtattgcgcctgcttgggttctgccatgcctggagcatgaccctgagatcgtgacaacacttgagtggaattttccatgttcctttttacctctaatttggatctttttgtttttgaaaaacattgagaaattcaattaaatgcttttggaataaaatgg

SEQ ID NO: 273414 - DNA, 486 bp, Homo Sapiens
aattgcacatatgctcacagaggttggcaaaagacactggaagtgattgtgaaatccacattgtgattcctcaggaatcagatcctagaagggggtgcccagagctgtcggcacaccgtcccaggagtctgcctgtgcagctcccagccaggcaagaagccctgaaggcagagtcccaggtggacacagctggacgcctctctgacaatggtggctctggtggtgaacccctcggtgtctcttctgcacctctcaaggctgcaaagtgccaaatactcttttccaaccagctcccgaattcccccctccatctgggactgcatgtcctgcttagcgatttcaagcaatgatttcaccttttcatagacaaggacattgtcctcatcagggcttgcaccatcactctgatttccaatgctgacagccaagtggaggtttttattcttaaagaatgtggcattaaaagaaaactcaccatctcatgtc

SEQ ID NO: 273415 - DNA, 445 bp, Homo Sapiens
cagctacatcctaggaccttgtggaaagaacccaacatctcttggttacaaagattatgaaatattcagctttacccatgggtatttcctgacatttctttggtaaactgtagcctaatagaagatatcaggaattagtgtaagaaatattctaaaaagctattgtcactacaaagatgaaagtaactttgatgatcaaaaagaagtcaataaaaaaagactgaaagtagttcctgaatccttctctattgttcatttgggatttcttaatttccctactctcaatatattatggaattttctgtgtgaagttttgccatgaattaaattgatgtcaacaaaagttttaccttaagtcatattttaccacaaactagagaagccccagtcctccagggagcaccttttcctgcctttaagaagcttgtctcttcttcttctttta

SEQ ID NO: 273416 - DNA, 457 bp, Homo Sapiens
  misc_feature (49)..(95): n is a, c, g, or t
ctgggattacaggtgcctgccaccacatctggttaattttgtgtgtgtnnnnnnnnnnnnnnnnnnnnnnnnnnnnnnnnnnnnnnnnnnnnnnngacctcaagtgatctggcctcccaaagtgctggattacaggcatgagccactgcgcccagacttcctaaactatttgaaatggagttgcacacccacagacaccttcggcaagtcccaagaaaaaggacttttctcttccagcaccacagtgctattgtcacactttaattatcttccagcctctaattattagagtttaatcttccctccatattcaaatgtcaaggtaaaagattagaaagatttttgtcatctaaggagcttggagtttatccattagggcttggggaggattgttttttatggaggcatctgagaggattagaaagaaacccagagtaaggccaggcacagtggctca

SEQ ID NO: 273417 - DNA, 397 bp, Homo Sapiens
aggctggtcggtagcactcctggctggtttttttctgttcctccccgagaggccctctggcccccaggaaacctgttgtgcagagctcttccccggagacctccacacaccctggctttgaagtggagtctgtgactgctctgcattctctgcttttaaaaaaaccattgcaggtgccagtgtcccatatgttcctcctgacagtttgatgtgtccattctgggcctctcagtgcttagcaagtagataatgtaagggatgtggcagcaaatggaaatgactacaaacactctcctatcaatcacttcaggctacttttatgagttagccagatgcttgtgtatcctcagaccaaactgattcatgtacaaataataaaatgtttactcttttgtaa

SEQ ID NO: 273418 - DNA, 434 bp, Homo Sapiens
ggtcaggttttaggatagaaactgcttaagagtttatgtggagcttaaagtggtattaccttgggatatgctgcagcagcaagtctgtgacctccagtgagatgctgtttacatttaacaagagatgtttgctcacaataaactttaaagtgtgtcaggaatggaccttttagcgggtgttcaggcaattggtttccctctcttcgtctcaagacgtcaatgtacttatgtgagaatctttgatggggtctttcagtctctttaacccagactgcttgcctgcatcctagcccctatcagaaagaatttaaggaaaaggttaggggagaaataggatctgataacaacattagaattttctaataacctggaacccacagaaggatagaattaatagcatggatttaaaaaatctggtttaaattgttcccttt

SEQ ID NO: 273419 - DNA, 988 bp, Homo Sapiens
tttaataatttcaacttttattttagatttaggggtacaagttcaagtttgttacatgggcatattgcatgatgctgaggtttgcagtatgaatgatcctgtcacccagatagtgagcatggtacccaacagtttgtttttcaaccaattatttttctttgaacctatcatccatgatttgcaaatcattatgctccttcaaaacaagaaatattcttccctattttagtcactttagaaatcacttagtgtataaagttctaaaagtaattacaattcagatttaagctattgaatattaacgcagtttttaagtaatcctatttcaatagtttgaacacattattgtgttaatatcaataatagtagtatacctattataaaaagccaatatgaacactataatattcaattgatagagcacactaaaaagtgcttcagtgtatgttttctaagctttccattaattcagtgctttgaaggaggctgagcagagataattatcattatgctaaatttacagatgaataattgaggcttagagagtgtaggtgagatggccacaaggttgtagagaagaaataataccctcaaaacaggttctcagatagaatttcatttggtacagcaatggctatttaagaatctgcagtggatctggcaggcccacatgaggaggaggtaactactgtgtagccggagaagaggggtgggtggtctgtgactaggacagtgtacagtaaaaatctgtagttaacaaaactctcaaggctggttctgccctccagaactaaaagtctatgttatttagtgcacagttgattaagttctggggaaactcgttcatgaacctaaactcacacagacttagagttcagataggttatactttctgcttattttcattagtccactaaaaattgtatgacctcagtttattcatctgtcaattgatatgaatgagctaactaattacccatctttcatg

SEQ ID NO: 273420 - DNA, 427 bp, Homo Sapiens
tctcccagctcccatgagtgcaccagccctgccggggcttgtgtgggttctgccaatgtatcccccagggactctccttgccctgttcccacatcaggccagctctctttcttctgagaccctgatggccttgctgctttgtggtcccatgaggcatctctgctggtctgcccatctatacctggtattgctcctatgtttttgctctcagagggccatcttattgctcccacttccagcttctcaatagggcctcagtgtaatcttcatgaactttccaaattgtttttagtctcacaaagcccacttccattcattaaagaccctgagcaggttggagagcatttatagtcacagctgagtctgtgaatataaccaacaactgtgatgacccctctgttaataaataacttggacatcagcaaaa

SEQ ID NO: 273421 - DNA, 851 bp, Homo Sapiens
  misc_feature (12)..(12): n is a, c, g, or t
tgtagtgaagcnccaggctccaaaaactctttcactctcattgcactctatccaatgtttcttaatgctaggcacagcagaatcacctcagtttattcctcaaaaatgatggttgaatttatctggccaggcattggtagtttacagaagtctaccagatgattctaatgtgtggtcaagactgagaactatgtgtttaattgggttcatttcaagaatactgtaaaaattttatctaaatactaaatatccataaaagaaacctaggtaatcaggccaggtttttgagtttttccagattagcccaactacaggggaaagagactttcgcactatatcccagagtctctgctcctgcttccagcctcaatgcactgggcctttctgctgccttggagcacttagagggattacaggaggagtgatctgtggagttttatctgctgtagacaggacctctcagtgatgcatgcagtcactgcccagggtgcagctggggaagtcacataccgtttcaactcaaactggtacactgcaattcagttctcataaccatctggagttagtgcagaccccataagttaaagagtatggtctccagcaagatggtcctcgcttcatactcagaggctgcaaatccctgagcttcccatgacgttcctgaagctcaaaaattcactagaatgacacagaattcaggaaagcattatacttacagttttattgtagaagatacaactcaggagcagctgaatgaagagacacacagggcagtttctgagagggtctcaaacagagcttttgtgctctcttcttgtagaataagggcttgtcactattacctggaaaaa

SEQ ID NO: 273422 - DNA, 337 bp, Homo Sapiens
aataggtcattggtatgggctgaactgtgtatcccccaattcatttgttgaggtcctaactcccatttcttttgaatgtgactgttcggagatgaggcctttaaagaggtgacttaagttcaaaggaggctgttagtctaatccaacatggtgtcctttggacataagagataccagcaatgtgtgcacagaacaaagaccaggagaggacacagtgagaaggcagttatctgcaagcaaagagagaggcttcagaagaaacaaaatcaccagcaccttgatctttgacttctaatctccagaatagtgagaaataaatttctgttgttaagccgtc

SEQ ID NO: 273423 - DNA, 428 bp, Homo Sapiens
gccggtcactctctcagtttaaaggtggagtctatttcccttccccttaagactgcctcaatggttagactatggcaagaaagatatcatgtgacttccaagacaaatcctaaaaggcaacacagcttccacctggctctttctattttgagccacttacctatggaacaccagccaccatgttggaaggaagcccaggtgacatggagaagcatctgtgagtgctctggcaggcacgccagcttgaatctcagccatcagccagcatcaaccaccagatgcgtgagagagagccttcacatgacttcaggcctcagcctgcaacctgtcccagcttatgctgagtgagcacagacaacctatccctgctgagccctgtccagtctgcagatttctgagcaaaataaatgatgttattgttttaaaaa

SEQ ID NO: 273424 - DNA, 149 bp, Homo Sapiens
acaagtaagagtcaaataatttgcaaccagcttatgagggcaatgggggcacctaaactcttgatgaaagaactttaaaaagaaatgtaaacctcaaattacctctggatctcttagccagaggaataaactggcaattattacagata

SEQ ID NO: 273425 - DNA, 445 bp, Homo Sapiens
tttgctccagtgaagttggataagcactccgcctccccgcaaaaaccagagttctcggcttataaacacttcaataaactctggtgacattctccgcgctcgctccttggcctcgcggcagtcactgcagggacaaaggcggcctgcgcagacttggaagaggccggccgcgtgggcggctttaccggccaaagacgttttcagttaaggggaggcatcttcagagctgagggtaactccccacagccaccccgcaggtagggcagccaaccccaatctggtcagcttaaaagtgtcctcggtttcgccccctttcccagcgaaccaacactggcagattggcctgcgagccgctcgctctgttgctctagcacatttatgtagccaaacggtcgaagagccccatctttaagcccaataaacacttaactttattctatttaat

SEQ ID NO: 273426 - DNA, 433 bp, Homo Sapiens
agaggtacagaacaagctgcagagccactggcaaaggaagcatgtgatctctgcagtgacttcagtgatgaagagccagtgggagccacaggaataaagactgccaaaaacaaagcacccgattcaagtaaagcttccagctctccaggacagcttaccttactccagtgtggtttctcgaaattgcttgaaacaaaatgtaaagcagttgaggatagtgatggaaatactgcctctgatgatgaaagttctgatgagcagcccacatgcctttcaacagaagccaaagatgctggttgtgagaaaaatcaggactctcttggtacttcaaaacatcagaaattagataacatcctaaatccaaaagaaaagcatattttttataaaagtgagaagattttagaacagaatatttcttccaagtctgacgaga

SEQ ID NO: 273427 - DNA, 415 bp, Homo Sapiens
aacagtggagttaaactacatactagatctaataggcctaactgcaatttacagaacatttcacccaacggctacagaatattcttttcatcagcacatggaacactctccagaataaactatactttaggccacaaaacaagcttgaaaaaattgtaaaaaatagaaattatattaagtatcttttctgaacacaatagaactagaaatcaataacaagaggaacctcagaaaatacaaacacatgtaagttaaacaacatgttcctgaaagactaatggatcaatgaagaaattaagaaggaaatttaaaaattgcttgaaacgaatgaaaatggcaatacaatgtaacaaaatttatgggatatgacaaaagcagtactaagaatgaagtttataacataaacacctatgtc

SEQ ID NO: 273428 - DNA, 686 bp, Homo Sapiens
ctgaactcggtgatccgcccacctcagccttctaaagtggtgggattataggcgtgagccaccacacccgaccagtgcatgtccctttcaatataggcttgatttaatgaaaatgggattttatttatatatttttaaattcatgctattttgacagggggattatattttcagtgttgttttccatactacttttttcccccattcagcagtgagtgaaaaattatagaaattgacaggctggaactaaaattcatatggaagtgcaaagacttaggatacccagaatttgttttgaaaatgaagaataaggttggaacttttacactctctaatttcaagatttattataaaatcttcaagaatgaaagtattgtggtcttaccataataataaacatatagatcaatggagcagaatatagccctcaaatagacccacgttatacggtcaattgttttttagtcaacaaatgatgttaaaacaactggatattggtatgggaaaaaatgaaccttgtctacttgacctttccctcataaaatacataaaaactaatttgaagtggctcataggcctaaatagaaaagctaaaactatgaaagttttaaaagtaaacttagcacaagataatatcaactttggttaggcaaggatttcttagaacacaaaaaagtactaagtgt

SEQ ID NO: 273429 - DNA, 426 bp, Homo Sapiens
cgtgactaaaatgataggtacactgttcctaatacgggatataaaagactcaacaccacacctgacaaaagaagctgttgtcttaaagatgcatcttcctttaaagtaaatgaataacaaaggtaggccataaggagcttcttatctactttaagctcttggctggcttttccaggaagtttgaggagataaatcatgactcattttctgcagggtcagtggggaaactggagaggtggctgtccctgttcctgccggtgcctgaagctttcagtgttgttccatcacactctggctccatacctttcctcctgtcctcccgccctgttggctggagtctaatgtgacacttcttccaaaacacagaaccgcctacattgtgtaagaagactctcaaaaaccattgattgaaatgctgctgatgcc

SEQ ID NO: 273430 - DNA, 1097 bp, Homo Sapiens
ggaaggttgccatcttctacacatggcttctaaaccatccaaggtctctctggatgacaataaaaaactgtcagtggggtaaaagaggcactggacatcatgtggaaggtttttgtggcccaggcccagaagtgcctatcacatctgtccatattccattctcagaactgtcactgggcatctaaccacaaggatggctggaaaatgcatagctgtgtgtccaggagaaaaggaaaataggattgttgaacaactaatgaggttctgccatggccttctttttaggtcgccaaatatctgctttcctctctttcccacacatagaagacactcattcctaccccagggtctcataccattattgcatccagtccaaagtccaagggggaatagactatcctctctatcagatccagatatttcagcttctggtttggtattcttggataaaaaggtgaattttctgcctcccaatgttgaaggtagaaaatgtctctggttctatctcttgtcattgtagaacgggcgaagttgaagaaaaaataaaatcaaacaaacaaagacaccttctattcaaaaaagagaagacaggcaggcaagcagcagtccctagaatataaccataaggaaatcctgattagcgagtattgagaagcttcctacactgggagtggggaaattccttaaatagcctctaaatctaatctctgggaggaaccttcttttccattattatttgtggtggctccatcctctggaaagttcttttccattattatttgtggtggctccatcctctggaaagttcttccttatttcttattccctggctgtcacctctgaagtggctgttaagaagtgtgctcttcttgcggatctttggcttcataactcattctgcaagagtaaagacggaaactaatgggtgttttaggtttaaggtctgtcatttgcggactctggggctgtgggagaaaaaataaatcgtttggttcatgcacacaatgtgacagcttggcataagtaaaagacatgaacaaaaggattaatgaagaagtgaaagaaagaaggcgtatacattaggcacaacatcacct

SEQ ID NO: 273431 - DNA, 337 bp, Homo Sapiens
  misc_feature (151)..(235): n is a, c, g, or t
accttcttactctttcatgtcaggtgtgctggccctcaatgaccaacacaacaaagataaatttattgttttctgagacttagacttagacttagaattcaaaatcaacctaagagaaaagatgaccccgagccaataaaacatttgtttnnnnnnnnnnnnnnnnnnnnnnnnnnnnnnnnnnnnnnnnnnnnnnnnnnnnnnnnnnnnnnnnnnnnnnnnnnnnnnnnnnnnnttgtttatactgaagaaactcatacagagtctttcccactgcacaaacccaaaagtaaagccacatggccctatgcaataaacattatggtaataacttcaa

SEQ ID NO: 273432 - DNA, 960 bp, Homo Sapiens
  misc_feature (288)..(352): n is a, c, g, or t
  misc_feature (777)..(870): n is a, c, g, or t
  misc_feature (921)..(921): n is a, c, g, or t
acgtggtttacaaagaaaagggaagatggagccaccattttgaacatgtgtcctttccaggtagctccttttcctattagcagagctgcaggcatttattcatgcaagcttccagctcgcttatctatgtctgcagctcaatcttacaggctgctctttgttaaaaagaaataatttgggggtttttattaaaaggaaaactttaccaaggactgtttttgccctcactcactatctgcctaaattatttatttatttattcatttttgtttttgttgagatggattnnnnnnnnnnnnnnnnnnnnnnnnnnnnnnnnnnnnnnnnnnnnnnnnnnnnnnnnnnnnnnnnngttcatgccgttctcctgcttttaactcctgtatcaataatagttaatgtcatgggaaacatttataacgtatttgtatgtatgaataagcaagatagcaagttttaactagtggttgtgtttaatttatttatacaaatgtgttgggtgcaagtataatttagttacatgcatagattgcatagtggtgaagtcagggcttttatgggtatccatcactcggaataatgtacattataactattaagtaatttctcaccatctaccccaccctaccttcttactctttcatgtcaggtgtgctggccctcaatgaccaacacaacaaagataaatttattgttttctgagacttagacttagacttagaattcaaaatcaacctaagagaaaagatgaccccgagccaataaaacatttgtttnnnnnnnnnnnnnnnnnnnnnnnnnnnnnnnnnnnnnnnnnnnnnnnnnnnnnnnnnnnnnnnnnnnnnnnnnnnnnnnnnnnnnnnnnnnnnnctgaagaaactcatacagagtctttcccactgcacaaacccaaaagtaaancacatggccctatgcaataaacattatggtaataacttc

SEQ ID NO: 273433 - DNA, 484 bp, Homo Sapiens
  misc_feature (264)..(264): n is a, c, g, or t
  misc_feature (454)..(454): n is a, c, g, or t
  misc_feature (464)..(464): n is a, c, g, or t
ttcattaaaaagaattccgttgctatatttataatttatttgtctaataagtaatgttacagtgacatttaaatggaaaaatacagtcttttttccctttctgtcatttatacttttaggaaatcttggctttttgaatcttgagcccataatcaaggcaccaagaactgtttgggggtaacaactctgagtgcaggcaaaagatccaagaaggataaaagggactcttgagtgctgttcacacagatgttaaaagtacaaatngactttgcccagctctgctttcccatcctgtactaatacgggggtggtggcagtggtggcgttccccgaggtaggaggcccacagaacatggaaagagcctgtcgacagcacatataagacacacactgaaaacactgctcgcaggaggagtgaagcttgtcaaagtactgcagaggctgggaaagtgangagaagaganagagcaattatagcccgcac

SEQ ID NO: 273434 - DNA, 238 bp, Homo Sapiens
cctggcttgaagtatagttctttgtattaactacttagattttactgaaactattgtgccttgatattattactatggaaaaatcatatcaaagcatataaaatacatttttttccagaaagtgaaagccattaagttaagtgatacaatgctcatagtgatggcttaggaaaaattacccttgtaaagtgaaatagtgagaatagaaaattcaatgacaagttgggcaccatgtgaa

SEQ ID NO: 273435 - DNA, 900 bp, Homo Sapiens
  misc_feature (171)..(180): n is a, c, g, or t
agacactcttgagctggacttagattttattcttccttgcagagtagtgttagaatagatggcctacagaaaaaaaaggttctgggatctacatggcagggagggctgcactgacattgatgcctgggggaccttttgcctcgaggctgagctggaaaatcttgaaaatannnnnnnnnncctgtggcacattcaggttgaatacaagaactatttttgtgactagtttttgatgacctaagggaactgaccattgtaatttttgtaccagtgaaccaggagatttagtgcttttatattcatttccttgcatttaagaaaatatgaaagcttaaggaattatgtgagcttaaaactagtcaagcagtttagaaccaaaggcctatattaataaccgcaactatgctgaaaagtacaaagtagtacagtatattgttatgtacatatcattgttaatacagtcctggcattctgtacatataatgtattacatttctacatttttaatactcacatgggcttatgcattaagtttaattgtgataaatttgtgctgttccagtatatgcaatacactttaatgttttattcttgtacataaaaatgtgcaatatggagatgtatacagtctttactatattaggtttataaacagttttaagaatttcatccttttgccaaaatggtggagtatgtaattggtaaatcataaatcctgtggtgaatggtggtgtactttaaagctgtcaccatgttatattttcttttaagactttaatttagtaattttatatttgggaaaataaaggtttttaattttatttaactggaatcactgccctgctgtaattaaacattctgtaccacatctgtattaaaaagacattgctgaccgattaa

SEQ ID NO: 273436 - DNA, 699 bp, Homo Sapiens
  misc_feature (38)..(38): n is a, c, g, or t
  misc_feature (449)..(505): n is a, c, g, or t
agaaactgaatcacctattgtaagaagttaagatattnaaatacgataaagataataaatgtgctattgttgcaataagggtagctactgagaaatcatgagagcaggaaagggagaaagggtaaaaactcctgcagaaggtgaaaggcatgccaggttttctaggacaccagcaggttacatatgatggcctattcttgtgcacgttctaaaactgatgggcaaataacaacaacaacaacaaaaaagagctcaaatggttaagctgcaactatagagttaaatagcatcttcatatgctctctgtttctctctttcttttcccacatgctttgaatctgctgttattaagccacagtgttgagataaaactcactgtttatggtaacactaattcaaggttatttggagattttgtttttcttatacaattaagccagttctagttnnnnnnnnnnnnnnnnnnnnnnnnnnnnnnnnnnnnnnnnnnnnnnnnnnnnnnnnnctgccatggaaacttctttcccccaaattttgatccacagctttccttggattacctatcagggaaaatagagcttagccataacaggtcccaattttgtcaaaagtaatttgggtccaactgtcttttgtaaaaactacaaatttattatattgtctcatggctagagttctgaagtaaaattatcagatctt

SEQ ID NO: 273437 - DNA, 254 bp, Homo Sapiens
acagacagggtctcactgtcaccctgtcttcacactttactactagtagagtccccttctttgaaaacacatctaataaactcagtaattgaggatccccctacagccttgttctcccacttagcttccagaccacaggcagccaggcctccaacttgtaggaaggagactagaggattcttccggagaatctgaccagccctagtggaaaaacctaaagatactgacatgtagttgccccacacatagcccag

SEQ ID NO: 273438 - DNA, 520 bp, Homo Sapiens
  misc_feature (172)..(172): n is a, c, g, or t
  misc_feature (471)..(471): n is a, c, g, or t
  misc_feature (488)..(488): n is a, c, g, or t
  misc_feature (498)..(498): n is a, c, g, or t
tgcaagataaagtcacctgaatcagtacctgttgacagcaacaaagactgtacgacacctttggaaatgttctcaaatgtagagtttaagaagaaaagaaagagggttaatttatctcatcaactaaataatattaaaactgaaaatgaagctccaattgaaattagtagcngacgatagcaaagaagactatagtttaaataatgattttgtggaaagtagtacttctgttttacgttacaagaaacaagtagaggtacttgcagaaaacattcaagatacaaaaagtcaaccaaatactatgacctcccaaaggtgctgggattacaggcatgagccaccgtgcccagccccattcagtattatatagcttttccaaagtatgctattgatttattcatttatatagctttatacaggatgagtatccgtaatccaaaaatctgaaatttgaaatgctccaaaatccanaacattttgagtgctgncatggtgccntaagcggaaaattccatacctg

SEQ ID NO: 273439 - DNA, 448 bp, Homo Sapiens
  misc_feature (28)..(28): n is a, c, g, or t
gtcacacaaggcatgcggagtacccgcnctatcagtgcccctcttccaaaggcagcgtgccgagccagcaagagcgaaggggtgctgtgaggcttgcccaggagcaagtgaggccggagaggagttcaggaacccttctccatacccacaatctgagcacgctaccaaatctcaaaatatcctaagactaacaaaggcagctgtgtctgagcccaacccttctaaacggtgacctttagtgccaacttcccctctaactggacagcctcttctgtcccaagtctccagagagaaatcaggcctgatgagggggaattcctggaacctggaccccagccttggtgggggagcctctggaatgcatggggcgggtcctagctgttagggacatttccaagctgttagttgctgtttaaaatagaaataaaattgaagactaaagacctaa

SEQ ID NO: 273440 - DNA, 566 bp, Homo Sapiens
catgggcatttgagccacttcctcatgtaacttacttgtgccttccaggacctgctcaagccccatcacgtatataccacttcccatttgatgatggaatgcggctgttcatgaccaactttatggctaaatgggtcagaaagcacccagttcatgataggcagttcaggtcatatggtgacttgatgacccagagtcaaacattcagtttccaccaaagcccagtaacaggccaagagctgtctctcaaaagaagagtagttatctgcagaagatggcagggcctgctccgaaagcctagagaccgccactgtgattcacctatgggggcctgccaaaggctgcagccagcatccttatctgccactgacacctcaagcaacattggatctgctgggtcatatggcccaagtggcagagcaacttgcacaacagcctggacctgtcatagagctttctcctgttctggaccccactcaaaactggcagcctttcaggtcactcaataaatgtgctggagtaacacactcaaacgaggaatgtgttgcctccaaaatccaataggc

SEQ ID NO: 273441 - DNA, 766 bp, Homo Sapiens
tctgagaagtaaatggtatttggatcctgacctcagacgcgaatttgggtcttctgtgcttaggagcagaaagagcccaggaggggcctgttcctttacttcttgggggaaacgcaatgcgtggcctgacttctcatgacgggaaaggctactccaccttctctgtactcctggaggggagtcttgttcacatgtttaccagcggccaggacaaggaagagaaaaggtattgacattaagaggatggtttgctgaggctgtgaaacttgaacgctattagtcagtggaacctgcctggcttagggaatggctgcagcagaatcgagacgtttccgagtttctcagtcatgtttcatttgggctgctgttcttttttctgtttaaatcaaacttcaggttacgtcatgacttctgcagggctgtccttggttcctactgcagggcgcctgtgtggttgggattccttttctgtttcaagatggagccgggttccacccttggagctttgagaggctttagcagttgctgtcctgtaatacctccgttcccaagaaataccgttcacatttcgcttctttttcacactttgaataggagttaaaatgtgctttctgtagtgtttggaaaatggcaaagatatattgtaatgtgagcccgaactgttgttgataaatgtataactattgctaggtcaagaaattgtgaacaacagtgttttgcttggtccgtagctatattgtgttaaatataaactgagtttactgcc

SEQ ID NO: 273442 - DNA, 995 bp, Homo Sapiens
  misc_feature (489)..(499): n is a, c, g, or t
cattgggctgtggtgagaatcacagaaaacgcatgcaacagcacttactaaatgggaaaacattatgcacgaacagttagcattacacagcacttcccaaacgtttctgactgtttgacctccacatgaaaataatggcacgcacgtgagtgcatacgtatgtctgcatgtgattcacacggccccatctgtgccaggaccgtctctggttaatatcaggaagcacctgcttctgctgcctccctgacacttccactttcagtacttacatcagtcctgcagatgttctccaaattgctaaatttattaaattagatgtaaactagaatggcccaagaagcaactttacggaaaattcttacaattcagcaatatcatgcagcctttctgtatgtgttatcattcattaccaatgagtgaatatttatgccgtaacataactgcagcagtgtaacatataaaaattttaagacatgaagggatacattnnnnnnnnnnnccgctgatagtctaactttagaggcaacaggaaagaaaggtttgattatttacagttctctgttcaaaaccacaagggttattctgttatttattctctgttttattcatgtcaacaggatttataacagatgaatccatcaaaggccaaattacagttactgcagaacacttcctcctgtgatggaactgttaggttctacgagtcatattgctaagagatacatttctgggaagggcagaaagtgttaagccccttcgcaatatatatatatttaagtacaaaattgtcatttgtttgcaaatgatatagctggaaaacagaagcaacagacagaccatcacaactagactaccacatgcaaatatcaaaaatatgaaaccaacagcaaccacctttccactaacaattaagcaaatacaaaaaagaaacagagatgaagactccagctacccagacacaaaaactacaaagtgcctgggaattactgacctag

SEQ ID NO: 273443 - DNA, 880 bp, Homo Sapiens
  misc_feature (658)..(666): n is a, c, g, or t
tctaggttcccgaacctagtgctgggagagtggcacgcccagaggaagcctagaaggtctgcaggcacccccttgcctcccacccccgccataccttgccttatgcagctcttccatctggccattcctgagttgtatcctttatgataaactggtaaacataagtaaagtgtttcctttaattctgtgaggcattccagcaaattattaaacccaagaagggagtcatggaacccctgatttatagctggttggtcaaaagtactagatgcccagacttgcaattggcatctgaagtaagtggaagcagtgttgtgcaactgagccctttacttgtggggtctgctgtcaactccaagtagacgagtatcagaattgaactgaattgtaggacacccagctggtgtcagaaaattggctggcgtgaggaagaaaaaccacacattttggtgacctcgtgttctgtgctgtattgggtataagtgtttggtttttcctatcttgtacacagtaagttaaagacaggattttgcactggtcttgttggtgtgtgcctggtagtcccagctatttgggaggctgaggtgggaaaactgcttgagcccaggggttcagagcagcctgagcagccccatctctgggtagagagagagagagnnnnnnnnnggattttgacctaggtctgaattcaaagttcatgctctttctctatgtgctgcttcctactaaaatctataaataaccctaaaagagtcaattatattagccttttcttaaactgtctttggccagaactactaaaaaggaggaaaagacttttatggcccttttctgttcttgttcagatatgtatgtttaaaatgtgtacaacaggataatg

SEQ ID NO: 273444 - DNA, 428 bp, Homo Sapiens
tatcaagcctagtttctaaagagaactagcccagtgcgtgccccacacacacactgaggagttcagttctcaagcaccggaacatcagccattttaggaggccttatttttcttcccaataaagcatactcacatcatttccttgctctaagttgggggtgggtatctaggggtgaaggttgggagttgaaaatattatttgacagaataactatttttgcaagctgctgcactggcgggacagaggcctgggatctggcacagaggagtacccgcctcacgatctgacacccgcctccgagcagcccgccaccttgcaacccggggccgggcccaggggagggggcgccagcagcccctggccctcagccatgctacctctcttcagggcactggatcagacacagcagataactggccaaaaaaaa

SEQ ID NO: 273445 - DNA, 615 bp, Homo Sapiens
accccaactcatgtaaattgaattcatctactctaacatcccagttaaatgtcaaagctttgggaatcaaggtagggatttttatttatttttcaaagttcagttcccagaaacaatgacacattttacccacaagtgagaatgttgttatcttgtagataatccagctactgttctatgaactgtaggtcactgtagcctgtctacaaaatgccatcatcagcttcaaggcctgtgttcactaagacagccacatggaagttatactgaacaggcaaccctaaaatgactgagcgccatcgcctgagatttattccctgaggaccaccaccaactgtgatccagccagaattctggcaggaaaataaagtaagttcaccttctgtaagttaaatcaaatgaacaataactcaaggcatgttgggtcattgggaactaactgctcagatgctcatggccggtgagtgaatcaactggcatcattttaaagcatctgggcatagcatttttgagctatagaacataagaggagattttagcaaccaaattattaccaacgtcagtgattggagtccagaactggagctgctttgatagttcattcgtgtattcctt

SEQ ID NO: 273446 - DNA, 509 bp, Homo Sapiens
tttggatcccatgatcgaggactgggaaatccccctcaagtcattgcaggtagatgaagaaatgcccagccacaaatttctatgcagctacaggccagacattctggatataccagtagtgaagcccccaatgcccgaaaccacttgcactgggtgcggctatgccggcaggggctgcagaaggagtcggcgtatggagtctcgaacccgaaggatttgtctgccgtcacgatggagcggtttgaacctcagattaatgcggaggaaagtgaaattcgttattctacatggaagaaagctgtgatgaagtcaatgggttgggttacaactcaatctccagaaagtggtattccataaaacctaccaactcatggattcccaagatgtgagctttttacataatgaaagaacccagcaattctgtctcttaatgcaatgacactattcatagactttgattttatttataagccacttgctgcatgaccctccaagtagacctgtggctt

SEQ ID NO: 273447 - DNA, 430 bp, Homo Sapiens
aaatactacattctggcttcaactctgttcctgactactcttaggctgttatgcaaatcattttctctgtataagccccagtttcttcctaggataacttcctccattacagaggcttttgtgaagctcaagtgaaaaaatgtatgtggacatgctttggaaattacaaaatgcctaataaaggtgagaagttggtattattttgctcaccgaagacattggaaataaagtgatcgtgaaaaaatgtcaagatgcccctgatatttttaagtactcattcacctgtctgcctccactaatgggttatatgctcttagattatcgagatgtcaatgtgttctctgtatactccttgtaactatctcattagctgattccttgtggtctactaagtattaaagcaatcaataaaataattgcaaacaacctt

SEQ ID NO: 273448 - DNA, 506 bp, Homo Sapiens
ctcggaagaagccctggccagacagccccggagatcaagcatctcctcctgggatgcccctcccttggaagaacaaaaggagctccattatgcctcccttagtttttctgagatgaagtcgagggagcctaaggaccaggaggccccaagcaccacggagtactcggagatcaagacaagcaagtgaggatttgcccagagttcagtcctggctggaggagccacagcctgtctgggggaaaggacaagtcagggaccacttgctgaagcacgaagagcccttgtggcaatgttaacattaactgatgtttaagtgctccaagcagagcagaaagaaaacagatgatggaattagagaggtgggctcaaatctaggccctggcactgtcatcaagcaattcactgcatccctctgtgcctcagtttcccattctgtaaatcagagatcatgcatgctacctcaaaggttgttgtgaacattaaagaaatcaacacatggaaatcaa

SEQ ID NO: 273449 - DNA, 518 bp, Homo Sapiens
gcctcaaaatatgcagcctcctctagtaaacaaacacttttccaatcataggcaacaccagaggagatttttaaagacagacaaccgttagggaagcttcatgagatattgcaatgtgaacatgtatctagattaagttaaatgatactgttttgataaaaagaggaacatgttgatgtcaagggtggctttgatgagagaatatattatatagtggcttagagagttgacctgcaacctcaggctgcctgtggctgagtcctggttcttgcactgggtaatattaggcaagtcagcattccttgccaatacaaagaggataacagcacctacgtcatgaaatggttttaaggattaaatgagctactctgcaaagtgcttagagagtcattgacatatactaagcattccatcagtttcagttcttgataccctacttcctgagggccttcaccttgttagcatgacacctctataattggctttgggcttttgggcaaaagtggttcaaccagtcc

SEQ ID NO: 273450 - DNA, 452 bp, Homo Sapiens
accaagagtcattgtcaatggcctataatgcctttcaccccaccaggctgtgttcttcccacctcctgactttatacatggctactcccaggacaagcttcttccagatggtccagctcgtttcctgcctgactttcccaatgagcccttgtgttggctcctttggccctctttttgaaagagtggacaagaatcagatgattctgaggtcttgcatttgttttcattttgtgtgtgaaatggtgtttaaggtccatagcattaagtttgaaggaaagatagtttcaggagagagctgagactctatacttttcccaaggtttatttgcattgccaatgaaacatccattaaagccatctcagccaactatagagtttgaattggggaagaaaataccacggtggaaaagtagaatttgatgttagccatgcagatggcgactgaacttaag

SEQ ID NO: 273451 - DNA, 462 bp, Homo Sapiens
gttcacaaataataagcatttggttgcaatttaaaattggttggcagagcaatagggcatttgattattaggattttacattatctgagtgacttggaaatagaaaagaagggacttgtattatatgtccagaaaaaaagtccagcaaactataatccataggcaaaatccagtgcactgctgtgtttgtaaataaagttttattggaattcagtcacgcccatttgcttatgtgttgtctatgtctgatttctgtctacttggtggcattgactagttttgagaaaccaaatgacccacaaactttgcaatatttaccgtctctttattgaaaaggcttgaccctctataaaaacgaattaatcctgaaggagaagaaaaaataaatagggaccctaatcatatttttaaatttatacagcatgcagttttgaaacactcagtcaatgatgtagaacaatt

SEQ ID NO: 273452 - DNA, 591 bp, Homo Sapiens
atggggtttcccagggctcctgcaggggcctcctgagggagcccttggggtcactccacagtctgggctttctgtagtccggtgggtcagggctccaagcaccaggagagatccagggatgcgcttatgtttgggccacccccggtgggcttgttcgttcagcccccttcgtttcctggcctgctctacttatatctgtttgtgaagaattattacacagaatctagaaaccagctttcccttttctcccagggttggagcccaggaagcaaaccagcactgcaccctagatttcagccagaggacgaaagccctgccctcagctttctcagaccagccctggagtaggtggcccggggagacctgggcagtgtccctgattgtcctgcagactgtgtggctctgcagacctctagatggaggaggcacaattctctaatgctggacgaggacactgatcatggaaactcaccccaaaccttgaatcgtgatagcatttgaggcagcctgaccggtgccacatgaacctgaaaggaatcaagatataatttattttgaaaataaatcagacactttcagaatttgagcgta

SEQ ID NO: 273453 - DNA, 399 bp, Homo Sapiens
  misc_feature (145)..(145): n is a, c, g, or t
  misc_feature (275)..(275): n is a, c, g, or t
  misc_feature (284)..(348): n is a, c, g, or t
  misc_feature (351)..(351): n is a, c, g, or t
gctcaagtgtcaccatagggagagaaccttttctgaccaccttaaacgttgctgaaaacctcccccagcctgcctcttgccagcatgttccatcttcttccttttttagcacctaccaccttcacatatattatttacttatttntattgtctgtttctccctgccacgagagacggagatttttacccctagcacctggaactgttcctggtatcagaggcattaaaatgtttgttggatggactaatgaatgagaagagaaggctgggcttgnaattgtcannnnnnnnnnnnnnnnnnnnnnnnnnnnnnnnnnnnnnnnnnnnnnnnnnnnnnnnnnnnnnnnncantctgtctgggcaacatggcagaacttcatctctgcagaaagatactaa

SEQ ID NO: 273454 - DNA, 583 bp, Homo Sapiens
aaacgcagtgaaaactgcagacaatggactgattcgcataactgtacagaatgtagaaatgggttaagcttcaatggataccggtggtctgtctcctgtgaagatggacggtatttcaacggccaggactgccagccctgccaccgcttctgcgccacttgtgctggggcaggagctgatgggtgcattaactgcacagagggctacttcatggaggatgggagatgcgtgcagagctgtagtatcagctattactttgaccactcttcagagaatggatacaaatcctgcaaaaaatgtgatatcagttgtttgacgtgcaatggcccaggattcaagaactgtacaagctgccctagtgggtatctcttagacttaggaatgtgtcaaatgggagccatttgcaaggatgcaacggaagagtcctgggcggaaggaggcttctgtatgcttgtgaaaaagaacaatctgtgccaacggaaggttcttcaacaactttgctgcaaaacatgtacatttcaaggctgagcagccatcttagatttctttgttcctgtagacttatagattattccatattatt

SEQ ID NO: 273455 - DNA, 358 bp, Homo Sapiens
actcaggcgatcccttcacctcagtctcacaagtggctagaactagagggtacacatgctacgcctggctaatttttgtatttttaccagagatgggttccgccatgttgcccaggcttgaatttcactaaatcctttttaaatgacaaaacaaatacttgcagtggagagctgcttcacataagaaagattagggaaaattatgattcgaatgcatttaagaaaaagtctatttcctcatccaagctcttactcaatgcacaccagccactgaaatctgatagtgacaagattggcaagattaaggttaaaatgtcaccgccagtggggccctcagtaaagaggaaatacttcctgt

SEQ ID NO: 273456 - DNA, 455 bp, Homo Sapiens
  misc_feature (124)..(135): n is a, c, g, or t
gtaagcagggcaatcaatcaacctgcttctttcaagtagctggtaagtcaaatagcgggtaaggcctcaggaaatcttgttatttggtttatttctaaacatttgcaaggtgacacttagggcnnnnnnnnnnnnccaccaaggtttaaggtcatcttgcatcgcagcgaatgagtggctcctatctatatctttccttcctctctcttgcatgcgggcccccaaaactgatgttcaacatctcaggacttctcttggtacctgatatgtttacagctagcttcctcattgaaagagcaaaacctcatcagggtgaatcttttaagccctgatctccctaacctgccccactgagagagctatccaacccttccggccagaatgcgttcccccttctctactcagagcagttccagaaacccctccctccaatccaatgaggcaattcctgtggg

SEQ ID NO: 273457 - DNA, 450 bp, Homo Sapiens
ctgcagtgaagtataaaattatactttcaatatcacaatgcagttgcccaaaatatgaatatacttacaaggtctccaggttatctagtccatcaaaacagtgttgactcaggcttctaattttattgttatgaagatgcagaactaccaggcttgaaaggttggtaaatgcaaagtcagggatacttgagatcttgttgagagccagggtcagcgcctgtagggtgggcagattgctgagggggtgcacaggcacctccgtcaagctgttgtcatccagccacagatgccgtaactggaacaagtccttcaaaactgtcctcggggactgaggtaatatggttggcatctaaacgcctaacagaaacaaaaacaaccatgttcagtaacaaattctagttgaaatgagtcagttcaagtctcacaactcaaagctttcaaaacaaaaag

SEQ ID NO: 273458 - DNA, 275 bp, Homo Sapiens
atgccacttgcatgggaccctgaaggctgtcaaagtccatttaggccaagtcccaagccctcccgggggcctgcggtgaacactggtcaagctctctccggctgggatgatcacaccctctgcttcctggccacctgccagcctccatgcaactctgtctgtctgctgcccatctgctgtctgtgcaagcaacttctggaccctggcaccctgggctgctggcctggaggagttcgggaaggaggatagaccaggaaataaagggtcaacagaaa

SEQ ID NO: 273459 - DNA, 287 bp, Homo Sapiens
ctccaaattatatttaaaataaatattaacttatttcagtatcagcagcacttaagtcattaactccctatcttgttccagactaaattatttataagaaaagaattaaatcaagaagcttatgggggggaaaaaatcccggcagtataagcagcaatgctattttttcttataccacattattgtgtaagaatgttgcatgtttgtggaggaggggagattgtttctaaatataaaaaacataccactcacttaaggtgggggggaggttcaaaaacttatttaga

SEQ ID NO: 273460 - DNA, 640 bp, Homo Sapiens
cttaaagagacctgcactgccaggcttagacgctttatctttattttgaaggcaatctgtgggtaaagaacaaaataaaagccttgtccctttgttcccttagccatctttcttatgctttctttgttaccagatagggcctttctcatactaccctggaatactgaaatttcagactaaaccagtcaggtggctgggagtgcaagaaatccttggcaagacccttctccccggaaagcctcctgacagcagagtacacagtgtcacaccttagaatgtccaccatgaaatgtaatggtgctcagtgtagcagatgattgcaaggccagtgtgaaggcaatctacccacaacatttataactctgcgggttgtcagcttcatgagctatgcagctgagtaggaaggcatctcctgactttcactcctcaagatccattctctatgatgcccttcccacttgaaagagctttctttagccaaggtctttctttgatactctgtccccctaaaaatcagtgcttttgaaagtcatggccagaatagtataaacaacagaagggttttataaatgttaatactttgatttcgcaaattttctgtcacttggaatgattcttaatacaaaacaatgtacattat

SEQ ID NO: 273461 - DNA, 524 bp, Homo Sapiens
tttttatattcctgtcaggcgttggttcccggcctgtcagtggccgtgtggatgagactggagcggagcctgcccatatgccagtaagactttgaaaggtcgcctggtctgccctgcctcctggaagggctgcacataaagggaactggcaacctttctgtcttgtgaaattacttgctggaagctttagggtcacccctggccctgtggagtggggagagctggtggcaagaaggggacagtacactgatgggctatgatgagagaagcctacagactctgggagggttttgaggtattggacagacttgtgggggtgaggagaggaacattcgaaagagtgtgacctgaagaactgacaagcaatgctgtctgttctgagaaataaccgagagcctaagaaagggaacctgatactgtctttgcatctgtgagccagtagccctaatgcctttttagttatagatgtgaaaatattcatttagggtttatcagatgcaccagaaagaaagacagtcctccac

SEQ ID NO: 273462 - DNA, 237 bp, Homo Sapiens
ggccagtgtgaccttttaatattgatttctgtgtctactgtaatatcccctatagtttgttttgttgttgttttgcccacaacaggcactcattaagtattgtttgaatttaaattttgtcctattggtttctaatggcatttctaagagtttactatagaattcagttgtttgttttcagctttttagtgacctatactttgtttgtgctatttaataaatgttatccatatctaa

SEQ ID NO: 273463 - DNA, 521 bp, Homo Sapiens
caccaacagtaataattataaaacaacttacattaacatttaaaatactaacctataaaactagaataggttgaaataaccagagtgagagaatgaaattacaataatgtttatatctctattcaatggtacagtctctaaatcaagcttaactgtattaacctccctgtactgcagaaatcagagaatcagcccagcctttgtctagagtcctcctgggatccactcattccaaagacctcagaagcatactgagaacaaaagcaggacaatgcatattcctgagctacatcaaccttaatggccaaataccaatggaaaaacaagctgaaacatgtaaaaaccaggactgcagcggggagagggctggtgggaaagagtgtgtgactgaggagcgggtaatcaacagagcaaagatcaggaaagctgcctgctgcgtttaatggcaggaaagtcattagtaagaatcatctgggtggactgatgggggtggaagtcagcctcaagtaggtagagaatga

SEQ ID NO: 273464 - DNA, 447 bp, Homo Sapiens
  misc_feature (386)..(401): n is a, c, g, or t
tctctggggattacgaagaggtagtaatggcttcattacagcttatcacagggacactgctagagatgtaaaaatgagtgagacatggtccctatctataggaaattcagagtgtgggacgggctccagtcatagaaacagaatttcaatacggtatgctgagagctgtaatacagacacgcacaggatgcagctgtaggtgtgtgcgcttcaggaggtcttcttcagaaagtttatcactggtcacatgtttatcccacaacgggttttcacattttaattagaatgtcagctttttctcttggttggcatttttttcaactcagtatgatcattctagatgtttcctgctgatgaaatttgattgacattttgtctttgatttnnnnnnnnnnnnnnnntgatgaagttgtaagctaataaatgcagtttggcagatgaaatctt

SEQ ID NO: 273465 - DNA, 884 bp, Homo Sapiens
ccactggaacattaaacagcacccaagaacagctttagaaataaactctaacatctgggatgcagtggtagctgacaaccttttgttttaagttatttgacttggaaagggtttttggagctgacagcttaaacacacttcatgtgtcccagaaaataagactgggtgtttaccacgttttgtttctaagaaactaagtaaacattcgttaaaacatatttaagatacacgtgctcctgagaacacatttactaccccgatgacaggaaacaattctaggcagtcctgaaagagggtggcaaggctaaccccgggaacaaagacttgcaggtggctgtacagccagctggccctggaggccagaagccagtggccagtagaactctcatccagcacaccgcgtcagcagcttggaacaagcaacagaaaccaaacacacagtggaaaatcccagaacccttcagcctcagtgcagcacagcctgacccccgacatgctggaaacgagacgtcctttctccaggaggtgaagcggctcattccttcctacagaacctccaagcctttagcaaactctgatgtgaaccaaataaaccaaacagacaagcgaaaggcttctcttggagagatgtaagaaatgaggtgggtctggtgtactttcctgcttcccaggcacaaagcaaaagtatgtttgagaatttcctatgacttatgctcagaaactcgactttcctgagttagggaactgtcgagcctaatctcacccactgtttctcactggtccttacctggtagttataattactcttagcacctggtattttctcttaaagcttttcctcatgagcactggatgttcaggtttcttcagtctcccttatctgt

SEQ ID NO: 273466 - DNA, 452 bp, Homo Sapiens
acaacatcatttaagccaaaatatctcccaactgactgatagactctgagcactaatatcatagtgctgtgatgatggacaattacatagcaccgataacagccatgcactgtgcaaagcatgcccttctgcacaggagagcaaggcacttgcagtagtgatctatgccagcaaaacatcattttgagacaaacatttttgtggcagatgtttttcctaaaaagtactatatcatccaagaaatatttgagtaaaaacccttgttcttttgggtgacattaactgacatttgctttttttcaagacctaatagaaaataagaaagcccataatgtatttagaaacaggaatcctcagagcaattctctgtattctcatataatttcaatgtaaaacagaaaacatattgatgtgttggtgataggcttgaattattaaaaacttcaaatcat

SEQ ID NO: 273467 - DNA, 617 bp, Homo Sapiens
gctttgaatgtcattgctaagaattacactttgagtagcatttctggatgtctgagcttttcaaatgatacttcttttctgctgtggctttcctttctgttggactggttcccagagggtcctcttgtttgtccttgccctcgcttttatatcagttcatgttttctcttctgtcatcttccttcccagcgctgtttctccaccccctcctgctgcactcacaacagcttcccctctcctgtttagaggtggaagcatgtaagaatgcgtttgagggggatgcttgccaaaggacagcatattcaacatctggtatcaacaaggtaatgtttaaccttagactagccaaactagtgatgacctgcttccatgctgcatctgctgctttttgtgttgatgggactcagaaatcatgagaaaggtcttcagtgatccatgactgcaacaaattcttttcctaattgtgccgtatattatgcccctcaatacaacttactaatctctgcctcagtttctccatctgtgaaagtggtgtaatacttatctacctcccttgaatgttgtgaagattagtatatgttggtaaagcacttttaaaataaagaatgatataaagc

SEQ ID NO: 273468 - DNA, 845 bp, Homo Sapiens
aacacagtagatattacacaggcatatatgcatgtgttcacaaagtgacatcaaggacatagaaacatgtttgtgatgtaatgttgagggaaacaagcaggtcacagaatgttacaggattttataaagatgtaaaggaattttactaaattatgggcaatcatactatggcatccttttttctgcacctttataactttctcttccttaaaagtatttaactgtgagatgtattttgtcaggaaaaaaagaaagaaagaacacagtgctagcattaaacattaaacattttttaaaaaacatttttacacttttaaattctaatggatatctactttgggccagtagagtaagagggaccagagttactttcccatctgaaacaaataaacaaaaaacagacaaagtacattcaacagtagttcttgagattgtccagactgtgctgcggggagggagaatccaacaggagccaggccatttccctgagctgaggaggtggagctggcagtctgggaaagccaagacacctagaggtagcagggcacaataccagagaggatagcactacacagagaattgtaggatatgcagagggtcccattcaagtcttcagctgagagctgatgcgcgcacgcgggcatgcgtgtttgtgtgtacaaatcaaggccagagaaaaccacctgaaaagataagagggaaccatcttcaaagttcatacagggccagttcctcttcctaccagccagagtagaaaacctcataattcagggggtatcaagtagaacactcagagatggtttgcctcggtagtggggcaaaataagccctaaactctgctcttg

SEQ ID NO: 273469 - DNA, 1032 bp, Homo Sapiens
acaatatttaaaatttaatatacgaaagttaattttctattacatactccattgcatgttatagtaatgcacttgaaatatattatctccatttcatatcaccatgccaaacttacaaaaattcagtatctttaaaataccaagactatttagaacaaatacatgatgtggtgttcataaaaacaatattggattaagagtcacaagagtcatttccttaacttggttctatcttcaacactttaaattctctggtccttagcttctttagttacaggatgagtgactgcaataaattatctctaaggtcacttatcatttcaaatgtacatcttggaatcactaaacatttccttataaaagggcaataacagaaatatttcctacagctggagtcttcttatctgccaacctcaaccattcagagcccagctctgcaggaaacacccaggttttgagcagtcaaaataaatgctgatgtccatgaaccaaacttattcacaaggaaactccttgggcccctctcacagagactgtttactctttacattgaatctcttttaaagtttgattatgttgttttcaaaggcctggcatgttagtggcaaactggaaagggactatgagacaatcacagaagggagcaataaatgggcgagtgcttcgaaggctctgaggtgctgcacaaatgcgggctgttatcattagcgagagtgactgacaactgacaggaatagtgagagaaaagataaatcattgtaaacaaagcacaggaatttcaaaatactgtttggggtggggctgtttagtatattggcaagtcggttgaaacagttcagtaattcctgaaagtctcactgaattatagcatagtatgtgcttatagaaataacagttatcaaggagatgtttatttacattctgaataatatttggtttaacagatagtgtaactggaaagtgaaatcttaagcactatataatggtattttgacatgtaattttatttgacatcagaagagtatgcaagat

SEQ ID NO: 273470 - DNA, 382 bp, Homo Sapiens
gggagtgagcatgaacaagtaagagacctttcctgcaagactcatacagatggtgcctcagcatatctgggaaggagattcaagcacaagctagccaaaacctgccagacatccagcatggtgcttttcaatcagcagcccccagacgtgagtgaatacctctgtgcggtcaatcagacttcattgtcccttctctgggctgacctggagtcagttgtttacaccttgcagtacctgacagcttcactctgtctttgcctcaatcctgggggatccgtaatagccactgctagacctgttttaatgtggccaaggagacaactccttaggcaaacgaagcctcaaaaagtttagatcaaaaagaaaaaggtcctgcaacatt

SEQ ID NO: 273471 - DNA, 432 bp, Homo Sapiens
  misc_feature (263)..(263): n is a, c, g, or t
agcatttgtgttttaaaattttggggagaaaaaattctagtaatttccttcaacatcaatttaagtacaggaagggagaaaggaacggtatccttaatagtttttcctctcaaattagtgctggggttgagaggaacctacttaacatccccatctctatcccagggtcacaagcaaggcgtgctaccacacggctggagtggggcatgtgaagactgtagagatgaattccgccttgggataagcatgtgctgtcaagccanatattttccaagtacctctgggaggcaggtatgacatagcttgaaaagccaaaacaggagtaaaaagtacaccttaacctaaaaaacatgacagcgtggtagctggagtaagataagaacatgatagaaaagtcacaaaattatgatagctctgaggtgcaagaaattg

SEQ ID NO: 273472 - DNA, 701 bp, Homo Sapiens
gtgtcttggtacagctcgtggctgtggtcagtgtggtggagggtaggtcttctcagatggtaacatgcatgagagtcacctggggatcacattaacatgcagattctgattccctggatctgggtgggacctgaggttctgcatgtctaacaaactcccagagaacacccatgtagcaagagtacagacaaaaggattcaaagcgaagggactgcaagaaccatggaaccagcctcccacgattttgcggatgacgaacccgagccttggggagtttcagaggccatggagagatgaagtataataaacagcatagcagttgtatgttgagccaagaatcagacatgcacagaactgctgattggaaaattaaatctgatctcatagccctggtgtgggcaaaatgcctagctggagtgggtgaccgctgatttacagtggggcttcttggtagggaaaattagtccatcccatttacagctacttccaatgcagctgtgtcaggggagagagaagaaaggacatggaagagagtgtagaggtatgatcttcagtcctttcaggcaggcacataagtaaatttttatttaaaagataagaattggtcatatgcgaatctcctgttagataagattaaaaacaaatttccattttgtggagaagttgcagataaatatttttccatgggatccaaaagaatc

SEQ ID NO: 273473 - DNA, 521 bp, Homo Sapiens
gctgggaagtttggagttcctgggtctttgcctgtgccggagcagctgctctgccaagactccccatatctgtatgtcagactgaaggctctagtggagtggcttcacaagggcgtctcttgacccaagggttgcaaagatccgttggagaagcgtggtttcccagggtcacacgttcactcactgcttccctgggccagagaggttcaccttgctctgtgtcgctccaaggtgggctgtcatcctgcctctcttttctttgttctctgtgggtcaagttgtttccttgattagtcccaatgcaagtacatggatgtgtcagatgaaggtgctgtatttactcaccccttttcctgttattttcaagtgtaagttatatgtggctcacattcattttggtttttatgtgggaaatatatacaaagatatctgtcaaatgatagtaactacattttgcttctcaattcagactacatagaaaatggaagacctaaaggaatataatgtaattatcattatag

SEQ ID NO: 273474 - DNA, 558 bp, Homo Sapiens
cttttcttctgttcactacagccgtggagagctccgggttgtcctgcacatgtgcactgccctctcttttatggaccttttaggctggctgcaccctccgtctgtgtcaccctcctgctcctcctccacctggctagttcctgttggccacttgtggaaattcatgccagtccagtccaccctgagtacatcctctttctgtgtcactgagctcactatgctgggttttatctatgtctccctcgcaactagatcattgacgtcttgaagttaggcatcatgcgttcttcatttctgtacctcccaactcaatgcttagcacccagcaggggctcaagactgtgtgtggaatgaaggattcgtgtgaaaatgcagggagatggaaggctgagcgtttctgttccttgaccattcccgggtttgactaataactctcatacacactgctactcattgaaggcctactgtgtgcatgcattccatgtgtgctatacagtttatttattgttaacccacgtagaattcccagacacatagcgttactacaaacttcatcac

SEQ ID NO: 273475 - DNA, 427 bp, Homo Sapiens
tgttgaggtataaaatgtaaacaccttaaaatgtcttccccttatatgatcactgtgtttgagtaaattttgctggattttttaaacacttactttcaaaaaccaagttaatacctctgacatggaaattaaagcttcagcccagtgactctaagctaaggctaatatggagcctgcaaaaggaggttattaaaggcccagttaggttctttttggggagcctcccctgcagatgtcccagcctgctcacaccagccatgaagaagcctttatactgagagaagctacagagcccaggaaagctggggacccacaggcagatgcagttaaagttaagatggaaggggattaggaaggtcttactggagatgaagttgttactgttttaaggcagtttctagacttacaaaataaaacaaagttatgt

SEQ ID NO: 273476 - DNA, 430 bp, Homo Sapiens
tcgtcgttatctgtagaactgtcagtgagagactgacaaagacattgacacctgactgtaggctttattccaataatgttcagccaagtagggccccactagctgaaatcatgagaattaatgcatctctctggtgataggtctaacacaatttaggcttttttaaaacatgtcagttttatgtggtattactgaatttgcctcccagtgccctggtgcgaagattcttagctagaaggacaattggagtttacatttgaagatcaaattaccatttaactcttaggcaataatccattgtacttttgtcctgagttaaaattacagtgcttcagcagttataagctgtcctattttctctgcttttaaacacaagctttgtaacttaaaatatctgtttgtccttttgatcaaaatcatcacatatctc

SEQ ID NO: 273477 - DNA, 472 bp, Homo Sapiens
aaaaaactagcatggtgagagggggcagggttgaagacacagtaacatgtggctctcagaaggtggcatccccattctgcagtggcagtgtcacccctcccagaacacgccaggggcctggtgcacccaaagaggagcccgacattttctcagccagaatgaatcacaggcacattctgctgcggttctgagaggcatctggccagtgttatagacttttcatgtgtcctgttggttgtgatcctcacagcagcccttggagatgggctgaacatgagagacaaggaacaagagtacaaggagataagaagctcaaaaaacaacaaacaaaacccaaagctagcagaaggaaaggaacagtaatgattagagcagagataaacaaaaagagaattttaaacaacagagaaaatcagttaaaccaagagttggctgtttgagaagactaacaaaattgacagacctttaactt

SEQ ID NO: 273478 - DNA, 411 bp, Homo Sapiens
tatagatttaggggatacaagatttcttacatgcatgtattaaatggccattttaaaattagctagtttcatgctcagatgtcataagtggcagctatctttagccagactgttgcagttattgcccgatgccactcatggtgtcctacctcctatttggaaaccatctctatttttttcttactgagattcctactttggggccaggaacttgaagggatgcttggagtgagtagatttgagggtccagttatggagtgctactaaaacatcttcttctctcctggcctctggaagcatctttagctttgactttgggcaagtctctgtacttttctggccagcttttccaggatttataaaattagagcttcggcttgacctctgtgataaataaatattcactctgtg

SEQ ID NO: 273479 - DNA, 136 bp, Homo Sapiens
ctgacttgcccacatgcaggatgaggccattgtaatgccaggtcttaaaggagagggtgatttcatcactgctgctctggatcgggttttgaaacaggtcactgcacagctacccagagacttggaaagtggacac

SEQ ID NO: 273480 - DNA, 688 bp, Homo Sapiens
aagtttagggcatttatatatctgcaacccaataaacccctggtaccatgcagctcccccaaattcagtgcaaccaaagctgctgaaacaagtccagccccagaaggtgtagtggcactgtggtgttaccttatttttatatgacccttcaaaaaggacactgaaaacccagtgcctgtttgcagagatcatgtgtggaaattgaaaccctgtctttaaggaatgaccaaattcatgctacttaacctgaaaacttgggggcaaagtggttgtgattatctgaagggctgctatgtagatgaagtattaaacatgtcgtaggcaaggtttagaggagaatgtggtacttaaccttctatagatcccacaatgaaatgacctgccttgtgaggtagtgagctccctgtcaagagagattttcaagcaatgggtagaagaccacttggcaggagtgttgcaaaaagtgggctaaaccagatttttccaacctagtatggaggaagaggcagagtaggggaaggtcctgcccctatgagattctcctgattgcatgcaagatgacaggtaatccctgtgtggacagactagaaaagcagacagcccctaaaatagatggggagaacttttagccctgatatccacacaaactattttaggatagggtagcttggaaaactttaagcaaaat

SEQ ID NO: 273481 - DNA, 511 bp, Homo Sapiens
gagttctgtcctgcccttctgtgtctgcgtgacctcacccagcctaggagggaggtgcattcagggtagatttgcctctcattcaaagttctggggctttgggcggaaaacagccagctttggcgctgttggggagactcctccagaccaggaaccccagaaggagacagagcctgccacatcctcccacgccagccctgggccagggtgattggactgagaatttggccacaaccaaattgatgctggctggaaccagaggccagaaagcctggccttgtccccatgtgggagccctgtcctcagccctcttgtccccttgagctcagtgaattcccaccaggtgcccacagctcctggacttcaaattctatatattgagagagttggagagtatatcagagatatttttggaaaggagttggtctatgcaatgtcagtttggaatcttcttgaaagtttaatgtttttattaggagatttaaagaaaataaaggtctacaatatcttt

SEQ ID NO: 273482 - DNA, 382 bp, Homo Sapiens
  misc_feature (120)..(120): n is a, c, g, or t
  misc_feature (163)..(173): n is a, c, g, or t
atagccaaggggatttccctttaaatcgaggacgctaaatggattctccctggcttcgagaaactctttgttgtatgctttatcttttactttgattcatgactgaccagttctttacantcaaacatttttgtcccctttgaagtaagagaagagatacttnnnnnnnnnnntgtagtctagaaagagactaggaatagaacactgctgacttgttcttataccaagagctggaggcataaacagttttaataaaaaagaatactttgtatcttttgatgtaacttccctttagagattctgtttcccctgtcttaaattctcaggctatttctgattgctgtttaaataattggtagttactatttgagtcatgcttctt

SEQ ID NO: 273483 - DNA, 543 bp, Homo Sapiens
  misc_feature (523)..(523): n is a, c, g, or t
  misc_feature (530)..(530): n is a, c, g, or t
ttcagttcttggcaacggcaacaaaccacaacattatcaaggaatgtaatgcagactttttaagttgtgcgcaaatgactgtttcccttctggtcatggacatgtccaataaatagattgtagaaccactgtactgtataaacttcatttatacatgcagttcataaaattatttttttcttaactgaataatttacccctgttatgtatatatacaaataagataatttttgtctcaaatataatctaatctataacaacataaatccactatcttccccttttaatggtcaatgtacatacacaagaagtgtctatccttatgaatcgccagccaattctacttttgctatccatggttagggcccgcacgtacgactgggtagttcgacactcggagttccaatgccttttgtctatgcccctgcagccatcattagtgtaacctatgggattgcactttgtatccgacaagtattgcttcaggtagcacttatgatacatggacctattcacagactgngacgcgnaccgtcagacatg

SEQ ID NO: 273484 - DNA, 530 bp, Homo Sapiens
gaaagcgctttggtggagcacccagcggtggcggagtcagccgtggtgggcagcccagacccgattcgaggggaggttgtgaaggcctttattgtcctgaccccacagttcctgtcccatgacaaggatcagctgaccaaggaactgcagcagcatgtcaagtcagtgacagccccatacaagtacccaaggaaggtggagtttgtctcagagctgccaaaaaccatcactggcaagattgaacggaaggaacttcggaaaaaggagactggtcagatgtaatcggcagtgaactcagaacgcactgcacacctaaggcaaatccctggccactttagtctccccactatggtgaggacgagggtggggcattgagagtgttgatttgggaaagtatcaggagtgccacgattccaatgttttccttcttttaaattaaattcagctgctccgcttcctccaagtcctctgtatctttagaatttccgcaggtgagcactcaataacgcaagtaataaaatactgatatc

SEQ ID NO: 273485 - DNA, 796 bp, Homo Sapiens
agaatatccgttgaaagaaatacatgaatttttgttctaattatttgaaaatccttcctccaatgttttcatatttattgcatacatcacagagtaataaattatttgccaggacttgaactgcagaacaaaaatgacaaacaaaaattttatgcatactaactttagcacctgccatgtaagactttgcagtattttctccctaaacacacatcacagttactcagaattctagcagatttcagtttgatactctgcagctctgaggactggttcagatgtgtgcgtgtcactctatttggaagtattcgagcataaggattgggaacgggaaaagaagaatgaggatgaccaagtagaaagcatgcttttgcactgttgcgttgatcaatctggacctgaggccagcatcctggtgcctactaggcaggaggaaatcaagatgtataaaactaaggtaggccagagaaacaggaaccaatcatggtggaccataaaatgaggaagtcattggacatttagaaaaaggacaaacagagtgggcctgaaggggagattggcaaagagagtagtatactttagtgtgtaacacagcaaaacacagttacaaaatcttcttaaaatttggagacagattctgaagcatatctatcaagagaatgtttctatctcaaggtacttaaaagaatattgaaaatatttgttcttaaggtacctcaccattatcttattttagcaagcatttaaaaacagaactaccatttgactcagcaattccattactgtttatatatca

SEQ ID NO: 273486 - DNA, 505 bp, Homo Sapiens
ttgtctcctaaggagggggaggctctgtagaggaagcttcggcctctgggtgcccctgggttgggagcagtcggggagcgctgtagaccaggcgcacgccctgtcggcgctgcgggtgtggggcgcaggagtccttctggccggcccctccgcccccggggaggctggagctctccaaggccggggagtctcccgaagcgcgctgccccctctgttctccgcgtgctttcactagggccccatgctgcttagtggccgatttgcagggaatctgggcacaatcttaataacaccagggccaaaaataacaacgttcctgggaaccgagcagctggagcgcaccccatggacgctgggccatctccccggggactagtgcctgacagagctgacagagttctaggccacatgtgggctagaaggaaccgccatgtctaccacagcacagtccttaagcaggagccttttgaagcacttggactcaaaacaatggctgtttgttgtt

SEQ ID NO: 273487 - DNA, 265 bp, Homo Sapiens
tgtagaaaataagctatttgtaccatacctgcaagttttctcagttattgtcaagaaaaataaataaaggtaataagaccccaaaattgcggcccaaaccccatccaggatggcaactatcctagctccaaagacatcaaagacatattctctggggaccagtgaatatggagacttggtactgacaggtatcaagcacaacagaaaataggtttgaggcacaggactgaaaacaaaagtgaaggctgagcacagtggctcacaa

SEQ ID NO: 273488 - DNA, 366 bp, Homo Sapiens
tctttaattcataaactacaagagcctctttcctccaaccaacaaataccacaggatgtgtacaggcagaattgtctgggcctggtgtggtgcttggggaaagcatttaataaacacttgctaaaatgagctgaatcaccagggagcagcacctcaattccttatttcactcaggttgaacctgaacaaggtgtgactctaaggtctaacctaacctgactacatcttgtgaggaatgcgcagccagaatacactagtcttaagtgagaaggcctgattttccaactaagagatctctgattcagagagcaggatcctggctttcctccagggctgatgggaggatgaggcagacactgcatagcc

SEQ ID NO: 273489 - DNA, 970 bp, Homo Sapiens
  misc_feature (589)..(589): n is a, c, g, or t
ttaaagacccacaatataatcaatctttgtatatttaggattacctctttggcctgtgaattgtccagctttttgttttgttttcttgctactgttttctgactagctccttggtcattacttcttctatgagcatgggtgggacaggcagcaggggaatggaaattaatgttcctctttgatagcaattctgattagaaatttcatttgagataaaggtatgattgctgcctaaaatactgtttttaaattgtcatattattctgaaatttaactaactcaaagagaataaactgtgcaaacataaggtgatcatgttgaggcaagcccttgacttgagtgagttgcctgacttgtacatccaaatttaaaggaataagatacttttcaatcaaaggtattgaatcattgttaatccgaagaaaagcatgcatattcacagtcagtaaaccatttctgacagctgtgctttccagataactggggtttgtttttgaaagctctaaaacttttatttttcattgtttttgataaaaatctctataaaatggaccttacatttactgctcccctatccctttctaaatgnctcaaagtcaaatttaagaatatcaatactgatagtgggccatacaattgtgacaccaaggcctaatcagacacgccagtccctaagctaagtgtggcctatatctgtagtttcctggttccctccacacctacctcctgggcccaggctattaggttactcttcttgtactcttacaaggttagtgtatctatgtaccacagaccttctctgggtagttaaactgcaagggacttgaaacaaactaacaagtaaacaaacaaacaaaacacagaatgttccaagggacttgggaaccagccaccaagtttactagaaggcgagagccaggcctgagggtgaaatacagagaagtggtgaccctcttgagttacttcctct

SEQ ID NO: 273490 - DNA, 573 bp, Homo Sapiens
tggcctcttgctcaggtgcagtgctcctggaagggccgaagagtgggtcctgcctcgggtgggcgcgccctgctgtgctgagcccctcacaacctggcagcaagggttgccctggcccagcgctcaccctcagcccctgagggagaagtgcagaagcaagaaggcaggaggctgaggtcctggcacttggaggagagggggagtgaggggcggccagtcagaccccccgtatttctgctgacacccgagacttgggctgtggccccacttctgtggtgcgggagctgcacggcccagcccaagcctataggaaacagcaggggcaactccacctccccgctacactccctgcctcctcctgcacccctggccgccagatgcagcctctccctccctccctcacacaccaagagcgcggcctcagactccccaggagccgggcaactttcgaaactttagttcctggaacctgggagccctgggcctgtgcacgttctcaaggggctacggggggaggcgacaggccctggccagagtcacctccgccccagactccccacggctccgtcttaa

SEQ ID NO: 273491 - DNA, 324 bp, Homo Sapiens
acttagttaataatgtctctgatcctcacttttttttctctatagaagaaatgatttcatttggagaggtcatgcaatggccacacaaaggcagaatggtgtggctgtacttcatcaccataaagtaccatatagctaggacctcagagaataaaatgctaaattaaagagaggagacgcaatgttctgcgtataaatgacctcactctccggttcgtcctgcaaaaaattaaaatttaaacagccaagttctataataaaggtaaatgcaaaatgccaagagaacactaaggacagagtgttaaaatcttccagggtggtggg

SEQ ID NO: 273492 - DNA, 445 bp, Homo Sapiens
  misc_feature (143)..(261): n is a, c, g, or t
aatttcagagacagggactcattctgtcacagcagcacgatcataactcactgcagcctcaaactgctgggctcaagcaatcctcccacctaaacctcccaggcaactaggactacagatgtgtgccactacccctgactaannnnnnnnnnnnnnnnnnnnnnnnnnnnnnnnnnnnnnnnnnnnnnnnnnnnnnnnnnnnnnnnnnnnnnnnnnnnnnnnnnnnnnnnnnnnnnnnnnnnnnnnnnnnnnnnnnnnnnngaatgagccacccacacggccaacaatttttctttaaaaataaaaataatggcaaattggttttaactcaggtatttaagagcttttcataacattcaacaaaataataactattactatgttcattaaggtaaatgactgcaatcttattcaaaaccatatttatcaactaaggctactggaa

SEQ ID NO: 273493 - DNA, 466 bp, Homo Sapiens
gtacagatgtggtctatgttgccaaggctggtactgaactttggcctcaagtgatctgcccaccttggcatcccaaatcccaaagtgctaggattacaggggtaagccaccacgtccagccctctctttttaaaaatataggtatgatattgtgatataagtatttggtcttcctttttctttacacacagctcctaaaacccttgttggaatcaccagagtgctaagagtatcttgtatgctaatgagatgactggtggctggaggctcctataaagcttcaggatgggaactggtcaaccttcagtggccaattatttaatcaatcatgggcaagtaatgaagcctccataaaaacacaaaaaacagggctcaggagagcttccagatagctgaacacgtggaggttcctggagcatggcatgcatggagagagcatggaagccccttctcctttggccctaca

SEQ ID NO: 273494 - DNA, 1052 bp, Homo Sapiens
cacatccttggaaccccagatgaagggaaattgtgagtgaagggaagaagaaacttccaaagggtattaggaataccctttaaaagggaggtgcttgaatgagctcttcgcaggagcggaggactttgttagagttgctatcccccactgctgtctgtggtgcgactcacttccctcatcttcagagttcactcgcttttgttgcacgattcatattgtttccagtgtaccgttttcggtatcttaacatctcctgtatagcaggcctacccaaataaatattattttaacttaggagcatgtcattcaggataaaatattttacactctctgaagatagaaacgggagtgtaccactttcacccactgctttctgtgcctagaaaccatctgcttctgtctttgcgcctgtttatcagtaagatgagctgctgttgatattgaaagctctcccagttaccctgcgtctgacatggatacgaagagaaaagggcagagttacagcttttgatgttggcatgttagaaagcagaaaacagaatagctgagcagctagagaaatgttgcctttggattgtgaacagaggggccataggaaaagttttacaaacaaaagtgaaatttctctgagacttcatgactaaaatttttagtggggccagttagattataataaagctttcatttgacagtaattatattctagggctgtaattatattttagggctgattaaatatagaacaataaaaagctaatgaaacctagacttttccctcttaaaaaaccatttcaattaaaatttaaaatagatattaaatatatgtattaagtgcctttgtacatagaaatctttatttctattcatattcctgtgtaagaagtacatacctttaaaataaaacataatctgtctaattaaatcttataaaatatcaggtgctatcagcataaatggctgtaaaattgatattaatttttcaaagttttcaaactattttatatagatacttagtacttcattgttagcatatcatgtagcattactttttt

SEQ ID NO: 273495 - DNA, 767 bp, Homo Sapiens
gagaaactgctagaccaattttagtaaaactgtctcagagccataaccccagctaaaaatcccttattccaccttcacggcctaatggaagtccctccgctccttcaacaggcatccacggagcccacagcatgtggggcactgggacaaagaagggagactggcccagacactgctgggcctgagcccactgtcctatgacaaatgatcaggcctgagacccaacaacacccagggcgccacaggagcccacggagaggactgggtcatgccggtacaaacaaggacagtgaacgccacaaaccagagctcccagctgccccctgcactaaggatgacaagtttaattggaatgagcgcctcaaaaggcctgcagggttggtgatcatcatcataccagtggcttgccatgtgtggttatttcctaaaggacacctttcgtcctttctaatctcactttaattagatgcactcttccaagcaaattggcctttagctcagtaaatgattctacatttggccagagatccaagaatcacagtgcctgatacattctgtatcaccagtgggctcagccactactttgtactggatactttctgcagacagtcttaacactgattattctaagaatggaaggtacatgagtgattcatgtttcttctttaattgtatgtattttccagaatatctaaagtaaaaatgattaccacttacaattgcaaatgtaaccataactaaaaataaaaattgttttttaattccgt

SEQ ID NO: 273496 - DNA, 900 bp, Homo Sapiens
  misc_feature (70)..(211): n is a, c, g, or t
acattctgtgtacatcatagtcatccagcacaagtagcctacagcagtgaagcagccagcacacaggtannnnnnnnnnnnnnnnnnnnnnnnnnnnnnnnnnnnnnnnnnnnnnnnnnnnnnnnnnnnnnnnnnnnnnnnnnnnnnnnnnnnnnnnnnnnnnnnnnnnnnnnnnnnnnnnnnnnnnnnnnnnnnnnnnnnnnnnnnnnnntaacaatgctaccttcttgcctgtctggcaaaaaaggatgaattaaaaaattaattatataataatcaattctagggtagtgttcagcaaaaaaacacagactcattagaatcactgagacagagttgaaagggacctcagagtttttcactatataaaagaagaaatgaatagggaaagtgacttgaagttcattgagaaaaatgaatcacacccaaaatgtccaaaatagaaccttatccactgcttcttgtatttagaatcctatcttctaagttactttacagtggtaaaattctgccattttcaaagaagagcagcttcatctatctaatgttagcacaatgaggtacaaaggacattgcaaaactatgcaagggtggatttcagagcttgtccatcaggcaataccaggcccaatcaacagaccacatcataaaatgcagtagaaaatggatttgagtctttcaaaaagagagacacgcccctgaggccaaacataggcaaaaggaaatgtgatggccggaaagtttcatttctttttcttatagggtagcactggaaactgtagtagtagctttatcaggatttcactgtggcagcagaaaatgttaagtaaacatgattacttgtttatctgacataaatgctgattaactgaataaaaagcgtatttgtggccaaaatgt

SEQ ID NO: 273497 - DNA, 823 bp, Homo Sapiens
aacatgtctgtttatcaaacacttgagagcactttcaaagagccctggtttgggtatgaggtagagttttgtgaggcttcttttaaagcctctctgtctgagaaggaatatgctacttttcataccaccttgccagaaaggaaggcccagaacagaaagaacacaaaagaggtataaggggttaagggaacctggaaaaacctttgaaaagtaaattatcagtttagaaatgctctttaaatgtcaacaaagagtcagcaggcagtgtgtcagctctgcacctggccacatttcctatcctctgttgcaacttagtgaagctacgtggccaaactagagccaacggaacataagtgggagtgatatatgtaatttgggggcattttccacataaaataaaagctctttgccatggaatccctttgtctttccccgtcccatgtgtggtcacaggaatgactatgacccaccttccaatcatgcagatgaggataatgcccaaggggataaacttttggggaaaaaatgagtccactcaccaatccatatttaaagacttatatgtgtggaagaaataagcttttgtgtgttttttagtcactctccttcagtctctatactacagcagttgaaatagaccttacataatacacaccctttctaggtacctacaggtcttctgcaaaagcagccatacaatcttcagattgtgaccaagttgcttttaaaattctcatccaggttgcctcttttttctctctcttggttgtagcaattctcatcagtagtgctgccaaagttgaatcctctttcgagcacatgc

SEQ ID NO: 273498 - DNA, 773 bp, Homo Sapiens
aatcttgctccatttatctgcctatagacactggctgaacttgccccagaggccataatgcactgaggtagagaagtgggtctgtgtgctcccaaccacagttcagctgggtgctattctccctggatgaaggaaacagtaatagaaaacgttctctccagccttttgaactaaggggcctggtttctttggtcttccttctcttactgcaaacttgagattcagactgatgaaaaggacaagggatcccagtggaaacaaatacttaacgaaaaatattactagtgaaaccaactaactgcattctataaaagtgtgaaaatgacactaatataaacagaaaagaaccaaagacctttgcagtgaagtaagcttctagtcatgagaaagaacttacaaaagtacattaccaattgatgataatttctccactgattttcaaaaaaagattgaaaccactattaaaagacaatgaagttgaagtgggtggggaatgagaaatcaaggtcaaataagcctcaatttttaatgaaattttaagagtttaagcattttcttacttttgtgtaattttaagatggtgtaagacatagcagtaagaactcgttctccttcaaagatgtagatatcccatattctgaggtttagtgtaaagggagtctacaattaaaagcaaaacaaaacaaaaatagggttaacagcttcccctcaccttgtatttataattttatgactgagttttgtaaataaatacttacacgatcaaggaaaca

SEQ ID NO: 273499 - DNA, 719 bp, Homo Sapiens
  misc_feature (597)..(597): n is a, c, g, or t
ctaagtgaacttaaaccacgtcgtggactcagctttactgtcttgttgttaccttcctgtactttcttaggccagtgatcagcaaaggtttcctttaaagagccagagagtaaaggttcccagctctgcgggccacacagcctctcacagccgctcagctctgtgctgtgtgaaagcaccaccagccagtgtgtaaatgcatgggccaggttgtgccagtgaggcctcatttacagaagcagtcagtggcgagatttgatctgtgggctacagtttgccgacccatgcatgaggcagtaaaaggccaagagcctggtataaattcataacgagaaaccaaggctctgaatcagccccgaagtgtaagcagcagcataatgatctggagcagcatcttggcgttattaaattcaacccattccgatggctgcgtcagcatctattgctctgtttattgtttttccttaagcaagcagttccatttctagaaatttatctcaagcacataaatctagagggggcacatcggtgttatttatgacgggaaaactgggaacagacacagccctaggctggaagaggcacagagtgatgtanccaacatgggccagtggttaggagcagactcaggagccaggggacacggctccaattctagctctgtgaacacactggccgtgtgccaccctcagcaagttacttaatctctctctcttagg

SEQ ID NO: 273500 - DNA, 828 bp, Homo Sapiens
cagattatattaacttcaacttacattgtgataagaacagttctcgttaagtgatataataacacttcttgtttgagccagtttgaattgcttctaaaacaactgccactaaaagcatcttaagtgacagttatgtttagatatggaaacatagttaaatattactttaatttttctacctactttggtttaggacagatgcctctgacttcaacagaccatcagagatgtgtaacattaattttagaaaaccactcagacagagagtgctgagctcccttaggaaacaacacaagtctctgctttcccatcaccaatgctctgggcctgcgctcatggtgaagtcctctgttatcaggctggcttcataagtcagtcccagcatctttgaaggcatattgatgctgaaatggaaagggtttcactgcaatctcttccagtttcatagatgaagccctaggacagaagcaaactttcctatttatagcaggttcttgaataatattttgtccaatgtcattttggttataacgttgatgggaaaaaaatctgacttcctggctggggccactgtctgtttgcatgttctcctcatgttggcatgggttttctccaggtactcccacatcacaaaactgtgcatgttaggttagttggcatgtgtaaacagtcccagtctgagtgtgagcgtgtgtatgagtaagccctgcgatgggggtggcgtcctgtccagggctgtttcctgctttgtaccctaagcaggataggctctggccactcatgacccgatcctgcgctgaaataaacggataaatattttacttgctt

SEQ ID NO: 273501 - DNA, 836 bp, Homo Sapiens
  misc_feature (342)..(342): n is a, c, g, or t
caaaagatggcatctctgccaccaggctgggggcccagagggacaggaaggagcagccaggggctttgatggggaggtagggagctggtggaacagctttctcactcctgtcagcaaggagtcaggaggtaccatctcgtccccccccagtggcccaccgttcagagggggatgctatcttctcacaccaggacaggcccatttgtaggagcccattggtattccaagtgagaccaccaactttatagtccccatgtccctgtcccaactccacagcttctagagaatccagctgcaggggaagcctgtccccaactcccattctcctgtctggaggcaganacgggatcaaatgagcccccaggggccccagcaggccactgcctctgcaggagtcagcctgcttcacactgggagaagggaagagggggcaagagagagacaagaaaccaaagcttgctaaaattcctgagatggcatggggtgtggttatattctgtatcaaaattggaagtgccttccttccacattacctaagaaccagttaggactctgaagacaccacaagagtgagaaatggttaagttcagtgtccgtgacaaaaatctcctttgtacaagataaaattatccttggggaggaggactgactgactaggaggcagaagggaaacagttcccatgtacagacttggcatggggagcaaaagcgggatgagggctgactgttcccataagccaaggacccatggttcgtcttcccacccaagtgacaatcacactcacacttggtgtgttttatattttttaataaagtttgtaatccaatggacacac

SEQ ID NO: 273502 - DNA, 827 bp, Homo Sapiens
  misc_feature (140)..(140): n is a, c, g, or t
  misc_feature (217)..(226): n is a, c, g, or t
  misc_feature (244)..(259): n is a, c, g, or t
  misc_feature (489)..(497): n is a, c, g, or t
  misc_feature (800)..(800): n is a, c, g, or t
gagcttgatttacgtgctgaccaaaatgatattgtgatcaaaaaaacctttgagaatagtataaggagaccctgattctgctcaagccccatgccacgctgtgtgtgtcatacgtgacttgactgcacagcatgtgcacncaacttgttagtaacttgttaataatggtaatgaaggacttttatcttcttggttatgtattgttacaaggttaaannnnnnnnnntagttagagcgtttttcnnnnnnnnnnnnnnnngagagaagaaaaaataaacacccccaaaagaatacaggcacagatgcagataccaagtggtgaacaagtcccttacactatcaaactgaaacctcaattatttcaagtactctgtaaaggagcggagacccagcccctaattcaacattgaggctattagtgagcactcaagtcagtactagtgctgctggctgagaacagatattcaaagtgtagataataaagatgannnnnnnnnctccagaaaattcaagaacctaactcataacctttgaccttttccatggagatgaaccagaaaaacaaaagctcaaaactccctcccagggaagcagtttaactcatatatatgaagagtcagaattaagacaattcaagatggccaaaactgaatttagtatctattccaccttacctctgtgaatggtaccactgctcattcagttcccctctctccccatcatccatcactcccccacgaatcaccgcactctatgagcacactccttactgtctctcacacccaactcttccctcaccnatgcctactgccttaaatggggccctc

SEQ ID NO: 273503 - DNA, 207 bp, Homo Sapiens
agcaccatgagcttcaataccctgtttgcatcaacagcaacgtgatgtgacgcccatgtgggaatgtaatggccgcctcaggacacagactcaaagggtaaaagcgtgctgcccgctctgcacacggcagaagctggaaaatgccttgtttacatgcatgaatgtgtcacaagtatcaccatattccaattctccagtgcttacaga

SEQ ID NO: 273504 - DNA, 878 bp, Homo Sapiens
tgaagaatcacagaagttagcaaagtatactaatctatgtcatttatttataaagcagagtggtcatttgaacaacaagaagtttggtagataaaggggataagattgcaccctttgggggaccaccaacaatagcttacaaagtaaaaatgcagaatttaatttcagagatagtgttacttcctcattcatggtactacttgtggatattatggtgagccgtgagcaatggagaaagagccaaagaaatgagattttgatcccagccagactctgaggtatttcctggtacctggcctacaaatattggcaatagttgttcataagaagaattagctattaattatttcactaattcgtagcatgcaatcctgaggttctccatctgaaggggagaaaatggagaaattattactaaatgtactacctaaaagaggtagaagtataaccaagaagtcattcagtgatatgtttactttttaaaagtttccagacataacactgcacaactgcagctttcctccgcaaagtcatcaaagagctaaaatgtacaaatgggaatagggatataaagtggaactgaagataaatggagagccacagcagcccccgcaatacttccctggtgttggttcctcctgggaccataatctgggctgacatcttctctccttccagcatctctttcaaataacatgaagatctggtaaatggccagtcacacctctggctgctcattctggtaggtctgaggttagtttggctataatatatctttcttattttgtccctctattgtggttttgtatagattttcttgcctgtactacttcttaactaaaggatagttaccatggcaacacctgttgatgacagac

SEQ ID NO: 273505 - DNA, 322 bp, Homo Sapiens
  misc_feature (244)..(276): n is a, c, g, or t
atgagccactgtgcctggtcttagtgaatcttttctggtagtttatgaattgatgtaataccagatggtctgttataaccaaagttgaaacacccgataaatgtcatgagagagatagctttattgtttagggagcatatggacatgaaactaactcctgtgtgttgttaaaaaagctttgctaccttttctaaacaaattttacagaaaaaaatcttacaggccaggtgtgattgttcgtgcnnnnnnnnnnnnnnnnnnnnnnnnnnnnnnnnncaagcccaggagtttgagaccaggagatagcaagacctgtctctac

SEQ ID NO: 273506 - DNA, 693 bp, Homo Sapiens
  misc_feature (20)..(20): n is a, c, g, or t
  misc_feature (46)..(46): n is a, c, g, or t
ttccagagggaatgtcgttntaagcgatgccttgctgaacaccccntgcgctctccttgcaggtgtcgagtgatactcacttgatactctgagtgtggccaacatgcggggctcaggtggcttactgcttttccttccaaaggccgactgtggtgaccttgctgaagacagatcatccgtctcagggtctggagtcggggtcccacactgcttgccgtgagaggtcagggggcggtgctggcctctgagcagccccgtggcactgagggctggcccaggtgctctcacagggcgacctcctgacgcccgtgctcaccgtggccctcgctcctaatcccaccctcaggttctgaggcaggaagcagttcccacacttggctactgggaaggaaggttgtgtgggggggcagaggcttccttgtgtgaccgtggagctgatctttcccgcccctgcaggtgcagcagtaccgcgtcggccatgactgccaaggactgctccatcatgattgcactgtctccctgtctgcaggatgccaggtgaggcccccactgcaaggcatgcagcctgggtctaacggggttttatggacagttggtgaattgttaataggatagttggtttccccatatttagagactccatggcggagtgacataacttccttggcaatgtgacatcatggggcttactaa

SEQ ID NO: 273507 - DNA, 759 bp, Homo Sapiens
  misc_feature (264)..(264): n is a, c, g, or t
cgtccaccgcccaggcctgagagagccttctgggaacttgcccttatcattgcttacatccctcccacctcccccactccaacacctcccctccagccaccagcagttcccagctgaccatccagccctcatcccaaacttcaccccacccaacaaagctcagtacagaccatcaggatggtgtatgggctttatttgcctggtaaacacatttctgaccaatcattaccatttgctctttttgtgctaaacttcaaagtgacnggaaccaaatgtaggtattcagcttgcccaagcttgggctggtttttctcagtcgtcttcacccctgtgtttgaaagggtttctggggtagttctcccagccacagctgcacaggggctcactggataactgcagattcaccttcactacctcctgggtggatgagcttgggtgagttagtggatgtcttggaagctcagttttctcgtcgaaaacagcggcctcaaggagctgcagtgaagatgcaggcagtggaggagcggagggcacgcagcatacacagcctcctagtaggtgcccaaggaatgcagccgctagcgtccaaggactgcagtgactaatcttggcatttagcctccagacaactggggaaatagcttttggcaaagtcacctgtgctgtccctttacagcaagtgtttcacatatcttgtggtggttcctcaacatcccttgagaattatttaccacagattaggttaaaatttggagagtt

SEQ ID NO: 273508 - DNA, 492 bp, Homo Sapiens
  misc_feature (55)..(63): n is a, c, g, or t
tttggcaagcctggtttatatccatctacaaggtttgcgaacccatgttgccgannnnnnnnnctgctacagaacaactcccttggtacaataaaaaagacgagtatttacttttcattgaaagtggagaacctgaaaaggaacctggaaagaagcagctggaaaaggtgagaggaaaacctagagtgtgtgttatcctgcaagccaattgagaatggagcttgcttgatatttcactagataaagaatttaaggcgagtatctatctttgttctccttggcaactgagagtctgcccttggaaacatcaggcaccatggggaagcgggataatcgggtagcctatatgaatcctatagcaatggccagatggagaggcccaactcaatctgtgggcccaacaatccaagattatctaaatcgaccaagacccacctgggaagaagtaaagaaacaattagaaaataaaaaaacaggttcaaaagcattagc

SEQ ID NO: 273509 - DNA, 836 bp, Homo Sapiens
ctccggaagctgacccgtctatgcacggaagaaggttgaggaaacagcaagccctgctctagtcacactgggagctgactagtctgtgcatggctgaagcttgaagaatcatcatcagatgagcaaatgtggccagaagtcttagtcccagtaatcttctttgtattattcattatattgctataaccaccatgaaataaaatattttatttttcatccacttttatgtggcactcatttttaacatctacacaaaaagttcacatatttatcttttctggttcattaatcaagctggtgtctatttgattttcctttagctgtaaagagaatgttatgtagttatcaagcatttattatgatcagtctctgaagccctggaaccaaaaactcttctggattgaatttgtcatgcaccacaatggagccaagtacctgctgccacctgcccacaagctcacctggtttcagtactgctctctggatgtgctggcctgcacagctcttgttactctctttgtcatactatgatgcttgattatcaaaagtttgttaagatgagaaagaaggaaaagagagtaggtctgtttgagatctaaggcaggcaggcatgataccaaaaattgtgccatttaatgccaccactatgcatcaaggtatggactaaattctttattacattttacaagacctgtgccttcctgatttgtttgaattttttaatctttgttaaacataagtattgtaaaattttattttcagaaaacctataataattcaattttaatgcttatctgtgtatatttttcagctgaaaataaaatgagtttcactgg

SEQ ID NO: 273510 - DNA, 1193 bp, Homo Sapiens
  misc_feature (545)..(545): n is a, c, g, or t
atcattaccattatctccatggagctgagaagtattactatccactattcagacagataaatgagcgcactgagagctcagtcacttcaacaaatattaaatgcccggccgtcttactcaaagccactaaggcagccagggcccaatcccaggtttccatggccagcctgacacttaactcaaaagagagccctagcaatttgggactgcagagcccgtgggatcgcaagtctgtcctgggaggtgctgccaacagactgacactgcctatgcatgtgtgtgtgcacgccagaggagctagatgacaatgccagtcaaatggtagcagatgagttaaggtctaggagatgaagatgaaaaggagatggctactgcatcctccccagcctcccttctgctcttctaagcaaacgctcagtgggtctgctttctcaaaagatgttcatggaaccactagggtcttctcacagaagtggggacagctctgccatcaccatatggcataaagttaaatggctgatgaggaaattaaaacataaaaaaanccccccaccaagaaccccacccccctgcagaaacccatgtactacacgcactatgcaaagaggtactcattagctgtgatctgctggattatgtgtctatctacagagtcagaattttgaccttccttttggattccacctccagaagctttgactatacgaaggaagcagaacacaccccaccattacacaaatatgtaaaaatataaatccagataggaatatgaacatatatatttgcctccctcccaaccagatttccaagtggggacgcttgaaaatttgtctccaaacacactctttctgtatttgtcaaagctcttctccaaaatcttttcagataagaagcaagttagtggtagggtgagttccctttgcaggcgcctgttgactatttgcagaggttgcaaactggtagcccccagactccatctgaaacatgcacatggcgttagtttggctcacacaggggtagccagcattttttgaaacgttgaattagttgtggacattgtaaaacttaggtgtgttcacataaaccatactgttgttttgatatgctcaaccctcactttccttacggctatgagctggctgtctgtctcagatttatgaggatgtggcagattagagaagacttagacttga

SEQ ID NO: 273511 - DNA, 351 bp, Homo Sapiens
ggcaaattccacctggaagggtcagcaaggtaaggctcaaagcaatgaagcacagtgacacagaaaatataagggagcagtgcacagcagggtggaagaatagtctactgtaagtttatatgggtctgaactcctgaaaagaattaaaaagcaaggattctttgtgagttatatacataagtactcacaaataagcatacctgtgaacaattctgtacatcaaaacatagcttggaacatagctcagctactcagcaaacacttgccgagcacctaattgtgccagacactgctgcaagacattggtaataaaaaaatgaagagtcagctgggcacggtggctcacaccat

SEQ ID NO: 273512 - DNA, 377 bp, Homo Sapiens
  misc_feature (123)..(195): n is a, c, g, or t
gagttggggtcttgccatcttgcccagcccgatctcgaactcctggattcaagcgatcctcccacctcagcctcctgagtcgctgagattacaggcgtgaacagcacacctagcagaaggggnnnnnnnnnnnnnnnnnnnnnnnnnnnnnnnnnnnnnnnnnnnnnnnnnnnnnnnnnnnnnnnnnnnnnnnnnaggaggggctcagcaggtaggagtgtacatggaccagggatgtctgaggagggcacagcaggggaagcagtagcatgcggctgggttttgctgtcccaggatgaggtgtctgtctgtgcaggtgcctgcatgtctaaaatcctgtgccaggccagaccccctcccatctcactgaccacaag

SEQ ID NO: 273513 - DNA, 376 bp, Homo Sapiens
cacgagcccagataggagtgaaataacagagggctttaagtaggaacaatctgggagacatcagcaaaatggtagactaggaagctccaggcccttgttaccccatggagacaccgaattaacaaccatatacagaccagaatatcactgtgagaactctagagccgaattaagaagcttcagtgcccaggccaatgcctaaccaagaacataatctatcaaaagtgctaggaaagtttgtggcattttgcgcgccaacatccctctccctcccctgcaaagcatagttcaactaggagaaaacctcccataccttggctcttcccttgggccagaaacaaagagtggaccatgcatgcaatgtactgacttgtct

SEQ ID NO: 273514 - DNA, 657 bp, Homo Sapiens
gtaatatttgcagcatgtcttgccctcttaatgtctaagaagtcaaaaaaggacacgtatgcctagaaaacgtgaataattatcatctatcaaatttttaccatgtgccaagcatagtcatatttggctaacgaaaacaacaaaatcaaccgtgacaaggttttattagtaatgaaactgaggcttctggaggatctgtaactgttgcaaatttccagtggctagttcagggacagtgccggggcttgaacccctgtctctgtgtctcccagctcataaggtgtgctaccaagtcacccatgagtagcaattagggcgacttctaacatgtccagctttaaacctgtgacctcaaggcaaatgacttccacatctcattagcactccccagagccttccagccccctgtaggagagggaggttaatcagccacgcgctgaatctgcttataaggctgtttcatgtatgatttttatatcttggctcctaataatggccccgttgtaaatgattgtctcactatgatatacgggttccttaccttctaggaactgatttaaaaggaagccctagacttcttgtgcctgtagagtttattcatatcactctttgcttgctcagcagttgaaatgggatggaggaaagccccctaactcc

SEQ ID NO: 273515 - DNA, 513 bp, Homo Sapiens
tgcagctcacctcctgctgtgcggccgggtttctaacaggccacggaccagtaccagttgtggacccctgctctacagcaaattaacacaaatttagcagcttatcttacagtttctattggtcaggaatttgggtatggtttagctgggtctttcctcaggttctcactaggctgaaattaaggaatcagccggggctcctatctcttctgaggctctgggttctcctccaggctcaccggttgtgggaagagttcaattccttgttcttgtagatctgatgtccctgtttgcttgctggctgtcagccagggaccactttgagctccttagaggcccacccccgccaccatgttcttgccatgtggccaagttattatgttgtgtatgactaaggaagaaaaatgctggattaaaatataagacaaattcttactttatgtatgactaaggaagaaaaaatgttgaattaaaacatgatacaacacattattgcttggacagtgccttgca

SEQ ID NO: 273516 - DNA, 728 bp, Homo Sapiens
atatccttgtattagtttgctagggctgttataacaaaatatcatagactgggtgacttaaaacaacagtagtttatttctcacaaatctggaggctgggaagtccaaggtatcagcaggtttggcttcttctgaggcctctctcggcttgcagacggccaccttcttgctgtgtcctcacgtggcctttcctctgggtaggttaatccctggcatctctttgtgtatccaaatttcccttagaggacaccagtcagattggattaggggctaccctcataaactcatcttaacttaagcacctctataaagcccctatctccaaatagggccacattctgaagtactgtaggttaggacttcaccatatgaatttgaaagggcaggatacaattcagcccatagcaatcctccatttagcagaccaggttctgacattcctttaacttccatataatgcaggaggagacatgaccacaaacgtctggtgagagataaaagtcaggcagaaagtagcgccctctgccctgcaatcaggaaccaccctgtgttatgtgctttgctgcatgtcactgttgatctgtcaggctccaaagtctacctattgaggccaataatatctacctgaccctctcacattggcatcttttaaaaaatagttttatttctactgtttataaaatacatgctcattgcaaaatagaaataaaatgctagtgaataatacc

SEQ ID NO: 273517 - DNA, 965 bp, Homo Sapiens
  misc_feature (725)..(745): n is a, c, g, or t
tttttaattcggcacaggacttgaccttgatacttttctgttgttcattttaggggaaagtttgctttggatagctattctaacttcagaatcaacaaccttcttctgttgattttgtgatgttaaaaaatatggcaccttgctttgagatttcctattgttttcctctcctatttttatctgacattctttccttttctctattgtctgtttccctgctccatctgattccactccaagactctcacgtagagtcctgtgtttgaagaaaaccttggtgcaacacactacagactccacagggagtagaccactgcagtccttttagatcagcctcatctgccactgcactgagcaaaatccctcctcagtttcagctcctcttctcaatttggcccattcacattttccaattggtacctatctgctgtttggggaccaaacaggtcttgtcctcaggcctatcaattatcagaatagtatataacgctgtcatggcaaactgaacaatacagtcaaaaatttttaaagagacacaatgaggaaacaaatacagaattgacaattctgaaatcataaggtttcatgaaacctggaacaatttaaaggacagttttgaagaaatgaaaaaatatattccaaggttcttgaaaagtatgtgagaaataacataataagcatatagatttttttggggggggtcttaaaattcaaatcttagtagnnnnnnnnnnnnnnnnnnnnngaatccttcttgacgacaaaagagacaaaaggtctgaagagtcatggagaagggctgtgcaggcccaggggtcagataacagacaccaaaagtccaaactaatagcgttagttctgggtaatgaggaggaggggagagatactttcacaaaggagtcagaagatgagagacacactttcaaagtcaaaagattgtataggaattgggggagaaagctgag

SEQ ID NO: 273518 - DNA, 658 bp, Homo Sapiens
  misc_feature (285)..(285): n is a, c, g, or t
  misc_feature (605)..(605): n is a, c, g, or t
aagcttagagatacaaaatgtttaaatgtagcacaaaaattgtgactctactaataataacgtacagaagaataactccacagtagaagttaggcatccatggctgcaggttttctaagaaatgggacgtgtgggtgacctactgcactgcccactgccctctggagggaaccatggggtaattatgagtcattggccaagaagggccaggggtccacgcagcttccgccctgaggagttgcactgtgcagtacagccaggcggccacaggagccactgtggcangggaatgcatgtgtcagtgtgtcaggcgtggtcagtaaaaggagttgtagaaggtaaaccggagaaaaactcagaatttaatccctccggagtaatctttggcctctcctccttccgtgtgtgatgtttctttgtttttaattttttgaccttctgctttttgattcgggattttggagccagaatgccttggccccgccatgaggtctgacttgtgctggctactttacccttggtgcctccatttccttcactggaaaatgggtgattgtgcagagtacagtgagtcaaaccattgagagtggtgcctggcacacagnattatttaagtatttttgcacttaatttcatgtaacataaagcactaataagt

SEQ ID NO: 273519 - DNA, 596 bp, Homo Sapiens
ttaattttctgtagagatgaggtatcactatgttgccgagactggggaaaatctatttatgtttacaagttcaaattttttctatactcattcatttacacatttaataaggctatgtgtgccaaacccctggggaaacccaaaaaaaactgtcgtagtagttaaactcccagcctacagatactcatatatgtgcacatctgtgttgtgtatatgtgtgtaaaacacaggtgagaaaagttatattacaactattaatagattcatagcagactagagatagagcaccctgagggaatgcctgactgtagcatgggtgaaagcttcactgagataataaaagcagaaatttgctaggtggatggggtggaaacaggggcaagaggaagaataacatagcaggaagaaggtacaacatgtataaagtaatatagggcaggttcgggacaaagcatttcaccaggcaaatgatgagtgatgaggaatgaggaagtattccatacggttcatatccactattatgcataagtaagtgcctgctatgtgtaggctctatacaagaggctggggaaacaaagacgaagctacaatccatg

SEQ ID NO: 273520 - DNA, 896 bp, Homo Sapiens
tggaaaataactgtaaattttttaaaaatcaagaagtctcagcatgatctatcctgcacctaccccaccttcgccccaccacaaggctttgtggtgaggtaaaacagaccaagaaaacttacggagaagacagaagtgggtgccagtgaagggcagctgtgaaggtaatttggaatgaccaccatacatcacatatgcactaaatccaaaaatactaaaagagtaactgggcagattagagctctggaatacagggaagagatttcaaaatgcacacaacttaaaggatctggtgtgatttaatgggataagtacaatttaaaaggagaggatggttacagggagatcttccaaactcatagcttctggagaaggaaaaaaagaggcaaagatagaaatgaagaagtgctccttggcaattagatggtgaatgggaaaaggaaacagtggggagaaatgtaaggttttacaagacagaaaagaactttaaaatcagaagattctcagctccacccttaccaccaagacaaataaataaccacactgaggtacctggattttgctagacccgacagaaaagtgtaccattaagctaggaataatattaaatgccccaatatcataaaaataaagaggaaaataaagtccatggaaaatgattgcagaaaattaggaaatgaaacttcacatatagacactaaggagaccctaccattagcaaaaaataatcgagaagcagaagaaaactgttcagttggcattctaaacagattaagtatacccaaatatacgttgagaatatgagaaactacctcaactcagatagtcaaaaaataaaaacagaggccaggaaacaaaaaacagggataaataaaataaagtttataggactcagg

SEQ ID NO: 273521 - DNA, 823 bp, Homo Sapiens
tgctaattagtctcctccccgtgtttctgttctccagccccagactgcactcgcagtcatgcactgcgtcttaggtgttgcttctgccaacagctgtcttagacgaggtggctctgccaacacctgtcttagacgaggtggctctgccggcacctgtcttagacgaggctgctgtgtcaaaattccacagaccgactggcttcacagcagacatttctttctcccagctctgcaggctgggagtccagcctccaggtgccacagacccagttcctgttgagggaccacccccaagcttacggacaagcaagcctcttgctcatgtgaccgtccccgtgtgtgctccctggagaggaaggctccggtgtctcttcccatgagggcactcatctcatcgtgagggtcccccaggatcttctctaaacctgctcccctcccaaaggccccacctccaacactgtcttgctgggggtgaggactttaacatgtgaactggaggtgagggacaagtatccagtccacagcaaccccaactctgggacccagtttctctactggcacttgctgagtaaccacccacccagacgcctggtggctcacagctgcagggacacggtgcttctgtggccgcaggcgtgaggacccgggtcctggcctccctggggcctgttcctcggctgtgcccggttactcagggctgctctggtcctgcctccccaaggagagcccttgtgaggtcacaggtgcagaaggaagcccgtccgatgcagacggatgttccagccaggcagagaggagaaaatcagtacctaaagcatctgac

SEQ ID NO: 273522 - DNA, 717 bp, Homo Sapiens
  misc_feature (53)..(63): n is a, c, g, or t
gtgactgagtccacactgtcgctcaggctggagggcagtgggattccatcttnnnnnnnnnnngttacttcaaactttcaaaagataatgtaaaagctgctcaactcattttacattatagaaaaatataggaatctatcaatctattttgtggcttgcaaactctgattccaaaatcaacacagataattcaggaaaacaaaaccaaaaactttagacctccacttccggccaaaactgagcaacttttaggaaaccaatgtccctgccaagaggaggagaaaagctggtaagttacttcatctgttctaagacattcaagagctgccttggcacaagtaacttgaagtgccaaaaatccggagaaaggacttcatggaggtaacctgacacttagcattctggtcttctcccttgggttatttgccagctcttgagcagtataggggtagatgctgaaaagcctggcagaaacataaacagaaaggcaagcagcacgtggcagctaaggagagctttcaacagttttacagagctgagaagacaaaagttgtagcaagagcctatcaaggcaaacaagacttgaggatggaaaagctaggacagaagagaaacagagaactaagacactatgcacgtgtttttccttcaaagtgctcaatgattcttagtcaaagaaggataataggctcaagtgttgagcagaaggaagcagga

SEQ ID NO: 273523 - DNA, 767 bp, Homo Sapiens
aatgatgtctggacccccagtcccagagagcctgatttaatccatctggaatagacccaggtggttttaacatgccgccaagcctccagaagccccggctgtcatcaaagctgctaagtcactgtggatccatcacctaacccagaacaaatggagacaactaagaagtcaatgcgttttgagctccaagtctccctgaattttgcatgcgggatatgatcagaggggctccacactgttgtctgtgcctgcttattttgggagtcagagtatattctaggaaagcgatcgtgggctgactactcctcagtcattgcttattaattttcggttatttaccatcacaacctctcttaacattgcagagaagtttgttttcccttaaaaggaaaggaacccatgaaaccagagcatgggactcagagatcatttccaactatccaacttaccaaggaggagcctcaagcccagagtgaattaagtcaaaaccgctaatgggaagatgccccgagtgagaggtaaccaagaaaacacaaccatggtccccattctcctgtaaggggtttcagagcagccttcctgtgagtcatggtccttatcagcaggagaagcaacctagaaaagcacttctccaaagccgctcccaggccagacaagttctcacctgtcagtgatgaaatcaaaaaaataagtatgggaacatgagggacttggaggtttgctttcatttatttacttaaaagactgctcttttttatgagattaca

SEQ ID NO: 273524 - DNA, 771 bp, Homo Sapiens
cttcccctgaaggcagtaggaagtttaggaaattgttctataaaggtgggacttgggagcagtttcagactttccatattcttcagcagtccctccccaaggcctccaaataaacctgcattctaagaaaagacagaggcttgctctgcagcttcaaagtaaatgcccaaactcaaaacacccccaccccatgagactgctgccccctcactctcaaggtcctgagtgatctgacccctcctgagcagccttacactgtacttccccacccctctggagtcccagcagaagtgaggggtgactgcccctcgcacagccaacaccttggcattctctgcgttaccctctcccacttcagtcctttgtgtggccaagtcctgctcctcctgcagactcaccccagtcctcaatcgccaggagggaatgggagcagggtaggctgaggagcagtcatcgggccattgaaaaacacaaaccacacaacctgccccaagcacagttaatagcctcatttttccccctgtatagtgtacatacagcaaccaagctctgccctgttttctgggacttccctggttttagaatgaataatctccaagcagtgttcttgcaactgttgcaaggaccatgttaaattgctttaaatgttgagacctgcacctggcacctagtaagcgattgttagttgttttaaaggaagaggaaataacagtctcttctaacgctgattgtgttggacaaactgtcctaataaatgctgtcttcacctgg

SEQ ID NO: 273525 - DNA, 779 bp, Homo Sapiens
  misc_feature (462)..(476): n is a, c, g, or t
atgagccaccacagccgaccacaaagctaggttttgggctcagtggctctgtctcttccaaggctcgattacaagaaaagcatacaaaactgaaaggaaaaagaccaaactattggatataaaaaaatatagaaaacagcacagacatctgaccccaagataaactttatttatatataaagaccaagttttatggcttcatgttatatagttggtatttgttcaggtatttattttgaatacagtccatcaagaaaacaaaacttaaaggaaaaagtttgtactgactgctaaaatttataacccactatggaagaacgaaagggtcagcatcaaattttcagtttctccaatgtcgacaagtcatcttatgtctaaatcaggggtcgacaaagtacagccccaaatcaaatctggcctgcagcctgttttcgtaagtaaaacaaacatttgtaaataaannnnnnnnnnnnnnnggaacacagccatgcccattcatttgggtatggctgctttcctactacaatggcagacctgagtggttaagacaaagacagtatgatccacaaaacaaaaaaacattgattttctggtcctttacagaaaaactttgcagacccccggtctaaatgattaccatatatatcacaaatggtggaaaaataattagcctgttcatttcggccctatttaagctttattatgaactctacctgatttaagtactcttactttataattactgtcacttaatttccacaaatatgttcacatttcag

SEQ ID NO: 273526 - DNA, 788 bp, Homo Sapiens
aactggaattatcttattaatctgtttacttcttccttgactgtgtcccccaacctaaacaatgaactccaggaggacagaccttatcgggctccgtccccggcactggaagcatatgtgatgttcagtaaatatttgctgaatgaagaagttaacaatggaatgaatgaatgagtttgcacatcactgcacaataaatcttctgcccccaggaggaatgtgttgtaatctctagcagcaaagaggcccttagatatcgtgcaatataatgaataactgatcccaaagcatctaaatgatttcaagcgtgctactgctctcaagaatttatgacccagacaacagtggctggggtcagggctcgcccctggccaggttaccagggcttgcctctgcaatggagtagagccctttattgttcttttgtctaggaatggagtttcagatcagaagaaatccaaatactcaaaaacctcttgccccaagcataaaggactaattccttggcgtagagcaggaactcaccaaagactataaggtctgacaatgcacgacaggggaaagagagagaaagatgggaatgtccacagtctcattacttcgacaaacacccgcaaggccccacccggtcaaaggtaaggcctggagcagccgtgcccacacaatgagatgactggactggttcatctgtttattggcaagctcaggacagggtatgagcagtggtggagaccggcaaatgtcaaatgaatgaacataaaaacaaggaagatttgaatctctgcagg

SEQ ID NO: 273527 - DNA, 405 bp, Homo Sapiens
  misc_feature (364)..(364): n is a, c, g, or t
gctccagaaggttctattacctttaaaaaagagtagttttgcccctcccagcaactctggtatgggtgccctaagaccagtctgaactcacactgtctgaaaggccacccaggatccaaatcgggccatcttcattgccatgagtgttcggacaggctctgcgtgccaggcaacagtgggcagacaaagggctccctggctactgggaagatacagaaccatcctgtgaaaatcatttcagcactggagaccttctttgctattacttctttcattaacaatgacctctaatttaaattgggccctgctggtttgttgatgaattgagcaactgagaacgtggcgggcactaaactgacagttncttccttcatggagcctgcttcatgtggaggaaacaggaaa

SEQ ID NO: 273528 - DNA, 786 bp, Homo Sapiens
cactctttttgggcaccgagggatgtaatatttaaagaaaatgtgattcagccccatattctccttttaatggcaaattataggttgcatagcacattctgtggttatccaactaaaattaaaatactgcagtttttttactcaaactacccccttgatctcagactttacttctattttacatgaaacaagatgccaacaggaaagatgttaaggaaaagttcctgggagtagcatccatgagtggtgagtgcaggtttgaagacttcagccttaggcccacagtcattagagggtctgtctgaatcctgggttctgtttgctatcctcagtggttaagtgtaaatctaaattgtagaaggttctgagatacaggccaacgtggtcagtcagttgtccagagaaggtaaagaactgtctttgggaggtgtcaaccttgttccctcgagggggtctggtcaaggtggctcagtggggcagttgtccctgggggaaatgatcccctggtcacctctcagtgtccctacagagatgcttaccttggaaacataaccagaaacagcgatgcagcctcatggtttggcaattggtgaatccccagccgacttcgtaaacttttcctagatttagaagcgttttctctgcatgtccatctattcaaaggaatttcctcagacttcactgtcataccttgtattttaaaaatgatcttagctgagtgcagtggcatgcacctgtagtcccagctactcctggcaggaggatcgcttcatcctcactatgatc

SEQ ID NO: 273529 - DNA, 133 bp, Homo Sapiens
aaatgaactgaatctgttggaattgataaggatggtgtggagtggcttgttacatgagtttgagtgacacaaacatgtatgaggaaaaactttcaccatttcagctatatacatattctaggaaattaaaggc

SEQ ID NO: 273530 - DNA, 710 bp, Homo Sapiens
  misc_feature (61)..(61): n is a, c, g, or t
  misc_feature (64)..(64): n is a, c, g, or t
  misc_feature (611)..(611): n is a, c, g, or t
ctttggcctttgcctctttcctcctatctgggaagcttttcccttgtccttcaggtatcanccntatgttatctcctccaccagaaagcccatgatattgacataaaagtgggtagatgtcccttctctgtgttccagtagtgccctgctctatatctgtcatggtatatatgactctatatagacattgcctgcctgtctgttttttagattatagcttatgactgttgagaagtggaccatgccatcttcatcttgtaattccactgctggttcgagtaccttagcatgtggctgttgattacatgaatgaagcctgaaaaagctctgatatttaaacacaattagaattaatgccatgtgtaaattattaaatagtaattttgtattgtaaatgtaaatacatatttctcgttcttattaactctgataaagttctcaagtctttagtttttaaactcacacttagttaactgaagtgttttaggtaaagaacaaaattctttatttttctttccagctgttgctgtattggacacttgctcccatctactttcttctctggaatccacgggtaagccacatctaatgaagagaatatttaaccatanaagtcttaaggaaaaattgtatgatgatttaaaagattataaaactttatcactgggctatttacacattttaattgtttctcataaaatatataacat

SEQ ID NO: 273531 - DNA, 827 bp, Homo Sapiens
  misc_feature (127)..(127): n is a, c, g, or t
  misc_feature (280)..(280): n is a, c, g, or t
  misc_feature (355)..(369): n is a, c, g, or t
ctacagaaagtaggaataggaggaggggaggagatgaagctggttgattctacttctgcacaattttctgggtcattcccaccatcccttctcaccacgaccaccaccaagacacatgagacagcanaggcatttgttctgggcaggacagcttttctgaagaaatatagtaggtatctaggcagactacagcttcaagagcgaggctaggtacatcagggtagggctctctcgactttgccttttggggaagggagctgcccttatgtgaagcctgcangttagaataaacccaagcttaaaacagcaaagaccactcatgccacacatccccaaactgatcaacccagtcctnnnnnnnnnnnnnnncccccaaacacactgctggagctgagaaggagctgaccaggttagtttcgacaactcagtccttcattcagaaagatgaacaaccaaggatcatgatgggaaaaccaccagcacataagaggaaaggtcaggaagaacaaacagaatagtccctgaaggaagcagataaattagggaactggaagaaaattttctaaaaatctcatagtgtcctgcaagagttttgggaagatagtacatctgtaaactgttaataagaagtatgttctaggcttaaagtataataataataaaaaaagaagtatgttctaggaaatgaagcaatgaaaacaaagagtctgtagaaattagacacatgactgtcacaagattcggtacctgaagtagatgataaaatttcggagatcttatggagtttaaagcaaactatagagaggcaaaaaatataatagaaatgc

SEQ ID NO: 273532 - DNA, 823 bp, Homo Sapiens
  misc_feature (502)..(502): n is a, c, g, or t
tggagttctgagaatggccaggctggagaaatcaatctgagagtcatctgcacacagatgggatgtgaagtcataggactattccatccaggcaggcctgcagagggaaaggagaagggggtaggattgagcccctggggtgctctagagcctaaagcaggcatagtgaaggcataggaattcctatcagagctcatatggaatcacagcatctcaaaacaaactagaagttaaactcacacctatgtaattgcctgaattggattaatataattccataaagagctgtgtctgaagaaatcctctgataattcagaaatttttaaaatcaataggcatggtacagacatgcagaaaatcataattagggttttaatgttgcaagactacagaagatttgcttcattattaaccaaaaaagggttacaccaatgatgagcacatttggttgaattgagaaatataaatgaatctatgtttggggcattttacacttctgccnaaagaatttatcggcacaatctttcagccaacactgaacttaataacatttgatttacatccaaaagccaaaatacattcccaaaagccagccaaatacaaagcttcagacttcactaaaggtccacagtgaatgctgaaacgtccaagctcaggaccggctataaactcggcgagtactacattaaccatgtgcaaaccaaacaacagcctcctaaggagacaactattaaatatttccagaaggggttacggatagtagagtcaacatttagaataagatcagatagacatccgatttcctttaaaagacagggtctca

SEQ ID NO: 273533 - DNA, 373 bp, Homo Sapiens
  misc_feature (99)..(176): n is a, c, g, or t
gctagtccagggaccacacttagaaccacggctctacaagaaaggagggttatttgtcactgtgcttgcctatgtacaaccaccaagaaagaatactgnnnnnnnnnnnnnnnnnnnnnnnnnnnnnnnnnnnnnnnnnnnnnnnnnnnnnnnnnnnnnnnnnnnnnnnnnnnnnngtctgagccactgtgcctggccagactttgtaatgtaagaaagtgttgcctagatcctccatggactccagcctgtctagattattcctgctcttcagtgattagagtggtttctaggcttcttgatggcacaaggatcacaaaaaaattatttttatgctaacagtgaaaagattacagcaagaatggtttggagt

SEQ ID NO: 273534 - DNA, 679 bp, Homo Sapiens
tgaaactcatccaattcctattcttgcctttaagccaaaaagactgctcgaaaacaagcctccttgggataaaagatgttgctaggatgaggaagctgtagtgagtgagtggagttaatgtgattagatttggaagcaatacttccagccatggggaagcatcggtgttctgtgttattaaagtgactccagtgcaaaggcacatatatcgtattggagtaatttgccctgactaggttagaagccaggagatggttcttcacaggtattcctgagtggcccaaggtctaagtcagctctcgtttagacaaatcctatctctgctgatcatctacctctcaccaaatgcagccatcaccatgcacagcacatgcgctcctcttgatgatcttcacagagtgcagagtcttcaggaagttctttcctcagtggaacctttgggatttctaggagaggggcaggggaatatctggaatcagaggtgaacactttacagcagcctctaaactacttctaattacgttcacctgactaaactgccaggtgataaacgttttatataaaagtaattcactatggaaagttctggatgttttccccaatgggtacctcaaaacagggtacaagatggaaacctgctcaagaaacagcaaaatgtaaactggataatggtgatgat

SEQ ID NO: 273535 - DNA, 661 bp, Homo Sapiens
actctggtgggaatatattttccctcagtatttgaattgttaattccctcaattccttcaggtcattgctgaaatgtcatcttctcaatgaggcgtatcctgccaactttatttaaaattgtaatctgtctgcaacctgactctctgctcctgattttcccttacccagttctttttctttttccatagcatttctcagcttcttgacatgtaactcaatttacatatgtctatcacttattgtctgtctccctatgcacgctacccctgctaaaatttaacctgcacaagagaaaagatcttaatattgtaaactaatatatccccagaagggaaaacatagtcactcaaatacttagacagtaaatgaataataaatagattatatatgaaaaggacatacttatttagatgcaaaaaatacacttatccctgtggaagctttagccactccagtcagggttataaggacagagctccgatctctccctgggacagggcttccgggggagggtggccaccatctctgcagattggtcgactcagctgttccacccagccagctctggagagtccaaacagtctgggtgagaaatgatccaccccaacacagcacacctgctccaccaacaagcagccagactgcctctttaagcaggtc

SEQ ID NO: 273536 - DNA, 452 bp, Homo Sapiens
  misc_feature (213)..(241): n is a, c, g, or t
  misc_feature (261)..(311): n is a, c, g, or t
  misc_feature (345)..(345): n is a, c, g, or t
  misc_feature (360)..(360): n is a, c, g, or t
gcactaccttagttggttattttgattatctcacagtcttccatattaattttttactgatttttgactgacttgtttttcaatataggaatataagctatcaagacaaagaccccattttctagttcgtttgagtagctcaaaggaccaggaaatttcttgagtttgacaaggaacagcatcatgctgtctaacctgttaaagcatactgtnnnnnnnnnnnnnnnnnnnnnnnnnnnnncagggtcttgctctgtcttnnnnnnnnnnnnnnnnnnnnnnnnnnnnnnnnnnnnnnnnnnnnnnnnnnntgggcccaggtgatcctcccacctcagcctcctngagtagctgggattncaggtgcgttggcagcacgtctgggctaatttttggatttttaagtagagacaaggtattgctatgttgcccagctcaagtaaacttttttt

SEQ ID NO: 273537 - DNA, 993 bp, Homo Sapiens
  misc_feature (80)..(89): n is a, c, g, or t
ctgaggtaccatagtggagattggtaagggctggtctgatattcccaaaagatgtcaattttcaaagttgatagctactnnnnnnnnnntctgtctaaataccagcaacaaacattgttattgaattcgtaaaccacaaaactgcagtgtatggtgggatgagaacatataaaactgcagcccctacaaagtggagatgaggatgaccactctgctctgtagcgtacttctgtaatctgtaggcaagagcacactctgtgggctgggccccctaggagttagttcccccggggtccatgtgattgatgtttgctgtaattactcactgcagctcttcgaggggtcagctttaagaacactaaattcaggctttgtagggcctgggaataaaaggaatgctgtaggggtgggagttagcccaactagggttttttcagatctggacttctgaagagtttgttttccttcctgactcagaggaatgaaaggttggaggatgttacaaaaaggccacatcgtccgtgtgggaactgtcatttgaacataattgcaggaatatctaggattcttgatagaaattgcaggaagccagagactatagatagtatgtaagttaaaaggagaagaaggccaagattgcctggggtccactcttgtaaagttgtagaagactggaaatctccctagctcctctctttcccttcgccctccagagcccccaagccccacccccaaatacttgtttcctttggggtatctccatcctgactcttgcagctggggtactctctaggagtatgttttaatgtttgtagcctcagctcagaagaagggctcaacccaaacctactccctgcctttctgcctggggctgccttctctccagagcctccttccattgcacccaggaatcattgctgtgaaagaacatcatagcttggaccccatgtaagccctaaccttggtccacttgtgggagttctctgatagctc

SEQ ID NO: 273538 - DNA, 828 bp, Homo Sapiens
caaactcctgatgagtttaagcattaacagacatcagagttcaaatcctgtgaatatactatgtatgacagaagctttatccaggtctcagagctcaataggcatcaaaagatacatctttgatgaagtcacacaaatgtaacatgcatgctgagactattactcctggaccacaactgtaggtgaggattcataggaagagtagaactcagtctctagtttcctcataaccctctgatattatatacttcagcataatcagaagtccaaatgtgttaaaactcattacatgatacatatcaaaggttgtaggatgtttggaaatggccaattactttcagcttataaaatgttttgttgaagtatttaagatttattgaaaaggctactatttataacttccaaccagaactttgcaatgtgctgattttatacatgattatacgcctaacatggtgttgttcgggaaagaatcaaaggatggaagggctcactcacttcattaggtgaggattatttctctccaagctcctgaagaaaaaagactctgccttttaaaattaaatatagtctgaattagagagcacttggaaagggcagaggatgatgaactatgatgtcactcatcatccttattgcactgcaggtgcccttcttctgacagaagagcaccgtgcccggccggccgagcataagaagtttaatcaaagtaaccagaatcccatgtttgttactaggatttacattaactgctggaatcacattttgctactatttaagaatgcatcatagatttaatgttttaactaataaaatttgatgtatttt

SEQ ID NO: 273539 - DNA, 884 bp, Homo Sapiens
gcgggagagcaattacatcataccaatttaggcctttttccaggggctggcctgggagtcactttgccactctggtttttaagcccgggattaactggggactgctgtatgttgaaagggagtcctgagatgaagctgtgtgcgctctctgttgttcaatagtccattaggcagggactttagagtcgaagtggtcatatgaatctctggagagaaaactcattaatgggacagtaagttccaattagtggcatggcccaaaagcagcaaaggtgcaaaaaaactcagtcctcagctcctctcccagaggggctccattacccagctgcctgctctgtgctgcacaaacacggtcacaaacaacacaaatatttgctcagaaaatccatctttgtcatccacgttgtcaactggaaggcaaaaaacccttccaaccattgagagaaaataaaaaaggccactggctttcacaaggcaatttcctctgtcggcaaggaaagaaaaagccatttaggtgtggcccagaaccggggaactctttctgtctgggcgtgtgaagctgtgggattccagttctgggataaagtgcatcatcgaaagggtccattcttcagcgactgcccctctttgttctgctcgggcaccccgaggaagccccatgggaagtctctgtgactccacccactgagcggctacagcagagacgtggcatggagagtgtttgccttggccaaggatgaagatatttctccctagggtggtggatcgtgggctttaacttcagaaggacctgatttctagctttccctgtagcactgatgaatcagttaactgttccgagtcttcacgtggccatcttcgagaataagagacacatgatgacc

SEQ ID NO: 273540 - DNA, 868 bp, Homo Sapiens
  misc_feature (475)..(475): n is a, c, g, or t
taagaaggcagtacccaaagacaactaattcttaggtgcaatcgcagaatttgcatttataaaattgtagtattcacatttctttctaaagtatgactgttcatttagatcaaatgactgttctaacataattaagccaatttttcccctaaatgttctcctgaacattaaacacatacataatagcagttaaatattggctcctttagcttggaagaactttacaggcaattagattgtgccagttttcaaataggagatcagttccgttagtagttctatttttttcattcaactcgtggaacaagggtcaacaaattgggtctgcgggccaaatccaccctgccacctgttttcggcatggcctgcaaagtaagaatggtttttacgttttcagcggttggaaaaagatcaaaagttgatgctttgtgatatatgaaaagtatacaaaattcatatttcagtcctccataanataaagttgtattggtatatagcccacactcatttgtttgcatactgtctatagctacttttaaggctaccaaggcagaagttgagttgcaatagatagctgtggccaagaaagcgtaaaatatttattgtctgaccccttacagaaaaggtttgctgaatcctgccttaaaaggttaaacactactgttaataatatcgtaagctcaatgaggaacactatttgttattctgattttaatacaaatacaggttttcatatacacaataacgaagaacaaattaaactaaagttaagaatacttcatcatggcagtacccattctctttggcactcaactcatttagccttcaaaaaactactttgaaaaccaatccaggcatcgcaaaatga

SEQ ID NO: 273541 - DNA, 859 bp, Homo Sapiens
  misc_feature (466)..(466): n is a, c, g, or t
atgaagcattacttgtgtggctgctgtgcagccttcaacaatgtcgcaatcacatttcccattcagaaggtcctctttcgacaacagctgtatggcatcaaaacccgggatgcaatacttcagttgagaagggatggatttcgaaatttgtatcgtggaatccttcccccattgatgcagaagacaactacgcttgcacttatgtttggtctgtatgaggatttatcctgccttctccacaagcatgtcagtgctccagagtttgcaaccagtggcgtggcggcagtgcttgcagggacaacagaagcaattttcactccactggaaagagttcagacattgcttcaagaccacaagcatcatgacaaatttaccaacacttaccaggctttcaaggcactgaaatgtcatggaattggagagtattatcgaggcttggtgcccattcttttccggaatggactcnagcaatgtcttgtttttcggccttcgaggtcccattaaggagcatctgcctaccgcaacgactcacagtgctcatctggtcaatgattttatctgtggaggtctattgggtgccatgttgggattcttgttttttccaattaatgttgtaaaaactcgcatacagtctcagattggtggggaatttcagtctttccccaaggttttccaaaaaatctggctggaacgggacagaaaactgataaatcttttcagaggtgcccatctgaattaccatcggtccctcatctcttggggcataatcaatgcaacttatgagttcttgttaaaggttatatgaaaaaaccatcagttaagtgccatttatcaactgaatagaccttctaagaagcac

SEQ ID NO: 273542 - DNA, 527 bp, Homo Sapiens
ataatctctgcttttataataaaaataaagctcagctcctctgaggttgacactgaaaaagagtaactgcaggggccagaagcagagagaccaacaaaccctggcccctgccctggagattcatctttctcccgagactctccctctgatgattttggctccatcgaagcctccttgggtcatttcttccttcatatctgaggtacaggcaatgggatgacaaaaggcatttttcaacatctctccacaactaagtcaaagctgaaaagtttaaaggacttttctgaacatgagggcaatgtttcccaaccttttgaggtcatagaaactgctctggacaccagtttaaatatacagaatcttgggggacatggattttgaaggtctgcagtgggagcctgggaaaaggtattttaaagtaataccggttacccttaaatttctgcaagttctagtatcactgtgctggcaagtaacaaagagaaataaacacagtagcataaagcctggcatgtagcctggctcac

SEQ ID NO: 273543 - DNA, 507 bp, Homo Sapiens
ccggggtggggtggtgaggggaggagggataaatcgaggaacagatgttgccgtgagcccacccacatcacttagtctttgagtgcccaagggcgatttagagggactgagaagtgcaaggatcaaaggctcacattgagcaggatatacacagggaaaaacatttcttggctggacatggccccagcaggtcatccttaagctgacattcaacaaatctgaacagtgaacaatgaacagtggaggtctcaacactccgtgaacctgagggccactcatcaaaacctcagggcatgtctgtagaatagcagctaccatttaacaagctctgactctgtgccaggcgatgggctaagtgcttaaccactgttgggccagttactccttcaacagccactgttcccaaggcagtccatcatgactgtgctctagaaggcaccattcatactgtcctttacaacaattcttgatgactgtgtccaacctgcatggctggcctggggggca

SEQ ID NO: 273544 - DNA, 953 bp, Homo Sapiens
  misc_feature (465)..(465): n is a, c, g, or t
gcgatagtggattatgccacagtccccttccaggtttacagaatcttagctagtgactccagcaaacacagcaaggttcattttattcttaagacagatccctgttacagtttgctttgtgagccaaggaagacaaatactgattaaccatcccaaagaactaatgagagtggagttggagcgattatccaactgctccaaaaatgtggggattttcttccaaaagaaaaagatttttaaatgttgacacatttccacaatgcatatcaaatgtgcatttatattaatttgtgtctgtgtttatctgcatttctaatattcaggcactcaaatagtatctgctactggccaggctttgttttaggtcctactgataagagcagtaaacaaaagataaagtctcttcccaggggagcacacatgtaagatggcacatattggagtggaggcccaaagaaagtatgnagtgctaaccccatgtatgttggagaaaaaaggcattccaagaaggagtattaaaggagcaaatacaaaggctgaagcaggagtatgctgggaacacaaaccattgtggctggaataaaggacggaagaacccagattctctgaggccttcacccacactcccctttccctgcaagcacccacaacaatggctttgatggtacctgatggtcaattgagaagccaaaatgtatatctgtgctattaatggcaacattttcatggagagactgcaagagtctatatgtgtttcatccttatttgaaaaggaatccttgactttgttaggagctctatatatctcctctcatagaaatgccatatattatcaggagactgttaatatctcatgtggaggacccatttgtgcaagcatatctttaaaattaaatattttcaactattgaacatattcatatttttaaataaaggctacagtaaaccgatta

SEQ ID NO: 273545 - DNA, 572 bp, Homo Sapiens
gcattagctgtgtggttcttgttgccatagaattatagaacctgattatactcttaggttcttggagtcagagaactgtagaatcatagaaccctaggaccttagaaccttagacatagaggtttataaatatatataaatataacgtgcaccagaatattagctaggagggtgaagaagggagatctccccattccttcagattgaggcgaaatgtcctctaatgcctgagttccagggctgtcacattcagttgctcaggttgtacctaatatacctctaaagaaggccattcacatagacttcgatgtgaatggagttccttagacgcagcatgacatgcaccatcgcgtgagaaagcccacatttctcccagagaagtcggctaagtcccagggggcttacacttagtaccataatctctgcctccagcaaaacatgctggctttgtcctgagccacactgacctgaatgtgatgaaactgaaacttggattccatataaaaataaaatcactcctgcatgttgtgcacatgtaccctaaaatttaaagtataataataataaagtta

SEQ ID NO: 273546 - DNA, 789 bp, Homo Sapiens
  misc_feature (636)..(636): n is a, c, g, or t
cttacaaataatactccaatgaatcagtccgtaccaagataccccaatgctgtacgattcccatcaaacagtggtcaaggactaatgcaccagcagcccatccaccccagtggctcacttaaccaaatgaacacacaaactatgcatccttcacagcctcagggaacttatgcctctccacctcccatgtcacccatgaaagcaatgagtaatccagcaggcactcctcctccacaagtcaggccgggaagtgctgggataccaatggaagttggcagttatccaaatatgccccatcctcagccatctcaccagccccctggtgccatgggaatcggacagaggaatatgggccccagaaacatgcagcagtctcgtccatttataggcatgtcctcggcaccaagggaattgactgggcacatgaggccaaatggttgtcctggtgttggccttggagacccacaagcaatccaggaacgactgatacctggccaacaacatcctgggtcaacagccatcttttcagcagttgccaacctgtcctccactgcagcctcacccgggcttgcaccaccagtcttcacctccacaccctcatcaccagccttgggcacagctccacccatcaccccnagaacaccccgcagaaagtgcctgtgcatcagcattccccgtcggagccctttctagagaaaccagtgccggatatgactcaggttagtggaccgaatgctcagctagtgaagagtgatgattacctgccatcaatagaacagcagccacaac

SEQ ID NO: 273547 - DNA, 730 bp, Homo Sapiens
  misc_feature (335)..(335): n is a, c, g, or t
aggacatgccaaagcccccacttccccaggagcaggccacagacccccttgtggacagcctgggcagtggcattgtctactcagcccttacctgccacctgtgcggccacctgaaacagtgtcatggccaggaggatggtggccagacccctgtcattggccagtccttgctgtggctgctgctgtggagacaggtcctcgccccctacaacccccctgagggccccagacccctctccaggtggggttccactggaggccagtctgtgtccggcctccctggcaccctcgggcaatctcaagagaagaggtaaatcctcagtcatcctttccantcctgcccctggcaaattgctcagagctcaagccagacccccaaaatcgtgaactttgtctccgtgggacccacatacatgagggtctcttaggtgcatgtcctcttgttgctgagtctgcagatgaggactagggcttatccatgcctgggaaatgccacctcctggaaggcagccaggctggcagatttccaaaagacttgaagaaccatggtatgaaggtgattggccccactgacgttggcctaacactgggctgcagagactggaccccgcccagcattgggctgggctcgccacatcccatgagagtagagggcactgggtcgccgtgccccacggcaggcccctgcaggaaaactgaggcccttgggcacctcgacttgtgaacgagt

SEQ ID NO: 273548 - DNA, 839 bp, Homo Sapiens
  misc_feature (347)..(359): n is a, c, g, or t
aggatttaaaaagatgattgctgattaccaaaaatttgtggcaaaacacttacttttaaggaataggagaatgatatacatttagatattcatttacaaataactttaacagctaactttaggctccgtttttagctctatcataaagaacagtgttgttcagccttggtctttgtgagaagaggttagtctgataggtagtttcaagcaaatttagtattatgttgtaaggtaagatgttgagactaagccacatgagaaaaacagcaaaaatgaaatagtcatctctcttcagaaaagctctggaaggacagttatttcctcttcaattctgatgaaagctattnnnnnnnnnnnnnggttgtttctgccaagaaaagatttcctaccatggtggctggaagcagtaattagactcctccctcaggatgctgccctcttactccagctgccctctcttactcagcagcgaagtccaagtcccaaattaactgacaggaggagcccagtggtctcttctggggtttgtcaacaatgaaccaaccttagatccccattgtaaggatctcactcattagaaaatgtttgaactggtttctaacagctgataatgatttatagagtatgttctgatgactttaaaatatggctggatctaatgttgtatttttcaatacagatgaagtttaagccagttggtccattttaaaaagacccagatttgaggagttggatgtgcaaattaattgaattatacaatgtgtgcaatattattttgaattgaaagttggatgttataaaactgaaaataaagaaaaaatacaatctttttgtagcgg

SEQ ID NO: 273549 - DNA, 735 bp, Homo Sapiens
  misc_feature (228)..(228): n is a, c, g, or t
  misc_feature (298)..(298): n is a, c, g, or t
tgcgaaaattctgaaaaggagcaaaagaaaaaaaggataatgtcaggaacatgaaataagaggtggaaacaaagggatggcaggggatagtactagaaaacgagcaagccagaactaagaggctatgcaagagaaagggcaggcagaaaaggtcactggactacaggtaaagcagacaggcttcccaaccaagtagagctcctgagatcagtgcttcaaaagtgttcntcctcttaacagaccaatgaaaaattttacaacaagccgagatgtttcaaacagagcccaacgccttcantcataccctctattccttttcaccgagtctcaggttttacctgagaaatgaggaaaagaagcaaagacagcaattgctgaggaagtgaggaaaataatgtttgcacacacattcgggagcagaagctgtttgccacgtcacaggtctgacttctgtctgtttcagatagctatagaataacatctttggactcaacagggcacaggcaagcaagcagaattgaggatgtaaatgtgccaggtagcatttggtgcctcactttaaacaccaacacaaacatctcaaatacgcattgtagaattttcctggcactgtgcaaagcatggtcgattgttactccagaattattagaaataggattatatgattattccagaatattttattttcccaaagaaggttaaggatagaattttgtagagtttttgttttttaat

SEQ ID NO: 273550 - DNA, 671 bp, Homo Sapiens
  misc_feature (652)..(652): n is a, c, g, or t
aggaacagagcagccttgtttggagactagacatttcccattgaagtcaggctaccaagaggcatatttattttccagcaggaaggcagctggggatgggccggttacatccatttgatgttgctagagcatcccagctactcaccacaacccctcctccaatattcacttcataagaacctgtgggaatccctgcaacatttaccaccttctccaaccctggtgacccattcttagacaagcttggctaaataattcccttcctgccatcctcacaaccagtgaggtcaccttgtttgagctgtgttcatttttggagttaatgtcattttgaatcacatttatgaggaaagaagggtgggggtagatgataccattggttggacttcagttgccatatttaaactttcatttccaaacctttcttttgattttacgtttttgtctatgcttattacgtagccttcacagggatccaattgctgggctgaaatttttgagctttgactgaaagaatttggcttttgggtggggcctttacctgtggttgggaaactcagccgtggcattgcagatgggccagtgtttaaggtcagatgtctgtaggtgactgtgctgccatttcatagaatcaaagagagggacatggctncaagggttgtctggcccaa

SEQ ID NO: 273551 - DNA, 489 bp, Homo Sapiens
ctggtacatgtacttagtgattcattcacatacacaatgattaccgctcccggaggcctactgagaccagccagcacatgtttgcttttttgcaatcacgtagcggcaccaaacttcttaccctgttgtttcaggcgttcccacagcctggccctagccttgccttcttcattttccactcttcccttgcaggtgcggttggctatagacatcttgcattctccaagccttttatctgtctttagtcagatagttccatctacctaaaaggccctttgcccttctctctcccatatccacctgctctcaacctgcctgtccctgaagaatgacatggcccagatgccaaagcctccatgaaaccccctggctgcctcagccgccctagactgtatctgtacctctcttgtagctcttctgtctcagttgataggaattgtgcaatgccctgtctccctagagaactccctgaaacgcttgagaggaaaa

SEQ ID NO: 273552 - DNA, 608 bp, Homo Sapiens
acttctccaagaaagaaaaaaaacttctgatcttgcatcaagtcacagaatgcctttcagacaatatcataatgccactgaatattttaaatatatatagttaaaaattattttttccaattttccagagccgaaaaggaaacatctagaaaagcttgaattgccaaactttactaaaatacattagcagttaaaaagcagagccctgaactcactgaagggcagagggaggtattaaagagcaccctattctccccagagaactcggttgtgtggctgtatgttaagtgtgtggggaagcattggcaggaggaggaggttgggatgtctgaggtggatggaagttggagtataattgctctctgacagtaaaacaatagagctgtaaaaagctctgcttcagttcaactcagctttctctccctctttccctcccacctacatgacaaacagaacacaatcaggcactttttgtccctgacagtgactattaccgggaaaaggaccacggtaaaagcatgtcttatgcaagaccaatctcctaaggaatattttataaataactaacaaagcactgttagagtgggatatttgtgaggtgctaaaat

SEQ ID NO: 273553 - DNA, 604 bp, Homo Sapiens
  misc_feature (222)..(222): n is a, c, g, or t
  misc_feature (233)..(233): n is a, c, g, or t
  misc_feature (336)..(336): n is a, c, g, or t
  misc_feature (534)..(535): n is a, c, g, or t
  misc_feature (539)..(540): n is a, c, g, or t
  misc_feature (542)..(542): n is a, c, g, or t
gcgggcagaaacaagaggtgcacattacagggataccagggatttgagtctgcagtctctctgattttccatgagtgcttatcttcttgggggaggtgggggcggtgtgtgaacatccacacagcctcctgctcctcctcatctactggggcgctcagtcacccaggtttggaatgcttctgaggtgatacttaatgttacagttcatggtcaccgtgctcncatgtacgtgnaggtccatgtgtattgtgtattgtccactgtctctcttcccagttatttttttcagtcaggtgctagggaattctccttttcttactatgtcatggctgtccntccccactccatggggctttcagaaagacaggtagaacataagagtctagagagaccttgggtgtcacccaggccattgaggctccatctgggcttgaaagagccctcacctgcagtaaaggtgcctctgaggccaaggaggaattatggcataagaagggaacaccaaggagatgggggcccggacataccctctcnnaccnncntcagatttcattctttataaaatttcacataagggaagagtctccaaagtgtaaggagggcc

SEQ ID NO: 273554 - DNA, 859 bp, Homo Sapiens
  misc_feature (600)..(600): n is a, c, g, or t
  misc_feature (644)..(644): n is a, c, g, or t
  misc_feature (656)..(656): n is a, c, g, or t
  misc_feature (661)..(661): n is a, c, g, or t
  misc_feature (686)..(686): n is a, c, g, or t
agtcatgctagtttagatgaattaaaacctggtaatttagtttactggatcttgtgttgtaaattcagattcctaaataacaatgacaaactgtctagagtagggattgacaaattttttctgtaaattttgtaggctttgcaggccttatggtctctcaggttgcagctgctgaactcttgtaacatgaaagcaactataggcaatacataaccgaatgagcatggttgtgtgccggtaaaacattgtggatactgatgtttgaattttgtgtagttttcatatattacaaaatatattcctttgatattttttaaccattacaaaatgtaaaaatgatgcttaactcatagaccttatcagaataaatggtgggccagattcggactgtgggctatagtttgcagacttctggtctagaatctagaacaaaagataggtccttctaaagcctcaaagtaagacctttgccttactaacgtgagttctttttagttcactgtgtttaaaagtattccaggtccaaacccagatatacaaggattatttgtttgcatgcttgcattcttgctccttttggtttgagttggggttactatngtgctaggtggactgaactctgggctactgtctctgctcagccntgagtactggcnacagngcaacactgactgctgcgtttggtntaccataaactgttaaacatatgccggtaatgatgatgtgacggatacagatgactgcgttactgccaatgggtccataatctgggagtgcgactcacgcttaatagggtatagcaggccgctgcgcgtgggggctttggatctgaaagctccacacggctctttgaaccctg

SEQ ID NO: 273555 - DNA, 817 bp, Homo Sapiens
ccccctaaccttcacaaggcaattgataagatttataatcggctagaactcagtctttatcgtgagtaaatgttgttttcctctttcataagcactaatgtgagaattaggattagatcagaataatagcttctagggcttgcttccaaagaaaactgggcatgtaacaggcaaatcagatacccttgatttatcatgaacaagaagttaatctctcctccattctccagaaatagactctattagcaccgttctgtggatggcaaatgctggagcatggctccttgcaggggtgaccaaggtgttcaaacacaggccttagctgatctgtgagacatccatgtgtatgaagaacctggtcactgaaaagcaaacgacctctgttatttttttcctccctaataaatatccttaagggactaggacaggcagtattctcatggtgatagttttatagctgatatttttgtcatatcatttatttttaaaagcatatactttttatgcaaaaataatttggggtataattgtgatttttgttaaaagagaaaacattaatacatccaagtcatttaaaagtaattaaaatagatactgtccaagaaaaagtagaaaaactttacataaactgcattagaaaacaggggctctacagacaaatatggaagattcaaagcagcagcatgctatttattatcttattaaatgccaatcaacttaaaaatatacccagcaatctcttttatgggtatatacccaaaggaaatacatcaactcctaaaggtatctgtacttccgatgctcatcgcagcattct

SEQ ID NO: 273556 - DNA, 510 bp, Homo Sapiens
  misc_feature (378)..(439): n is a, c, g, or t
  misc_feature (454)..(454): n is a, c, g, or t
acggagcagccgctgcggcttctggcagctccctcgacagcttctccaggggttcactcaagatcagttggaacccctggcgccacgggctgtcatcagtggacagtctgcccctagatgagttgcccagcacggtacagctactgcctgccccgaccccagcccctgattctaccgccgctcggcagggggacggccagggagaggtccaaccgcgcgccaagcctggggaatcccgcagcgcctccagtgataccatcgagctttgaagagcggtcctgacgcagggccaggaccctgcccgatgcccacatggcatggcctactgggacagttgagcctttaaaaaatgggcatcctggccaggcgccggttcannnnnnnnnnnnnnnnnnnnnnnnnnnnnnnnnnnnnnnnnnnnnnnnnnnnnnnnnnnnnnatcagcctcctggtntcgaacatagcgaaaccctcgtctctactaaaaatacaaaaaaattagccaggtgg

SEQ ID NO: 273557 - DNA, 941 bp, Homo Sapiens
atcagtctaataaaatgacattggaagacttctggtgacttatgcaaagccactgggtttaacaaaagaggcagagtggaagggcacgaggacccaagaggatatgccactggtttcctcatctgtaaaatgaaaggtttagctttgttgcttgacatgatttacttttcccattgttccacctgaaaatatagtacttaaaaagtgttacaagaaaaaaagatgcataatctcacttcaaattttacaaaatccttccacatgcaattgaaatagctacagaattttatcaactgcagagtcagagatggaaataaagatcaacttcaaggctcttatttttaagattaaaaaactcaaaatttaagggacttgttcttggcaaaaactttggcagtcaggattcagacctactcctcctgcgtaagtgagtctataaccctccgtataccacagtgcccaccctaaatgagtctgtaacccgtccctataccacactgccccatccaggcgaagtcccttctcaatctgggtgccctctttcagttccccttcacatcctccaatggggtcatgtccttgatgtcaggagtcaggatgacatcatagagctggactagctagaaaattattctacggttaagaatcagtcaaggagaagaaaaaaaatttactcactgcaggaaagcatcatattatacatgttagctctctaacaaaaaccacagtacatttagattgaaggaaggaacaaattaccagtttgaaataacagacaacttggtgttacaatacgagctaccattccctgggatacacaagctgaactgctcacagcagcttcttctaaccttttcaaaggatggaagatcatctgacaggcattacattatttttcagttttgaagttgttatgaatattaaatgaagcagccttttga

SEQ ID NO: 273558 - DNA, 986 bp, Homo Sapiens
  misc_feature (634)..(634): n is a, c, g, or t
tgcgttttgtccaattctttgttcatgacgccaagaacctggacaccgtcaatgggtaacacttgtagagtggtgcagggaaggagccagggatattaagtgcttgtcagtgcagcctccgtcccttttccgaggccccgctcccttcctggctccttacccgcaggcgtgcagcccctggaaacactcctacgtgtttgctattctgcgtgggttgatagctaagaggtgagggggaacacaaggccttcagattagggagaccccctccgcagctttgagagacgatcgagaactgtgtggggacacttagggtggcgtgctttgtagggaaatcgccggagctgggattggaaatcagattcgtctgatgataaagctactccttctctgcctgtcccgcctcagcaagatttcagaccctcctttaggaaggcgccgccagtcctgaagtttgggccagttctcgctttgggacttggagaactgtggttccagtaactgggtggcgggatctcccccaggcggggcttaagcgggaagggcgagcagttccagagcgggccgcgcggggcgcggggacaggcaccgccgctgcagacgcggcagctggtttgcctcgcgcttttggctncagcggtcggcaggcaggcctacgggtggggcgagctccttgcccaaggcagagggtagctggccccgtgagcccaagtcccatgacgctttgtaatcacggacctccacagtgcaggaccccagcacgagatagcgtttcacctcctccaaacgtctctctccaaggagagtcgggaggaaaataccccaaatgcttaccggggctttgctttctctttttttcccccctacatccctgtattctcccaattatttggacactggtcatatattaggttaatttcatttttctaaataataatgcttatttcctgaatagataataaatacgtgcttactgcatactagct

SEQ ID NO: 273559 - DNA, 1124 bp, Homo Sapiens
aagaaatcaaagatgacctcactctccaaaatttcaacatttatcatgcctgtggaaatgctttatcaccgtaaattcaccatattttacagatgactacctcatcttcctccaaaatgaaacctgcctcgtacaacaggtatttactgaccaccccttttgtgttaggcgttgggctttggatgcttaaacatagaaaggccgataacatagagacgttgtccttgcctagtttacagtggaatgagcagcactgccacgttatgatacagtgtgatgatacatgtgtgttctatctggttaagatacaaagtgctaggccctagacagagggtctcctgaatcccctggctctgtgaacactggcatcattcttcttctcactccagcacaaaggcttagttatcagcaattttgttctgtcctccccaactcaccctttgatattcaattagtctgtaactttcctgacgttcttcagattaccccttttgcttacttctatcacagacctgaacccagggccttaatacctcctacttgggctaaggtccttgctttctaagctgatttcttcacccctgagctgacttccttcaaagttatccaggaccctttagtaagattaatgttccctaaaacatttccttcttcctcctgaactggcaccgcctgcacattcactcatccaatggttaagggtgccaagagtggctcagaagctccccatggaagaactccaaaactctagctttcttctgcctggcgacaccctgcctttctgatctatatttccctcatctaaaagtcacctttctactagtgctttttcctcacaatctcacaacaccttgcgggttcttatctcctcctttgctcttgctccccatccataccaggggaccccctgccctcatcacaagtctgattaaagtccttcctctttcaggaggcctccccaactactcaagcctgtaaggggcgaggactgagcagcagaaaacatcctactcagtcagcagcaagccacactcatgtaagaatgactcgcaaaatccttagtcccacaggatcttttgctgaatctcctcttaaatgcctttcaggtctaaatgcctgtcctc

SEQ ID NO: 273560 - DNA, 555 bp, Homo Sapiens
ctcctgttttcagcgggtggccctcagcactttccagaaagcaattcaggaaacagtggagaaattccaggaagaaatgaactcctacatgctcatctcggctccagccatcctgggcaccagtaacatgcctgctgctgtgccagccacccagccggggacgctgcagccacccatggtgctcctagatttcccacccctcgcctgctttctcaacaatattctggttgccttcaatgatctgcgcctctgctgccctgtggccctggcgcaggatgtgactggggccttggaagatgcccttgccaaggtaactaaaataatcctggccttccatcgcgctgaagaggctgccttcagcagcggggagcaagagctctttgtccagttctgcactgtcttcctggaagaccttgttccgtatttaaaacgctgtctccaagtcctttttccaccagatcagatagcacagacttaagataagagaatgaaaattaagtaaaatgccttactaatgtgtaattcacataataaataattcatacatttgagtaa

SEQ ID NO: 273561 - DNA, 877 bp, Homo Sapiens
gagatggagtcttgctctttcgcccaggttggagacatcgcacccggctagtctcacccttctactcactcctccaataaagaagaaggaggttatctggctcatgaaaagcagacatttatttggccatgttttactagaaggtagaattactatgtcttgaaagtaagggccaaacttaaaacttccccctttactgcctaggcacaggcatagcaggcactcaaccaaccgaacactcttgtcacccttatttccatcaggccccctgttgtggcaaggcccccctccgaccccgttcatgaggggaggccaccattcttctctgttggtaggatgggcaaatttaccagagccctgcatcagagcttactgggtgcttgccctgccaagaataaagtgggtattttggtctctatctggctatctgttctttgtgtgtgtcctttataagtcagaattttgaagtgctggaagggtggtcttagatcccaaactgccagtgctgtagttgaatgttccatcaccacggatgaacagagttggctatatttattttctctgaagtgagacaccagaaatcatttccaaactctcagtcatgaaccacctgggcctctaactctttgtcctgaggctttcatctcttttgattcctgccaaccgccctttttagttctatccaaacttcaccctcagaaaatgagcataactgcaatcaccacactcatagaattgattagaaagttggctgctgaatatagtcccagatgtttaatataattttgaatctttggccaaatcatttccacatttgcttggttgtgaaaggttttcccgcaagtgagaatttaagggttgaagactccaatttatg

SEQ ID NO: 273562 - DNA, 813 bp, Homo Sapiens
gcaaggggcttccctttccctgtctacagagcggcaatcataatagagcctctgtctcagagtcgccaggaccactgggatatcctgagtaatacctggcccctcccagcctcccttcctttccctgaagaaacaggtccttgttgccctgtgtgagtggactctcagcaagtggaaacctcttcctcagcgtgacgtggaagtccttcctgtacagcatcttgcaaggaatatccctctagagtgacagcttgttatctctgcaaatgcttcaggcctcaggatccccacatttcctctgggtgccccgctgagtggctcaggcaaggagcatgctgtacgctacgtgacaccagggcctggtcttctccagctgccctggctgaagctctgaagtggaggcaagtatttgatcctcccccgcaagcagcacagccctcatccagggcggacagagaggatcggagacagcgatgggcgctgggggctaggtgagagctgtgcctgcaagagagcttcttgggcatctcaaaggagacactccacaaaaatatcgcttcaatgcactcctttttggaggcatatcaaaagcagccctcttttatttccatgccttgcataatagcagatttccagtcccaaagtgtagaggagccttgctctcggcgcagaggccctttgtaaaactacagaaggctttgtcttccctcccaaccgggtctgtttcatgcataggtcagagcattgatttgctactagccaggaaaaattaaccaggtgaacactctcctcattaaacagcgacagagttta

SEQ ID NO: 273563 - DNA, 466 bp, Homo Sapiens
tctcatctactgcttccaagcagattataccaccctcctggctccaactgccaaccctgccaacacaggttaggataaatagtagcacctttccccaagtgtgttcaccaaatgtgttctcacccaggtactttcaaacacctcatgaggctggccagagatgacaccactgccccggatgcaagggggcagccctgctttggaccccgttctgaatctcaggcttcatctattaggcacactgagcagaaacactcctccctgccacttccgagttgcagcaaaaagggtctaactatgatttaaaacaaataattttaaacttcaaattttcattactgtcatacttatgaggaccaaataatgtaatgactaagacatcaaattacatgtaatatgaataaaaccagtaagaaaatgatagttacttataattggatcaacatacaaaaagaacgtcatttgg

SEQ ID NO: 273564 - DNA, 704 bp, Homo Sapiens
  misc_feature (430)..(515): n is a, c, g, or t
  misc_feature (592)..(641): n is a, c, g, or t
ttctactactactttggtccagccagactaatctccataatggggctctgcccttgagacactctgttctagactctgaggcctttctaagtcacctgcagtctagctcatgttcagagtgctggacatgaagacatccatgcctggcatgagcatgtactgagaactgaacctgaatcaggcaggcctaagtcctaatccagtcttattagctgggtgaacttcagcaaactgctctagttttgagcttcagctccctcatgggtaaaatgggattgcacctgccacccagggtcataaggctgaaatagcataaagcaattaacgtggggttggatatttgaaaagtaggggaaatggggaagcgggggcaggttcaagagcagctggttgaatgctagacaactttggctaggtgcactggctcagnnnnnnnnnnnnnnnnnnnnnnnnnnnnnnnnnnnnnnnnnnnnnnnnnnnnnnnnnnnnnnnnnnnnnnnnnnnnnnnnnnnnnntctacaaaagtattaaagaactagccaagcatggtagcacacacttgtgctactcaggaggatcacttgagcctacnnnnnnnnnnnnnnnnnnnnnnnnnnnnnnnnnnnnnnnnnnnnnnnnnnatgacagagtgagacgctgtctctaaaaaaatataaagaatgctagataattttaatcaaatt

SEQ ID NO: 273565 - DNA, 701 bp, Homo Sapiens
atttttacatcaccgacaaattctcagcagctgtacagacacttggctgcggctacacctgctaggaagttcatatggggaccttttgcataacagcatttaccctttagctgctataaatcctcaagctgcctttccatcttcccagctgtcatccgtgcaccccagtacaaaactgtaggctcagctctgcccagcagtccaaagcggcatggccaacagagcttcactccttacccaggagtgctggcttatagagttagaagtcagtatctcttctaatctgaggctatgatcagtcccagctgtaggggcccagaggggaggtgaacatgcctgatttttgtgggacaactctagcccacaaactgactggctggtgagtcttgactcccttccaacacagatgcccaggcacctccagatcattcacttcgcacgtgggccttgtgaagggatttgtgaatatccaggaagaacttagaggaccccatctgagttcggatggtcaggaaacaatctgggcaaaaaagaggcaggcatttcaaaggaaggggcaaggaagactggcaaacagatggcaagggatgcccctctttttcataaaactctccaaggttcaatcaatgcaatgtatagtgaaacttcaatagatctttcattttgacactattaaacaatccagagaagtaaacactgtt

SEQ ID NO: 273566 - DNA, 628 bp, Homo Sapiens
  misc_feature (238)..(238): n is a, c, g, or t
  misc_feature (334)..(334): n is a, c, g, or t
cactgctctctaacaagaaggcccctgacctcctgcagaacaggttaggatggtatttatgttttactctaaagatgattttattttgaggccttctagatactctgtgaaccaatgagagaggctgggagagtggagtggcaggggtggaaatgacccagaatctcttctgtaaacaaagaagtgcaaccgtgaaaagtaggggaaagattgcatgcacaaatcagaaaagaaatantcgcttgtgctgctaagttccaggggagatgagttcacagaagccacaatttgccaatctgtggaatgaccagcatggtgctcagaacaccttcantagaatgatgagtcaactggatttcaacttattttataccagggattgcacgtcctataaaaaacaagaacaacaaaccttgggatatgaactgcaaattcatctaatttgagcagatgaaactgatatggtctcttcaaattcagtagctcttaaaaacatgctgggactataagagcctaaagacatcagttgcctcagttctcagcatgttatcaagatgtgcctcttctttctaaatacgtgagagcccaccatattctaggaacctgtggttactaactcacctaaatc

SEQ ID NO: 273567 - DNA, 407 bp, Homo Sapiens
tgctgaaccctgccatcttagacacggctcctcccttttccatgcctctgtttctgcatctgtaaagtggagaccataatgcagtcgcctctcctgggctgctgtgaggattaaatgagctcttgggcgagattatgcgaatctccagttgtgtggtatttttagcacgtcttatttgtctgcttgcataagctccgggcgctcatttctcaacaattccttacaggcataaactgccagctctcagacccttccagcaccaagccaggtaccttgttgaaaaccagcccctcaccagagcgatcgctattgctgaaatgtaagacccccgggagtggggatagggtggagacggtggagatggtgggatgttgggtggaggaggatcatggaaatggaggtccctc

SEQ ID NO: 273568 - DNA, 665 bp, Homo Sapiens
atttataaaattcaagtcacgtcttgctgcacccacctgctgggtgtgtggaatgattctgggactacttcacaggaaaaaacgaatatccttgagagaggctacagggctctacaccatcagtcctgccaccctctctgagtctcgccatgtgtgagtctctgtgtctgcttgccacatggacctacattccgtcccttgaaggtagacaccatgcttcttcctctatagggactttgcacatgcaattgtttcttctacctagagcattcttcccacccaacccagcttctattggccagctccttcatttttcacatcaatagtcacttcaaacattgccttgtctggccacccagacctaatctagggcctctttatgtgttccactggaaatatgaacaggacttttatgattcttatcacagagtacaaagaaatatgcatttattttaatagggtgtgtgtgctggaccacggtgggtttcacagggtaggaattctgtttattcactgcagtatccacaaccatttgcacagcaattagcacataagtgtgcaatagttacttgcttaaaaaatgagtaactctactacaatgaaatgggtgattattaaatctagggctgaagtgaaatttatattttcaaagaaaagtctgccat

SEQ ID NO: 273569 - DNA, 723 bp, Homo Sapiens
  misc_feature (192)..(192): n is a, c, g, or t
  misc_feature (490)..(498): n is a, c, g, or t
caagccaccttacccagccaaaattaacatttataatagtgggtttgatgattggtcttagtagtatgttttgttgaacttctcaaaaatgagaaagtaacgttttatataactggacatgactgaatgaaatcattttctaaaagcttataataagaacatgaaagggtagtatggtcaaaatgtagaatnttttttcctgcaaaagaaccatccacaggcaaattatctaagtcccctgaatatgaaatatgacactatttagaagtgggtaaggtgcaactgcatggtatgacaaagtaagttgctgaatggtccttcacaatcaaaagcactaacttttaaaggcctcaagtactaaagcataattttagggatagaggaaagtgttcttgtttttgtaaatgagtatgggtcatggcatgactttggttttattttgggtcctcaaactgagagctttcttatgataatctgtatataaatagcnnnnnnnnncaatgggaatgttcataggataaataatatgagtgcaaatttttgccagaaagttctggaaatgtaggacttggttctttttataagtgcttttaaccttttcagactcattaatttcataaaccaatttaagcaattatttctatcagctacagatattttcttcacaaatataaagggttttgctcccctccccatcctccagcctccaccaatttgtgcctg

SEQ ID NO: 273570 - DNA, 656 bp, Homo Sapiens
gctttaagcaaacattttcccaaagaggctgttctagctttttctcctgcagttaaatatgggtgaactgattggactcacttgtcacaggatgaaactgtatttgctctaagggtggcaggctagagatgagactctagaataaagggttaaacagaatggggatgacccagttaaattttaatttcagataaacagatgatttaagtatgttccatgcaatacaaaggacatcctgcatttttatttgctaaatctggcaaccctctagaatctagtcttctaggtcattctagtccaaccttcaagttaacagatcgggagaacttgagacatgttaaatgtacttctcacagccagtcactgccaacatcaggattccaacctggtctgcctgactccacgttgtgtgcctggtatcccactaggagccccaaactgtcacctgctggatgggtgggagggtaccgagccccagtaggtaggaggggtccaggaagcagaaattcctggaggctgcactggacaccgattacatctgtgggcgattagcacacgagccttcagataattgcttttgctttaagctgaagtttcccttttccttctgattgcaaagatcacaggaggttcagaaaatacagaaaagcccaaag

SEQ ID NO: 273571 - DNA, 819 bp, Homo Sapiens
  misc_feature (366)..(366): n is a, c, g, or t
aagttcatttatatgactcttctccagattgtttctgtgtcactaaccagccaatatagtagccactgcagggcatgaaacaggcctacttgctacaccttagttatctttaaccaagacatacacagcgtctcaactctggttaggccaccactgagtccaggttttgatttgacagatgagcaagctcctagaactgcattcagtcgcccaggttggcacgtggagtccagactccctggtaagctcacccatgttaataaactcaatatagtctataattacatttctctctctttggcagtcacctgcagaatctgtatgccgtggatacttaccccagatctttgccttctaaattcaatngggctgtaaatcttctgggtgttgtaaaccttctgggtttgactttggtaatattttttctctggaacatgcaggaaagtggccagttacagacttggggacactgagaaggggagggaacgtggtggtgtggaatgggctgagctctctccctcttacaggaaactccctctggcgggggaatggcaggcctatgaggaagtaagcgttgtccttttcaggggagtgacctagtgctgcatccaaaaattctcattcctgttctcagggcccagttttgacccctgcaggcaatgccctgactttcgcataaagtatgtggggaggctgtgaattcaagtaatttggcagcctatagattctcactaacctagagtttatatttcagctgccttagcactacagcttcaagagataagacaatcaagcctgtgtcgagttaagaattaaatg

SEQ ID NO: 273572 - DNA, 427 bp, Homo Sapiens
ccaatcctccttgctgcctgggttgtcctaaagatcaaatgatgtcacgtgtaagttgcttggaataatggctgctatctagtaccaactgtatttgctggttttcttactctcttccgaatgtatcagtaacatgggaaagtctcgcactgccgcattttgcaggctcgattgtcagcatttgttggctgcagcagtggagctacagagaatggtcctagttgtcaggaaatgcagagcctgattggaggtagaaaatatttaaaaccagtggtacaagagatgcaaaggcctgattaataataaaataataattcctatagaagtctcagaaaatttaaataaacattctgttgaacttggttgatactagtaggtaaatagatgaactaaaaaggctagaagtaaaaacaaatctttgaacttc

SEQ ID NO: 273573 - DNA, 974 bp, Homo Sapiens
  misc_feature (773)..(773): n is a, c, g, or t
gtcagatgacataaaaggaatatttctaactatagttcttgctccttttgaactttaactgatacaaggacaaagggggggaaatcacattttcagattaaatttgctcttgtcgctgcatgtgctactaggaattaagccctgttacaaatcctccttgtctcctctattcccgttagcattgtttttgctgcagtcaggtactggccttctggaatattcctccagtggcatgctgtaccttaaaggttggggagcagctatatatacacagggtacatggctctctagcctcttccgagcatgctaattctggtgcctttgttctgtcttaaagttcctccaacattcatcttcctcttttcagagaatccttgttttacagaagaggccgcttgtgaaagagagtgatttgatcaaatcactagcagaattggtgggaaactagactctacgttagaacctactcctgacttccatttagttatttgtactgtgtcacactgataagtgaattttttataagcgtaattgattttattaagtacacagtattactcaagactttcgcttctgtgtcaagtgagtgaaactgaacccacagtggcttaaacatacaagcaaatgaaatggcatctgttggctcatgaaactgaaatccaggcacagctggatctgtggcctgaagttaccatcattctcataccccaccccacccccagcctccactttttcagtcaggccatccttcccgcatggaagcaaggtgcccnccgcagctctgggctgccaccctgacctctcagctgaccagacagaaaaggggcttctcttcctcctacgtttcaaggggtgaggtcaacttcatctaaactctgtaacctagaaggaaggggatgagaggataccccaggggaaagccagggctagtaacaatagaaatggcaatagaggccgggtgcagtggctcacac

SEQ ID NO: 273574 - DNA, 334 bp, Homo Sapiens
cctgctgcacctgttctcagaggggcatgagaaaagaggattctcttcctagggctgtgggaagccccttgagatgttggaagcagggcagggcaggagaacccagggagggcacagagctgtggacgagggctgggaaagccatcccgcctccccagggggtctccgaggagtgctgctgtggccaaaccaggggggccactttgtgctttctgtttaggtgatgggatgcttctatctcctcagcaccccacaccaaatcccctgttattgccagatgatgtgcctaatgatcaaattgcttggaactcctaataataaaactttaaatcta

SEQ ID NO: 273575 - DNA, 757 bp, Homo Sapiens
  misc_feature (74)..(74): n is a, c, g, or t
  misc_feature (595)..(698): n is a, c, g, or t
tgttcagataccaaatggcctaaaaatgacaaatacctatgtgggaacctttttcatcaggagaaataagttgnggtataagatgggaggctgtgttccaatcttgatttttatcacgttgttaagcctctgggttgcagccgccccctctgtaaagtgaggtgggggaactagatgtctgacagtgtctgttcatttactcactcattgaataaatatttagtaagtgccttttatgtgccaacacaaaagaattatcacacccttgccttcctatatttggtgagtcagcagagaagtcattctgatacagttagggtgaagtgctcagatactctagccttgggcaggggtttaggagctcgtgagagttcccaggccagcctgggcagagagtgttggagtaggggattcagggaccacactccgcttctttcactcattcgtttagtgtttcctttaagcctttgccttgttgttatgagaatacaaaaataaataagaccagtacttccctccaaagcactaattgtgagagcatgctgatggctttagcaggcagcatgcttgctgtgttgagataagagcagaatannnnnnnnnnnnnnnnnnnnnnnnnnnnnnnnnnnnnnnnnnnnnnnnnnnnnnnnnnnnnnnnnnnnnnnnnnnnnnnnnnnnnnnnnnnnnnnnnnnnnnnncttgcgatccttacccaaggaggtcttggcttacgtgtatgtgtatcttaatttttgag

SEQ ID NO: 273576 - DNA, 781 bp, Homo Sapiens
  misc_feature (26)..(26): n is a, c, g, or t
  misc_feature (76)..(101): n is a, c, g, or t
  misc_feature (154)..(154): n is a, c, g, or t
  misc_feature (236)..(236): n is a, c, g, or t
cagccaataaattaaccaaccaattncaaattgtgtcctaccactaaagaaagcattgaataggggacagtggttnnnnnnnnnnnnnnnnnnnnnnnnnngctaattaaaacctaattaggggacaggaaaggctgctattctgaggaggcancaccgaacccagaggataaggacccgcccttgggatgcatatacccagagagtgagaatgagctgaaaaccccttgaagcangaagaaactagcctatttaacaacaaaagccagctagtgtggctataacagaggtagtgtgatacacgggtaagaggccattatcatgccaggtggccttgctggcctggttgaggagtttgggttttctttggatataaccaggaagctgggaggttgatattaattgatttacattttgaaaagaagatcacagctgctgggtggaaatgtatcaggagaaagatggtaaaagaggaaagtggggaaaccagtcaggaagctacgtgcaatagcctaggctagaaagaatggtaatctaggcagcaatggatcaagagtcggctaagggatattcttgtggatacaaatgataggtttatttagaaataagatattgaaagagaaggaaaatgactcactggtttctgacttaggcaacagggtaaatagtagtaccactttttactgataggacagggaaagaacaagcagagaaaaaaacaacagtcaatagttctgttttggacatttataatttagagatgtccatttagttaagcaag

SEQ ID NO: 273577 - DNA, 579 bp, Homo Sapiens
  misc_feature (92)..(100): n is a, c, g, or t
ttttctctatttccaagatattattagaacatgtggatagtttataaataaataaaatacaaatgaatgtatataaatatgatgtgttcaannnnnnnnnactgatagacgtcatgatcaaaaaagttttagagaccatcgctggaattgatgaggagataaaacaattggaactgcattcaactgcatgttatcagaaacactttagagagttaaattttctcatgaaaaagatgcctaggagtaggcagtcccaggcagggactcctgtgaagcccagagtcctgcctttccacaaagccttatttgacttatagatttgctctcatgcacacaaaatggttgctgtaccctcagatatcatgtccacattctaggctggcagaagagagaaaagtgagggaaagaaggcagaacacacacattagcagaaaaataccccaggtctaggcacctggggaataagatccagcatggtcaagagcaggaaggctcttactggatttatatcacggcagacgctgaaagttggacatcacaaaagtcactgtagtaaagtgagcaaaaagctcaattgat

SEQ ID NO: 273578 - DNA, 348 bp, Homo Sapiens
  misc_feature (161)..(161): n is a, c, g, or t
  misc_feature (336)..(336): n is a, c, g, or t
tgactcattgtgtctgtgtcgaggcgtcgggagggcctaagtccgtgtgcggtgcccttcggccggcctgagcccagagtcagctcccctttctcgcccagcgcccccaggccgctcccggggctcacggtgagacttggggccggcctctggggtggganggcggggccgcaagggtgtgtgcgcgagggtgggctccgcagctgcgccctgggaccccctccaggcggccccgctgttgtgcgaagagagtctatgcccctgcctaatgttcgggcccgcgataagaaaagcgccgttcttcctgggagacgtccccgccccaaccccaaggantcaaggcgggga

SEQ ID NO: 273579 - DNA, 701 bp, Homo Sapiens
  misc_feature (181)..(181): n is a, c, g, or t
gtgccagtcagcgggcaggaggcgaaagagccagagagttgggatgggggcaggctgggggcagtgggaagagcgaggagcagggaagaggagaatgagcatcatgggccttcaatgcccgctctgatagcccctgaggactctcctcactgtgacctgtttccaggtgcctcatatctcngtgactcagattcccgggactcagacagagtccagggctgaggaactgtcccccgcagctctgtctcccttgctagagcccatcagatgctctcaccagcccatttctctactgggctcctttttgactgaggaagtcacctgacaaggaaaaacttctatcagtactttgatatgtcacagtttcatgtttatccagttcaatgtatttttaaatttttccttgagacttctttgactgatagattattgtgaagtgtgtttttaaatttccaaatgtttagggattttcatatctttcttatgctgatttccaattggattccctacaatgatttctggttttcatctgctctggatgattactatctcttttaaatttgttgtggcgagttttagggcctaggacagctctatcttgccatgtgtttcatcagcactcaaaaaaaatatgtgtattctgctgttactgtgtggaatattctgtaaatgccgaaatagattcttttggttaatggcga

SEQ ID NO: 273580 - DNA, 662 bp, Homo Sapiens
aagtatacagattataagtattcagcttgatgaattgtcacaaagtgaacacatccatgtagtcaccatctgccacaataaatagatattatcagcagctccctctgatggttcacagggaatacatatgttcaactgtggtagatactgcctgtattagcttcctaggactcttgaaacaaagcaccagaaacactgtgggttacaacagaaacttattctccccggttctggaggttagaagtctgaaatcaaggtgttggcagggctaaaattcctccgaaggctctaggggagaatctcttctttttctcttccagcttctggtgactgttggcattccttgtggctgcacaactcctatctctgactctgtcttcacatggccttctcctctgtatccaccttctcctcttctgtgtcttctaaggacttgtcctacaagtgtgggtgagatttaaggcccacccacataatctaagatgatttcatctcaagatccttacagcaaagaccctcttgataaataagattgcattcacaagttctggggttagggcatagacatacctttctcagagtcactattcagcccaatgacactgccaaacagtttaaacattggaagagttggcactcccaccaacagtgtgtatgtgttc

SEQ ID NO: 273581 - DNA, 651 bp, Homo Sapiens
gtaataaaattagcaactcactaaatttatgtgaatatatggttttaaaaactctcaatgaagattaaaagttcactgtcagaggtttcagcagtcctttcccaagcttatttacatgctaattttgcttagtaaactctggcttcaaagaacacaaaggtcagctgccaccaggtccctcctccgaggctttggccctagggaccctgggaaggcggcttcagtgcccgcttccctgagcaaaggctcgtctggactctgacgcggacccaccgggtggggtgggtctccacgccacccggctgtgcgtggggcaagtcctgcaccccgggcctgcgtttcccgctgccgtgaacggatggtcttgcgaatctagccaagggcacacagcgagcctctactcgggcattaggcaggctgtaacgactgagtgctgcacgggcagcgtccttttgcttgtgttttcttaacccgtaagtcatttaaagctttgttttggaacgaccctctagtgaaattggaacatgcccatttaatgccatattttaaaaacgctgtaaccccctcccatctccgcgttcacccttgaggaaatcctaacagtcaccatggatataaacattaataacaaaattaaagctcataacaggc

SEQ ID NO: 273582 - DNA, 941 bp, Homo Sapiens
tactcgatggggcctctgggggcctcctgtaagaggagagagatgcttagtgagacagccttggtcagtgattctcaaactctgttggacttgggaaaagagttaccttccccacccagttcatggcactgtaccctcattggtcctcaaaaggccccccttgtttggtttgttgccttttatcctcatttcttactgttatcctctccccttctcccatgggctaccattattaatatgtgtttgatgtatatgctgtttgtatgtattcttataaaacaagaaggtttggaatgtgtgtgtttttaatgtacatagatggtagcagtctagaacagcagttggcaaactgtaaagggccagaatagtaaatattttagactttatggaccatatggactctgttgcaactactccactgtgtcattgtagcacaaaagcagccaacgacatatgcaaatgagtgagcatggctgtgttctaataaaactgtatttatggacactgaaatttgaatgtcatgtaatttttatatgtcacaaaatattcttttgattttttccaactgtttaaaaccccttgtagcttgtggaccatacaaaaacactgtggccagatttggctactgggttgtaattgtgtgattcctcatctagctccttgctgctcagtatgttctgtggaccaacagcacgggcatcaccagaaagcttgttagaaatgcagatcttaggcctcatcccagacctgctgggtcagcacctgcattttaacaagacccctggtgattgtgtatacactgatgtttgggaagcactgggcaatgtttcattttttttatcctttctcatttagcactcttctaaagaccgaaccatttcgctagatctaacccattgcttgtaactgcagcacagtatttccatattcacttttccacc

SEQ ID NO: 273583 - DNA, 513 bp, Homo Sapiens
actgaagtaggtagtcacctttaagggaaggaaaaaaaattactagactaggaagccacagcggtaactagaataatagtggtgatttacactgtagtttgactcttgattatttggaaggcacactgtgggttaagaatggtagaaagaaaagagacttgaaagaaactagacttcctgtagctgtggcctcagtgcagtttattcctgggtaacggagcccttgccctgccagtaccaccctgggagctcctctgctctatggtgctcatcactggatcccttcctttattggggctcaaacttagttggtcaccaaatcttagtctaccacagaaatggtttttgcctctgaatctggtttcccctctctttctccactgccttttgttttttcgggtccctgttatctctcacctggtgtcttgccacaaacttctgactgttctgtttcttttcttcctcttttccttccaagtctgtcctcagcataatcaccagagtgatcatctt

SEQ ID NO: 273584 - DNA, 609 bp, Homo Sapiens
  misc_feature (121)..(121): n is a, c, g, or t
ttggatacttcctgccctggaaactggactccaagttcttcaagcttggggactgggctggcttccttgcccctcagcctgccagacagtctattgtggacccttgtgatcgtgtgagtanatacccgaataaatgcccctttctatatatctatccctgttagttctgtcccctctagagaacccctgaccaataccagggtccgttccttaccccctacatctataaccctgctgcctcagttgatagggaagcagaaagagccgcttttttaatgtttaattttattaagtttgcagtttcccagtgcccaaactcatgttgatttcaaaaactgtccttttaaagcatgtgggcagggtgacaattcatagcaggtgacaaaaatgttttataaataatatccatggaaatggaagctgtcattgtctgcagaatgcagccaaaatattcagaagatttgtatcactctaagttctcgtgctagtaagaaataaaaaagcaaatgatgactgggcctctaagaaataaagtaaaattaggaagcaggagtatgaaaataatgacattgtgcagaaataaatacaaaaggaaagtagcagagaagc

SEQ ID NO: 273585 - DNA, 1004 bp, Homo Sapiens
aagtttgagaagcgcaggatggaaatacggcacagaggagaattcacaggaaatgcatagtccagccccttctaggagtcctcaccaggagcgctctcttcctgctgtgggaagtgctctgagcattgctgcactgcaaactctgggcagaaatgaccctgaggctccggggaggaggaagcacataatcccatctctaagctccacttccagaccccccgtttctcatactagaacctcccgcttcccagggcagtgaccatatctattccttatggaaccatccacagggtgtggtattagcccacagtcccaatagtaattacataattgtcagacagaacattccccaggtctgggctattaagttgtaagcagcatcgcatgaaagacagatcagcccagcccaggtagggctaaaacgattgcagtccagcttttatatagcatcaattattcaatccagttattcactcaccaccttagccatattagaaataaaaggaatgccttcctttctttccaaaggactcagatttaagccacagctgttggctggcaaaccagacccccgcgtcgtttcttccatttctctaactcgatacaggatcttcatcaattaggacgggtttcactgcaagtcaagcctctagtagtcagagattctaaggttggcctgatcctgaagacagagggaggctccgtgtaagaggtcacaggaagctatacaatagccctgggttataaattcatgttctggattggcttctggcagtcctgtctgcctaatttatgatgacaatttctcagactcaggactagtgagcagagatggaattacctaggaaggggctgatatccttctgcacccatgacttttatacccagagcacactcttgaaactgcttctgccttctaaagcagtagcttcccaacccaattcattagaaacttgtgagaccaccttggagaatcctataactaaaaagccatgttctgcaaa

SEQ ID NO: 273586 - DNA, 475 bp, Homo Sapiens
tactatttcttttaaaatatattgatggtgtggttgaacccgtagatgtggaggccacagatggagggctgactgtgcctctcatgcatcctgctcatctgacccatccaatatccacgggagaacgactgccagggaggcagccttagtgaccaggctgaggggcatgcaggtagctgggagcttagagaagtggggcagagtcgatggcgagggggcatcggaaacaggaaacttatagttccagcctaatcctaaaaccatctgataccagtcacaagacacaatctatgaaatgcatcaacaaagaagctctaagagagaaactctacccttccccatcctattttcctactcttaaagacagaaagcacagaattattttagtggttaacattttgggggaaatcatgtctgatgactgactccacgaatggttcctctataaagaattctaagtttttaaaggagggca

SEQ ID NO: 273587 - DNA, 772 bp, Homo Sapiens
gaggttggagtgaaagtttaatgagtgagagaagaaagctctctgctgtggagaggaggcctgaaagagggttgccattttttacagttgaatgtaaaggcttttataagaaaccgatgaggactgggcagctcatctgcataaggcatgaatttctggtagctccctgctgtccttctaatgtacatgtgggcccttggcttgagttacttactccatattgctttgttccccttactgcacatgtcaggggatgaaattttccattgcaggcatgtttgggcaagtcacctgtgtagtctgtcttatctatgaggctgtgggcatgtcttaggcaagcccccctgtgcaagttcccatatctgtgcctgcagcttgatttttcaggctgttcttttgtttaaaagaattctaccgagaacccaccctaactgcctgcctgactggtttcttcctttctcctctctcactccttctccagatgaggaaacaagatcagagagggacagtgacttgccaagttcacactgagatgagtccaccctgtaccctcccctcctcaaaagaggaccttaccaaagggactgtcatcgggggccctcaacatccatatagtgatgacacttgggaagagatatgacaaaagcaagaaacagaatcctaaggtcttaaatgtaatgttggaaacaacattagagctggaaaacaacttaaggaataatggtaatgaggcatttgcatcattgtacaatgctaatgttattttatcctt

SEQ ID NO: 273588 - DNA, 675 bp, Homo Sapiens
  misc_feature (55)..(55): n is a, c, g, or t
  misc_feature (86)..(87): n is a, c, g, or t
  misc_feature (169)..(169): n is a, c, g, or t
  misc_feature (354)..(354): n is a, c, g, or t
gaaatcttactcatacaatttttgacattagcgtagggtctgtggtttacctccncttctacagccacacatggttccagggcacnntgatttagagtctaattccaggacaacaagactgaaattcaccttttgaatgatgtgtaaacaggctcattcaggagtggcnctgggaccagacacaggtataatggagcttgcctcagagacaggaaggcaaagctgacaggcaactccagggaactttggatataagaaactaatgtagagttttgaaagagctaacaatttgttcctccttcatccataactgtggaggttccagctgttttaatggtatactattactattcntattgttttcagtatgtatttagcattttcagtaaaccctatcccatttctccatatatcaaaacttagagaacaaaaacattctatattctgtggcctctgaggttcaagtgtaggactgtggcaacgatgcttgaaataataaccactttccatgagtgttctcatctaactgcccattaaactccaaataaatcttatgatcagcagatattctactttttaataattcagtacagaatcatcaattggcttcataacaaatgagataataaattcatgctattgtgggcagaaagctaatttagtaagaaattcctg

SEQ ID NO: 273589 - DNA, 845 bp, Homo Sapiens
cctctgggatagcccccacccctgtggcctaagctgccatggcacagtgccatcctgaaaactggaaccattgctggaacgtgtcctgccctgggagacagtaggtaccaaatcccccatccctgtgggcccactgtcatttcactatgtctacacaagtgcctgcaccacacatgccctgactgcctagaatctagacttgaaaaaattactaagaccctgatgttaaaacccaggagtcactctatcctccagggaaacaacatgacctacacagtgtgaaagcctcatgcaactgtcaagcacatgtgtacccacccccgtcatcataggcagccagaaggcagctttgccccactagagaggatcctgtgcagccgttggcccactccccacccaacaaccaacccagagttgaccctgccctcctagagtgattcctgtgcagctgcccagtccacatgcccctgtccccagccgtacagctgtcccagagacacctttgccccatcagagagagccctgtgcatctagctgcctggtccacatgcacccatgcttagcctgacagccagctcattggtagccctggcctcccagacagcctgccacacagcctgctggcacccaacttgcactcagcctgacaacaaacccagcacccctgcaccatcaaaactgcactaccactgtcacaaactcccacagcctaggccactgagacaattgcaggtattgcagatgaaaattacagataatgaatctacaaagaccacaatactgagtccagccagaaccagagccaatgcaccattctcaacagacactctaaggaactatctacc

SEQ ID NO: 273590 - DNA, 758 bp, Homo Sapiens
ggagaacggggtctcgctatattgcccaggcaggttggaagtccctgtttttctaagctcccctggccatgtgcttgagtggctcagcaccttctcccttctcaaggtcctggctggtgtggaggtaggagccatactgttccttgccaacctacttccaggaaaagcccagaggggagggagaagcatatataaatctaaaaggccatcagaatttctgtattaaagtgttgtcagtaaaagaagagcagaccacttcagctgctaaagcagattatgctcaggcctgatgctcagaaaaacagctttcacagcggctgcttctcaggaagggaaaacagcagagtgttagaggctggcagctaatctgaaagtgggggtgggagccctgggtcaaaggaaaggctgcttggcatgatggggagatgacagtaaggccctcatcagataggccctacaggcccttcttcccaaaacagtgctgaaacatctcctttgctagatgcagcagtcagtattttccactctgactcagagtgagcagagcagttctgaaaattgggagcgttatctttattcctcaaggctggtttttgggaagcctggaccactgccttccacctgctgtgtccagcagagtcacgtggtcccagagcttactcagcccctcccgccacagctaattcatatccatccctaccgcaggcttcagagagcaaaggtgatggctgccttgctgctgctaaggttcacctttc

SEQ ID NO: 273591 - DNA, 413 bp, Homo Sapiens
gcacatgttcactcagaaaactttactagacttttagccatgttcctattactgccacatctgggttttctttttcttccctatttaaaaagtcccgcagtcattcagggcctcgagtagagaccgagtctaaggcagcaaatgagaaggcctaaggtgcagcagctgtgctctccaggcactgttcattcccccagggtgccacttactagtgtgggggttgggggatcaccagaatgtcagagcaaacccctgtgattcgctttgtttgccttcaccttgggagaggggaggagggtatgtggagacatcaagatacagactggaaagccaggggcaaatggctcctagtggagctgagaaaagaaccttggacattttctgctgcttgtctgagtctacttagcttccag

SEQ ID NO: 273592 - DNA, 503 bp, Homo Sapiens
  misc_feature (306)..(318): n is a, c, g, or t
cccatgatgatgtaagaggaaagaacatttttttgtgattcaccagacatcactttaaacttggtgatgagtttaaatccagtagctaatcccttcctgagactcaaagatcgtgacgctggttggaatttctgactgtgccctttagccatcctagagtttcaaaaggaggaagtgttcgtgcttgtgtccctgaagttccctgttgcatgagcctgcgacaggacctcacccccaccaccaggcttctatttgggattcacatcagtattagtatcgtagctacaccaatgttcaggcttctcnnnnnnnnnnnnnacctagaaattgggctcagtggtcttcaacttgaggacgagggtgattttcctaagaaatcagccaaagagggaaggcagggcccctgtagattcaccagtataaacttcagctgcagggattccagagccctcgggaccactctgtcaccttaatagccaagttctcctggttcctccgatctt

SEQ ID NO: 273593 - DNA, 455 bp, Homo Sapiens
  misc_feature (300)..(341): n is a, c, g, or t
taaacaatgtggaatgattaatgcaatctaatgcatatccctctacctcaattacttatcttttttttgtggtgaaacatttgaagtttattctcctagttttttcaaatatacgttattattgactgtagtcatcctgctgtgctataggtctcaaaacttatttctcctgtctgtctgaaactttgtatcttttgaccagtaactccctattccctcccctcaatgtcctcctttaaaagtaatttgtataatagtcaatgctgatacacttttttcagctttaagaattgtttttcnnnnnnnnnnnnnnnnnnnnnnnnnnnnnnnnnnnnnnnnnnttacaggcatgagccaccacacccagccactgcttcatattctttatcttcaacatcaagtagcttctgggattatcatgataacctacattatactctagcttataatacatt

SEQ ID NO: 273594 - DNA, 354 bp, Homo Sapiens
  misc_feature (204)..(261): n is a, c, g, or t
  misc_feature (280)..(280): n is a, c, g, or t
  misc_feature (292)..(292): n is a, c, g, or t
acacaactgtgagtggtttaatataggtaaaacataccaaaatttaaatccttcctcctgaaataatttaacattaatttactcttgtttcatgaaatggttaatttaaattaagtgaccttaaaaactcgacaatgtattataagctagagtataatgtaggttatcatgataatcccagaagctacttgatgttgaagatannnnnnnnnnnnnnnnnnnnnnnnnnnnnnnnnnnnnnnnnnnnnnnnnnnnnnnnnnttacagcgtcgcacccgcngcccggccgaanaaacaattcttaaagctgaaaaaagtgtatcagcattgactattatacaaattacttttaaa

SEQ ID NO: 273595 - DNA, 468 bp, Homo Sapiens
cggtgccagagtcacacagacttggtgcagacaacagagctacctttcaggggctctgtgtccttggacaggtcactagacttctctgaacccgttcgctcatttccagaaagggataagatctctcttacagttcatggggtgccgcaagaatgatgggtgccaagcccatgaccccaggttctggcaaggaatcggcctctccaaaaatgatggtttttattattctcactattctagaaaatgtctttgtgaattgtttgcttgattgaaacggtttctttttaataaaatcttgattttaaaaagcccgaagtcacctctgttttctttattcagcagaataggatgcggggcgaggacaacatttagagacttggtaaatgtttttttctttaacttacattgccgtgtgtgtgcgtgtttctcctttcatctttcccgggctcccccaatttaagaaaggtt

SEQ ID NO: 273596 - DNA, 464 bp, Homo Sapiens
tgatgaagtagggctcaaacaccacagtctggaaaccagtaagtctcaaccatctgtcttagagataaggaaaccaagttccaaggataacaagcaaagccggcagcagaaccttaacaacttccagacaacttctagtgggatgctgagatatgacggcatgaaaaatatactgatctagaaaaacgggatcatcatgcagagtttaaggaatccaaatagcgaggcaaacacagtcacagaatgcagcccatctggtttcttctcaggaagattccagacttcaagtaactataagactcctgcaaggccaaccacacagtctggcctatgaaatactcaggtctcaaaggcactgtgcgagtctgtggcaatcacctcttttctcctgcctttttctcttaactttctcttaacattctcctaacattctcttacccatttcttcacttattgctcaaata

SEQ ID NO: 273597 - DNA, 583 bp, Homo Sapiens
ccggacgggcaaaaaggtctgcggacgttggacgtcagcaaggcctgggtggtgctggtgaacggtgatgcttgcggccacacgcggggtggctaagccagggactcgaactcatatgaggtctggaaggtgtgttgagacacttctcgccggctggtagacgcttccaacgccagagaccgcagaattgtaaggtgttccttttttgaaagctgcattaggtctatggtcaggcaccttttttccagcggagacaatgcatttttaggaggttgagttctgcggttaggaagggagatggtacccctcgccacctccccttgtcacctcccgccgagaatagaaggtaaaatatttttgagtattagtaattttcttttttcctttatcacaccggtggcttggggtcctttcggagtcttacagatatttggagtattaatttgaggacctcatcggcctggcacaggaatttttgcgtgtaggatattttgcataaaatagtttatcctgggatgatcaccttggcttgagtagttgcaccactgcactccagcctggacgacagaacaagatccgtctc

SEQ ID NO: 273598 - DNA, 554 bp, Homo Sapiens
  misc_feature (226)..(421): n is a, c, g, or t
  misc_feature (466)..(466): n is a, c, g, or t
  misc_feature (483)..(483): n is a, c, g, or t
  misc_feature (492)..(492): n is a, c, g, or t
  misc_feature (511)..(511): n is a, c, g, or t
gcacgagacagaccgggacaaagtgacagccacggtaaacatattcataaaacagggctggcaggtggctgagaggcagcatgtgggggcctcctggagccccaggtcctgtccctgccggctctgcacagccctgtagctctcccagcacagagcaaacccacgttgtacctgctgggctcggctgctcctccctccttgagctgggagaaaaaaatgcagttgnnnnnnnnnnnnnnnnnnnnnnnnnnnnnnnnnnnnnnnnnnnnnnnnnnnnnnnnnnnnnnnnnnnnnnnnnnnnnnnnnnnnnnnnnnnnnnnnnnnnnnnnnnnnnnnnnnnnnnnnnnnnnnnnnnnnnnnnnnnnnnnnnnnnnnnnnnnnnnnnnnnnnnnnnnnnnnnnnnnnnnnnnnnnnnnnnnnntcaagaaaaaaatggccaggcggtagtggctcaaggcctgtaatncccagcattttcggagncggaggtgnggcggatcacgaggtccgnagatcgagatcatccttggtaagaagtgaaacctgtctctact

SEQ ID NO: 273599 - DNA, 838 bp, Homo Sapiens
agaacattcagataatagtagatgctgaacttcctgtactatctttctttggctagattccactgtcttctgtgtttctgctacaagacttcttttagactctaccccaccttgctagagtcttggcttagcttctgttcttttttagagaagaaacttagggctttcctcattcctcatattctaagtgctccaacctgaataaccatctctctctctgggattgctctctggtctgggtctgccaccgcctttgcttgaactttagtatctttgactatgagttcttgcctccttgagtctggttcttccagtcttgattgtaactcacgtcatacctttaaccccccacctttaagtttaaaaaaatccttattttctgctctccaaaatataagatattctaatactaatttcagtgaaagacatagttggctactctacctttttccctgcccttgctgcttattttgctgacttatgatcactgcttgtctaaggagaaacctattgtctaatgctgattaggaaatggcatgatgtttggttgtcttacctctctgaaaataatgtttacagaccatgtggcaaaggaataaaaattacctgtggctcaaaagagagtggattgcaaaaacagccaataattcgcaaataatttgatttttcagatgtgtctttatgaatcattgatccatatgtttgacttgataattgttatgtattttagattttattctgatgaattataatacgtttaagtaaaaaggcaaatagttaaattcattcaacaaatattgcatacccactatgtgcgggatactgaattaggtgatac

SEQ ID NO: 273600 - DNA, 498 bp, Homo Sapiens
tctctttcagggtgccactttaagaatatttacattctcaattataatgtgcagaaatccccgtggttttccaatcctgactacattccccaacattaactgcttctttacaggtaagagtgagtctgcagttgtcccagtggccaatacaatgcctcctcttctctcgtctgcccttccaccaagcctctggcactctcaggcactcttttctaaggaatcagtgacaagataggaagcaataaggtcaggttagagtagctgctgcaaatgatcaaacatgataaggacaatgaggtgaactgtggttgcttttctcatcctgctcttctgacacctcccactctgcacaccaatccactatggaaaccaataagccttctttcagacccatggcaaacatgctgtaacagaaagcacagctacagagggcatgcattggaggcctgtgagctgaatctggcccacagatgtgatttgtttgaccccaacagtgtt

SEQ ID NO: 273601 - DNA, 930 bp, Homo Sapiens
  misc_feature (420)..(459): n is a, c, g, or t
  misc_feature (606)..(606): n is a, c, g, or t
  misc_feature (613)..(613): n is a, c, g, or t
  misc_feature (774)..(775): n is a, c, g, or t
tttgagactgcatagggctcggctggcatcctggttccttgttttcaatgagcctgaatgattctacaacctttctctgaatgtgaattaggtgcacagggttttaaacaaaagaaatgttgcctcttaccacacattcacatgcaaagtaatcagagctgcagcattcatgcccatgaatttctcatctctggtcaaatatctaatcttcattttcatcaattatgccaaattaataggatttattctgggattgtgttgtttgcagtctggtcctatgaccccaggcctctcctgacacctgcccaatgtgaaaagcacatattggtgctaagatgtctcattactaacggtgtgcccccactgggcttgacatgcatcagaagcacaatctgagaggtaactctaagaagaatgcgnnnnnnnnnnnnnnnnnnnnnnnnnnnnnnnnnnnnnnnnctctagttaggagtttgtcaagatcccacagtgagtcagcggaaaatgaaggagaatgtgttttggaaatggctctggctgctttgaacttccagccacgtttccctccctccctcataggattcaaaaagtgaaccttatcaagancaagacnttccacattggataataagttgctttcccagagactggaaggggtgagcaagtatgatgggcagctgattgatgcacagatgtttgagagtcccgagtaattatggtgaaaccctgggatgggtggaggggtgcaggctgaaggcttctggtcacgaattnncatgatgtgaaggcagagaggatgcaaagtcagcagaaacttgcatgcttaatagtacaccacgccagggagaggtttctagttctcttctttcctggatattacttattgatgtatgcaatttaataaaatgagctaactccttaaaacacaaa

SEQ ID NO: 273602 - DNA, 1029 bp, Homo Sapiens
  misc_feature (183)..(183): n is a, c, g, or t
  misc_feature (413)..(413): n is a, c, g, or t
  misc_feature (855)..(892): n is a, c, g, or t
cgcaatgttgcatcagctctgggcaacttgggacctgaaggtttgggagaggagctgttacagtgcgaagtaccccagcggctcctagaaatggcatgtggagacccccagccaaatgtgaaggaggctgccctcattgccctccggagcctgcaacaggagcctggcatccatcaggtactnggtgtccctgggtgccagtgagaaactatccttgctctctctggggaatcagtcactgccacacagcagtcctaggcctgcctctgccaaacactgcaggaaactcattcacctcctgaggccagcccatagcatgtgattccagattcctgcggtccagcctccaactttggttgccagctctttcttattctactacacaagccgccaactcaactgagagctaaagnagactagaaaagagataagctgccaactcaactgagaacaagaaactagaagagatttatatataaagcttcttccttctcccagatgcaggatgttttcaaccagtaaattttattgctgttggtgccagagaagagtcctttcttctctacatccaggggccttttctccaataatgtccctttaactctagggaccctgcctcacggaccttagggaaaaacctcaacctgaaagatctcttcctttctggagctcctttaatcttcccagcaggtttttgccttagacgtgctggccccaggacagtgatgaagacagagcctgtctcagctctaggcttgtggggatcaatgccatcagtccctgttattgagggattatcccttagccaacattcctatctgtgggtgggcgtggagagtgtatctttttttgggnnnnnnnnnnnnnnnnnnnnnnnnnnnnnnnnnnnnnnttaatagttctgtttgtaaactcttttaataaaagttgtgcctcaccatacttgaagctcccaggacaagggttgagaggctcaacccctctttcagcttctatgtggtgttggaggtgctggtatcgtgttcacac

SEQ ID NO: 273603 - DNA, 580 bp, Homo Sapiens
  misc_feature (480)..(480): n is a, c, g, or t
  misc_feature (484)..(484): n is a, c, g, or t
ggccacacacatacatacgcattaaaaagtgagtgagggcaagagaaacatacgataaatacaaagaatcacagaaccaaaaggaaatctaagtaaacatcacgactaggatcataaatacatagaaatgtctgtaggagcccagtgcagaggggtaaaaagcaccaggtgtttaaactcgcttgaccacaaacccataaaaggcagctgctcctttgctgcagccgattatgtcatgcagaaaagtggaacacacaaatgtctccatcaccctaatgctggttcattgtttatctttgtagaaatcagcttatgtttttgaaaaaaatcccttagtggatcaataccctgcagactaaacaaaacgtgcccacaaaccgtattttcttttttataggctgatggtttaccacctctaatccagacaagtcactggctcatataactcactttcctaacataaatcttctgggactaatnctancagcattatcttcatcagatattataaggtctgagataaaataatctttcttcagtttaataccgaattttatctgccttcaggacacaactatta

SEQ ID NO: 273604 - DNA, 966 bp, Homo Sapiens
  misc_feature (91)..(488): n is a, c, g, or t
tccctggagaaataaaaacttaggtttgcacaaagacctgtacgcagatatttaaagcagctctacttataatcatcagaaactagaaacnnnnnnnnnnnnnnnnnnnnnnnnnnnnnnnnnnnnnnnnnnnnnnnnnnnnnnnnnnnnnnnnnnnnnnnnnnnnnnnnnnnnnnnnnnnnnnnnnnnnnnnnnnnnnnnnnnnnnnnnnnnnnnnnnnnnnnnnnnnnnnnnnnnnnnnnnnnnnnnnnnnnnnnnnnnnnnnnnnnnnnnnnnnnnnnnnnnnnnnnnnnnnnnnnnnnnnnnnnnnnnnnnnnnnnnnnnnnnnnnnnnnnnnnnnnnnnnnnnnnnnnnnnnnnnnnnnnnnnnnnnnnnnnnnnnnnnnnnnnnnnnnnnnnnnnnnnnnnnnnnnnnnnnnnnnnnnnnnnnnnnnnnnnnnnnnnnnnnnnnnnnnnnnnnnnnnnnnnnnnnnnnnnnnnnnnnnnnnnacaattttttaattgtgtaaaaggaggaatgacttaggtttttttcaaacaattttttctctcccctaagaaaactcccaccctcagctgttagaagctcaccttttcttctccccacattagcttctccttcagcgtctataagggaaccactggcctatctagaggagaaccgatatggcccctatggcctcctgggatgccgcagaagcaaatctcctttcgtacattcacattcacaggctgcctctgaagataggaagggcttgcttagttggacccttttaaagaagttttgcagttcactttcctgggctagtggaaagacgagatagttaggcctcggaacccagaattcactcttgcccctgacatggaattgggatcatggctcactgccttggcctgggagaaatttcaagccaggtcagagggaaggactgcaccaggacaggctgttggggctggagggacccgg

SEQ ID NO: 273605 - DNA, 853 bp, Homo Sapiens
  misc_feature (63)..(71): n is a, c, g, or t
caaattaagtcttaagaaaaagaattttaaaaaagaaaatatctttgtatattcaaagaaatnnnnnnnnntaatccgtattgtccatctttagcctcaaagtggttctcacatcagggacagcatggccctgttgttaagtaatgattggcaacatctttggtcattctgcacagcaaaaaattgtttccctaaatttcagtaatactacagctgataagtagaaattcaagagaggagttagaaattctctgagacagataacttgccttaggaaaaaatccaatttataaaagtgttccccaccccctgcccccagtcaaaataggggtgctaccacctagacacgtaagaccagttactttccaaacattatagacttttcctagggcatcagaacttttgatgcagaggattccttggaaaatgttgccattgttagaagataaatcctactcatttcctctttgcccagcatacaccattgctttagaggagaaatggcacgagttgatgtttaaaagataggcctcagctttgagcacggtcaagcaagcccttgtattcttatgtaatcacaccagaaagggctgagtctgtgtatttcccccagtgggaagggtgaggtaggctttgagtttccctaggaagttgttgcgcatgttgttttggggccctggggagaagcttgaataggctttgtgatccagagagtcatcaggggagtagatggaaggaacttgtctccttgggtacgttaattgaaggaaggataagctgtaactgagatggacgcttttattttaatccccgcaaatgggcactaataaccataaataaaaacaggaaaccc

SEQ ID NO: 273606 - DNA, 945 bp, Homo Sapiens
ctccctccccccctccttagtgtagaggcatgtcgctgcagccaaagcaaagcggttcataactagagttctcctctgcgactgacaacagctgcactattccaaggactaggcgaaaagagtcactggggctgaggctaggttaatgaccagacactgaaaaccacctccttcttgttaatagagtaagcggccagttgggtaacctgtcagcaatggtcacctttcacatacagtggagaaacaaaagctgcatacagtatgcttgattaacctcacttaaatggcaatgctgatctcaaatctatcccaagagtgcatataaacaggattaaaattatattatgtgtggatcttgcccaacaaaagcaactggcacaaaatcattttaattaggtggtagcggctgtaactcattcaactttggcattaattcttttagtcccatcaaagaacttctgggacctacttatagtgtggaataagggagatgttgagtagacagcaaatcattctggtgactcagcttcacgcatagggtattggcatactgacaattggttaaactgtacaaccagatcagaatttgtccagaatattcagaaaatctggtgcaatctttgtacatacctttttcgaggtagacagcagattcagaaaagtattttactatattgaccttcaaacggtcagagaatgctagtattactagttattttggaggcaattttctttgtacatagcaaacttaggaactttattaacctctggatgtaggagaactacagttcagtattaggccctcttcattcttctttctgccctttttctcctagtccatttaaatgaaattttcttgttgtgggacctgtgaggacttcccaggttccagcttagaatagatgttacagtaaaacctccccactgacctttcttaagaaatgt

SEQ ID NO: 273607 - DNA, 1191 bp, Homo Sapiens
  misc_feature (539)..(539): n is a, c, g, or t
  misc_feature (871)..(891): n is a, c, g, or t
tggttatacatggtatatttgaatcaaaatcactaaattagagttgaaaagcatttcatttttttctagaaaggaggcttaaaaaaagaatttcacatgattcaatcctctcattttaagtggggaagcatgcacaggacactgaaggattcatccaaggtcactcatgagaacactggcggaaccaggagtacaatgtaagaaggactggattcccatgttctgtttcctaatattagctgtctttgctttgctttcagcatttatgatttccccccttctttctcccttagacttctccaagcggattataccatccgagactcttttccgaaggtaggggaactctgcccagacttcattgtctattttccaattgcaactttccccaataacgatttatccaaacatctcaaattcatgtagataactctgacagcaaataaaaggtacacattttataaagtaagttataagtgagatactgccaagctttatttcaaaaaccaggctctagtttccaatctaagaagtaaatngctttctgcctgtttctgcctttcctccctcactcaggagagaggcccaaggctgtgtcttgagggattgcttcataaggaaaaatcaaggcagggcacagtcccaggatggccagcatgggttggaagtgagcttagcagaaggctctgggaaaagggaactggattcatgagcaggctagttcagtccccagagcgatttctctccattggaaacaggtctgagtgctgacacgggggtttcccacagcttctgctggcctccaaaggcatatttgtcatcagaggctcttgatgaagctgtacataaatatctgactgttgttaaatgnnnnnnnnnnnnnnnnnnnnntattccacaggaaccaaatcaaaaccagctgtgtgggggagaggccaaaatctcagtgtaagtgcaaaaggcccagcagaaacacttgttaattgtgttatttactttgctgaatagtaaattgctgtgccaatgaagtcatatcacatgaccgtaatgtttttcatatgactttttggctatgagagaaatgggcattttctagaattctgagttctatagtgaatgaatcacaatctacattttaattcataaccaattaatcagctcagccctgttcatttctgctggtctgtttat

SEQ ID NO: 273608 - DNA, 161 bp, Homo Sapiens
tcatggttaattttatgtgtcaacaggctacagtgtcctggtgtttggtcaaatactagtctagatgttgctgtaaaggaattttttagatgcaattaccatttaaatgagtagatttcgagtcaagggaactacccttcatgatgtgggtgtgcctcacc

SEQ ID NO: 273609 - DNA, 518 bp, Homo Sapiens
caagtctgttcccctttgagcctcggcgttctctctgaaaggaagtgggatgtgtagaagttgtcaaacatgaactccgtggaagtagatagtgggcctcctcccacacccacctactcccttgaggaagctccaggcagtacatttggaaagctaccaaacaggactacctctcaggacttctcttgttttattagtctctgagctgcctctttggttggtttatctggagtttttgtagcatcttctcactcatccacagcatgtcacttgttctctggatgaaggaggctccaagtcatgctagactgtggagttctggaactagagtatactgtttatttcctactggaagccagagttagggccaggctggattttatgtctgcacctaaaaccattcagtcccccacaaatgaatcaacctaattagtgctagactgttgtagctccctgagagcagggctctggccatcttaccactgtattcccacgccgagccctatgcagtctcaaaa

SEQ ID NO: 273610 - DNA, 894 bp, Homo Sapiens
  misc_feature (366)..(366): n is a, c, g, or t
tgaccccccagagaagaggcgggggctgtacctcacagtcccccagtgtcctctggagaaaccagggtccccctcagccacccctgccccagggggtggtgcagatgaccccgtgtagctcggggcttggtgccgcccacggctttggccctggggtctgggggccccgctggggtggaggcccaggcagaaccctgcatggaccctgacttgggtcccgtcgtgagcagaaaggcccggggaggatgacggcccaggccctggttctctgcccagcgaagcaggagtagctgccgggccccacgagcctccgtccgttctggttcgggtttctccgagttttgctaccagccgaggctgtgcggncaactgggtcagcctcccgtcaggagagaagccgcgtctgtgggacgaagaccgggcacccgccagagaggggaaggtaccaggttgcgtcctttcaggccccgcattgttacaggacactcgctgggggccctgtgcccttccggcggcaggttgcagccaccgcggcccaatgtcaccttcactcacagtctgagttcttgtccgcctgtcacgccctcaccaccctccccttccagccaccaccctttccgttccgctcgggccttcccagaagcgtcctgtgactctgggagaggtgacacctcactaaggggccgaccccatggagtaacgcgcccggccccgatgcgaatcaggcctcccctacatctgggggcgttggccgcgagattcccattgacacctttgtttcgtgtgcttttaaattcaggttaaatgttgcaataatctgatgcagaagactcagtttctcaagggagagggagggggcggagcggaataaatagtaacttatttaagaaatgc

SEQ ID NO: 273611 - DNA, 323 bp, Homo Sapiens
ttccattgttctccgctggcagaagttaacatgccagctgtcaaaggaaaagttttaaagtgtccaggcacatttttgctcaacaggcagaagggatgactttgtgactaagaagcggtaaccagcacagggttctatcgttgttcatgctagctggccactatacccttccagaacaaagcccgtcactgaggacaaactgttggaaatataatccagattgagctgcagagagacaagttagtagagacgaaaggaaaggttcagataaaagcggtagggagaagataaccaggacattaaacgaaccgtaaaccccggga

SEQ ID NO: 273612 - DNA, 495 bp, Homo Sapiens
tgatgtatgaatttactcaccctatcttcagcagttactagctgtctctctgtagaacatttttaaatggtttttagaggatccttttcgtcaaagcaaaaaacatgattaaaatcagagtctcacatctgattccttcagcctgcctgagttggggggatgggagggtgaagaagcgctaccaacaacccctcccatactgaatttttcctcaggataccatttaattagataccattgtgtctgtttaaagtttttaaagaattaacattttctgtattcaatgtaagagaaaaaacatgttgccttatcttagccgatagatgagaatagcttcttaaacataatgccaacttgtgagacctgtctttaagctgctgttaacctaagtgctgtaaatttttctagtgattaagctgctttctttcatactgtagcataaattcttctgcagtaagctttgaagttacacaaaattctaaattattgttccta

SEQ ID NO: 273613 - DNA, 342 bp, Homo Sapiens
  misc_feature (84)..(84): n is a, c, g, or t
aaatgtaaaaggagtagtggttgccaggattagggagagggagagatcaacaggaagagcacaggggatttaaggcagtaaaanaaaacctctgtatgatagtgtattagtggttatgtatcattgtgaatttgtctaaaagctatgaaaagccaacaccaagagtgaatcctaatgtacactatttattttgggtgataatacatcaatgtagattacttaattgtaacatatgtaatctacagattcaatgtaatccctaccagaatcataactgacttctctatcaaaatcgacaagctgattctaaaatgcatgtagagtctaataaatgtataactg

SEQ ID NO: 273614 - DNA, 772 bp, Homo Sapiens
cttaacagcagtagcttaataacagcaaattcaaagcaggccgaaaacaaaaaagagatagctttagaaaactctacattttaattgtatagttgcaggttgggcaattgaagctctgaattttccttgctgtaatttgcccgttcagttttaaaatgtgcacaagaacaggccacaatatgcagctagctgaagtgctggaaaacctggcatgcctttgaacttctacaggagttcctgcccctagtgggtaagttacctattgcactgactttatgaagatatctcttccagtgcccttaagtgtgagcatccccacaaaccttatgaaccagttgaatccaacctgaatgcctctccataagccccggagcccacaaatggcattttctccagggcccttggatggagggaatcacgaaggcctcctcccaaacccaaggctaggagagatggtccctccggggtccagggaggagaacagaaaggactgagaagaacttaggaatgccctcccaaacccaaggccagcaggaggggctcctccggagttccacagatggaggaggcctaaaagaagaaatcaagtctgcaacctaaaagtgggagatcttggattttgatagcacttacccagatcctttcccagcatagtcaggaacaactggactttttcaaagggaccttggctgtacctggtgtcctgggtgacacaggaaaaggaattcaggggctgcttcagaatcccatctttgccagatacgttaacttt

SEQ ID NO: 273615 - DNA, 537 bp, Homo Sapiens
  misc_feature (329)..(329): n is a, c, g, or t
cagggagcctggtggggggcagggcatggaggtacacagggctgggagacaacctcctctggctgtgatttggcatttcttccatctctaactcacctgggggactccttcctgccaagccagaggagcagggcacgaatagagcctgatcctgttggagatgggtatggggagagggactgagacagagcagccttggcgtgctgttagagagttgtccagtctcatacctgttaccctccagttgatcaggtctgtccaggtgctgtgactcaccttgccagctcagaggagacgctgagtggtacggctggggaacacaggcttangaggtgacctgcagccaaaagcatttggctttttgctctgccaatgggtccagtggattagggggtcttcagccttgtttcctaaatgctctgaagaattctgtgccagccccaggttccctctattctggaaacaaaggcctagatccccgtatttccttcttgctgttttgtttttgtttttgagaaagagtcttgctctttctcc

SEQ ID NO: 273616 - DNA, 776 bp, Homo Sapiens
  misc_feature (528)..(539): n is a, c, g, or t
tcaaatcatcatacgccaacgtgtttggggatggtccctattccaccttcctgactagctctcccatccgctcccgatctcctcctgcctgaggccacttatcagggcctggagccctgatggaagccataggaactccagagttgccaagccatagctgagaagcctggtggttttcctctcccagtgaaaaaatgggttcagggtcttgtccttagctactagctctagaaaagtcccaaaagcagcagaaggtgaagcaggaagcacttggttttctccttcctgatatagtcacctgttggaagtgttaaaatttcctcgacaggccttaaatttactactacattaggggtaccacattttaacttaccatgactttgctccttcctttcctgagaaaatatttccactggattttttccaccagtccccttacagccctcattgttttaggaatctctctcaggtttgttctgacctaaaccagcaggaagtcgtcctgggctgtaagcaccatcacttgcnnnnnnnnnnnnctgatttcacaagtgtggtgttttcccaaggctcccttcccaagctcagtgcaaacctctcactcccaagtttctttgagccaacttgcccccaagcacttcacaatagaccctcgagggcttgtgtccatttggccttttacaagtgtaatgccaatttcattgatttttggttcttttggcctgatttggatctctggaatgcatttattcttgaaatatttgggggattttaca

SEQ ID NO: 273617 - DNA, 766 bp, Homo Sapiens
cctggagcaggtccctggcctctcctgggagcgagtttgagtgcagtctcccgtcagacctcctgcaatggaatctgcatttctgtaagcttgctcagcaagattgagagcagggtttggcatttctagcgagagtcccaaaaggaaagagggactgtacctgaagataaaaataacaaagaaattcctgcacctaaatctatgcagtgaaactaaatcagagagaaactattaagcagccagattttaaaaagacatcactttccgaggagctgtccccttatcaacagaaatgggagcttgaagacagtcaaatgatatcttccgtgagttgaaagatgcactgccagcctagaattatacacccagggagaccatctttaaagaatgaaggtgaaatcaaggcattttcaggcaaacaaaaagcttactttggcaccagcagacctgcacaaaaggatatacctcaggcaggaggaaactgaccccagagggaagatctgagaataacggatactgtgcacctaaattaaagctgaataaacaagaataacgtggggtacaacattttagaatgtggctgcacagtacgaagaggaatgaagggagggaaactgctcaaaggcccccccgccatgctgccctggaagaggatcaagatgcacattcgcttctgagtgtatgaagtatgtttattgcgattcctagggtaaccgctaaaataacccatttagctggaatcccagaaggaaagaagaagaagaag

SEQ ID NO: 273618 - DNA, 727 bp, Homo Sapiens
  misc_feature (561)..(561): n is a, c, g, or t
  misc_feature (715)..(715): n is a, c, g, or t
ccctagagactcaaaatgtattaagagagtcacacattttggcaaaaggataactaccacgtgggtcagagagggtgctggttaccaggaataccccatttccatcaccgcttcagagttctcaaacgttcactgacacttgcctctgtgtcagacctttctcccaaccctggggttatgtgtttcatccccattttgcagatgaggagaagaaggtggaaggatgctagacagagaagggacttctgcttttctaatctgttaccttctacagaggacacaggaacctcaccagggcacggcccactcgcacgcagcagcaggaggggaaggagattctggacggattccttgccagggcatttgctcctcaagagttaaaggatgccggaataagctggcggatccattgtgtcccatgattcaggccctgaggagcgtgatagcccgagtcatcgcacaagcttcaaccacactaaattgattctgtgttgcttttcctaccgctgggccaatctcagctatgatttgtggacctgttcttttgcagctcaaagacantgcccccttgggcttcctggcagaaggtggactcatttcccacttgcccactgttccctgacccctccccaagctgggcttttccccatcatttcctttggaacaaaatcttctcttcatataaaactgaccatgttggcctcttccttcctcncgtgccgaaata

SEQ ID NO: 273619 - DNA, 534 bp, Homo Sapiens
ttcacgctataatggcagagttgagtagttgccaaagagaccacatggtatggacatcctaaagtatttactatctggccttttacagaaaaggtttgccaacccctgctctgtacaatgcctgtcaccaatacagaggttggggctctaaccaggtgggtctccctggcttccactggcgacctcttaacctggcttatgggtgcacattttcaggctggtgcttctgggagatatgagagacacagtcagcttgtttccagctccaagatgtgagatggactgtgtctcttatgtctgcatttgaatcttctctcctttccatccaacttcctgcccccagctctgactcataggtctctgtctttgccttttcccaagaagagcaagaaatgactaaggcccaggggaggctgcatttccctgatagctaatgatgtagaacatcttgccatgtgcttatttgtcatctacatgtcctttatggtgaaatgtctcttcacattctttgctcatttaccaaatggattgctt

SEQ ID NO: 273620 - DNA, 421 bp, Homo Sapiens
ccaagtacaagatgttaccactgacaaaagggtctcatatgaatgatggaggtttctgttaccgtatgcccataaaggggcctgaaaccaaatatgatttgaatagaaaagaccttgggaaacataagtagcactttggggctaagctgcgaaggcactcgtattgtacaagtaatttcgaagagagcctaaatttgctacccccctgcttctacagggtataccagatttttgctgtcttgggacactgagctcatggaagcctgtggaggaaactaaccggtaagctggggatctaggtagtcatccaagagtctggagggagaagaaatttgttacttccacagctggggtcctatagaaccatactaatgtacaaatggatgctgaaaaatacctgcatagtttcaaaacaaaactc

SEQ ID NO: 273621 - DNA, 450 bp, Homo Sapiens
tgagttcaagcaatccttctacctcagcctgctgagtagctggaattacaggcataagccaccacacctggttcagtcctcattcttcttgaccaatttgcaacatctggcactgaagatcaccaccttctttttaaaatgttctatcaccttggcttttcttattatactttcctgattctctaatttttttaaatcacttctcgatatctttcaaaagctaatctacctgttctttatctcccagggtatctttcatcttgttctcattctatatgaactctgtcaatgtccaaggcttctaccactttaattcagtactgttaattctcaaaactacagccctagtacagatttgtatgtctaaatccagacctatagatacaaaagcctacctataactggatattctacagacatttccaaaatagaactcattaactttttttt

SEQ ID NO: 273622 - DNA, 506 bp, Homo Sapiens
  misc_feature (350)..(358): n is a, c, g, or t
catatctcttaaaaagaaacaaaaaagtttgctaaattttattttttagagtatttacaaatcaaactggtatcctctcaaatgtttacttaggtgttataaacctttaaaaatttttgaccaagtacctcacatcacattgtggattatgctatcaagttcctgtaaacaaataattttcaatgtaaaaatacagttgttttatttcaaatgcctcggagttaaattgacgataagtgaaatcttgtctagcatggaaatgcttttgttccttttatgaaactaattttaaaacgtaatttggtataaagacttattggcaggatttaccaatttcaccagttgactgnnnnnnnnntcttataaaatcagataaaatataaatatgtttttttcagttttctttctgtatcacattcttaagaaaattagtttaaaaatgctacaatttttgaaagtaaaaggacacctattataatacagtataaaataaaacatgtaatttt

SEQ ID NO: 273623 - DNA, 766 bp, Homo Sapiens
  misc_feature (140)..(140): n is a, c, g, or t
  misc_feature (149)..(149): n is a, c, g, or t
  misc_feature (152)..(152): n is a, c, g, or t
caaaattaccttaacccttgcacctggcctgaaggtcgtttccccctgtactcttcaatcacatgagccagttaactatctttcttctcctttatctctttccttaagtcattttgaggtgagttttctgtcatgggcancaacaaaancancaacaaacaacaaaaaatcttgacttaggatggtattgaaaagtccatggccagaaaagatgagtgtggtcttaaaacttccaagcagagccccccaccaccgtccctgacatccacttgcttcctgcccacagatggaggtgaagcccacaggtttccagctggtgcctggtggctgttgtgggaagggcgacctcagcgttgggctcccatcaacacttctccccggtgatggaggcactgtggcttactcagcccttagcgcctatcagcaggaacacttcatcacactgacaagctgatatgctaaatgaataagtgcaaggcacagcgaggtcaccccagaagttaactgaggggattgcaggaaacagtagacacactccaccagggagggcccggataggtgcaggaaaggtggcaaacagcacccaggccctgtgccccttggccatacaccccattacagccctgacagctgagttctaaacagttaaatatgaaactgtcaacaaggccttgtcttaataaccaaacttgaggccttttatccgggaagatttatgaagtaattttaaagagatccaagcaaacatctgtcaataaattgaatg

SEQ ID NO: 273624 - DNA, 658 bp, Homo Sapiens
  misc_feature (508)..(508): n is a, c, g, or t
cttagcagttggcctggaacagaattactgagcttcctgaagccagagggtgtgcagggccaggagctagaatcttccacatgctccaagccacaggtccccaaataggctttgtggaagtgaaggagcccctggcagaccttgcatgaccaactgatgaccagatggggaggggatgtccaggcaggtgcgagcatggacggatgatgatagccgaggaaccagaagtcttaccatgacttaaaagccacacccccacccgaccgagcttaaccccaggaaaaggtccagggggagactttgaattgactgagattaatttctaccacctgctgaaacggggttcctaatagaaattacattctgtgttagaaaaataaagttatgcttcttgcagattagagtttgtaggctgagttgtacctactatataagtaatgaattaattttttctttatgattttgtaaagaaaagagaagaaagaaatttcagtagaatagcgctacnattgcaagagaaacggcacttgtgatttttatccattttccttctagtctttgaatttagaaagcacaagtctcttgccacaagttcaggtcaaatgactgcagcattttgagtgaaaccaataaaatctaagttcatggattgttaaaa

SEQ ID NO: 273625 - DNA, 711 bp, Homo Sapiens
  misc_feature (303)..(303): n is a, c, g, or t
aaagatcctcatacagcagtttatttctcttgttaaattcatgtccctcaagatatcacagtacccactaggtacagatactgggccgccctttgttaaatcgtagttggatttatttttgcttccctttttggccctctttctcaccatttgtcattttcacaggctttagtgacataaatcttgtggaatgttgggctatgcacatagcatgaaggattcaacctctcccatttcaggctggttggccaatgtaagcaactgagggtggcagagatcagggacagataagaccagggaganagaaggggtagagggactttggaaagaatacctgaagtacggaaagtgacacctttaaggttaagggtgatggcaattgacatgatgacttaccaggtaacaatggagtccactggaagctgcataaccatgaactgttatgattattttttcctatctatgtggaaaggcctggtttgcttctctgcacacagtcctgattcagtgtggtgcccgcatattgtaaatgtcttatccaagaatccagggacctggccctgaaggaaaagctgaggacagagtatttctgcaacaggcctaggctcttgcaaacttgccttcccaaagctccaagcccaactggcctgcaggggaggcggtctcgctgacaacctgccctttggccttataccttctgtcacaaaagag

SEQ ID NO: 273626 - DNA, 434 bp, Homo Sapiens
  misc_feature (13)..(13): n is a, c, g, or t
  misc_feature (58)..(58): n is a, c, g, or t
  misc_feature (63)..(63): n is a, c, g, or t
  misc_feature (268)..(268): n is a, c, g, or t
tggaaattttaangtcttttggtcatttcaatgagttttggggagaaagaaggaatcnaacanggtatgtatatatttactcaaccattctgagcttagaaatcaagagactttttcattgtagctcggattataaacctcaatttatattgctcttaaaactcatttctctctgattgctcaaaacttaaaaagatctcaagataccactgtttagtccagcctataagaacatggttaaactgttaattgcagttattaaaaaccnatccattcttccctttaaacatctttaaatatgaaagttctagaaagtccctcagtggcctctccagtgcctatttctttagtcacacagttctttctgaagagacacaattattcatgttaatagcatcctcagatatctctgaacactttcatttgaaataaaa

SEQ ID NO: 273627 - DNA, 1026 bp, Homo Sapiens
aagtcttgaatttagatggaaaaaaaatcagtgcacaagttcaagattgtggaaacctgatttaacagcagttcgtgggaaacagacctaagggttttagttgacagcaagttctttatatgactgccaaagtgattagtccaatcttgggggacattaatgaaagtgagttgccaatagcataggtaggcaatggtccccctgcgtcctgcagtggtcagattacatctggatatctctttctaatagggccactgacaaatgtgtccagagaagagtccaccttcccatctgccctgctttcttgacctttccaggttgttttgttgtgttttggtaacttctctctctcttaacccatgtatgcccgaggttgcaattttttgaatttttgcaatcagaccttggtgctgtccttgagcagtagaatataaataactcccacttgcttagcattccaataatggaacactaggcataaatgggctaatagaaactgggaccatttttggagtcacttccactttctgtggtgtttagactctcgcaccagtctgctctcattatcatatcgtgagtttcccagagacagagctggagcttggctcagcttggcaaacagagcccctgatgttattagtttggcttctgggttgctgatgattgtactggaagggaaaagaggagaaacaggtcatgagccaaatgaggagtcccacagatgccacttcacaggcaccctatgtcataggaaggatattcaaatgtccagcaactaacgggtacaaaaagtagttagaaaaaatgaataagacctgctttgtgttagcacaacagggcgactatagtctaataatcgtgcattttaaaataactaaaagtataatcaattgtttgtgacacaaagaataaatacttaaggggatggataccccattctccatgacatgattattaaccattgcatgcctgtatcaaaacatctcagataccccataaatacgtacactccctgcacccccactt

SEQ ID NO: 273628 - DNA, 634 bp, Homo Sapiens
agaggtgcccgatgagctcccagtcatgtggttcagggcgggctctggaagactcacagaggagactcctccgagaaaccaagaaggtttctgtccaagtcgggatctgctctgctcaggatgctcctccaacacacacagtgaaaaactgagcaccctagagagcaacaccaaaaacccatggccaataatggagagccaaatcaggagagcattcagcaaagcaattcttgctgtagaaggaacagcacaaaaagctggaaggaaactgaggcatgcgtgaaagataacttgtcagtgtttgcagtctactgagatccccgctgcaagaaaaggcaggatttccacttgcttcttggcccgcctctgttgtccagaatccaggacaggtgacaagagaagcagatgtgatctgcacaacctggcgcagctgggttgggagttgctcttcctggacaggccgggaagggtgctggagcggagggaggaggagagaggttttaggggaggggtgctgagcagtcagggacctgtaaggtcacatttctttcaggtattctttctaggtgtactgaatgggaacattgtctgtcatccctagactgcattaaagacctaaactgcttccatttaa

SEQ ID NO: 273629 - DNA, 889 bp, Homo Sapiens
  misc_feature (396)..(396): n is a, c, g, or t
  misc_feature (521)..(521): n is a, c, g, or t
  misc_feature (700)..(700): n is a, c, g, or t
gtgtgagccactatgcctagctgtattactttttttaagttaaatccctttctcataccattcaaaagaaaaacagtggatacacaaacacctcaatgtaaagcaaaattaaaggcaaaaaagtcataaagataaaaggtcaataaacctggctacatcaaaaatataaaacttctatataacaaaagcatcacatgcaaagatgaaagacaagcaacatgatggaggaatatattggcagtacacctaacaaacaaatgcttattacataaaaacaaaatctgaagaaaaatataaaaaaacaatagtttttcttttcagggaataggatatacaaatggacatgaacatatgaaaagatatttgaaattagagaaatgagaattaaaaccttancaacaagatctcattttttacccatcagatggtcaaacattaacaagcatgacaatcccagttcctgcggacagtgctgggaaaggagtgcatctatgcatctatgctgcgggaacagggcactnaggagggagcttcagcttgactcacatccaaatgcttaagacatcctaaaatgaccacttctcctttaacggaatccacccccagagaatgcacgcactggaaaccatctacttaagccatagaaacctagggttaaaatgaggtaggtaccagttaatatggaaagatccaaggcatnatcccccaaggggatatccctcatggtgcttcaagctctataattcaagctctataattcttctgtccctcaaaggagatgccttggatctttccacattaactggtatgaggctcataacccttgagcctcacgttaactggtatgaggctcatattccttgagcctcacatccaaatgaggctctag

SEQ ID NO: 273630 - DNA, 1023 bp, Homo Sapiens
  misc_feature (548)..(596): n is a, c, g, or t
  misc_feature (614)..(693): n is a, c, g, or t
  misc_feature (698)..(766): n is a, c, g, or t
  misc_feature (826)..(952): n is a, c, g, or t
gcagtagagaacaagtttaataaacagggctagccaagcagaacaggagtttattactttattactcaaatcagcctctctcagaactcagaggctagtctaggtagggatttcatggctaatttggtgaacagcaggctagggaatgagtgctgctgattggttggggatgaaattgtaggggtgtggaaaatggtcctggtgcactgagtccacctcatggcggggtccacaggactagttgagtcatgagtcacgggtcaggtgcagtcattcatttgccagaatgcagaattctgaaaaacatctcagaataacaatcttaggcaatataaaagtagtgttatctataggaacaattggaaaagtcaccaatcctgtgacctctggccacatctcctaagaggcaaggaattatagaaaagcaagccagagaacagtggctggttatcatttaagcctacatgttagtagaattcagacctctcccaaaatcctaatcttgtggccctgcattcattttacgaaggcagtttcggtccctgagnnnnnnnnnnnnnnnnnnnnnnnnnnnnnnnnnnnnnnnnnnnnnnnnnagttaacaaaggcaattnnnnnnnnnnnnnnnnnnnnnnnnnnnnnnnnnnnnnnnnnnnnnnnnnnnnnnnnnnnnnnnnnnnnnnnnnnnnnnnntcagnnnnnnnnnnnnnnnnnnnnnnnnnnnnnnnnnnnnnnnnnnnnnnnnnnnnnnnnnnnnnnnnnnnnncttctttatcattatcaatccttagtattttatctctttttcatgttggctttttcactnnnnnnnnnnnnnnnnnnnnnnnnnnnnnnnnnnnnnnnnnnnnnnnnnnnnnnnnnnnnnnnnnnnnnnnnnnnnnnnnnnnnnnnnnnnnnnnnnnnnnnnnnnnnnnnnnnnnnnnnnnnnnnntaacctggagatgtgggagagctggtgtagttcctgtctaaacccaaaggccttgttgcagtggccacctg

SEQ ID NO: 273631 - DNA, 419 bp, Homo Sapiens
  misc_feature (145)..(145): n is a, c, g, or t
  misc_feature (371)..(371): n is a, c, g, or t
atgaaatgccctaaaaccacaagcaaaaccaaaagaaaccccagtggacatgtgaaatatgtaaagcaaaagcttgtccaacctgcagcccaacacaaattcatcaacttgcttaaaacattatgagattttttttgcaattaanaaaaaagttatcagctatcattagtgtattttatttgtgacccaagacaattcttcttccaatgtgtcccagggaagccatccctgatctaaaggaggttacaacatctattcttcttcttcgtaatatctgggagaataaactgcatgcccactttcaccacgaagcctcatgtccgcggctgcccagctaaccgccctcttgcttgattactaagatctgatcnctacttggagaagttggataatgaagttacctgtgtgcaggtggaata

SEQ ID NO: 273632 - DNA, 343 bp, Homo Sapiens
tgctgagatcctgaccctcagaaacagaagtaataaatattgttaatttaagctcctaaattgggggcagtttgttacacagtgatagataacgaattcatactccgtaattcccctcgcacatttgtggtgtctttttaaaaataccaattctcatatacacagtggtctgtttctgatcgctctgttgtgtttctcaggtatttttgtttctgtgcccgaactgataccgttctcactgttgtggctttgcagcctatcttaatatctggcagggtcggcctttcctctttgctcttatttttaaaaactgacctaagtttgggaggatggcttgagccca

SEQ ID NO: 273633 - DNA, 1003 bp, Homo Sapiens
atagaaagtaaaaagtctcctgagctgaaaaggccacagcatgtattcttcaattcagggtcctggtaatcactggaaccacaagttcaaatgccatctagaccataaggactcttataaaacacaaaccacttcatcatcaacaaacctatttgcctactagaacttttaaagcaaggctgcaaactattcaagtaaacaaccttgtggggtggttgacatggaccgagagctaacaagagaacactggaattagcttctcagtttcaaaataggacctaaaggagtttgcgctataggagaagagttgctgcattttgtttaatggaaataaatttgtgcccatttaaatcatgagcaggtggcacttggtagcaaagaaagcctgaaaatattcacatttagtgaatgcagttgtatgtataattagctgagatttattttaaagtactctaatcttttgtactcttttctacaattcaaactggtgagaaatagagagcagcttttgaatttattatgaaagcacagctatcgtattagctgttaagaaaataaaaaatggggagggtgtcggaaaagtctctaataatatgtacattaggaacagacccaaagcaaagggctttctttccttcagagtagtgagtctgctgctgttcctgagaaatgagtgagctgcacaggaccagccagtaggagggcgatgggaagaatcaaggtgtgcattttagaagcagaaggttttttcatggaaaattccaaacatgtaccaaagactcacaatagaacaccaaatatccattactcagcatcaacagtgacaaaccatggctgattgtgtcttcaagcaaatcccagaactgtaatttcatccctaagtatttcattaggaaccatagaattttttaagctccctcattttcctgaggtcctcaaaagtcaaatgacccaactataagtagagatatgaaattgctactacaagatataattactcatc

SEQ ID NO: 273634 - DNA, 862 bp, Homo Sapiens
  misc_feature (466)..(529): n is a, c, g, or t
tcggtacgaaacaagagtctttatgaagaactgcttcaggcaagagatccagggaaatttgtgattcttcactaccattactggctcttccatggaaaagcatgaaaagatctgcttgataggttgagaagaaaacaaaacatgttatagggtgaaaaagagtagttagtatatctgtgaagtaaacttattcctactcaatccacttcctgtgggtaaataatctgacctcccagagagctgctcaacatacagcaaatcacttgtgtaaaagaaatattcaatatttttaccatgctttctatgtatacaaaataggatgttgagtgcacatgtattcacagtttaagaaagggttaaatacaaaattagctgggcgtggtggcgcacgcctatagttccagctacttgggactacacgcttgtgtgccaccacacctgcatacatatatgtatacacttgaannnnnnnnnnnnnnnnnnnnnnnnnnnnnnnnnnnnnnnnnnnnnnnnnnnnnnnnnnnnnnnnataaatattgtagcatgaaagaatataaactgtatatgtggtaaacattcttcttggccaatgcttaagtaaaatacctctactgatttttaaaaaacacagtatctcaatattgaaaagataactgtgtgattatggacaagttctttatagattgcaaaataaaacacaaaggtacacagaggtatgttgtaaaatgaaaataatcaagataagtggatacttttaccaatatatttcatcccacttttgtttttcagaaaaggttactcatacatttaagatttctctataatatctaacatagtaatttaaaaaatctgtcatcccatg

SEQ ID NO: 273635 - DNA, 725 bp, Homo Sapiens
tcgaagtttgcctgaatcgtaaaatgcaatccttctagggctggaaccgcgtctcagtgtcgagcctgctttctactgccttaaccacggtcatctttgccagtggtttaccttggcacctgggccccgagtaccttcgtcatcaaataatatttatgtcgcaagaccgctgtacccggtgactcaacaccttgcatgccacggccttaggcttggtcaagatgaattcttgtccctgggggcgctttcaagcggggagaaacttaccttcgcaaaacttaaggctatagaagatggggagagtatcttttgatgcagacgaagccctatgctccctatattctttttttgatcacacctctctatactacgtacgcgtgcaactgcagttggctcaattgtggcatttcgaaatcacatgcatcctttgtactgctgctcacttgatatgttgtctcagataatgaaaggttaggaagtgcttaaagaaagcgtttttagaaattaagaatcctcggttttgtcaagcactgatgtaattctttgcgtcaaagctaaagctcttctttatgttcgttttcagtcctcttttactgacttcattatttaagcccctaagaagtaaagtcttatcgcaattctgtgccatacaagggcacctctgttatttataatctgaaaaccctttctcctcagctctggagaaggaccaaacaggaccttta

SEQ ID NO: 273636 - DNA, 661 bp, Homo Sapiens
agaagaggtcgtctaatccacgtggctcacaaagccaattatgccattatttgtttgcactttataaggatgcatttaccaagtgggttaggagacctgtgggaaattcactgaatttcttatattaatctgtcagtgtaaatcatgggggagtgatttcgactttaaagcaagtacttcttgtatgctctgtattagagagcttagagagctgtggactgatctgagtctcaaacccgaattaatcttattctctgcacacctgcactcacacacacatccacacctaaaaaaatccccattccaaatacacaaaaccgtatttgaaaaatgactagaagtaataattaccatgtgtctcagaaggtttgtatgactagattcatatgccagctttattctcgtcctgtgtttggatattgtcgtctgacagggaaggaagctggtcttcagattgttgactgttagccccacacctaggtgagagaaaagcaggggctcagcgaagaccctgagggagctgagaatcagccctggtgaaagtgtgagggtctgtcttttagttaaacacagggtgaagcagttatatactttaaatgtatgttacaattctacaattgcaagaatgacaagaataatattgcaaactgtggtcactagc

SEQ ID NO: 273637 - DNA, 1003 bp, Homo Sapiens
  misc_feature (326)..(326): n is a, c, g, or t
  misc_feature (632)..(632): n is a, c, g, or t
ctgtgactcctctgtggacatggtggcagcagggaacccctagagagaggggccactgggaccaggcctcctgttgtggagggactcctgggacagtcctccaccctgtcctgtggtcctgtgtacagggttggcctcttcctcctcccctgccaggcctctgcccatgccccttccttccttctcctgggactggtgaagctaggcatctggaagacttcttcctagcctggaagccctgacctcggcccatctgcagaatctcccaggttccttcacagctgccgagtcctctcacgggtgcggtggaggcggccttgccgctngcgtgctttctgggcagccaggggttcctgggtgggaggactgtccctctggggacgtggcactgaagtgcctgctggcttcatgtggccctttgccctttcccagcctgagagatgctcaaaggtggggagctgggggagccacccctcggccattccctccacctccaagacaggtggcggccgggcaggcactcttaagcccacctccccctcttgttgccttcgatttcggcaaaccctgggcaggtgccaccgggaaggaatggcatccgagatgctgggcggagacgcggcgtggccganggggccttgacggcgttggcggggcctgggcacaggggcagccgcagggaggcagggatggcaaggcgtgaagccaccctggaaggaactggaccaaggtcttcagaggtgcgacagggtctggaatctgaccttactctagcaggagtttttgtagactctccctgatagtttagtttttgataaagcatgctggtaaaaccactaccctcagagagagccaaaaatacagaagaggcggagagcgcccctccaaccaggctgttattcccctggactccgtgacatctgtggaattttttagctctttaaaatctgtaatttgttgtctattttttcattctaaataaaacttcagtttgcacctaaaa

SEQ ID NO: 273638 - DNA, 729 bp, Homo Sapiens
ggcatgggctttcagacagaaggactttgtatacagtgttctaccaggtcccctgtccctagccctgtcacctgtctcttttagcatgcccaagcttgggactgccatcttatcacttcctactccagttagcacatcccccgcaattatttttgttttccataggttcacagaagtgttgaaagattcaagtatgaaaattagctatccctctccctcgaaagagctactttcatgaaacaaagtcttgcctgaatattctgggtggctaagaattagcccagacatacctcctgtggactccttttattacttccctgcctttcctagaccagctttccttagtggccagtgtagacttggctttagaatgcctgtacccgtaagagtctaacggtagccaaagttgggccccaaaggccactttctaagagctgccatctctcatacttctaatggggtggtccattgggaaggacacaggtcatgtgtgcctccaaggagctttgtagcatctatatcagtgtgaacacatagaaggagtccagggcttgggggaaccacatggcttcttagataaaggaagcccaatttaaaatgaagattaaaggagtggattacagggacacttaaaagataaaagtaattatattctgtgaaattcagcaagctgtttattgagcgcaaaccatgttcgagacgttcctaaatgaactgagttgtcaaggc

SEQ ID NO: 273639 - DNA, 696 bp, Homo Sapiens
  misc_feature (35)..(35): n is a, c, g, or t
  misc_feature (45)..(45): n is a, c, g, or t
  misc_feature (306)..(306): n is a, c, g, or t
caccagggtgttggggtttccctgtaggaaaaggnctggccaggnagaaggaggggtgaagcttcttccagctcgccttctgccccctggaaccatggcattcagatgtcaagtaaaatatatttccctagttcagctgcaaccttagggccctgtgaggctgtcattgccagagcagcaccttgggttctcctgcacctgccaggcagacgcattgtcagtgcaggctgctctcacagtgggctggccagcctgggtgggcctggcctccgctgaggagctgcaccctgctgagagactaccccnaccttccccaccggggaagagtgattcagccatgccaccaaggagaccaccaacttggtggtcagcactgaggaactgggagtgaaggcaggaaggtagacaatgggagggaccagtgggctgaggggagagggggaaatgtagctctcctgcggtgggggtgttgggagggggtatccagacacacagtcccttctgaatctccaccagggtcactttggcccccttgagtctactgaaactgacttccccctaggtaaactcagcggcctcattttctttatcctcctgagcgtttgctatcactaaccgctctttccttttgaaagccctctacttaggcgttgtcagtgctgctctccagaaaattcagtgagtccctatctcctt

SEQ ID NO: 273640 - DNA, 548 bp, Homo Sapiens
  misc_feature (397)..(405): n is a, c, g, or t
tttctcacatgctttggccccagacctactgcatccaaagtggagccttgggaatccgccttttactgagttttgcgaatagttgatcccccagtacataatgcctggattaaatgaaaacatttaagaaaaatgaggacagggaaaaggcatcatggtattccagacccaaagagaaagggagtttctatacccacagccccaggagctgtttacatttgactcagctcaagctcagaactggccgggaagggccttcagtcagtgggctgtgaacacatcttcccaagacaggaaggacttagcatgacattaaactcggaaatggtaaaggaaaatttctcatagtttcacctacaaaaaagcgaaaacttttgcatagaaaagacaacttggnnnnnnnnnctaagtttggcaaatcaatgaaaacttagggaaaaatatttgcaacatgtattaccaatcaaggtttaatgtttataataaataaacaattctcacaaatccaagagagaatactgcaaaagacatgaataaacagtccacag

SEQ ID NO: 273641 - DNA, 903 bp, Homo Sapiens
  misc_feature (284)..(316): n is a, c, g, or t
ctagcgtcacgtcggtggcgtcggcctgcgagtgagcctgcccattctgccctgtgggaccccaggcccactcaggggtcactgaggcctgagacccaggactcctccccaccctcctggcctcagactgcacccaggaggggaacactgccctcgcacggccccgaagggccaccacatttgtgccgacactgttctcccttcggtggaagagctcaagggacaaggacacgcgcccccctcccagaggcgtcccgcacctgtctgaactgttaagaaatctnnnnnnnnnnnnnnnnnnnnnnnnnnnnnnnnnacgtgggattcagagaaaggcaagggaggtaagggaggaggagcttctggggtccccagggctgtcatctgaatttgccctgggaaaccccttctctgtgacccatttctcatcacacacatggaaacccataggcccacacacaggtggtgtcactgtccctcctggtgtcaccccagagccacacatgggcatctatgggagagtgtcaaccagacagagggtcacagtgtttacactttggaccttacgatcaggcacaggtcaggggtgacacagactcatcctgaacagcatggcactccctccagcacaaacacaaggtcatggccacactgtgacacactacaccacacacagcagccaacagctacaacagcctcacttggtctgccaggcccccaccacacatcccagcccaatccaggtacgcacagacaggttttcacataaatgcagcccatttctccagaacccatttgaggggtgggggggtgttaatttatgcacttataaggtgttttctgtgtaaccattttataaagtgcttgtgtaatttatgtgaaaaaaataaataaaagctccgg

SEQ ID NO: 273642 - DNA, 524 bp, Homo Sapiens
ccaagggaagaacatctccttcaccggaggtgagggagggcatcctgaaattctgctgctattccgacaggtgttttttacaatgtggctaacacaaaccattttttgagcacctactgtgagcatgagctaataaaataaaataacttcatcttaggggctggacacactttatctgtaattcatccttgcattttccaggtgtaaaagttgaggttttgctaagttaagaaatttgccctgtatcacgtaacttggaaagcggcgaaagcaaggcttctgactccaaagccagtgctcttctttctaacagtgtggtgtttctgttcatacatggataccatctacgcgcaccttgtgaattgcacttattggattgaattttgggtactttaagagctgagttctgaaaaggagaaaggccaggtgagcgaggacagaaggctaacttagactgatatcttcattttctggcacttggccactgtagggatacatggagtagggtgaagtctttgtataca

SEQ ID NO: 273643 - DNA, 812 bp, Homo Sapiens
  misc_feature (200)..(240): n is a, c, g, or t
  misc_feature (286)..(286): n is a, c, g, or t
  misc_feature (347)..(347): n is a, c, g, or t
aaacagtgaagcagaaaggagttgagtcaagggactgtcaggccctcaggagctaacagtcttcaggggaggaggagacaagcactgacagtcacaattcagtgtaatgttgaatgttatatcgtaccagggtcagggctataaccaagggaagggtggaaagttagggaaaacaccacaaaagtgccacagaggtttgnnnnnnnnnnnnnnnnnnnnnnnnnnnnnnnnnnnnnnnnnttgtctgatagagagaaatgataaggtgagtgactcagactcttgngactggaggagctcaaaggaaaagagagaagagcatttgccagccatgaaaagttccctgnaggtaacgttggaaggatgttgactgttaagtgtggtagacataaagatgtttcagttgcaggtaacagaaaatgcgagtcaagcataggacattgcctcatgtaactgataagtcctagaggtatgtaagttttaggcacagtttgatcagagctgtggtcctgatctcagtgctgcccatattttgtgtgtgttagctttgtctccaggatacttcttcatggtcacaagatggctgcctgccacaaatagggatatggtcactttccacaatcatttttcaaagggcctgaattttgttcccgttgaactatccctgactcaatccctgtggcccaggaattccgtctactgactgatgtaggcctggattatatgatgcaatcattgtggtgaaaaaaaggaccctctggagttgggagtgaggtcatttcacataaaccacatgacttccacataatact

SEQ ID NO: 273644 - DNA, 559 bp, Homo Sapiens
  misc_feature (264)..(292): n is a, c, g, or t
ctttccgttgaaatgtgttatggatggaggggtgggcattttttaatcctctataccaaggattgtaaactatgggccaaatcaggcccgcccacctgtttttgtaaatgtggaacatagccgcacacattcacttacagttatctgtggctgttttcacattcagagttgggtggtatgacagagactgtgtggctcttaacagaaaaagtgtgctaacctgtgttctctactgttcattgttgttgttgttgttgctgttcnnnnnnnnnnnnnnnnnnnnnnnnnnnnnccctgctttctgcattcttaaaatagcctttcacggccccccattagtttcatttgagtcttgccctcaacgtgtttctcgtaagctgtaaactgggtaaatatagccattccctaaaaagagtggagccctcctgggacaggacacagcagcatcttcggaggttgcaggggttatgaccatgtcacatctttgtccctttcttctgtcacagggaacaagtattaccatggagctcactgctttctatcataacaacacacccaa

SEQ ID NO: 273645 - DNA, 719 bp, Homo Sapiens
  misc_feature (19)..(19): n is a, c, g, or t
gtggccgcgggccttcccnacccgcccttccgccggggccgccactatctggggttgttgaggaggatctccagccagcaggggcaggaggtgatgaactgccgggagtagcagggcccccagcccttggcgaagctgatgcggacgctgttggggtcgtaggggccgtcggcggcgtcgggctcgggcgcgtgctgcaggcccgagcgctcgaagtcgaacaccttgatggagtagccggggggcaccttgcgcacgaccagggcgcggccgccgggcgcgtccagcgtcggggagttgacgaagatggggtgctcgccgcggttgtaggcccacacgccgtcgggctccttgctgagcaggatgccgaagccgatcttgctgcgcgttcgccgcaccgactcgctgcgctgctccaggttgagctggcccaggcagaagccgctgccctgaggtaggtcgtagaagatgctgacggcctggtcgtacaccgcatagaggcggcccacgcgcgtccggtgctcccagtacgccacgctgcaccagtggctcggcttggtggcgtccgggagacatgctggcgtctgagaattcacccggagcagtgatgagggagttggtagcctccgtttcagtgtaagacaatgtggaatcggacagatccagtggcttgtactcgtcgcgaggagacagccgagagtagggaggtggcggagatt

SEQ ID NO: 273646 - DNA, 482 bp, Homo Sapiens
gaattggcagaaaagaaaagatttaattggggcactgtatagtttgcatttaactagtaagcaagctgagtaaggacacattctgtatttctatttctaccctggatactgcattgcaggttaacagtgataattccattctaagactttattcatcttctaaaataaaaatgaagatttatatcatgaacttagctgtgatttgtattccagtttaatgggctttaccctaatcactagtgtgattttgtgtctatgaaaaacaaagtattgaaagttagtgttcctgtacaaagagtaatatcacatttgcaacatttagaacctttgtatgtgtggattaataatatcttacatttgatacagttctatatattattttcatggaaactaagtagatatggccggtggtgttttactcatttggcagttaaactttagctgctaaagaaacaagaaacagcctgggcagagtggcttat

SEQ ID NO: 273647 - DNA, 305 bp, Homo Sapiens
ctatactatctctttcaactctctcaataacttacaaatgaagaaactagggcttacagaggttaagggttaagtaggggcacatggtaggaaatcagaattctaacctacatctatgcaaccccgacatctgtgctccttccattccattaaaaacatgtaggctgcaaaaaaccacaggccctcaacaaatcttcctttccaaaagagttcccaagagaagaaaagccacaagatagataaaagaaatagaagatacaaaaggaaatctatagaaattcaattagcattctgacctagaagca

SEQ ID NO: 273648 - DNA, 1037 bp, Homo Sapiens
  misc_feature (196)..(196): n is a, c, g, or t
ctatatttatattttacataagtttttaaaatccgatacagtcaatatttgtttattaaaattatatgatggaccatataatataccaggctgaggaggaccaagcgtatcaataccccaaggaagcacgtccatgtgggtaatgttaaggatacctatatgtcaggccctaaccaaaggaggtttgtggaacttngagagatccaggaggtaacaccaaaaagctgcatttagcaatgcctgcctagccctcctgtacagctcatgttattttgttgccttaggccaccttacaccaaaccattcctatctccatgcttttgtttatgctgttgcctccttttagaagggccacgctccaccgctctgctgtgttgatactaccgacccttcctttagttcctgttcaattccccaagccttctgccaagccttcttggacattcccatcccatgctgactattccttaagctaaaacccttagagttaatatgatacacttggctacctcattgtttcatatcagtcattcctgtctctagctataatcggctcagccaaggaagatatatttatatggacaatgtctttgtgccttggctgtaaacagtgttgaataattaatctcacttgatgaggtcttacttaatgatagcctccaattattcaccaagacgaggggcaacgatgcttgtccattgtctgtgcaggctagactggaggaaagggccttggggaggaacttaaggtagatgggaatttgctgatggaaatgttatttacttgatcaaattttccactggcattggtacatacttccctaaagagggttaaaaataagaaaggccctcctgggagtcaggagaagtgatgagatgtgctgtagctaggcccttcctttgtgaaatggagtttatgctatagccagatgtcacaatgctcaacaaatgactgaagtccatcgtaaacaacaccaaaaacaacgaaatgcatttattttaaaactactattttgaaaaaacacagtccctatggc

SEQ ID NO: 273649 - DNA, 886 bp, Homo Sapiens
  misc_feature (738)..(738): n is a, c, g, or t
ctacttaaagtttaaggactgctttaatactccatgtttaattgttaattgagaatttaaaaatcaaaaatgccaactttgccttcgatgagatggaaaattatgctgctgtagaaggtaacataatgtaaaacagccaacattaccaaggcacacaaatgtttttggtatgtaaaattgctttgtaaaatatttgctccatctgctgaaagcggcaaagacaattttccctcgatagctaatggcccatttcggctgtgtggcaagtgattcgctgtggtggcggctctcattaaacagaatggtgaaaatgcggtatataattccatacttatgtagcattatccactcgctgcttctcgaggagtctgtccctcattatctaggcctccaccttgcaccaacatgcaggcctagcagttgatttgactcgagaagcgttttgtccaactgaggcacatatgttgtgcctccattccaaagctcagaacaactgctttgcccccgaccacaaacactagagaggttcattccctttcaactttccagcacttaaattgctgtatcttttttcctctcaccacagggggctgtggttttctttctaggctcaccctgtgcgcgctgcatgctgggggtttcaatagataaagattaaatgcttcttgaaattcttaattgaaatttgcacatacacaaaggcaggaaaatttttccctgggacaaaattgccgatcnatcaaagccccgacaagccctgtccttggttcatggtgtatgtgagggcctgcgatccttttctttcagggagttgtttacactactcccagaattacttcaacatctgctaaaggaacaattaaagataaataatccagggtggttt

SEQ ID NO: 273650 - DNA, 315 bp, Homo Sapiens
  misc_feature (239)..(239): n is a, c, g, or t
cttgcctagtatatcagtgaacagagccaggatggagaggccagtcagctgagcccaagtcttgagacaccccattcctactgaggctgcctcttcactcagcactgctgctgtgcccctgtttggaaccctttctgcacttggcttttctaacagtgagctctactgagtcttctacttacgcctctaaccactgcttctgtgtttccttatcagccccagggccgatggcctcgagnagtagaagaaggagtaggctttgatagctgagcccccaaaggtaaatcaaatttaactttgttatgctaaggctat

SEQ ID NO: 273651 - DNA, 807 bp, Homo Sapiens
  misc_feature (154)..(154): n is a, c, g, or t
aaacctcccacacctcaggcgtctggaagcctttccttactgtgttttctaattacttccccaaagtggaactttcctaagtcaaattgcaataagggtctgtctcttctcctttcagatccctggaacatcatctgtagttcagagaaaatgngaagcccctgcagcctgtttcacagcctcgagggccaggacagccaacgaagtcccggatgagcgctgtggcggctgaaataaagcagatccgagccagaaggaaaacaagcccggatgttgatggttgtgcttttggtatttgcaatttgctatctaccaattagcattctcaatgtgctaaagagagtatttggggatgtttgcccatactgaagacagagagactgtgtatgcctggtttaccttttcacactggcttgtatatgccaatagtgctgcgaatccaattatttataattttctcagtggaaaatttcggagaggaatttaaagctgcgttttcttgctgttgccttggagttcaccatcgccaggaggatcggctcaccaggggacgaactagcacagagagcccggaagtccttgaccactcaaatcagcaactttgataacatatcaaaactttctgagcaagttgtgctcactagcataagcacactcccagcagccaatggagcaggaccacttcaaaactggtagaatatttattcatatgacaaggatacctgagtaaaactatccttttttaaaatcactggggaacagaaattttattatcctatgatgtgaagctaaaattacttgtggatc

SEQ ID NO: 273652 - DNA, 780 bp, Homo Sapiens
  misc_feature (42)..(53): n is a, c, g, or t
tgctatagtggcacagatatctttcattctttttagatgacnnnnnnnnnnnnaagcacagtctctccactacctctctttccctaactccctaatctttaacacattggagagaatttaagccagggacaagcactcacacaagtgacatccctaccctgacaggcctgcttgggtggcaggtctactcgtcagtcccaggctgggcatttcctgacagaggtccaggtccggcagacagcaaggcacaggaagtgtcctgctgtgctcactgactgcgtgggctggcgggggtggggggctgcaaatatccatgtcggacctgagcagtctcaggcttgcaagctccaggcagggaggctgagaactggctttcagcctggggaggagtttggaggattcgggagggagaggtttgtggggttggtggtggcgagagaagaggacaggaggaaggagagtgtgaagggaggcaaggggctgtgggcagaggggaaaggaaggtggcctcgggtgaggggatactcagagactactcagcttgccttggccaggcccctctgcagataagtgtggctggggtggtggtatgcagggctgtgtgggctcccagctgactggctgcgtctgtagcagccccactattcctgccctgggcctcaaaccaggagcgtcccaggccttaggtcagctaaccaaggcccgacattgctggcaggggtctgcaggggtttctgtggatactttgacatttttcacaataaacatcctctgttttga

SEQ ID NO: 273653 - DNA, 680 bp, Homo Sapiens
ggaacgaatatctcaggctacggttattgtttcctcttttcaagaatgtttcagcaaggcccagaaactgaagtgcctccatcgtagggttcctggcatcctgattagtcacaccttgaaacagtcataatcagaatttagtgagcgttttctaggctccagacactgtctttagaattttgtgtaatactcccaaagattctataaaacaaatactgctccccatttttaagcattaagaaccgaagttcagagtggttaagaaacgcacccaggggcacatggcatggagagtaaatggcagaatcagaatgtggacacaaatttgtttgggtctgaatcctgtgttcttttcattgtatcgagtgtctggcctccttggggagggaggagaactgggctccatttgttacaagtgaatagatctagagatgttattggagcaggagtctgggtggtggagattggaacatgaaacagtgaagcagctcgccttgcagcctctagcagacagcacatgcagagtatgtggaccaattcatagcttctaactttcatccttagttgtgtaacctctttgtgatattaaaatagtatcttaaattcccatcccattcacctctcttatggctgctgtccaaatcctattatttaggaacttaataatttaaaatagcttg

SEQ ID NO: 273654 - DNA, 714 bp, Homo Sapiens
  misc_feature (315)..(315): n is a, c, g, or t
  misc_feature (445)..(445): n is a, c, g, or t
  misc_feature (628)..(628): n is a, c, g, or t
tagtggagtcccccaccccacactcctggtggcaggcccgccttggcacgcatccaggcctcgcaccacttctggtcctacctcctaccatctgccatctttccttccttcttaacctgtgaccttttcccatacaacttcttatgggtgacaaggcaacaatggaggggttttgagatctgccctcacaagtcaattgctcaggacattctaatatgcagctcttctagagaggcaggctgctaggaaaacccaggctcagccactaaccacgctcacgtgtgcatggtcggtcaccctgcctccctcacacangatcctgctctgtcccaggctcccatgtggggagactgagacccaaacccctcagtcacggcagctctctcaccagcaccactgtgtgtgcacattaagagctccataaaggccagttatggtggccagncttgttattcctgagttgttttcttcaaaagcacacagagacatgatgttatatgataaaaatagaagttctaataaaatcccagattttaagaaaattttgggatttcgttcaaatcacatttagagagccctaaatctatagggcaccttctgagtttgctgttttagaggcctggcctanagcactgttcactcggcccaggttcaggaaatgtcacctgagtaaaaagcactatactaatgcatgtggggaggaaggctcagtgg

SEQ ID NO: 273655 - DNA, 599 bp, Homo Sapiens
  misc_feature (215)..(215): n is a, c, g, or t
  misc_feature (441)..(451): n is a, c, g, or t
tagattccttctggccagaaaactatcattcctggtccacagtcctggtgttttggtaaatgtttaaaataaaagttcaagtctctgaaactcccctagaaaatgtggcatctggtggcatcggtgacttcacatgacccacggccccatggttcagaaaagccttccttgtagcaacgttttctccacacttacccccaccctggtggtggggnggggcacttgctctcaaccctgcccagtcaccttggcaaagaaatatggaccagtggtgtacagcccgtcttccagttcatagtaaagcattgccctctctgagtaacctaaaaagtaagggaaaggaaaagagaatgaagaagtagaataaatctacagtgcttctgttttggagactctcttaatacaattcaaagtagttatcatattgcccaagtctctcannnnnnnnnnnaaataggcacagtaaagccatcccaatttagatgtttgatgaggctcttcaggttttgcaagtctgtagctcgtgttctgctgtcaaatataaatcctgctaggataggaacagctaagactcggtaatttactttcatttgtatgct

SEQ ID NO: 273656 - DNA, 866 bp, Homo Sapiens
  misc_feature (104)..(126): n is a, c, g, or t
  misc_feature (851)..(851): n is a, c, g, or t
tggtaaaggtgaattaaggtggagactctcataagagatagcaaagacaaataaattaatatcaatttcagggcagcactggtgcctgcaaaaggctcaggaannnnnnnnnnnnnnnnnnnnnnncgcgcgcgcgcgcgtgcatgcacactcgtgctgggtggggaagaaatgttagatccacgtaacttactggaaatctccatttaatttcactgaattttgtaaactttcgatcataaataccctgatctgctatccctcacccccagccctctcacagacaccctcacatgcatgaaatgaactgagtatgcactacactattttttaatttgacagcaccattaaccatcattagttctgtttttaagcatgtaacattttattaaggcagtcatttaaacttggtgtagtgggaaattttagacataaattgtttgttttgatggcaagaagactgcataacacggagtgagtctgtgctaactgtacgacactcatggccaaggaacaaagctgggagtgatccaaggctttaaatttgaatatatttaacaccccatactttgctgagtttagagggcagactgtctgctatctttacaatttgcacttgcatttccccctatctttacacagaacctttaagctaagatttagttccctgaaagaatggaaagagatgtattaagattatggggttctcagcagagctggttggcccctttaatattaactgacttatggtaaatgtgattcatctatgaaaatagtggctataaatagatgttaatagcgctcagttgcagaacagccaggttgtgctcacatggccagattaggggaanaaatcctgttgggta

SEQ ID NO: 273657 - DNA, 755 bp, Homo Sapiens
gagcacacagagaagttggcagaaaggatcagcttaatcagagaaaccatttatgggaggatgtggtatttcacttcagacttctccagaggtgacactgcgtacaccaagctagctctggatcggcacactgacactacctattttcaagagccctgtggcattcaagtgtttcattgtcttaaacatgaaggaactggtggcaggacactgctagtagatggattctatgcagcagaacaggtacttcaaaaggcacctgaggaatttgaactcctcagtaaagtgccattgaagcatgaatatattgaagatgttggagaatgtcacaaccacatgattgggattgggccagtcttaaatatctacccatggaataaagagctgtatttgatcaggtacaacaactatgaccgggctgtcatcaataccgttccttatgatgtcgtccatcgctggtatacagcacaccggactctaacgatagagttgaggagacctgagaatgagttttgggtcaaactaaagcctggcagggtcctatttatagacaactggcgtgtcctacatggcagggaatgcttccactgtaccgccaactgtgtggctgctatttaacaagagatgatgtattaaacactgctcgcctcttggggcttcaggcttaaaattgacagcatctggattatgaatacacctggcaccctggctaccagaatttcatatgggcagaataatattgtgtcaaactctaa

SEQ ID NO: 273658 - DNA, 664 bp, Homo Sapiens
  misc_feature (292)..(469): n is a, c, g, or t
tttccatgagcagttcagtggaatgaggtttgtttgataaacactgccctcctgtggttaacgtaagctaacagttttgcaaaactactgtagtcatttccgcttgtggtaagataatgtaatggttcatacagcatgtttgctcagtaatatatgtggccaagaaagggtttttttccctcattctctccctcttggttttttcctagtgtgtctgcacattcttctcatttctatccatgcacattttctttctttttttggtgggggaggcagagtctcattgtgtcannnnnnnnnnnnnnnnnnnnnnnnnnnnnnnnnnnnnnnnnnnnnnnnnnnnnnnnnnnnnnnnnnnnnnnnnnnnnnnnnnnnnnnnnnnnnnnnnnnnnnnnnnnnnnnnnnnnnnnnnnnnnnnnnnnnnnnnnnnnnnnnnnnnnnnnnnnnnnnnnnnnnnnnnnnnnnnnnnatgactgagcccggcccatgcactttttcttatgtgaattataagagttaaatgtaaacgaatacagaaaaagtattaagctatcaaagggagggaagctacatttaagtgtaaacatgcttaaagaaatagaaaagaccagtcagttacaatacataaaattaataaaaactttaatggaaaatcaatagtgat

SEQ ID NO: 273659 - DNA, 722 bp, Homo Sapiens
  misc_feature (544)..(544): n is a, c, g, or t
cacatgagtgaagcatacatccattgtccatggggcaagaaacatgaggatgaaaagccaatatgttaaggacatgaagtgaaaagcgggaagagcttcttattcatgttatcactgagcagcgggaactgggggctctgctcattatagttgcccacgtcctccagtcaatgaaatttccggccaatgaaatgctctactgtgactgaagcagcaaagagaagatgttctgccggaggcctcatccagattgtgatgcactgggagcaagccaccatgaacatatcctcaggtctccatgtcttctgccatcgcatgaaaaatggagcttgtcaaacacagagcagagctgaactttctgaattccacaggacagttcagagtgcttggaatgacacccacctgcaatttaaacaaaaaagaaggatgatttgctgctacatttgtgtgggaagtgctgcttgccgatagggaagtaggagaggaaataaggaaaacaataaaccaagtacagttttgcaaatacccagacacattggatggnacacagaagctttcactgggagattattgaagggtagatgcttggtgtctccattgcctcctgtgatgtgacctcacattacaagccactgtggttggaactgctggcaaaatggaaagaaccaggaagaacatcaaaggagagttttaaaaggatatgaaatgtattaatttgtcgt

SEQ ID NO: 273660 - DNA, 204 bp, Homo Sapiens
ctccaacagcgatcagtagccctaagtacaaagaagccagatttagccttctgttgtttggcaaaacctcactcagagctttactccctcagacctttctgagtttaaccacagacatgatctttgctgtgctgagaaacttgtgtctacctggcctgtagggagtgtaaactagattaatacagattaacagactctgaactt

SEQ ID NO: 273661 - DNA, 431 bp, Homo Sapiens
ctctgtgatacccacatatgtctgttccagaggtcctgtcttagaagctttagtggccagggcatccgaaacattgagatgacccaagaggatgtccgactcattggtctcagtgccaccctacccaactatgaagatgtagccacctttctacgtgttgaccctgccaaggtcctcattttactttgacaacagcttccgtccagtgcctctggaacagacatatgtgggtatcacagagaaaaaagctatcaagcgtttccagatcatgaatgaaatcgtctatgaaaaaatcatggaacatgctggaaaaaatcaggtgctggtgtttgtccactcccggaaggagactggaaaaacagccagggccatccgggacatgtgcctagaaaaggacactctgggtctgtttctgagggagggctcagctc

SEQ ID NO: 273662 - DNA, 761 bp, Homo Sapiens
ctttatgaatgtgtattgggtgatattatttctgattttccatggcaatttcagatgttttattgttcttaattattaactactcattttgattagtagtttgcctttcatgacagtacaaatttagtattgaaaccttgtttattcagttgatctcatgtatataaatatacatatgtatgttatttgactacggtgccttgtcaaagtatgagagcgtttttataaatgaacctgtactgtatatgtaattatgtctgtactgttcagtaattaatgtcatagatctggagttgggacatcctaccttctggcctgctctgttctctactgtaggaggccgatcctggcaaataacatttctcaggctcctttgccagcaggcttttggctcggtttggcaaatggggaagcacacgtggaagacaggagggcggaaagaggggaagagccggggtatttcctcctctctttttctgccttgagaggggtctccactactgttcagatagcttatatcagataactcataatttggttcagtgattaacaaaaaaatcttttttactactataacatgggcaaatttcttcatagaagcatttttattcttgttctttcctgaccataaatatgaatgcctagctttgcacattgtagttatatagattatctaatctcattgatttatgacaggttgttttacatttgcaaatggttgctgtaagtaatacgcagaggaggaagaagctagcttgtga

SEQ ID NO: 273663 - DNA, 391 bp, Homo Sapiens
cgactctgaagtgattcacagagcatctcccatgccaaagcattgtgttgcaatatcagtagcaacactcttagatatacaaccagtcactggacgaggcacttgtcatttaagcctcacagaagtcaggaattggatattaagcaaagatgtttgtttttcatagttcctaaaaagtgccaatcattatgaaagttcaatggatggcgcacggggacaggcatcagatgactgctcccagcactgcatcgtgaggttgtgtgccttcagaaaaccacatgttatctgcggctcagttttgtaatgccacatttaacaaggatgttgactggaaaacaatattcagaagagaccaaccagggaggataatgacgtcaaactatgtcactta

SEQ ID NO: 273664 - DNA, 500 bp, Homo Sapiens
  misc_feature (283)..(283): n is a, c, g, or t
tgacccattcataacacctggggctcctgtccacaggaggctcatcactgctcttcctctggctgaggaggtcccacctgccccgcattatccccaagacctagtcttcccggggcaatggtgagcacattacctggggcagagatttgatctaaaccataaaccatttcccagaatgaactgcacccgtgtgccgaagcttcaaatcaaatgttctgctgtctgtatcctgccattctttctgagaatttggtgtcacaggattgctttgtcacaaaacaantgtcaacttaccacaaactgcattttgcattttgtcatgaccgtacttttcttacttataaggatcataattgccatcatttacaaagtgcttaccatgtagcaggtgttttacatacattgtgttatattattttatccttacaactctgcaagtcatgtatttccccctttttatagatgaagggactgagatttagagagataaataacatgcc

SEQ ID NO: 273665 - DNA, 742 bp, Homo Sapiens
cagatttgcacagcgagtggcactcataaagaatgaagctgttcttaatgaagaaattaaccccagattagtgattaaacgcctacaaaaggaaatccaggaactgaaggatgaactggccatggtcactggggagcagaggacagaggcactcacagaagcagagctccttcagctggaaaaactaataacatcctttttggaagaccaggattcagacagtagattagaggttggcgcggatatgcgtaaagttcatcactgttttcatcatttaaagaaactattgaatgacaagaagatccttgaaaacaatacagtctcctctgaaagcaaagaccaagattgtcaagaaccattaaaagaagaagaatatagaaagctacgagatattctgaaacagagagataacgaaatcagtatccttttctgaaagtgatgaagaaacttcctctatcctggtttgaaaggggtaaacagcaagtcttttcctgagccacatggctgagctccccacccagcttccatttcacattgcttctttccattgagaagtcaaaggtcccttcagcaaaagtattgcaaccagtgaaaaaagagtttctataaaagaaaaaaatgtgtttgtttttatcctgacatagttactcttgcagggaacattttagtttatttcaaagtatgagcctttttacaccatcttttaacattaattttttaaaatatattttttggctcctca

SEQ ID NO: 273666 - DNA, 581 bp, Homo Sapiens
aacctcccagacttgccatcatggtgaactttactgctgaggaaaagaccctcatcaatggcctgtggagtaaggtcaatgttgaagaggttggtggtgaagccttgggaaggcttcttgttgtgtacccatggacccatagattttttgacagctttgggaacttgtcctctgcttctgccataatgggcaacccaagcgtcaaaacccatggcaagaaggtgctgactgcttttggagagtccattaagaatctagacaacctcaagtctgccttggccaagctcagtgaactgcactgtgacaagctacatgtggatcctgagaacttcaaactcttgggtaatgtgctggtgatggttttggctagtcacttcggcaatgaattcacagctgagatgcaggatgcctggcagaagctggtggctggggtggccactgcgctgtcccacaagtaccactgagccctctctctagctgtccagcaatcctgtgtgtccgctatgcctcctttctgcacatgaatactggactgttccttgaaagcacatcatgtttaataaagatcatccttcctggta

SEQ ID NO: 273667 - DNA, 834 bp, Homo Sapiens
aaaaataagaattataaccagaaaggcttacagcaattaaaagggaaaaactaatgtctctaccataaactattagacttccattgtagttattgccctaatgtaggtatctagacccatacatttgacagtttaaagaccaaagttctcagaaatgttttctctttcctaacctgtattttaaaataagttaacattgctagaaggagttacaaaagcaccagtcaatgcacccatagatccaatcccttccttctttttattgtctatgtccacatttttggacaatgtcttttcaccatgtgcagagtgaccagctttaccccttagctctatgtgcgcttggtcaaggactgaagtagaagtaaataatatacccgttctaagcctaggcttttggaggtgatttatgggtaggtttctatttgcaagtgtgtgtccctcgcattatcttgaggacgtgcctaggctgttctgctgtcctggatggagcatttgagatgcatgatgaaggactgagttaaaccagctgcccagcatagataagctgagtagaataacttaatttttttcattaagtttattttccaattaacaaaaagaacatctgtagcaatgcttttggctttgttagctgtagcaaacttgctggtttatgcaaaagtgtaaaagtgtgacacacatagatccagctaaacaataagaagaaactggtatttatatacacaagtatatttatatacataaaccatcacattgagtagtttgatctcttttccctacaggaagacatataatcagctttctttgttctgatacaaccattcaaaaaaa

SEQ ID NO: 273668 - DNA, 445 bp, Homo Sapiens
  misc_feature (14)..(14): n is a, c, g, or t
  misc_feature (96)..(97): n is a, c, g, or t
cacctccagcagcncagagtccccctccatcttgacttccacctggtgccatctcccatcatccagccgtggtccagcacccaccgtaagctgggnncagtgattgtgcaattggatctcaaggcctgccgtctcgaagtccccagcataaaccagtcatccttaagggttggtatcccccataaaaaatcaactccctctgggtccccaggttcgaacctcaaaggaggaggaggtttttgtgatcttggtgaggtcaaaggtcatgacagcgataggctcttgtcctgggccattgctgaggtggacagccggagggtcgtgggcactctgggtggggagaacaggtctcagggcccatccctggcgggtgtgacgcagtagtagcaacagcagcaacagcagcaggcgcgagggtagccagtgggcctctgctctccataat

SEQ ID NO: 273669 - DNA, 454 bp, Homo Sapiens
cggtattctcgggctactgctgcttcttggtggcaagcccctgtgcaccctgctccttgcctctggcgcggcagcctgtcgtgcctgcttcctgccctgtgaacagcaggtccgtgcttcctggagccaaggaagacttcggggtttccctgtgaaaggccctgtctccccaagcctggcgtcctctgaggctttggagagcccgggagagacggcacattgtccaagcacacagagatcacgtgcttcttccaaatggacaggactcagttattttctgtcaaacacaaagatgcaagtatgctcactataaaaggcccaagcaatagacaagcgcagaaaatggaaagtgtgtcaggagaccattcccattgagcccacttcccagataatcgttaatgacaatttgatgcacgtggtggttccagtctcaagcatatgtgcatctataaac

SEQ ID NO: 273670 - DNA, 644 bp, Homo Sapiens
  misc_feature (572)..(582): n is a, c, g, or t
aggatagagaagctcatgttcacctaggcagcactggccagggtgcccagaatggtgtttgttgcctccatagagggaaacaagcctacagttaagagctgctctggtcccacacagcacatcttcaaagcaagactcaaaaggatcaaaccatttccttgttttctgagaataaaagcagttgtacctcttccttttcactctcagaaaatctgatagaatctataaaagagccctaaggctggagacactgtattttccagggagccaactccttgccccagacactagtcaattgccccagcactttcttcactgatcattagaggaaaaaagctcatgttagatttaaaaatcaggaaaaaaatttaacactaaacttgcaaatattatgtggtgtatattacagttacacatttactatgtaagtgcaactgtaaaactgaggaagtattccaaaatgttgacagtagttaatcctgaatgacagaacccaattgattttcattttcttccatttcctaaattgtcttcaatttccttgtactccttgaatatctgaattctagaannnnnnnnnnntgcaacccaagcacaacaagaatattgggaggtgccccagctgcaaataaactcagacttgg

SEQ ID NO: 273671 - DNA, 494 bp, Homo Sapiens
  misc_feature (352)..(352): n is a, c, g, or t
  misc_feature (404)..(404): n is a, c, g, or t
  misc_feature (413)..(413): n is a, c, g, or t
ttgacccactggagagtgagaaatttaacccaaacaagttgacgtacattcttgccgtccactccactgctctgggaaattctcccctggcccttccattaaagccacgtgataacccatgagatgttaccatgactgtggggcccgcattggtcaaaatggaggacataatcaatctggtgtaagcgacctaaaattgccttgtccctcttgcatctggcccttgcttacagaagggctgggtatgagtagggtatcattggtaaacaggtgaaaatagctcccgaaataggaaacatacaattttgtcctggtggaaggagagcaacaatgctagtaccctagggaagtnggggagtgcattacaccttgggaaaattctggggacagggaacattaatgantccttgtcnatttcagaacccacccctagagccttcctcagggatgaaaaagccctggtgtggttctcccagatttttgcaagggactga

SEQ ID NO: 273672 - DNA, 926 bp, Homo Sapiens
aagcaccatgagcttcaataccctgaaatatcttcacacaggacatatcttccttggatggttcacccttgttaattgtggcaacttatttttgaaataacactctaccctcaaaaagaaagcagaatacccccatcataccccagaatgatctaagtgtacactacatgaatttctctgagtctgtttttaaaaattcactttaaaaaaagactggattagcccctgaatatggtgctttctaaagacagtacgggaacaaaaaatagcaagaccccagatagtaaaacaaacagctcaagattaaaattcctagagcaaacaggttaagccaggatgccattatacacactgagcctgggatgatgtctcctccaccgtggggccaagaggctgtcatttttcccccagcaagatcagatttccttccctcccgaccgcctctctgagcatcatggccaacatctctagtgtgctattaatatcaatgaagagacgattcgatttccacagaagaaaacctttcctattccggcacagaccttcggggaggaccctggcccgggtatagacaatacagcggcagagtttctgttttcttacagttcagcttagcactgtttgaggctttagcaacatggcacgatactgcggatagttacaaacagatttgttaggacaagatataagctgctcctcccgtgtctttaatcgctagtctacggcttcttggggcgaatagcacatctaggcgctgctggcattagtgcgcgagtgatagcggcaagtttggcctaggcgaccctctttatagaatcgctgtcgctccttgtgggattgggggttctagattgttggaacgtcctcgtcccgcggcgggtggaccctatggcgcaaacaccttgggcgggttattggccagctgc

SEQ ID NO: 273673 - DNA, 722 bp, Homo Sapiens
aataaatacaactccagtttccatgtccataacagggaagcggttccacgcattggcccggggagggcaagctcccagctccctgcagctgggcaggaggacacgagagggcgccacggccttgggtggccactgctgggtggatcccactggacagtggcacccacgggctgggctgggctgggcgggcctggggaatcatggccgctggctttgcagcctggtcctggagtgtgcccccagccctgcatgtgcttctgctgatccgtcactgtgtggtcacaccccaagtacattcgatggggtgggagccttgaggctgcggctgctgaaagggctgcagagctaaagcctgtggctgggtgaagcctgggtctgtcacctgctttgtaaaatgcactgcacttctcttcatgtcactctgaaaccagccatgacttgagcccatattttgggcttcacgtcagtggcatgtttgacacttgacatacaaaccctggcgcaaagcccattccacgccaccaaagcggcagcctgttgtagacttcgccggtgtgttcgtgtttatatttggttctttgcttgctcactcaagagctggatgttcgaaaaagtcttccttctctatattttagagtgggagtaaaatgtggatggggtggggtttccctccaaatacatacttttaatgtcttttaaaataaaattaagtgtctgatttt

SEQ ID NO: 273674 - DNA, 935 bp, Homo Sapiens
tgtgaccagtgagtggcagaaccaggattcaaactcagccagtctgcatactcaacctctacactctactgcctcctttgaaacaccctttttttcttaagatactgtaaggaagagctttttcttctccagctttggagtggtgccaccgtagaaagagaatgagttttctattattgaagacgctgaaatgaagagtggatagcatcctggttggagatattagagggccaggaggttcaggaccaggggctgtggattatcattttatgaagccttgcactgagtttgctttagcacatcacagtgggttaggtctgaagtggatctggcctttaaggtgctgggggacacattttgagtaaggagaagacaagcaggagctgctcaggcagtctgcatctgcagccaaaaaaactcaacataactggcatgtctttagtatctgggacatagtatgctcatagcacctcatggatcatctcacttaatcatcccagcaactctttaagggtaggccaagcagtgcaatgccacccctgttgtgaggatgaatcatctgatttttggagaggttgagcaactggtaggtggcacagccgggttctcgcactgcaaaaccacaggcccctttggtggacagagattccgaggattggatagtccattgggtccatggcccattaccagaatcacgtgagaggcatgtaaaatgcagattcctgggctccaccccaatcacaggagtaccacagcaatcaccaaactataactgagctcccaatttttgtacagtcatgagctaagaattatttgtacatataaacgttgcagtcaatttgatggtatggaacactctttgaatcccaatgacttgaaatgttattctcccaaaaaataagaaatccacttgtctcgttaacagatctcgttac

SEQ ID NO: 273675 - DNA, 770 bp, Homo Sapiens
gagactgcatagggctcgggatatgtcagtgaaggagatttctgccctcagggagctaatgttctcaaagacattagggaggcagatagcaaacacgtgaccacagagtatgttagccggtgagaggtgctctgtgggctgagggagttgcaagtttccttatggtggacaggacaggcctaacagaggaaatggctattgtgcgaagatctggagttggtgagagttggctgtgaggatgcccggcggaggagcctagcagtcagagggactggccagggcagagctcctgaggctgggcgtcttcagcctgctcaaaggacagcaaggagggctggatggctggagcagagtgagctgtggggacaaatgtgagatgaggttagagaggaaatgagcaaccaaggtcacatggggccctgcaggctggcgtgaggactttacctttactctgtgggaaagggagagcaggctttccagcagagtcacacttgagatgatcatcgggctgcgttgcatgtagggagccaggcacttggtgcctgggagactgcctggaaggtcgctgtgatcctttaggtgagaagtgagggtggcttagacctgggcggcagccatgactgagtaagaagtgatctttccttgtcttctgccctttcctgtctttcccttgctttatttattaatctttaatgtgttgagcactactgtggtggcaggcataacggtacatctgtgaatatctgggtggacaaaactaacattgtgct

SEQ ID NO: 273676 - DNA, 576 bp, Homo Sapiens
ccagtgcttatccttattcgctcctgctcacttttcctccctcaaagttatttttgcattttcttttgtctggtgtccagtaacttgtggggcagtgggaaccaaattgcattttaagatcttttttatgagatgttctcagcaggcatcttcaaggccccaaattctctttttgtcccccactgtgaaaaactgattggcatctggtgatgggcagcgcacgggtgcctggcgcttgcaggaagccccacaggaggtgcacagagccatggtggatgaagtgtggccaagccagcacaaggtgggggaccagatgtcgcccgattatgttccattgaaatccaaacaaagccccagattcaggatcatttccttgagactccccagttggaaattggcactcagccagaatctcacaacagctggtctccccatgctaggatttatgtgccttaccaaaaactttacctgcgtgttattgattggtttctgtaaagcaatgaaacaatattttgaagacccaaagcatactgctctctgctgaaaataaaaagaccatatatcactgaacacacc

SEQ ID NO: 273677 - DNA, 596 bp, Homo Sapiens
  misc_feature (146)..(146): n is a, c, g, or t
aattctgggagattaggaaaaaagcttctgaaatgaaggttatttcagaagtaatttttatgggagagcttccagaattcttagcctcagtaatgataatggctaacattttggagcagctaccatctgccaggcttggcagtgcntaagtgcattgtcccttttaatcctcgcatgaactctttggaataggtactataggtgctgagcctggctcttcagaacaataagcatcctgacaaatgactggtcccctgaagacagtaccaggtcttattctttgcacttggccggagactagccagatgctgaggtgtgctcagtaaatggggatcatggctgagaggcccttgcaggaagctagaacctcacacacttcctctggttccagagcaggggtgtgtagaatctgtagggagacactggtgggtgttttcacaggagactgtagtgcccaagcagctttaaaagggctaagggaattttctgggatgctctacgcttatgtgggagctgactttgctttgggccaaaaatctgtgggtggtgttcagatctgcttctatgtccttgtaaataaaaaacctttgaaatgc

SEQ ID NO: 273678 - DNA, 929 bp, Homo Sapiens
  misc_feature (20)..(20): n is a, c, g, or t
  misc_feature (51)..(51): n is a, c, g, or t
  misc_feature (56)..(56): n is a, c, g, or t
  misc_feature (150)..(150): n is a, c, g, or t
  misc_feature (192)..(192): n is a, c, g, or t
  misc_feature (300)..(300): n is a, c, g, or t
  misc_feature (372)..(372): n is a, c, g, or t
caggattccttaatataatncgagtctcatgaaactttaggaacaaattanagganaatcatagctaatagttattactgacataataactgccaaaacgaatcataattattgacacttattgggtgaatgccatgtgtcaggcattgncctaaactctttctgtatagcacctaattaaatcctattaanccattttttacttatgagaaaactgagggggggcacaaagcgattaaattacttcctccaaagtcacacaaatagctgagtcttgaaccctggtcctaaactactagnctccgctacctccccaatgtaaacatgtgcactgtatttgcctgctcagataagcatttaatgtcagtccangaaggggcaaagctcttgaaatagacaaagtttgtgttcacgatattcactcctgccctccgttccctgtcagcattatcccctggtcactggacgctggggtctagtgcctaatacgttaagctgcttctccccatcatcaagaaactgccgcatctgccatataaagggagatgtttctcattcgcccccactcatctcttcccccatgaaaacctcttccattttcaaaggatcttcggctctacttttcaagcaaattcaacaaatcagtgtatgcctgtgtaactggtaaatagtgaagggtaattatttcatgtgcttctaactcaaaaacaatggaatattaacagcggttttctgaagatccagttggacaattttcattttcatcatataatggacatttatctcctacctgcattatccactgtcttccctcggagaccacaaatttcactgaaggcagcatctatgtcttattcatgcttgtgctctctacctcccccgacccagaaggacttattcttctttctgcacattttagtagatgtgtt

SEQ ID NO: 273679 - DNA, 476 bp, Homo Sapiens
  misc_feature (112)..(112): n is a, c, g, or t
taggaaaactgtaaggaaattaatttcacacttgtaggctttatttcctcatctctaaaatgagaaagtatgatcaggcggcttctaagtcttccagccaaaaaggaaggtnaattttaaatcttgaaccactgaggctgtgtgtcgccgtggaaactccacagccaggctgcccaaagccaaaggagccactactgcagttggtggctcagaatcctctgctgccacctctgctcctcaagtggatgctccaaatccagaagtggatttcatgcttcccatgttgaaaacctaattcattcataacctgagtaactgggaaataataattcttcagaatggggcaatttgtaaacttcaaaaaactgcagaactctacttgcttatgttgtcctaaatgtctaccataaattttaaatctctaaaaaattatagcaagggttcacttcaaagtcttcattgctgacataacgtgg

SEQ ID NO: 273680 - DNA, 693 bp, Homo Sapiens
caactagtatctataatattccagagataaattctggggtaattccaacataggtgaggaattagtatagagcagagagagatgagaatgtccagaactactattcttgaggatgagaaaggtgaacaattgtaagtttatgtaatttatggggaaaaataaaaatagagatcctaataagttaatggaacaactaacagaaacggaaaattgaatgtataactttgaaacatactacgtcagttaggaaaggcttgctggcaggtaagaaaaatctgcaaattagcgtattaagcaagatggaggcttacatctttctgaaaagaatttctgacgtaggcagtcaatccattgctgacgtagcagctccatggcaatattaaacccagctgacctaccccttcctttttaggacatttctcagatatcatacatcaaacctcctttgtatctcattggcctaatcatatgacaatacctggctttcaggaaggctgggatgtactgtatagcaggactgcatcatgtccagctaaaaactggggttctcaaactaaggaaggaggggaaaatagctagcaggaggcgactagcaaactgccacacctgcaaaaggaaaattaatggaaggcaaaaatgaaggggggaaaaaataagaagtatggtaattagaaagcatgttagaacatgtgg

SEQ ID NO: 273681 - DNA, 795 bp, Homo Sapiens
aaaagccaacaggaatgactgggaaaacagcaggaggggacaaaaattggtgtgccttggtgacacaaaaaactctgggatgacggagttgatgacaatcgaggccaaaatcatcttcaacataccctagttctaaagtatgcactattctccccctcagcacagccctttgggccttttacacaatggtgacttctaatttggtccctactcagattttagaactcccaagtaatgttcccaaatggatcatattcacgaggagtagtaccagtgaattaactgggtctcaaaatacaattgcacatttcagacactgctttaaagttgtgtcctctcattttctcattcctgttcagttataataggcagtcttcctcttattcaccaggggattccatccctctgattcaggaccatggtatatggaatcgccctgccttctcatcttcagcctctcgctgtacaggatccatcctcttagcactttttttcctcttagtaaactattgctgtgtaacacagagaaatactcatagctctgatcacaaatctgagtcagatgcctcttgaagaatggacttctgaggagcaccgtactcgccccagcacagctctcacacaggagtttgctgaaagtctcctgcctgtgtgcctcccagtatgagctctgtgagggccgtaaccccagggtataagtaactcaactagaatatgtgcaatacacttctctgtgtcctgatgttaaacttaaaatgaaatagttttcagaataaaaataaatttgtatatatt

SEQ ID NO: 273682 - DNA, 489 bp, Homo Sapiens
agtgaaatgcgtggtccactttaagttgcttattataatactgaaaacttggactgacattaaccagtgccaacaatagggacttggttaaagaaattacagaaggaaattcactctatactgttcagtggaaaacaatcagtgagaagcatttgctcatatatgcaaaagggtgtgcacacttgggtgtgtgtaccgagattactggaagaacagtgtgaagagtggtctcctcaggtggtgggagtcccagcttcctttgtgagacatgagcatgtggagactagaactggtctttctcatagaaagactgttggttctggtgttccgcactctgcacatttctactaataattaaaatacttactgcctctgagatgcctccggacacccttctgaatcacagtgttcagaaatgctctctaaatcaggaaggtgtggatgacctttggaccttccctggtgtgaggagtttagcacactgagagt

SEQ ID NO: 273683 - DNA, 733 bp, Homo Sapiens
ctggaaaattggggtcattgattggtcagggtgaggaggatgaaattatcaggatgtggagcctgtgtgctttggtgagtcagccttcttgtggggtccttcagaccggcctgatgtgggtggttttagtggcatgtaggacgtgaaagaatatctcaaaggaaaacaacatttcataaggttctagttgttatctctagagcagataaggggatctataatcttgtaacagggtctatctgattctaagacaacagacaaacaacaacaatggaagcgcgtcagagaacaggccgacctcatgatccatgctgcgtgtgctgcaagctcattttagtctcatttctctccctcccttcttccctgatgaataaagtttattgggatgggtttcagatgctcagcttttccatatgattaggtgagtgatccagaacccttccaaagaaccctgtggactcaaccctctgtttgaacaacatacaagataatatgagaaatttaattatcgaggaccctctgagcacctggcaactgggccagattccttccagatatataaaatttcacttgctccggttgaatctggaaaggagcaacggcatcttatgaagctgtagcagatactgtcctggcctcgctcatgtgtgtcagatgtgttggagtgccctggctgctgctctgcatgtgtagctgaggtcctggtggaaaaaataccaccggagctctctgc

SEQ ID NO: 273684 - DNA, 747 bp, Homo Sapiens
ccaacacccacatatctttaatggtcttccagacattgctttcttaagatgtttacattctttatcagattatcttttactcctggcgccaaccactttagcatgttttcagttattagagtcttaggatagtattttctttgagattcaaacaaaaaagtattctacatagtacttgtaatctctttcacaattgtaattgcctttcacaaagccgacattgtctgactttttgattctgctgtttatatcttggtagtgttacctgttggtcccctagtaaacagtgacagcaatcttctgaaccaggctgaggcccagtcaagtgtagatagacatgtatttcttatctcactgtggttttatttttctgcatgtctgccctaatcaaagcttgtgctgggagctgcagtgcatctcatatctcggcctcgggaggaatggttcattgcatattctctcagagacagctgggcgcttcgcagggagtggtccccctccctgtcaccagggcaattctctttcacatctcccaggacagatggagaatgaagaaattaataattcatagtgtgtatttaagtggtgattcttcctagactgagacatacttgcattttgttcaaaaacatcttgatgaagacaggcccagtggtgacctaagagttagaacataggaagtagggaaactcttactaagaaaatggacaatacaggccaggcaggtgatccaccccaccttagcct

SEQ ID NO: 273685 - DNA, 545 bp, Homo Sapiens
gctagtgacactataatttctcagaagtttcgaaagtcagcaataagctgaaaagaaccattttgtctgtgatctaaataggactttgctgatggttagtatactcaaatgggtttgtagaatattttgtcttggtgcctggaatttgcttttacgaactcacttgagaggcagcggccagggaagagctctctctcacctgaatgcttagcagaggcaagccatcaaaaccttccaggaagtgcaagccaaagggtctgaattggaggcacctccccaaagatcaaaagttatgctccaccaacacagagacactgagaaatggttgaatgtgttctaaattaaactgccctggtggtgagcagagatctgccaaaatctttcaattaatcacttttaccttcagggcagagttaggcctgagagtatttcaatagatttttattggaacagagttatttcagatattaaactatgttgcacaaagtaaaaataatgttatttttaagttgctactcttgttaaataaaagttggcaagcgtta

SEQ ID NO: 273686 - DNA, 606 bp, Homo Sapiens
acagatacctctgaatgtgggagtacagataaggctgaagtcaggagaactggctgagagtctccacgggatgtcccttcctttccccctctgtatcctccctaactctgcgaggccaggcagctgccatccctcccgtgacagagcatggctctggagatgctgaaccagagctgccaggcagagcccagggtgagggcacagttcttagaacagggaggctgaggaagagactccatcctgagtggtagaagtccagtgccctttctctacccacagccactcacaccacccaggatggtcagcccaaggggaaaggacctgtgaggtggtccccctccaggttcactgtgtggaccttcaccatttgatagacccacctatgcaccagagcatccaatctgctttttatgcctcacttttaaatatgagcagacagacaaggatcctcaaggtttgggaatggcttccaggacagacagtgtcagagaccagattaaagaggaaaaaaggcacaccggagaaacagtgacagtgcatggggcaggagaaaataaaaacaaacaacaaccttctccttacagagagaagaaagctttgtgcatg

SEQ ID NO: 273687 - DNA, 606 bp, Homo Sapiens
  misc_feature (16)..(16): n is a, c, g, or t
  misc_feature (54)..(54): n is a, c, g, or t
  misc_feature (106)..(106): n is a, c, g, or t
attagttaagatattncaaaaataaaataaatttatgactttagagccacaatnaagctgagctaggttcctattctgtataatcagcaacacacagaaactccanatcttgattgttttgttggacccgtgaattctattgggaaatatctgttcttcaaggcaacctcataattcacattagctagaaaggtaggtggtattttgtacattaatttagtgtataaccaggacaaatttcattctgaattgctttgctaaatcatcacagagctgagctctcccatggtcagggaactccttccaacaccaagtcataagcacataaagacccgttcctctaagctgtgacctttcatctggctaaggagtgggaagtcagccatggactttgtgtcgtggagttaacctcatgttcatgacttttcctccatagagaaatattcatttatacatccagaaacaagaagaaagggcagagaatgtcttgctttatgtttttgtattgatagtgatgagagctgccatttttgagccagcatgcatgccagcactgtgctaagtgacttacatggatcacatatgtaagtcatagttactaatctt

SEQ ID NO: 273688 - DNA, 587 bp, Homo Sapiens
acttgggatactctctgggcaattgcaaaatatctcctaaatgcctggtcatgtgcatgggggaatgcaatttagatggggatttactcccaccctcatgaagacttgggacccaatgcttggggggatcctgtctaggagaccctgaggaacgttccgccgccagcagcaggcatgtctcacactcccaaaccttttcagggggtgtagaaagcagtgggcttcctgcaccggatggaaggttcgcttatttgctcaattgtaactgggaccaagaagcctggtagaagatacgcactcactgttgccagcaagaaccaaagatccagaggccacgagacacaaatgtagaaggccaagccctagccccacccgatagaactgtggcccaatcagtgacagttctcactaatcaggaagcagtagtaaaagtgagggaacccgcattcctgctctttaactttctggctttggggagaggtaggcaactcttctttgcagaaatagaaaggccgaagagggggagatggcaagtgtctcccctaagagatgcaccattctccctttttataacccagacatgtgca

SEQ ID NO: 273689 - DNA, 631 bp, Homo Sapiens
  misc_feature (454)..(466): n is a, c, g, or t
tatatggagcgcctcaatatgccaggcacattgctaagcagcagggatacgaagtcggttaagatacccagtccttgcttactagcctcgcactgctgggagacagacttttgaacctgtaattagaatgggcaatgggtgtataacagagacgatagctgttataagaacacagggcagagcttttctgtctgtggagggggcaccagggaaaactttgcagagatggtgccatttgaatcaactcaatcttaaagaattcctcttgaatttttcttcaagactgatttggatgaaaatggctatacttggtcctcgtgaggaatcaatgacataataaaagtatgctaaaaagcataaaaaacaatataaatagtctattagtaatgaaatgattcatgggcatgaatattacagatctagttctaatttttgattgcctgtttattaatgnnnnnnnnnnnnngataatgaattatgagtgcagttatttgagaactgattgtaagactgtagttaaaagtgggagaggccaggcacagtggctcacacctgaaatcctagcactttgggaggctgaggtgggaggattcaagaccaacatagcaagaccctgtcttaaatctaaaag

SEQ ID NO: 273690 - DNA, 579 bp, Homo Sapiens
caggaaccagaaatggaggcactgaggcttgtgaaccaccccactctgcccccacccccaacaagcagccctgtctctgttccaggatcagcatctgcacttaccctaggagctcactccttcaccccagtccctgggccgtgtgacccaggcctggccaatccacacattccatccccctgggcacagtgacaggtgcagggatggacatgtgtgacccagctgaacctttaagatcctgagaccctgatctgcactggggcaggttgtgggtggggagtcgggggaagagcctgatgggaagagggaaaggaagtctggctctccagcatccatcatgccacagaatggacagccaagacaggagaccattgctgagacggagagagactgagccacaagggcatcagatccatccctggatccagctatgtctgaagctggtggatcacctctagacatttcatggatgtgtgccaatcagttccctctgtgctcaagctggcttgaagtggtcttttcttacttgcaactgaaagaattcagacaaatgcatgagtaaaaacttctctctctctt

SEQ ID NO: 273691 - DNA, 734 bp, Homo Sapiens
ctcttcaacctgcttgtccacgaccagagagaaagcctggtgtagcctggacacacagtgtatgcaccagaaaaaggagtttcctcaggaactggccatggaggcctcgatcttctttgaaatgtcactcaaaaggaagctcaattttgacacattgttttcaatgaagccaatcatctccagcttttggagggttaatagctgctgaggagggtatatgacctggcacttgaccagttcttccaaacagaaaacgtaaattttgaagatggctgctgcagagcgcagactgatatactgcttgatatcagacctgtccacaaaggccatgtcaatcttcacggtgatgttggaagtagctggaatcactacattaaaatgccttttaatctgattaatttgggtcaagacagcgttgaccatgccaatggcacccgatggctttcattatgggtggctgtgagactttctatctcatcaatcagtgaaaatgccagagcatctttataatcaatcaaatcctgaatcttctggaacgtcttagttatcagcttgtcaatttcggaaaaccgtttagaaaagaggttagggctatttatttcaattaattggccataccaatacctgcttgaaagtttaatagtcaatttgtgggctaatgctttacataggaatgtttttccagttcctggaggaccctgtagcagcaccacctggttccaggtgctgaggct

SEQ ID NO: 273692 - DNA, 465 bp, Homo Sapiens
  misc_feature (45)..(71): n is a, c, g, or t
ttgagaccctctcccgccttgggtgacagagcgagactccacctnnnnnnnnnnnnnnnnnnnnnnnnnnnccagaacattatcatggaaagtttaacaacatgattaacttctgatcctggagagtggtaatgatagactggatcaggagtctactggcctgggcaatagaaatgaaatctggactgtctcagggcttcgtataatcaccagcttttgtgggtggggatgttggggtgtcctacaggggtatcttgattccttctgagaacagatcatttctttgtcctttctgatgtcctaatctaaaacatccagtactcctggaggatttgaacttgtgcccaatggctggtcagactctcttggattgagaatgttggattgccattcctcagactgaatgtgggccaagcaattgtgctttagaaatttatcttagagtctgggtgcggtggctcatac

SEQ ID NO: 273693 - DNA, 490 bp, Homo Sapiens
ccgacatgaagaactcgtacacaaggaatagggactgttttggccccttgaatgctccatcgatgtggctcaccgtgagttaggagagctagaccaccagctataggcttctccgccttgtctgcaatttactgtcataatctgttttactaccccgctttatttatgttattgctgctgaaaacctcaaactatagtttgtttcttttacgttatccatagtagtttggtcctttgtgtgtaatgagtacaggtatgtctataaagtgagtggccttttcttttctttttaaattcagaatgtaaacctctaagtcaaagttgttccattatgagtcagccactttaagaggttaagtcacttgaccaaatgctgctgtcatcgatgacctttgcctttcagattgctgctagaaccaaccacatgttattttggctgttcttagcgaaggcaaatctctgcatttttggtatggaattgaatttggga

SEQ ID NO: 273694 - DNA, 1143 bp, Homo Sapiens
  misc_feature (30)..(30): n is a, c, g, or t
  misc_feature (223)..(223): n is a, c, g, or t
  misc_feature (252)..(288): n is a, c, g, or t
  misc_feature (309)..(309): n is a, c, g, or t
  misc_feature (338)..(338): n is a, c, g, or t
  misc_feature (346)..(346): n is a, c, g, or t
agagtacagcattatagaactgtatacttngaatagtaagtcattttaaaatataccaagtacccaggggtttatgcaactaagagtctgtgcaagtatagtctatgtcgtgtgaaggtctttagacatcatgaaataaagtagttcagagcagtaagcagcagaatggaattcagaaaaagggcacctgggtttctaatcttgatttgcagcttactagctnatatccttggtaagtcgctgaatcaaggnnnnnnnnnnnnnnnnnnnnnnnnnnnnnnnnnnnnntcccctgtgtctccctggtanggctgtgaaagggatcaattggagtaatngtattgangaaagtgcttgacagagaagaaaaacaaatctgacttgttcaaagcctcagcatgccctgaaaagtggtgatataaaaattagccactttttctttggagaaaaataaaatttccttaatttctaatctctttgaaatgttatatatgtttttggcagtaaggaaacatgcccatattttatttataggtatctatccctttgatgtgtcaacaacactattccattatatgttaaactaaaaaaagtaattcttgccattttctttaatacttcaaaagcgcgataaattcttaattcatggctttcaaaggtgtatttttaaaagcagcggtcattttaaaaatctttcaaatataaataaaaactcaacgaggaaaaaagtaatatgaagtagactaactgaattaaaagtgcacaaaggtctgaagaaagccccaaactctactaaaatccatgtcttctgaaacaagagaaacacttcggaaggaagttttaaaactcaatattgcttttattaaaatgaagcctttttctaatgctttcaggaggcaccaggatgacgtcagaatgtgaccctgagccacactttcagtgctgtcccttctccatcactagggagcgtcctcagccttctccaggtgatgctcggcagctgctcttccagccctttaatgtctgctttgaaccacagatgcctgtctttgtgttcttgttcacgtttcccacttagctcctacaatcccagaatgcagacatcagccctttctccctgcagcacagggtgccctggccagt

SEQ ID NO: 273695 - DNA, 946 bp, Homo Sapiens
aagaaagaatagaattaaaagggagaaacaggttttagacaacctagataaaatattaaaatatgaacaattttatgaaaaaaatgtgaaaatctagatgaaatagatatttctgagacagaaaatgttaaaattgacagaaaaaaatcaaaggcttggatacaactgtcctttttaaagtgcccagccaggctactgcccatgtcctggaaaggtaggaggcagggctcagacacctgaccaaattgaggactaactaaaacaggtaggtcaggggtggaagccattttcgataagacatacccaccaatatgtcatgtcagtttaccattgccatggcaacacccagaagttaccgcccctttccacagcaacaacctgatgacttaagagttgccacccttttcctagaaatttctgcataaactgccccttaattcgcatatagttaaaagtgggtataaatatgagtgcagacctgtctctgagctgctattctgggcacactgcctatagggcagccctgctctgcaaggagcagcacctctgctgctgctatacactgctgcttcaatcaaagttgctgtttaccaccaccagctcacccttgaattatttcccgggcaaagccaagaaccttcccaggctaagtcccaatttgggggcttacctgtcctgcatcactggggaaaggcaggaatcgggggtggcaagagctcctcagtagcaggcaagagggcctcagcatggagctgtgtgattggtgacttctcttgagatgctgtggcacctgcatccttggcaaaggctggtggaacagactgtgacttctgaagcaatagctgcctaaaatgaaggtgcaggctccagaattctagtcatttgtcacagaaagattgaagagcttgacagaattatttgttaaagagaatcgtgaattcagaat

SEQ ID NO: 273696 - DNA, 652 bp, Homo Sapiens
atttccagtttcctatctcagtaacaactccttaagaaatgatgcaacagaattaagcagtaatgagctggtgattcccgtgcacactttaaaagcactagtgtgtgtttcagaattctgtcagccatagcagatagcagccaaagcagtccaaaaaaacgtgactttgaaaatgtggttgttagatcacagtacttaaagtggttttagacaatttacagtgattcccttagaatttctgtggaaatcagtgtatctctattccaattctttcagttctgcaaaagcatcagaaacccctgtgtggaaggtgtgtgggtggaggttctgcaagcacctttcatcctgagggagggctgactttcctaccacaggctgggctacgcacatgatctgcttcagagacacggtttttgaattgcaagagtgacagaagaccagatttgtttttaaaactgggaagtaaattacagatgatctgatacaaactcctaattttataagaaaataaatgatgaccaagatgcttaaattatttacttaataacacttcgttaatgacatagcttagattataacctatatcttcagttcctgaaacaacgttctttcttactatgccatgctactgtaagttatttagtgcagactt

SEQ ID NO: 273697 - DNA, 668 bp, Homo Sapiens
  misc_feature (182)..(182): n is a, c, g, or t
  misc_feature (479)..(479): n is a, c, g, or t
gtcatgtgagatatccaggcagacagtaggcctggctcactaacaggcaaagcaaatcattcaactcatattcatttataatgggcctttgggagtaactaataaattaccaaaattgcaagtgttgaatctgcaaatgtcaaagacttccagtggattctttgacaacatgtacgtagtcngtcatttgtcagttttcttggggaatttatcttctcctggtgggcagcaggaaacggatcccactacagacattaaccatgcccaatattcacttttgcatgtccctaggcagctagggcagcttgaccaatcagctgcatttgcttaggatttctgaggctggaggtgaggatggaaaaaattctttacagtggttgcagcagtggcagcagtatccagtgtccagacgccttgccactggggtcagcatggcatccagcatccaaacgccagctgtggctgtgacaaacgcagcnagcactgggcgttcagcagcagcagcactgaggctgtcctcacctatctggctctgtgatggaatttggtgtaattctaggtacctggtctctgtttctgcttttttcccaagccttgtttctacagccttcaagtgattctgtaacttactcaatgtgctttcaataaaattcatttcctgatttaaa

SEQ ID NO: 273698 - DNA, 669 bp, Homo Sapiens
caaaaatataagcccataataatagaaagagggaaggcaagccagcagcagatgagggattctgatacatttctagaaagcagcaaataggtgtgaccaatccctgggttagggaagcagaggatgccatacctaaaggctgcagatgtgggtgtgtaaggagtcaggttgactgagcctgcaaaagccctgtatacccaggcgctgcagacaccaggagccaaaggtgaagttcagagcctgaccctattggcggcacccaccactgcaggcaacctctatgcaaaaccagtccccctgggcccctgaacaggagtcctgagaggatccagatgcagggccatggtcaggcacagtggaagggactcagcgccaaaccactcccaaccctaccctgagaataccagcagctccccagaaagcagatggcacaagtcctttccagaaaaactgaacagtctagggaacagccatccagatccagacatttgggagtccctccaaaaagcctggcttgccatttagctaccatccaccccaccccaaacacagaacttcttggctagccttttagggcctcactcagatatagacagatagccttgggtaaggcatctgaggagggcctccaacataaaagagataaactggagtaacagagagggaaaa

SEQ ID NO: 273699 - DNA, 621 bp, Homo Sapiens
ataattgatcatacaaaaaaataaaagtacatttaggaacaacagtgtgtcttgactgtcctccatagtacagttataaatctgggcaaacatgtaaaggaggaagacacggtccctgatctgccgaaggagtacagatactggtgggagtagaatggggacatcttttaagctgaagaggtcaggaaaggcttaaccaagcagtgggtctgagctgagccttggagactggagtgaggatgagaattgttggtaagacaagggcagtaattatagattcacattttgtaataaaagttcatccttgcagaccaccagcaggatccagtgggactacactgtgagaatcactgcaaaatggccagaatttatgtttgtgggaaaatctgagtaattattgaatgactacccagcattgccaattaaaacaaaacttggatgagaccagtcttccaattctgtctgatgaaacataaacggaaagcctttataatgtaatattacggcctgagtgattattttcagaatacaatgatcagccaaatggcttttaattgatctcaaaatatttattgagcctctcagtgtgataatgttttgttgagttgttgatttaccccc

SEQ ID NO: 273700 - DNA, 815 bp, Homo Sapiens
agtctttctaaggctaatgaaaagtgtttttaatatagttccattcaaatacaattagatgttagaaatatcttttcatcgaaagctaaccaaaaatgtgttagaaatcattgcttttttctgaaaaagattctaaggcacatgtcctcatccattcctatgtcaggattctcaccaaagagcattagcctggatgacgtttcctgagcttcctggggggatgccttttgaatcgggacttaatagcgggcccttggtcttaccattgaagtctttctgcatcttctgcagaccgaaggccatgtcgcctattttattcattaccacccttgtaaggaaaggactgctcttgaagagcttttccttccttttattggacaagaactgtgtgcctcagctctgagctcccgctgctttagtcaacagcactgtagcaaaagcacaagtatagcctttatctcattcactgtcctcatcattttcttttccgtagttctgtatggtcccaccatcattcattctataaagatttgtcagccactctctgcctgtcagatattgccacaaagtaatatccttttgtgactgtatttattggaaactatagtgcattcttgttgtcttctaaaccttcttaaatctgtcgaacagtaagaatgtaagccattgcaataagtaaggcatggtagaattcctagttaacaaagatacatgaaaatgtgtatactactcttcgtgtataagtaaactaattttttaggaagattttcaatgtcaaaagttaaagctggccaggcacagtggttcatgcctta

SEQ ID NO: 273701 - DNA, 736 bp, Homo Sapiens
  misc_feature (254)..(266): n is a, c, g, or t
ccaaaacagtgggagctgagcaagagcaaggggtagaaagcttattcgaagaactaataacatagtaatacccaacctgtgcaacactcctttcctgtgccaggcactgtgctaagcaattaacgtgtactatctcatttaatcctctcagcgactctatggcgacagtattattaatggtgcttcatgaaaggaaaaactcaaggaaatatctcttcttcctatagcgtgagagccagctaaggagtgcaagnnnnnnnnnnnnnaaccatggggtgagaagtgtcccctctgttctcccagcagtcctgtgcttccctgttacagagtgccccccagtctgctgtgatggctgtggccctgcatctcttccaaatgaaatgagagctggaggcatggctcactccatgatacagatctagtccctagaacagaactaggctcctatggggaaatgcaataaggacagcgaacaaagaaagggagaggtagaaggaagctcagaagtttaaaggactcagtctggcagaaaaagaaagaggggttgaggagggagtgagatgaagggaagttgagtgcaaggaagttcagagggggaactctacagaatgcacatggaaaataaagttaatcagcaaggatggaaagatatcttaaacgtcaacatcaacagaaaaaagacctaactgtatatcaaattgaactttaataatttagtggaatataattttaatgg

SEQ ID NO: 273702 - DNA, 839 bp, Homo Sapiens
aaagagaatcactgatctacaatgtatgatctaaacctttgaatattacataaaaagcctttcacaattggattctaactacagcttttgggcctcacatctcccacctgtacatatgctggaaccaaacacattatccagtgtactattcttccatctttgcctgcccatgcatcccccactcacctggcattgcccctatgtgttacttccagtttggaggaggcattttcctgctctcctcgggcatttcttcccttaaactcctgtgtatcctgtactttccgccatcatagcagtcacctatagcagtgggctcaaaactatttgttgagagtgatggcatagaatcaaaattacccatttaagctttttaaaaaatctaaaaagttattatttaatcacacatgtagttctgataccttcgtccatcagagatcaaattatttaagtcaatgttaaagcaatcgagccaatgtagacattccactcataagaactctcttattacgtattactgagatataataaataaacacaactataaaccttaagccttgtacagtgaaaacatatctttatgagaatgttttaaaatccaccttggatattttttaagaaaagggtaattaatatatgaaccatgaaaatcagatcgtgagaaaacatagagttgtcagtgatggcttaaagtccaatgattagttctttggaatagacgagtaacaggccagacaagaacagaaatgcagaagtgttcattactctcctgtgattccccaaaaggaaaacaaagcaaaactaacttttaacaaatagttagttgattaatcttccag

SEQ ID NO: 273703 - DNA, 885 bp, Homo Sapiens
  misc_feature (263)..(263): n is a, c, g, or t
  misc_feature (316)..(316): n is a, c, g, or t
  misc_feature (359)..(359): n is a, c, g, or t
  misc_feature (625)..(625): n is a, c, g, or t
cctgagcctttctacacagtgtctgtttcctcagaacaccggtcttcaccaaaggcgtgggaaagggcagagagcacaggacatattctggaattcaggtcaccttttcatctgcctggagttgggtgagcgcctcatgaatgactcggcaagactgactgccactgctaaccagggggatgcaagcaatgaggaggacctgcccaggccgggtgggtgtctgctccctccctctggtccccggcacatctctggaccccctngccctgctgtcggagagatgatgacgggcaacggcgtagttctcaggagacangggcctgcctgcaaatcctttaaaggtcaattgggatgaaatngtatacccattgttacgaaaaaaataggacttagcaagttgagtgcaaataactgatgcaagactgggatggagatgggaggggtttggggcaaaagcagaagtctttctgggtacgcaccagctgtgaaatacctggcttgttgttctgtgcctgtctccagcacccaggcagggctacctgaccactctgctctctcaagccacgccctggctctggagcgagcctgtggaaagggggacacttagccaaggccccagccacantagcagcagtcagtgcgccctctgtcagctccttgcacctcctcactgggcctcctgcaaggcacctgctccactccaccactatcacctgggtcctcgctggccttggcctggcttgcttaccttgttatcaagtcctgaatgggggaagcaatattccttcttcactacaaatcaccacagtattcacaaagaattccagagaaataagaacagagacatcagaccacactgagcactcaataaagagaaaattcttc

SEQ ID NO: 273704 - DNA, 693 bp, Homo Sapiens
  misc_feature (116)..(228): n is a, c, g, or t
ctcttatagttaaggttaacaaatacaaatcatttaatcagtgtcctgaagtagtcagacatgaaaataatttatttgaaaatattgtgtatacctctaaacgatttacacttacnnnnnnnnnnnnnnnnnnnnnnnnnnnnnnnnnnnnnnnnnnnnnnnnnnnnnnnnnnnnnnnnnnnnnnnnnnnnnnnnnnnnnnnnnnnnnnnnnnnnnnnnnnnnnnnnngtcatgatggtgttatcatttcatttagtaatgcttaaatccaatcatggggagaggtagtactcagaattttttattttgaaaaaagcttctagactagaaaaagttatgagctattactaaagattaataaagttgtggagattttagtgtatagttaacataaagtgaatgataaaaccacccattaaagtctctattttaaatatctctaatagctttgttattctttgacattctatatttttattttctttaaaacactaagtcagtagcttcccaaatgttgctctttgagttagaatttttaccatgaagttcatgatgaaatagaaatgttatcaatgtttatacaatttattcacctttaaattatatccatcctttttctgtgttaaaatgccctttttcttatgaagttgtgattctagatagtagatagattttttccttctaatatttggc

SEQ ID NO: 273705 - DNA, 587 bp, Homo Sapiens
acaggtaaaccccaatatcccagtggcttcataaggcagagtttatttcttcctttcatgaagtccactgaaggactacagctctgtaaggcagctttcctccaagctgtgacttggggatccacgctgctaaaattttgtagccacttcatttgaaacaactggctttcaggctgctggaggagaggaagagaaaaggaaaggggtatgtgcccactttctaaagttgccacttctgctcacacaacctcgcaaagccgcaaggagcctggagactgtgggggaagcacatgaccgtcgggccagtagtgcctgtttctgcacagagaaccctgggctggctgtgctgcttcagcaagcattgtgccttttctcttccgctcagcaaggcaaccaatttcccttttaccttgaacaggattcctgaatccaggccgacaaagtttcggggcaaagtccagacctgaacagaagcttcctgacacttagtccagcgccgtctttgacgctaaggaccacgctcaattgtccctcccaacaggatgtggaggagcagtcctggactctgaacggccacccagacattc

SEQ ID NO: 273706 - DNA, 585 bp, Homo Sapiens
  misc_feature (129)..(129): n is a, c, g, or t
ccgaacattaggatgacaggcgcgagctaccattcccagcccatttccaactctacttgaactagctgcgtttttttcagctttgcccagcagccctggtgagtgcaggcaaagaaggcagcggcctcnttgcctcagaagcccgaggcacttcccagccagtccagggctcgctctcctgcccgcagctcgtgggcctgggtctgcagcgctttcagtggtctctgatgtctttgtccacctgcccactagggtctggccagatggggcccgtagccaaggccaatggacagacatggcttccaccccctcccagggacctgagctccagggaaggcaagcagccttttcctcacagacaccccttctgttgaagaccaggtgatagcggggacgggaggcacggacccctcaagtctgctcatcatttgcattgttgtgcatgaatttgcgtggagggttcaggaagctctgcccccaagtcctccccaggtgcaggcgcagggtacaagatgttctaaaaaatagaaacctggtggggggttgtcactgtgtgtacatttaaaagtaaactgtttaaaggtg

SEQ ID NO: 273707 - DNA, 823 bp, Homo Sapiens
gtaatcaagccatttggtgaaaatctgtaattcacaagtcaaatagcacagaacagagacaactttcggagcccactgtggacatggtgggggccagcctgtgctgctaaacatagattttgctgatctgttggcttctcagtttatagcattcagccccctggctcctcagcagctccttctcttcggctgtgtctcgagctttcagctgcgagaagtgggcaggagaggcgatgagatcatattgttggtccagataccgcaggtagagtgagcatgtgcagggcataggccaacaccagcagcaggatcagggacattgccaggccgatcagaaaagctggcgagaaggaggaggcgcagtcttgggctttggtaaatcgtccccccttgatggcaaaaccttggatctggaaatcaataaaagtgacctcccacaggctcgacccatcatccgtgtcgctgggcagcaagagggcctggtcctgctgcaggctgcccacgcgttggcagcggtaggagtaaccagagggagcatatacgccagttgggttaaagactgcttggattgaattgttggaaatgatctcgactcggcgcaaactaaaccaactctggatggacaacttgttgtaattggtaaggatgaatcttatagcaagacttctggggtttccagcatcaccaagcttcaaagacaacctaagaaaaggaaacaacgcagtctatgaaaataggaatgaccctgacttcatatgtactcaaaagttacctcaaggtggatcacgtaacacctaacacacaaaatgtacagaactttttt

SEQ ID NO: 273708 - DNA, 270 bp, Homo Sapiens
taatcagtgatgatactttggtgtatgttcaggactgaaaccttcttattgtgctaacttgatggtttctttaaaaataatagtcttgccataaattatgaataagacttgtttttttagccatatactcagaagaacactagagttctccaactggctacgcttagttcttgctttgccaggtagtcccacgcttactataatgttcaatttagagttctaagtataaaatatttttacttatttatttatttttgtgacagagtcttg

SEQ ID NO: 273709 - DNA, 774 bp, Homo Sapiens
agctttcaaaaagtacttatgaagaagttaaaaccattttgagtaagaagataaactggattgtgcagtatgcaaaaaattaaggatctggattcagattctgaatgttctaaaaacccccagcatcatctgtttaatttcaggcataagccagaagaaaaattactcccacagtttgagtcccaagtaccaaaatattctgcaaaatggatagatggaagtgcaggtggcatctctaactgtacacaaagaattttggagcagagggaaaatacagactttggactttctatgttacaagattcaggtgccactttatgtcgtaacagtgtattgtggcctcatagtcacaaccaggcacagaaaaaagaagagacaatctctagtccagaggctaatgtccagacccagcatccacattacagcagagaggaataagtttttgaagagttaactcaccaagtgcaagaaaaagattctttggcctcacagctccatgtccgccacgttgccatcgaacagcttctgaagaactgttctaagttaccatgtctgcaagtagggcgaacaggaatgaagtcgcacctacccataaacaactgacctaaacagacttacttcgtatgccctgccctttattggtctcccagacatgcaaactttgaagaagtttgaagaaagttgtggtccgtttttttatggtcattaaatttgccaaacataaggcagtatttaacatctttgtcaaataaagcagatcattatactctaaaa

SEQ ID NO: 273710 - DNA, 856 bp, Homo Sapiens
tgttgagaattcaccaggggtcttggtgcccatcttgactatagcttcattgcttcttctttcaacctagtctcctcacttgtccctagccctatattgtccccaaattgacacatcctattccctccccacacttttgccaaccactcctctctttacctctttcttcatcttgcttcctttgaaaacccactgacatattcactttattttcctattatgttttactttgtagtgtaaaccccacacatcctacctattgaaggagactccaagaactttagtaaagtggcatctgggtggggcaggctggggatggagggaacatggcagatcttgagttctttagtgctctcacctggcatcgaccttgctgatagggatcttaagccgggcagcgacttcctctgccgtctcagtgccttctgagatgatgcccacacccttggcaatggccttagctgtaatgggatgatctcctgttaccatgatcacctgggttgggaaggagagggaagaggagcagaatcatcttcagagcccggatccttcatttttctcctctgagaactgacagaccactgcttttttcaacaagggttttagtcgctcattcccaagaacttgtggtgtagaccaaaaaccatgctactgtgatttcaacccttgggagtgggtcaagaccatgagaccataaaacaggacaatttgggtcctagatttaccaggaataagccagagatttgactatattcagaatttcatttaattgctccagaagctattctgcttccttaagtgcaaagacagaaacacctacacatagaacaagtggtaataaaggaatgtctggaat

SEQ ID NO: 273711 - DNA, 622 bp, Homo Sapiens
ttacattagtgtgatcacacaactccttagctctatcttgccttactatgaaatatactaattttccctcaaaaaatgagttatctcatcctccaagagccatgttaccttaccatttaatttggatttgacctctaaatacagttaagttttaacagtacctacgtttttgagatcctttgactgtaatgtaagggttctgtgtggagcaaagagcagttaagcaacatgaggaagaatcacaactggacaacctaaaggtaagttgcctagaatcacagcagtgcttaaagtagtgaatggcttcgtcagctctgaggggcagcaagcctgtttctgtccttctctgagctaagaaaattgtgctagtggcctggaatggcttgaggctggtaattgtggagaaatacctgctcttaacaaaagtgctctctctttctggcacacctttctagtacctctctgcaaattagtattggtctgtctgtatgctcttttaattataaacagaaacagttgaactcttaaacaggctgatcagtagaaccactggctagaattaacagccaaagggagtaagcaagtgttggatatcccagctaggattttagctgcgaaaagg

SEQ ID NO: 273712 - DNA, 557 bp, Homo Sapiens
ttgtcacttgcttttgaaatgtgcatttgtacttaggcagttaacagttagccacaactcctcatctattcttcctagtagcgcaggggtggggcagacttttcttacaaagagccagctagtacacactggaggccctgtggtctctgtagcagctctcgcctttgtagtgcaaaagcagcccaaaacaatatgcccagcccaatggcatggcccagccaaaccagtgtggctatgttcccaataaaactaggaggctagctggatttgacccactggctgtcgttggctgactcctgtgttagaccctccatggtcttatatgcgttatgtgcagttattctcccatctctctcaaaagggaaacgtcagtgacctgaacattgtgctcagagtaccagagttcttgcttaagttgcaggtaactgactaggctgtatgaaccacatagtgggtagactaggtaagaataatgtggcaataaattagtatgacatgtttaatagtaattatgtctatatggcattttggaataaatggcaaattgtttacaagtt

SEQ ID NO: 273713 - DNA, 1044 bp, Homo Sapiens
  misc_feature (468)..(468): n is a, c, g, or t
atctaccctaatgagctcatcttaacctgattacaactgcaaagactatttccaaataaagtcacattcacaggtattgggagttaggacttatcctaatatcttttggatcttatgatatccagttcagcccacaattaaacccacaatgctcttcgtgagaaagaagcagcagccatgaagaaagcctagatatttttaagggtggagagcgctcttgacctttcctttgacagccttgagcttccctaaatactgttgtcctcactgactggcttgtcttaggagtagggtttttgatcttcaaaccttggagtgcagttcagtaaagtgagacaagcataccttctgtctctgaggtccaggagcactggaagagtggacagattaattgtgaatagagaatgccctgaaaatacaggaagaaccaccctcctgcagatgtagctctggtcccttgtgggagcnccctggaccttcggtgaggcagatctggaagtgctacagcaggggatgtaaagagccccttcctagacccgcttcctggcccattattctgcccttccaaatgtattccaagggctcctcattttgatcattgctcagtggcattgttgtagaggaagtaggagggtgcttggtggagtttgggaggcccatgaatttctgcacttggagaaatgttaatgttgagcttatatttctctccttgcagcacagaagaccattactaggtctgtgtgtagaagcccaagcagttagaggggctctgcgaggcttgtgggatttttctggccagaagatgggccatggtggaggaaggccatgttaaatggctgtgatccactgcctatagggaagagtacgcaacacacacccaggagggcttaggtagccggaactgtggcggctccatacccccaaagtgaattttaaacttgacttatttatgccgttctcatagcaacaggaaaactgttccgacctatagccacggaagactctgtaaaagaaactgtaggaggaaaaaaagataatgccagg

SEQ ID NO: 273714 - DNA, 794 bp, Homo Sapiens
  misc_feature (147)..(157): n is a, c, g, or t
gtactgaaaacctacatccaaccaaaaacctgtatacaaatgtttatagcagatttattcataattgttgcaacttggaaacatctaagatgtccttgacagatgcatgtacagtgttacatccatacaatgagttactactcaggnnnnnnnnnnngaaagaaccaccaatccaggcaataatatagatgaatcttaaaaatgcattttgttaaggtgacagaggtctgatgcaaaaactaccatattgtatgatttcatttatgtgatactttggaaaaggcaaataggaaaggcagataaatcagtgattgcccagggttaagggaagaaagagaaattgactaaagtaaccacaaaggggccacacaaggaatttttaggatgatgtaactgttctgtgtgcttttgttttcagtcaaaacaagtcaagctgtaaatccgatactctagtattgatttggttatgcacacgctagcttacttgtctgttctctttaaagatatctactagttggcatgttctgcccacttgttctgcccaggcaaagcctgctcacacagccccaaccactcatcttgccttaggaaactacctgtctggaaaacagaatagtgaccttcatgacatgaaatacttcagaccaggaccaagatggtcaacatagatctgcatttatatgtctgaatagaattaaccattttaaagacagggaaacaagttaagcaattacagcaaatggcattcaggaaaagttaaagccaaaattaggacaatagttttttttaaaaat

SEQ ID NO: 273715 - DNA, 489 bp, Homo Sapiens
  misc_feature (1)..(1): n is a, c, g, or t
  misc_feature (11)..(19): n is a, c, g, or t
  misc_feature (470)..(470): n is a, c, g, or t
nttttcatttnnnnnnnnnttttaatagtaataagaatgttcagtcaatatcaatagaattaggaagaatttctatttccttccttcattaattcaacaaatatttattgagcaaacatctgtgtgtcgtctggcgctgttgcacaggtcaaactggcttcttaagaatgaaatcctaagtgtgaggaagaaattgccattgtatgtgtggtctgactgcagaaaacctaaaataagtaaactgctgccatgatgaaaagtcaaggagtaagttggcttttccatgttagtaagacaagtgaaaaggcatgtttcagtcacgatgtaatatttcctaaaattttgaagctatggggagaaaggtttgggaggaatttcatagggaaaagaaaatgtggggaggggggaatgtaagcaaacaatacttagtacattttacaaaattaaagtcactttgtaggtatatcaanaagttttaaaagttggttt

SEQ ID NO: 273716 - DNA, 490 bp, Homo Sapiens
  misc_feature (239)..(257): n is a, c, g, or t
aaaccatatggcttctgatggttcttgagtaggagaaaccctacttcattaactataacccagatccattgataactataaaaggataaaccagaaagaagctagtatatttctttttggtttcccttcttatggttatcaatggtgtagctatcatatctcatctactcatatttgacaagtggtgtaaattatgcatttctttgttaatgagtctaataggctaattgctctacatnnnnnnnnnnnnnnnnnnnttagccgggtacggaaaggagattcacaaatcatgctactactaccatttccaagacttcttcaatccggcttatattttaaatgcaggaaacactagttaaaatcatttatggaacttcaatactcaacaaagtaatactagcctaaaatgctcagaatattttctagtcaatggtgagtttgtgtgtcacttgctgaattgtgtaactcatttgtttattaggtaagatct

SEQ ID NO: 273717 - DNA, 697 bp, Homo Sapiens
  misc_feature (60)..(73): n is a, c, g, or t
  misc_feature (164)..(256): n is a, c, g, or t
  misc_feature (271)..(271): n is a, c, g, or t
tctacgagatgacaaactctcaatatgacctcctccctatcctcaacaattcttgaaggnnnnnnnnnnnnnncttctaaaggaaattttttaaatgctgaatttctctggcattgagccatgtgtagattaaacatcacttaatcctccaacagctctaaggnnnnnnnnnnnnnnnnnnnnnnnnnnnnnnnnnnnnnnnnnnnnnnnnnnnnnnnnnnnnnnnnnnnnnnnnnnnnnnnnnnnnnnnnnnnnnatgggggaacgcccnacccaggtggtgatgctgctgctgctgcggcaggtgggggcactctgagaagcgctgcactaaggtaatattaacagtgtggcccatcagttctgggaaacgcgtgctgtctgcagcagaaattgccaagattttgaaaacttttatagcagtttaccattacatggcatcgaagcacgtgaacatttttctagtatttcacccttattgtattttcccaaagtactgatgtgagaacgactagaaagttgtccaagtttgtggagcatcgctttaagctgacccagcatacggcagcccctgcccctggggacagcggggccgacctagggcacgaggggtgactaggggtgactctttcaaccagaacactggcctgagacgcagttccacacttaaggttttcatcgtctcgtctcattccgg

SEQ ID NO: 273718 - DNA, 345 bp, Homo Sapiens
acaaaatgaaaatgtcattttactgttctgataaatgcataatgcaaaaattcccatggaaagaaaaatattaagaagtgttagcaatctgaaactatgtgctagtggttagctagtgtttatgttttggtgaacatccttttagacaattttctatgcaacgttagataaacatagaattgtacacgtatgattttgtacccatacattttcttctgtacctgcctttccactcaaaagtgttttaaagccatctttctatgccactaaatacagtttttcttcctcattttaagtgacattgtagcatcctgttgttggctgtcttgaaattaattaaataaa

SEQ ID NO: 273719 - DNA, 831 bp, Homo Sapiens
cactttgagaaatgccattctgactgccctgtgtaaatctctactcactttttggaaacatgcacccctattcccaagcccatcatctcttcccattgcagcgagtccccagacctgtttatccaagctccagttatgtagggcccccttctttgaaatgccgtgtgctgctgtgtgctgggtccggcagctcggaaagggagccgagagtgactcggtgtcaggccagccacactctccgagcgtcactccccaccagcagtgactcaggtgcacctgctggtgttcccagacatcctgatgaggaactgtccacaggcacagttcctagaggtggtaccgtttagacctatcatgaggaaaatgggattgtcctcaatgccttgtgctttttaagacaaaccagcccctccaagactagtacagtgcacaggaggggctgcagggaccacacctggatctgattcttccacttcccttgcacatgcagcaggccttgtgtgcctacccccattctgtgtcttcctgagaaggagggcaggccatgggtgccgagtctgaaaggagcccattcccagggctgtggcccaggctgcagcctcctgagacacctgaggatctggtgacctctcctccctcacacccagccctgtgggtagtcccagcagctggtgacaccatcatctccaatagcctggcttaggggaggggggatggagaggacatcaaggaggcaggaagtagcccaaggtcctcaggactatgaagtgccctcagttagcacaagcatcctgtgggcctaggtggggttgaaataaagcaataaagcaa

SEQ ID NO: 273720 - DNA, 399 bp, Homo Sapiens
gcatttactctgctattaatctaacttcttgggttgtatactttattatctgaaatttttttcagtatgggcattttaaggctgtctactttctataattactgccttaacagaatctcaaaagctttgatatgtaacattattattttatgtagtttttaatttccactggtgtattagttttcttttgctgctgtaaagaaattaccacaaatgtagtggcttaaaataacacaaatgtcttatagttctacagatcaaaagtctaacactggtgttattgggctgaaatccaggcgatggcagagctgcgctcctagtctggaggctccggggagaattctcttccttaacctttcaagcttctcgaggccctctgcactccctggtatgctgcat

SEQ ID NO: 273721 - DNA, 523 bp, Homo Sapiens
cgtgctaatctcaagcattcagccatgtgtattgtacatcccactccgcctatacaaacccagccagaaggcccctgcatagtattgccctaaatgttaaagtgggctcttccttatgtcggggggcccccaagcatagtttaaatttcagaagattaccagagctccagagttaggaaaacttcctaatataaagtaggtccaaagcccctctccatactgtagggatttgtgtaggatcctcattccctacgggctggtgccaaggaaacatgtcaagatttcctgagccaggctggcactaggaaacctaagaaacaccagcaaggaagcgtgcttcctcaggacctccttgtgttaggtcactcaccccaatgtcacagaggctggtgaagtgacttgcccaaggccacacagccaggatttgagtccaggtctacctacctgtttccaaggctgtctaccttcacattcccaacaaaaatataaacagcctgggcgacagaacgagactccatctcaa

SEQ ID NO: 273722 - DNA, 465 bp, Homo Sapiens
  misc_feature (307)..(307): n is a, c, g, or t
  misc_feature (383)..(383): n is a, c, g, or t
  misc_feature (394)..(394): n is a, c, g, or t
  misc_feature (409)..(409): n is a, c, g, or t
  misc_feature (435)..(435): n is a, c, g, or t
  misc_feature (444)..(444): n is a, c, g, or t
gagactgcatagggtcggcgtgggtataatacttagttttctttgtagctaacttagtcttccaaagtccttcaagtcctctcagttgtgcttcccacccagccagtcatcagataagctgttcttccctgttgctgctgccctgcctgctttctggacctgcttcctgccttggagttggatccctccattcttgaactccaggtccttcgctttgttcattctctaggtttggtgaagcacaactggtcaagaggcatttgaactaggagcaactgcatcttgaataggggctggggacaatganggctgaaacctactgggctgcattcccaagacagttaaggcaattctaaggttacagaatgagataggaggtcgantccaagatatngatcataaagacctngctgggaggccaggcacgatgggctnatgtttggnaatcccaccaccttggggact

SEQ ID NO: 273723 - DNA, 655 bp, Homo Sapiens
  misc_feature (548)..(548): n is a, c, g, or t
tagcaccctggggcagttagaacacagtttattctttaagtgtaggggtatatgacttaacccttacctggcatggccttgggtcttgtttatcttttgatacctttttgccacaaaaagtcctttctgtcagtcttgatatctcttctttaacatcaatgctggtcggttgttgtgtctaaacttcaaaagggagggagtttaatgaggcatgtctgccctcctgtcctgttatgatcaggaactctgttttaaaggtttttctggggtcaccttggccatgagggtacgttcatgcagttggcagagggctcaggattttatttattttacatcactgactgaatgactttgaaattcatttttgctagtttgctaattttgatcatttgatgatgcatcctaataaagtcaacataaattacaaagcaaaacagtactgacatgcaaaacttactgtgatgaagtcattttgacaactaacattatttgagtcacaagttaaaacaaaaagcaagctctctatcctcacacaagtttgcagcggntatatttttcaagctcaaactacagttttagtggtgttttacggatctctgcaaacacaaaggaaatttccatatttcaaaatccatttaactgtgcaacctgaaga

SEQ ID NO: 273724 - DNA, 601 bp, Homo Sapiens
ctccaggatctctaggatgctaggaagggagtggagacccttggaccaggctaaccaccatgtgccatcctccacacacccctgcccacaggactaggaattcctgcagtgcagggactctgtctgctgcctggcaccgaatggttgcccaaacatacttcttgaggtaaacggaatggcagtcaatacaaaaactcaccctcactctgcacaccaccatagccactgctggctagcaggcaccctagccaggctaggagataacatggtggctggcagcagcttgggctttgaccggaccagtggttagtagcgtgggagagcatcctgagtctaggatggggcagggactggagcaaggcacctggattccagaaatttgggggtaaaccaaggcagacccaccgccccagtgcacttctgctttctatctccagtctcatggctccctggacccccaaaagttatgaaaactaaaccagagctgagaactgggctaggatggaattgcctgtcaacccgagggatgcaaagaggaaccaccgttgggtccattaagaaatccacaaataaaataaaaataaatcagtgtgacacagac

SEQ ID NO: 273725 - DNA, 459 bp, Homo Sapiens
tatagatggaaagcaggcgctgccctcaccgacctggcctcggtagcaggagtgtgtttttgtgtggacaactgcagttgggcccaggtccagccttgctgacggctactcacttgggcctccacccactgatgaattttgggggcagagccaagccccaagatatgttggctggcagcctggggccaggcagggctgctgttgtgggagcccagtcccagggactctgttcagagtggagcctccttactctacagctcgctggtaagccctggtggcccatcagcccacagaagggggcactcactcagtgtgcatcgagcagcggccagcaacctgcctctcacccacctggcccttctgggaggaccgggacttcctggggtcagattggaatgtacgtccaaaataagagtgaatggggatttgctgattattaaaacaattttgtttgcgtgc

SEQ ID NO: 273726 - DNA, 866 bp, Homo Sapiens
ctggcttggagaattgaatgagaatcgtcgacattttgtgatttaattccacagaacgtatttagcccatcgctaatgatgtcagtttgctggaagaataccagccagccagttaaaaggtactttctcacatcaagcaaaagcttcagttcactaaggatattttttattgtgtttatataagttgtttatttctacgtgtgatttgatacattacaatttatgtaaataaattacactcagcgctgctcagcgcatagtcatgaagtgctagaagcattttagtttttaattgaacttcgttcgacttagttatgctaacctggcgttagcgctgagactcgttgagccttgcttgcagtgtttacatgccaagtgcaggtgcatgcgtggcacacagacacaaacagcacctccacagcctcgcagcgtcatggggtgggaacggtgagaaggtttaaaaagcctccgcagggggccagtcatggaagtggccaggaaaccctggtctcctgccgcctgcgtgtggccagccgtgcttccggggcgactgtggtgcggctccttggggtgatgtctcctggcaggcgtgaggccaggactgcatgtgttcagactccacgtcctgggctgagctgggctcttccggggctctgtcaaggcagaaagtgtggcccaaggaagcagcggcactctcagtcggaaacgtattcctaacaggtgtcgggcagaaagtgtggcccaaggaagcagcggctctctcccgttggagacgtgtcaccaacaggaatattcacagtgggtgtttaatttgtgtgcttaaaaagaaaaattagctttggattgactacacacattgcatgaca

SEQ ID NO: 273727 - DNA, 881 bp, Homo Sapiens
ctggaacacaatgttacaatacattaacacacattaaaatagcaaaacaattgcctggcaacccatcaagtagattttcagaacctgctaagaatgaatacagatataaaaactgcaaaacatacatacatagagagcacataatccaaattttaaaaagtaagtctcagctggtaggccaccattgtcttctgagaagtaggatttttaaaatcattctgtgttgatggagcactgaattaaatcactaataccaattgcgctctgccaaaaggtttgaaacacagtgaactgtggcatggttggggtgctagcggtcatgagctttccttaggaagtgaatcccacgtgcctctgcttcccataagagcttctacttctacttccaggggagacacatgggggaacaggccaccatctggcccttggcttctatccctcacctacaagggccttcccttggaagagacagacctatctcatcagtagggcttggatgaagactcagctgcatggggggccttttttggagaggcagattttctcttcctacttgtgtgggaaatctgggatgccaagcctgcctgtgactggaaaggtgagtgtctaaagcccatctggtcacaaatctaagacatgtgctctgatcagctatatcagtaataaagctgatattcaggccatcaattgtctgacttctggctccttccttaattggatctgaattcagaaggttaaaaagtagctattactcaactctctttcttcccaaatgaaaccccaaacatgcaatacagtgcaaaacaaataattctttgatccccttacaagaggtttaataagaactggaagtaccatctttctccaaggggaggtgtacc

SEQ ID NO: 273728 - DNA, 781 bp, Homo Sapiens
  misc_feature (641)..(709): n is a, c, g, or t
tctgtgagtgtgtacgcaggtgtcaaatgtgtacgcacagatcacagggtgtccacactggcttccaaacacgtctctgggttcctttatgtgcgtgtgtatgcacttgtcatgtgtacacacagatcacagggcatccacactggcttccaaacatgtctctgtgtttctgtctgtgggtatgtacacacatatcacatgtggaagaggtaggaagaggctggaacaggtaagggtcatgaaggtgcagtgcactatttgtactgtttgcgctttatatgtgtttggttagttttgcaagaacatgctggtgaaggagagagaaccccaaacaattgattagcagtgctactgaaactcagatatacacaggaatggcaaagaaacatctatgaaaaaaagcagattctggaactccatctccctgagattgtcactcatggggtctgcaggaagtttcaggaatctgcattttcttctaataaacgtggtccacaggttataagttgagataccaaatagaatatataaaagtaaaaaaggaaaatttgaagtttcctgcctagcccaactcttctcattggtagtgtctgttaaattggaaacatatctctttccagacatattaataccttttatannnnnnnnnnnnnnnnnnnnnnnnnnnnnnnnnnnnnnnnnnnnnnnnnnnnnnnnnnnnnnnnnnnnntggaatatttttggcgatggcaacaattttgtgaaaaacctcacagatgagtcgcttagccaagaaatatgg

SEQ ID NO: 273729 - DNA, 825 bp, Homo Sapiens
  misc_feature (508)..(528): n is a, c, g, or t
ttataattagaacactaacattggaagtaaaaacgttgtttataagtaattacttgtaaaattttaagtgaaatgtttttcttcaggcatgtcttcaggcttttgaaaagttcacaaataagaaaacctgtcctctctgtagaaagaaccagtatcaaacccgagtgatacacgatggggcccgcctgttcagaatcaagtgtgtgaccaggtgaggacgccaggcccgtttggcgctaagcagacacagatcaggctatgacaactaacttgttttttgaatagtgggattttatctctcttcttggccaccataatttccccagggccttgtacagcacagggcttataacaactactgaagtattggttgacatagagtcatcataaattagtcattttcaaatatctgtgttttagaatccaagcctactggagaggatgtgttgttagaaagtggtacagaaacctgaggaaaacagtacctcccacagatgccaagttaagnnnnnnnnnnnnnnnnnnnnnggtaggtaaagatcattatgttctccagatatggtctccgtgcgggtggttcacttggggtcaggaaggctaacagaggtggtaaaactttgagacttacttcactttgagggctttttaaaaatgggtgagatgctgctaaaaatcctgtttaactttagttggctttccaacctagatgttcaaatacttctagactttcttttctagttaaatcataaaattaggttaaatcaaagcaacttctgtttggccattttgtgctaattgtttaaataaacttatctcttcagacac

SEQ ID NO: 273730 - DNA, 488 bp, Homo Sapiens
  misc_feature (373)..(373): n is a, c, g, or t
ctcaaaatgggtatgataatgcccatgatatttagctgacaattaaattgacaactttctttttttaattcatatttatcacgtgccaggcaggcaccgaggacttgacaagcttcatcttggttaagtttcccaacacctgtgataaatacctgcattttcattttggaaactacaactaaagtaatattttcatattctcacagtgaaaatgtggcaaagctgcaatgaattcaccatttagtccagactcagtctttatttttaaccctgactaataactagagttgggctttctgaactttgtctactccaatgtctgacacagtgacttcacctcagtgccctcaggaaataatttgtggagtgaatngttgaatgaagtgaccatgtactcattgctgttccaaggcttctgcagaacccccaggtcaggccacatcattgaggctgcaggatctctcttcatagcccagtacgactctccg

SEQ ID NO: 273731 - DNA, 1054 bp, Homo Sapiens
aaattcttcactaaggggtttcaaaccacagtgcaacttcagaccacaatcctgtacaagagccagcttgtgatttacaaattctccagggaaagtgacaggttggagataggcatggggttttgttgttgttcttgttgactcctgcattctgcatggcaggacctaggcctctttacctgtacattgcaggtataaccctttcatgacacaggttcatcagagggttttagtctgcactgtggcagaccttggctttatctcttgccttgacctcctacattatcaacaaagtgagagtttaagatctcctgggcaggagatttcagaagccagcctaagttttgggccttcctcacctcctagggcctttgtgtcaggttcttttgggttcttcatattccttacctccctttcagtgatgttattataaagattttgatttattcagcatttcacggtctgtttagtgaggtgcttaacattgaacttctgaaatgaagggcatatagctagtgtaagcatacctctggtttgccctgaatagttatgggttacatctgttttcccaaaacaataatagctccccctttcacacacgcacaaaaattgtctcatttgtatgataaacttgtgtgcctcctacacatagccctgtgaattcgattttgaatcacagcatggatggagatcaacaaagttgtatagatattcaagtgttggctgggggggcgctattcatggagaatcccctccttaattctgcaaaccagatctagtacattgtgaatattctataatcattggctattttttacagctagcttttcagatctatacctgcttatgtacatgaaatgtagctcctgtaaattgcagattagtgtatattaatctaagatgccatcaactgtaaaatacctgttattttctataccacgaagaaaggatactgccaattaaactttggtatgcattgttggtaaaatgcatcctatttgtggaaaaaaattagcattttaagattaatacaatacaatacctgtaaagctca

SEQ ID NO: 273732 - DNA, 533 bp, Homo Sapiens
cagatctctaccagctgctccagagactcttcaaaagccactcatctctggagggattgctcaaagccctgagccaggctagcacagatcctaaggaatcaacatctcccgagaaacgtgacatgcatgacttctttgtgggacttatgggcaagaggagcgtccagccagactctcctacggatgtgaatcaagagaacgtccccagctttggcatcctcaagtatcccccgagagcagaataggtactccacttccggactcctggactgcattaggaagacctctttccctgtcccaatccccaggtgcgcacgctcctgttaccctttctcttccctgttcttgtaacattcttgtgctttgactccttctccatcttttctacctgaccctggtgtggaaactgcatagtgaatatccccaaccccaatgggcattgactgtagaataccctagagttcctgtagtgtcctacattaaaaatataatgtctctctctattcctcaacaataaaggatttttgcatatg

SEQ ID NO: 273733 - DNA, 831 bp, Homo Sapiens
  misc_feature (39)..(39): n is a, c, g, or t
  misc_feature (42)..(42): n is a, c, g, or t
  misc_feature (47)..(47): n is a, c, g, or t
  misc_feature (153)..(153): n is a, c, g, or t
  misc_feature (162)..(196): n is a, c, g, or t
gcaaacaccttgagaatggcatttccaaggcccttgctngtngcagnggcaccaacgccagtcgaggaccacgcctttctgagggatgcttggaatctcacagacaggggttcacattccgactctgcttcctagaggctatgtggccttggngtgtctggnnnnnnnnnnnnnnnnnnnnnnnnnnnnnnnnnnngagtcatggtagcctctccttatgggtttatggagagcttcggatatggagggtggggcagcacacagggctcaagctgcagctcttagttacctgcttttcctttgcaggtgtcctatgggcctgatggaaaggtggcaggcgaaatgcacctggcctcagcgtcaggggctgtgaatgcagtagcacttgtagctatgaaggtcagagtggactaggatggtccttccaccaagaagcctgggccttcctgctcctcgttgtccagctgcagaaactgatctcatccctcagggcttggcacaactgccccttcctcctcacattcccaaatatacctacccctccccaactcaatcctcctcaccagactgtggttccaggatgacagggcagagttggactcacctgtgtctgccaggccagctcaccgtgggggcaggtcccaagaggcctctggatttggaccaacttccagtgtgaccttgaaccaagccttcgcctccctcagcctccgttgcatgaggggttgtgctggcacatctcagagcaggtagcgctacctggtgagttgagggctctgtccatcatctttgtcactgtaatgctgggtaacaaataaacacgaaacaatg

SEQ ID NO: 273734 - DNA, 757 bp, Homo Sapiens
aggacaactttctgcggcacctggcagagaagaacagttcagcacagcatcattaacatccgtctccttagtgtgttctccaggagacacgtccccatgtgtgagcgtgcacagagggagtcggtgagcatttccttagttctcagactctcctccgcctctaccaagagcttcgccagtgtcactgaatcaacagatccaagggaatgaacaagaagactaccttgagctcacagagggactgtcatctaaaccaggggaaccactgaactaaagcccaatttgcttgcattttctgatgacttttataagtttcaaatactcagacttgtggaattttataatttcatatcagctgatgaggtatgcttgcttttatatcccagacttctcctcaaagaggggataggcctggtttcctttgtactaatcgggaaggctgtgagattaatccagagcattaattgtatcactgtgtatggtaaggaattcttttcagcttttggtgccagctacagagttgagctggccatgtttcacagtatatcaagcattatagagaaagacagaaattttcttctttgtgtagctctcctaacgcactctttattttactacagaaattattttagagtttttgtatagacttctttggtagtctgtttctaaaatgaaatgtatttcaataagcagtgtaattttttcagtgtagctgaacctatgttgtaaaatagaaaaaaatttttataatcatcaa

SEQ ID NO: 273735 - DNA, 572 bp, Homo Sapiens
ttgagatggagtctcgccctgttgcccaggctggagtgactctgtcttaaaacaaaacaccaacaacaaaaactagctcttacaacacacaggacatatgtagccactaagcatcagcagggccttaccagcaatctgtaccacctggtttctccaacacactgtctccacagacataagtcttccagagtcaaggataatttataatccaatggagcagctgatttagtccagtagctcacactagagtgactaaagttcaggcctgcacaaacaaacagcaccaacacctaccccacccccttttcttagtgctgggacatcaaagtaaacacacaggggttactgaatgcaaacatccttgtacacataaaagtagtgatgctggaaatggagagggtgaagggagaaggctgggacagcaaaccccaaaacgaccaaactgcattttttagaaactaaatgttacttctccctaactcctatttcatccaaccttcacctgtcacaactgaggtctgggtttaggattacagcatccgatacagactatatttcaaaagagagagaag

SEQ ID NO: 273736 - DNA, 489 bp, Homo Sapiens
  misc_feature (284)..(284): n is a, c, g, or t
tatctagagatagtaaatggtagaagttcaatgaagctgtatgaccctgagttagttcaaaaccttgttctgccactagctatataaccctgggtaggttaacttactactctaatctcagtttgcaacctgcgaataggcctgatagtgaatagtatcagcctcataggcagttttgagcattaagtacgttcatatctgtgaattgcttggctctttctgtgtcttgcccataagttcttagaaaacatgaaagcatattgcttttattcccaagttactanaggtgtatgtcagaaacatttttcctatatatgattattttcaactttttaaggttttaggcagatttagttataaatactgttttaaggtcaagtttcctgggaaacaggctacgaggcagagatttgcagttgaagtttattatggagtgtaatttggatcaacagtagtagcagagagtgaaagaatcaggaaccagcagaa

SEQ ID NO: 273737 - DNA, 801 bp, Homo Sapiens
agcatgcagtgtggggttagaaagagacgcacggacgggctgtggcagcctggggagagtgccatgcacctgcagaagtagtgtgagcctctcacgccatgatgaggtcacagttcccctgcactatctcttgatgtgtgatgtcccaccgaggcccacaggtgggctgtgtccctcgatgtctggaacatacattgaggtcacagggttctgccttcccggcgcccccttctagatgttgccacgtggtcaatggataagcagacagcacccgaggagctgctgaaacacagcgtctatcccgagctttctcttccttagtgctacttgctcaacactgcctgtgcctcatgtctcgctctctctcccctgggtgggagcacagggagaccactctgtgaagctctgggttcctgacagcctcattagaaatgaagccaaaaagcacaggcacagatcaggagaacagggttgtgacccctggaaatgacacgtctgtccctggaggtggcgtccttccccatgcttcttcccaagggcggaggaaacccagctccagggtgacccacagccacttggatctccgggtatcagaagactggcgccaggcccatagccgggttttcacaccggaggaggtgggaagggggttttcattttgttttgttttgttctgttttaataaagtcatgcttgattaaataaaatgagagaaaagtaaatttaaggaattgtgagggagaagaaagagcagattgttgtgaacagttggtgggatatctatgcagatagacagtgcac

SEQ ID NO: 273738 - DNA, 502 bp, Homo Sapiens
  misc_feature (485)..(485): n is a, c, g, or t
cccagcgattgttactggttggtcctgttgccaagacatcggactgtaactttggaaagaacccctgctcatatttgccttgaccaattttcatatcaagtagatgtgggtgattgcagtgtgatccattttcatcagtctctgctcaattgattgggctgcttcttttaaagtgctgcatttctgatatatagatgtccgcaagggtgggtgcccttacattatacagccttatcttatcaatccgagtgtcaaagacccgaagcaaaggatctttctcttcccactgagacataattttattatcaataaaggtggcaaacatctgtgtttcaatgaagcgtgaaagaaatggcaggtaaggctcaggctggtcagacagaaaggaagctttgtcaaagttctgcatctgttcccggttggtcagccaggattccatgtcctgggcagtctgaatgacaaatgcttcgtaatctgcaaacatnctgtgtaaaacggttag

SEQ ID NO: 273739 - DNA, 636 bp, Homo Sapiens
tcccagggctgatccagagctaggtggggcctttactgagacccccacaaaatgcccgactccgcacaggcatcccgagctcacatgcttggcctctgacccctgccctttgacctctgacccttcagagccccggcgctgtgctttcctgtcggacccaagaggaccccgctctggagagacgcttgaagatgggaccccttctctgcaaacgcctgtggaatcaggtacaaggaaatacggcaactcgctgctcaagctgctggctggtgcccaggaaaaatgtcccagcccaagaggctatgtggcagatgtggagtgtccctggaccccaattcaaggaaggataaacccagcttcaccctgcttgagctgctgcttctgcctccgtttcaccagtgggagaatgggcagaagcagctctcctaggaggattggggaaagagccggcctgcctcctctctgccatctccagattcaaggatcccgggggaagacccaggcctcaggtgcagagcctgctaggggtcaccagccccttctccagtcagccttgccgaggccccctcaggagacgctctcaggaaggatgagcattgttacagcagggacaataaagtacagagatatgccgag

SEQ ID NO: 273740 - DNA, 803 bp, Homo Sapiens
gaaatgaatggctctttatagaggaaacagattcacaaggtacaagtaaaacatttgaattcgggtctcctcaccctctttcctctctagattcagaaaacagcaaagggttttagctttgatacttcaggcaggatgaggtggacacaggcaatggaaaagtcagcctgagagctagggaggaaactgagtctttcttcatctagtcagggaaacttccaggagacaagctttttgcctcaggctgcttcagggactcaggtaccaggttcttactctttatggacctacgtacttactgcctgctcaaaggagactatgtggacactgtctgctcttccatcttgtacagagaccacaagttgaaacttctagtctgaggtcattccatcccactttgaatggattaaggatgacaggcatcaaccagggcaagttttaaccttgccagtttgatattgggtgctaagtggagtggctaatgtctatgttttgtcatgcatattttgctctggctggaaaagaaaatgttaatccacttcctccgtgcagcctgttgggccgcatcttgcaaaactgagaggattttttgcctatggtcccatgaaactgaaaaaagatgattttcctttgtgatatggtttggcccccccgggctatggtgcaagaagcagggtcgctagggccactcagggagaaggaacccagaaacctagcatgctggtgaaaggtgagaatttcttaccagtcagccttctagcctctctctctgtgcaaactggttgaaggaatggtaaaaatca

SEQ ID NO: 273741 - DNA, 495 bp, Homo Sapiens
  misc_feature (485)..(485): n is a, c, g, or t
cagcctgggaatatggagaccagtgaaggaccaggcctggagagcacagggtcctacctgggcatccagcagaggagcccctaaaggccaggagcaccccaagaggagggagggcagccagcctccattgacggcgagcctccagccctctcctactttgatcaccatttctctccaggctttctgcctccgagatgtggcaccatagtgcggtgccctgtggcttcaccgccctacttccacctccgcccagcctgtaatgtttatataagcagcctcaaggaccaagaaccatctgcgaaaggacacacacaggaaattcataaaagaaatctgaatggataaaaccatgaaaaaaagtatgcttcattagtaattaaagaaaggcaaatagagctggaagcatttttcccttagcaaaccataacagaaaaaaataagacccactattgccaaagagactactgaaaaaacattcccatacnttgcgtgtgg

SEQ ID NO: 273742 - DNA, 827 bp, Homo Sapiens
  misc_feature (434)..(434): n is a, c, g, or t
cctcgtgtaattctcagaacaactccagaggtaggttcagtcctctacccctttcacgaatgtggacggtgaccctcagaacggggaagtctgtaaatgagaaagctgtggatcatagtcacgacagcttttccccacagcctgactctacacacaggtttttggtgcatttgcccaaagaggttatgtgactgctcccccaggacattaaaactggaggagcccttggcagtcgttgctcgtgttcccatcagcttatagatcaggaagccaaaggccagagaagtgttaccacttgccaaggtcccttggtctaggcatccctaaattatatagaagatgaaatccaaaccagtggctctggctggttgagaagctgggtcaaggtctgaagaagagaagaggttgcaactagtcattaaaatgaaggtttngaggatcacggaccttcaattaaagtccagagaaacagccctggggccctcctgaaagcttaacctcttggctccaaggtggagaggtgttcatctcctccactcctttaaatatggagctcattcctggaaggggcttcctcaatccggaaggactgatgctggggatggccatagaggaatttggccgcaccacgaaaccccgtcagtggcgtgagagtcacacacgatgggcttcctcaccaggcctgcaacatctgttgggggaagaaaggaattaaaacagggggaggcctggatttttgaaatctttccagtgtcattcgagcgcattctgtgggaagcccgggagtttggagaagctgccgcggcctggatatatttcctgattgg

SEQ ID NO: 273743 - DNA, 356 bp, Homo Sapiens
aagactaagactgaatgagggttataagagagactgtagtatgtgtgactaaatgttctaacaaggtacagtgtatctaggaaataacagggagatgtggtgagaacatattaaaggaatattatgcttgctgattatagttattaactgggagtaaaggacagtatttcaaattagatatagagggagagagagggcagggagaagataggtcctagttaatttctagttttatcctttgaaccacattaagtattttacatactcaacaaaattgcatcggcaaggatggaggaaccctaaaactgaatacaaacagacaaatgaacctgtttataaaattgataaccacacag

SEQ ID NO: 273744 - DNA, 834 bp, Homo Sapiens
  misc_feature (47)..(134): n is a, c, g, or t
aggctgaagtgggagaagaggattgctgagctcaggaggtcaatcannnnnnnnnnnnnnnnnnnnnnnnnnnnnnnnnnnnnnnnnnnnnnnnnnnnnnnnnnnnnnnnnnnnnnnnnnnnnnnnnnnnnnnngacagttgaatcagtttaatacagtacttctcaaatatggtccataagaacaaaactatttaataataacagaaagacactatttgcctcttaaaatgttctggcatttgtgctgatgttgcagggcaatgaggaggtaaaaccactggcaccttagtacagaaggtatcagtggcaccaaagtatgctagtagtcattgtgttcttcactatcacacactcagagtaaaaaaatacgtttcacttaatcctaaatgaagaagtaaaaattactagttttctaagtctttattccttaaggacacatcttaattgcttgtgtgacaaaatgggaggtatgcctaaagcacttctgcatactgaagtatggtggtcgtcccaaaatgaaaacatttgtgtgtgcttttgacttgtgagcttgtttctgtttctggacctaccctgggcaggtttccacagttgagaatcttagcgtattgctgttacctcaaatttccacacactaccagtttgtcttttgaaatgttatttttataagatgtcaaccctggtatggttcacttttgttatatgttggcacctctgtgggttacggaaagctttgccctccaaagcaaccagttggtttttaggaaagggaaatattgatctttgtggataagtagagtcttcttaaaagctattagaaggctctctttgg

SEQ ID NO: 273745 - DNA, 662 bp, Homo Sapiens
attttttaaaaattgtgataatttttttaaaaagatgccagctgctaattccacctaggtagagacatttaaacaagtttggctataatacaggaattttgatgaatttgtttaaatgagattctcattataatacaatcccttgctgtctggaagaaataagtcagtctagaaacatttacagaacagctgctatatgcaggggttttttttaggtctcatggggtgttcaagaatgttgattccaaagtctcactcctccaggggtgtcccgtagtcaaaaggttgatgctgatgcctgtggaaagagcggctgaagatggcttctcaggctttcatcttgaccccctcctcttacttcacacacgccctgggctccagcctcagcacccaagacgtcaaccacctcccaccaggcttgtgatgccaaatctttatctctagcctgactcccagcaccttccagttgtctgcccagagtggaggctggctggctccagttccctttccaacagcagccagggtggcctgcctcaaacgcacacatctggccacagcactcgcccacgcccgcgtaggagctggccctggtcaccgtcatccacgtcagagatcacaaacatttggaaatgtaacttgtttttcaaataaatgttatattc

SEQ ID NO: 273746 - DNA, 564 bp, Homo Sapiens
cttaggatggaggtagcccaggtttgacttcctgaatccccagcagcaggccttttctttctagagctctttgcaggaagagaaagctttggaccagctcatgctgggtgtaatcctttgtggaagcctccctgtttcccttctctgatctgccccggagattcctgtgtgtcccagtctctagggagggaggcttagctggagaggttcagggcaggagaaagcaggagaatgcagaggccgcggggagaggacagaaagtatatcatttataactaacctttagcctttagccactcaaaaatatttcctaatagcctaagggttcttggcaggtctttccccacatcagcaagaaatcttgggagttgggaagagtcagaccttgttccctgaacaagctttctgctttggccaagagttgttaggagattaatgcctgtccccgaaaggcacaggttggagtgtttacttcttcctctcctttcctctctccccccttagagatcgtgacccttcctgcttgcctccctggtgggctctttcaggctggacacagggttt

SEQ ID NO: 273747 - DNA, 763 bp, Homo Sapiens
  misc_feature (329)..(351): n is a, c, g, or t
  misc_feature (646)..(646): n is a, c, g, or t
  misc_feature (714)..(714): n is a, c, g, or t
ctccaatggggaatgcgggatcgggcggttaaacggatggaacgaatctggaaccagtagacggacagcctaaggaaagcgctgggaccagtcgtccaatcggctctccaaaagagggaggtcttcgatttggggttgtgaggaaggggagtcggtgcctgtaatggcgtgtgagggtggatgttttatccacgatgacttctctaacgaagcctttaggcctcagtcccatacacctccttgaaagcgtaagtttgctcctgtattcctcgacttgagcatttttcccccgccccctcaccacttgaggtttggggaacaggagttgnnnnnnnnnnnnnnnnnnnnnnnaaataatactttcagaagtcgcttctttaggaagactgttaaaatgttagaacgaatgggagaaatctctatgtactgtcatggaaaggcgttcaagaaatatctccttcctgatagtgcatatttctactgacaaatatgtttgtaggtccacagaaaagttttggaaagctacacaccaaagtgtcaatcctagggacacagtaggatcgaggcagattagatctttaatgtttaaaactttgcaaggttaataatttgtgattaaaattaaataaaaaatgaagtcgattgntttgtgtttctagtcataatcacatacttacaaccccttttctgttttatgtaatccatgtgcccagngcttttattttagtctctttcttccgggaactttatatattttcttttc

SEQ ID NO: 273748 - DNA, 405 bp, Homo Sapiens
tggctctgagaagggggctggagccagaactggagctggccgggcagggacctaagcaggaagaggctgcccagccccctcttcttgcccctccctgccctgcccctcccaccaccacaggggcttctggagctagccatggtcttgtctgaaaacctagggactgcctctgtcccagtccctggggccctgtttcctcctgaccttgtttctcttcaaggttgacttgagggttttattattattatttattaacttttatacagcccagagtccccaagcctcacccgtctgcccagtctagtctggcatcaaaaatggcagctggcctggccagtcagtctccagagggacatgaggctttcctggggcaggaatgtaggggctcagggttcgctgctccag

SEQ ID NO: 273749 - DNA, 995 bp, Homo Sapiens
  misc_feature (555)..(555): n is a, c, g, or t
agagcctagatccttgaagtatttgaaggtgtttgggtcggcattcagctaaactttaacagggactatgtggactgtttattctcctgccattcctagcattacttgagccactcgagtggcactaaagtggtacttggtaaataggagccagattcttagtcttttaacccttgaaccagccctgcctacagacttaagtggggggaaaaggatcaggaagagaggtcatatgagagaggatcctgcatctctccacttgggttcttcagttcacttggccctttgtgaaagtgtagatgatagagacagagcaggaaccatcttgggaatttcctttacgcttttcttttaacagccctctgggtagggagggggctggtggggcaggaaggcctttgtgggacccacaccaactaatctatgctctctcgtgttaggcttggagagggaaaggttgctctgtgagtcagtgatagaagtagtattgatcactaatcttctaactttccattctctagctgcctgcaacagtagcttgttttagggtgttgntcttacttttctcttacctcctcctcccatgaaactactttaccgaatgatggagctggaaaggacatttggaagtcatctagtctatttcccctgcctccaaatctaattctctctggatgagataatatgacagctacaattattctgaactctgttctagtgttgcatggcaacagcctgtcttaggtccctttgtatctttctgggagtttcccccactggaatttctagactcagggtaccagaggggagaatatctggctaccaacactaccagagttaggcctttcataaccatagctgctggaaatttggcattgttacagattgctaatagtctgtctctaatctttcaaagatagaattgaatttatcatgtgcctctttcctaactcagaatcttctttccctgccacctgctctattactttgcttgc

SEQ ID NO: 273750 - DNA, 654 bp, Homo Sapiens
cactattggtagaactttgttctttgttcctattagaaaagtccagaaaccagcacactgttctttccatttgtagttgaaatcagtattcatttggcatggctgagcctccacaggaatgcgttgtggcatctcttccatagttgagtgaagaagaaaaggcaagggaagaaagcatacccaccagtaattaattttgtagaatttagtacacctctttaggtttaaaattccaggagaagggttctcatctaggacaccagggatgtacagaaaggcaccgttctttatcagctgcctaagcagtgtcatccccaggctcatggagtggggttgtagagggagaacaggccagaaggcatcttgcacggtggggtctccaaaggtgtccctaatccacagcttggggagctaggacccacaggggctcccaagtcaagattctgagccaagttgttatgagatgactcctaggtgttagaattgccttagtgcttccaggtgattgtcatttccagccaggcagagaaacactatcctaaatgaaagcccagtgagttttcaggatcagctatcaggtaaaaggcactgagctgtagacagaagattctgctacttacagaattttgagacccattaaaaaagttaaatgag

SEQ ID NO: 273751 - DNA, 980 bp, Homo Sapiens
  misc_feature (572)..(572): n is a, c, g, or t
aattgacacaaaattatacatatttctggtgtacaatgagatgtttgatatacattgtacaaggatcaaatcagggtaattaacaaatccaccacctcaaacattaatcatttctttgtagtaaaaacattcaaaatcctctcttctagctatcaagttattttgtaatttgtgtaatattctggtaaaacggcctaaactggggtcatatttcctcatcagccgcattctgctaatgccagatgccctgggaagatcttcactgccatcttggaaggatgcagaatgtggtgatgaggaagccattctcccaggtacagcaaaggcagagtctgttggcaacccacctgaagggcagtagacttctaaatagcgagttgaggtccatgtgggtgaagctaaaacccagaacacttttactggctaaaaatcatgatgattcaaaactcaaaccttcacatggatgcacccaaagtgaatcaacaaaatttaaagtcctttgaatagatcaatcttctctaactagaaaacagacctcattttctctctttgccatatcaatattcccagtnaggccctgtgccaaatgcctctttgggtttctttcactcccctttgcaagctgttcttttgttcctgtctctcttttgtggctccccagggtgatgtgcaaaaaagctccttcaaccaggtttccactgtctttttttcctacttaggataatgttctcctgctatcacccagggaatgacatagagggatctttctccttctatattcatgcagctgaggcacatcttcgattctttttgttaatctttttttcccagttaagatacatttttgttatgtcctctatgggacacacctgggtgtccatactacagtgtggaggaccttgagggtaaaattatccacagcccagtggagtttggacacaaaatcttacatgactcgatcaatttcactttgcattttg

SEQ ID NO: 273752 - DNA, 647 bp, Homo Sapiens
atttatatttggctttcttccagaaaggatttaaagcagcaattagtattattttctttatgacttcagcgtaggttaggtaatttccagatgtctttatgataaaattgtcatattcctcctagtatttctttaaattggactggaaattttccctcccctctgcagtcattggttttggattctgcctttgtataaacacagattagcattgatgcacaaaacctcacatctgctgatctaattgctgagagagacctgttcccaggagagtgagctgtttgtgcagctggctgctgtaacagaagttctttttcctaactctgttagttctgaaaggactttgaatttgtagtgccttctagtttatgttcttttagaaatgagtaaaggagaggcttaagttgacacagtttgcaggtccggctttgaaagaatgtttgtcaaaaaccaaagctcaaactatttttgcagtttttctgaaagtatgaaaaatttcaaaacagtaacaaagccaagtccccagaaactgagtagaaatagaagttaagtggtttgttgttgttctcaaattgttgggactcttagtgtaatttttaaaagtagttcttgtataaatagcaaatgattcattctaatttttctgt

SEQ ID NO: 273753 - DNA, 533 bp, Homo Sapiens
cttttgtaattcaataaatttgggaaatgctgaggtagggcagagctaaatgtggcccctaagagatgaagtggtgagtcactgggatagcgcccaaagggatgtggacaggagctgctggacatgcccttggctctcaccttcaaagggaagtggactgtgtgagttccctctcacgattatctcaggtcagtatttgcctttgtaattgatggagaacttcttaatttctctctctagtgcgtctagagtgttgacagttgtttccatggacttcaaatcaacccaaccctgtgagcacagactttcagcaccagagtcagatttcccaaaaatgctattcttgaagcgtagagccagactcacagatcctgtaaagaaaacagatctttcagcaagtgaaacacccaatcttccattgcatgggactcacagaggttctgagggagagatgtgaatagaaggagtgatcatcactgtggactctatttcttccatctgtgcgtgcaagatttatatctgtatgtgtttgt

SEQ ID NO: 273754 - DNA, 736 bp, Homo Sapiens
aagctgtgtaaatgagaagcagttgcaggctcagaatggtttctatgtcttttaaaaggatctggtcttaggattacaggcttgagccactgcacctggcctaaaatgaacgtctttataggtaacatccagaccctgcagtgagttagctagggagatgaatgttgaatttgggaaaaggcatgtattacgtgtaacttcactctttttttctgacttctccctgtaaatctttttctgtatgatttattttggtagatttagataggtcttctggccatggttgttgagatgtttgttattgaaagatcaaaggatagctgttgcttaatggtaaaacaaatttccaacaggctcagttttagttcccttattcctaaagtatagataacacaaaagcaagaatttgtttttagaaaattggctactccgtaggctgaggcagaagagccgcttgaacctgggaggcagagactgcagtgatgccccatatcatatatggaatgcatccccatttacacctaaaatttgaaacagaatctgagaaacaaaatatttctaatctccttcctgatcctcttcactgataccaggtttgcagaaaatataaggccagctcttatcttttgagagaagactcttatttctttgtctaagattgtctatacccctttttatctgcctcttttaaaaatccttgtccagccactatatttttaatttaatcaacactcag

SEQ ID NO: 273755 - DNA, 387 bp, Homo Sapiens
  misc_feature (122)..(148): n is a, c, g, or t
ttgctgctctgaaattttaccacttggtgtctacatttgagctttcttcatccactctgctcaatatctggaacactttcaatctaaactttgtctcagagctgaaatataataggagttannnnnnnnnnnnnnnnnnnnnnnnnnnctcctatttgacagatattgaagctctcggaccttttctatctcttagcatttctcttggactcgacatttatttgtaagatttcactgctctgtatttaaggtaactatttctctgaaaaagtacccttccttcagcaaatctccctctgcttttggcccagttatttatggaatttatggcatcttcaccacagttgcgtaaagatccgggctggggggagggcaagagaaacagca

SEQ ID NO: 273756 - DNA, 716 bp, Homo Sapiens
ggcacgagaaaatttataccattctcaagagttacatcagatcctcaatcaaatgatatcatgctggttaagcttcaaacagccgcaaaactcaataaacatgtcaagatgctccacataagatccaaaacctctcttagatctggaaccaaatgcaaggttacctggctggggagccaccgatccagattcattaagaccttctgacaccctgcgagaagtcactggtactgtcctaagtcgaaaactttgcaacagccaaagttactacaacggcgacccttctatcaccaaagacatggtctgtgcaggaggatgccaaaggccagaaggattcctgtaagggtgactcagggggccccttgatctgtaaaggtgtcttccacgctatagtctctggaggtcatgaatgtggtgttgccacaaagcctggaatctacaccctgttaaccaagaaataccagacttggatcaaaagcaaccttgtcccgcctcatacaaattaagttacaaataattttattggatgcacttgcttcttttttcctaatatgctcgcaggttagagttgggtgtaagtaaagcagagcacatatggggtccatttttgcacttgtaagtcattttattaaggaatcaagttctttttcacttgtatcactgatgtatttctaccatgctggttttattctaaataaaatttagaagactctctg

SEQ ID NO: 273757 - DNA, 961 bp, Homo Sapiens
  misc_feature (62)..(62): n is a, c, g, or t
ccccatgccctgtactttctccccactagaaatagccctggctctgaaatgtgttttaatcntcccactttgggtccaccagttcctagcctttgagcttaggcctctcctccaggaccctccctggctacgatttcccaacccctctcgaccttccattcactgaccttgccactttcttgcctctagtctgcacctctccccatccctagtgtggattccatccccttgtgaacgctgccacccgtcctggcagagactcagtacttccactctctgaatgcatttcttcttcctaggcacaccagaagactacatttcctagccccccacccccttgcagtgtctgggaccatgtgactccttaattaggtcacttctctctcctgggaggccctctctgccctctctaagtctaactagtggcaaaggatctaagggaagaaacctggcagagttactagttccaagaagcctgggtccctgaatcaccacatggaagtctacgcgcccaccacctgaatggactaaggtatgaacagaagtaatacacacccctttagggccaaggaggtgaaacagctggtatgccttcctcacactctctgctttcctggtgacctaggaagctgcaggatgaagacaacagcatcacaaggaggaagccaggatccctgtgttaccacaaggaggagagatgcctaaccaagaccgtctgcaaggattttgtgtgagccagaagcagagctgtatggtgttcagccactgagatttgagggctgtttgttacagcagttgacctatcctgactgacacatcacatcattcctttccccaccatgtgtctaacatgctaccaaattgaattttaagtaaattagtacttataaattaagtacaaatagcttttcaaattcacatgaatctttggtaaataaaactggttgtaaaattattgata

SEQ ID NO: 273758 - DNA, 1054 bp, Homo Sapiens
attcggttttgtctgagaccttgaatgtgcttctgtttggactggaatgccactaacagttcttagcagttctctattttggagacatggaaaactttataccttgtaaaatgtcttaaccccctgggtgtcagaaccagcctaggtttctgggggggattgaaaagctgaattaggttgattgtccctggggtcacccagcaaggttaggcttaacgttcctggggatatgggggacaggtgttggtttgttcctgccacgtgttccttattgcgctgacctaggtggacttaacccttctgaaattgcatactcaagtctcaccttcccagttaaagcctttccaaagccttcccttccggaggtggaaccggacccatggtcttcttaggaccccactgtctcatgcaatcctgtcacacttgttactgaacttttgtttatatgtctgtctctcccctgtagactgagagtttcttgaggggaacagtgccctatgcatgtgtgtattaatagttcctacacttgggcctgcctcaaagtagggattgaactctgtttgtgaaatgaaagagactatgcatctgcgcgtaaccatcacaatcgtgtttctgttttggccttaccagtgaaacatgtttcgcagaacagccaggtttttggagtgagatgaaaacgaactggaaacagttcctgatctatctaactgtcacctaattacaagcatttagcattctttatgaagtgtgcaatgaggcagatactttctgggaaaacaaaaatggggtctatcttattaggtcaggtttttgagacagacacatgagataaaggcttggtacagaaacgctggctataaaaagcaaaattagggcaccttggcatccagttggagtgaatagtttcagtgatgtaataagatactctggcacattctgtctgctagaaagggtgtatagaaattcaggtgtgcccctgctgatgtgatttttctgtcaggaccttgcaaaatggaaagatcgtcgaaaaagttacacttcagatctgcagaag

SEQ ID NO: 273759 - DNA, 714 bp, Homo Sapiens
  misc_feature (118)..(476): n is a, c, g, or t
agtgacaagcaaccttaaaagtagacacaaggagactggcagacagaggaagaagaggcagcaatgtgaccccggaggtggaaatctcagtgatggggccaggaatgtcaaggaatgnnnnnnnnnnnnnnnnnnnnnnnnnnnnnnnnnnnnnnnnnnnnnnnnnnnnnnnnnnnnnnnnnnnnnnnnnnnnnnnnnnnnnnnnnnnnnnnnnnnnnnnnnnnnnnnnnnnnnnnnnnnnnnnnnnnnnnnnnnnnnnnnnnnnnnnnnnnnnnnnnnnnnnnnnnnnnnnnnnnnnnnnnnnnnnnnnnnnnnnnnnnnnnnnnnnnnnnnnnnnnnnnnnnnnnnnnnnnnnnnnnnnnnnnnnnnnnnnnnnnnnnnnnnnnnnnnnnnnnnnnnnnnnnnnnnnnnnnnnnnnnnnnnnnnnnnnnnnnnnnnnnnnnnnnnnnnnnnnnnnnnnnnnnnnnnnnnnnnnnaatacagccattagaatggatgatgtttaccgctacttgctgacaaagaaaaatgttcacttgtgttaaatgagaaagacaggtctcagaacagcaacaatgttctagacgattctgttttttaatactcagtatatgtagaggagattaaagggatttatcgtgagatgctcatagggggcaactgttatttcagatttcttttttaaaatttttaattgacaagtaataattgtat

SEQ ID NO: 273760 - DNA, 372 bp, Homo Sapiens
  misc_feature (311)..(311): n is a, c, g, or t
  misc_feature (322)..(322): n is a, c, g, or t
  misc_feature (326)..(326): n is a, c, g, or t
ttttaaaaaagaaatctgaaataacagttgccccctatgagcatctcacgataaatccctttaatctcctctacatatactgagtattaaaaaacagaatcgtctagaacattgttgctgttctgagacctgtctttctcatttaacacaagtgaacatttttctttgtcagcaagtagcggtaaacatcatccattctaatggctgtattttttaataggtggagttgtatcttcagggcagattcctaacagtggaatggctgggtcacaagggaaatgtgtaagtagttttgtacatgttgtcaaatntccaccataanggtngtgccgtttgtttcccaccatagtgatgagactgctgattcctgtc

SEQ ID NO: 273761 - DNA, 823 bp, Homo Sapiens
gagagccctgtattcagaggaggcatgtgacatgccatggtcccccatttcccctgccctaaacatctctggagaaagtcaagtgtgtgtggcttctacagcagggctggatgtttttccctggggtaggaggggcatttacctgcttttcttcagccattattaatagggctcaattcaggaggggaggagaatggtgcctgtaactcagactccccagcacagcctcggcctgcaggcttcagccctgttggagtcagggcttgcgtaaggaatgctgtcatggatccaagccagatagattacaaatgatggaatctgatgtttcctgttgggtttggggaagggattcaatgtggtgtgggcttaggtccccacagtttacctcagaaatagtcaagatgcagggagctgaatgaggactctcgaggcagctttgccagcctggagcccaggtgagtcactaccacctcagaaacatccttcagaggccaggattacaggccccaggcgggagtcggagcatccaggctgctggtccggttctctccactgacgtcatcacccccgcttagtctggaatggctggcaacctctgcctgaggatgagagctggctggaagtggaaaagcaggaaatgtttccagattggaaactcaaggcacgtttgcgcaatactgcactcggccaagactgtgtggctgacctgcatgcctaatgggatcccaggtctgaaacagggttctgcagaaccattggtctgacctcatacctcccacctagacacaatgatatcttcttggccaagaaaaaatgacctgta

SEQ ID NO: 273762 - DNA, 558 bp, Homo Sapiens
  misc_feature (20)..(20): n is a, c, g, or t
tgtgaccagtggctcccagnattcccaagcacaaggaaggatgggcattttgtggcttttaatttattgagcacttggacatgtagatcattttacttatacagtggaaacacataaataatttgcttctagaccagcctctgtctagacttgcttctagacagaatctcccagagtgtggaaatgttgccttagaaatggtgattaaaatcactcatttctattcattcctcaggcacttgagtgacagttgtttaccaggcactgtgtgtagccccagggtttggccattcaggggtgcacacatgggaccatgttagctgatgccagttgaaggccagggtatttgggaaggggaagggtattagagtcatgaccaagcaacccttctttttccctttgacttctacagaaatctgggcctgagacattgtctacaattgggttctagatacatcaggaacccatcttggataaataaatacctatcttttgttttgaaaacatctcagttttcaagactgctcttagtattacatgaacaatatttgtatgctg

SEQ ID NO: 273763 - DNA, 717 bp, Homo Sapiens
  misc_feature (692)..(692): n is a, c, g, or t
atgatgtctcagtataaactttctcagaattccatgcacagtagtcctgcatcttccaattatcaacaaaccactatctcacatagcccctccagccggtttgtgccaccacagacaagctctgggaacagatttatgccacagcaaaatagcccagtgcctagtccatacgccccacaaagccctgcaggatacatgccatattcccatccttcaagttacacaacacatccacagatgcaacaagcatcggtatcaagtcccattgttgcaggtggtttgagaaacatacatgataataaagtttctggtccgttgtctggcaattcagctaatcatcatgctgataatcctagacatggttcaagtgaggactacctacacatggtgcacaggctaagtagtgacgatggagattcttcaacaatgaggaatgctgcatcttttcccttgagatctccacagccagtatgctcccctgctggaagtgaaggaactcctaaaggctcaagaccacctttaatcctacaatctcagtctctaccttgttcatcacctcgagatgttccaccagatatcttgctagattctccagaaagaaaacaaaagaagcagaagaaaatgaaattaggcaaggatgaaaaagagcagagtgagaaagcggcaatgtatgatataattagttctccatncaaggactctactaaacttacatta

SEQ ID NO: 273764 - DNA, 937 bp, Homo Sapiens
ccctgctgtctttctctccacccccttttctttttttcctcctttaataatcaaaccatacatgccaagcagcttacttaaatcagtggcaggggtattcttggtggccaggccattagcccctggagccccataagcagcttaatcagttttcagtgatggaggcaatcaacagcttatcaaacaccctgtgggtggggcagctagagctcaatgcatccattcacttaacagctcactctaacctggttctttgtgcctggctttaagagccccaaacttatcatatttaaaggaagtttaattcgattactttttctgcctgaggtgggttaaattggatttagcttttgatctgtctgcatcttggctatcagcactgaagggcatccccagcttcatctttccttggtttctaagtaaataacaagcatgttttctagatctgaattgttcttgcaaatatgtaatggaaaggacacaaggagaaagaacaaaaaatagcattgctttgtgaaagggcatgtggtggtatcggaaaccctacctaactgacccaaccaccagccttatggcgtcctgggcctttttggcctcttctggactgcttcatcatcctgcttcttgtcagtttcaggcgttttagagtaaattattttccctgtttgatttttctcctcactgctaaaggtttctgtaaaagcagacctgtctgtcatatcgagtaactagagaaaaggggcttttaatgttcagattttgcaggggaaaggaaaataaactaaagcaagtgactcaagagttataaatcagaaaaaacaataatgcagatattcttcttaaatgcacaggttcctgtctacacatttctcttaagttaatttgatttttcgccattagctcttatttaaaaagcaaaacagacattttcctcttc

SEQ ID NO: 273765 - DNA, 428 bp, Homo Sapiens
cgagggtatggtttcaaagactctgactgactgtattcaaattccataaggcattggaatccttcccataggaatagctgtcatcgtctcaactgatttgatccccttccccttcacccagccctgttgccgggagcggtaacacagtaacttggagctgatggcactatgttcagctccacttggaaacattaatcacaggttgacaggaataagatagaataactgcatttgagtgtgctcttaaagatatatttatggtgcattttggttggaacgcatcaacttagtgaatctttttctaatctaatttaggcacttgaagaggacctgagagagaaggaaagagaaattgctacagagaagaaaaataatctaaagagagataaagccaatcaggaaataaacaatggcattaaaatcaaaag

SEQ ID NO: 273766 - DNA, 889 bp, Homo Sapiens
ctgcatagggctcggcgtgtccttggaatccctgtccagcagcaggcggccctgagtccccagagccatcgggtcccagcaaggccccaggaccggggtgtcctgggcaggggactgacccagcctctccactgtctcttggaggaagcacagggcggtgaccgactcctggcatgcaggccagagggacctctcactgattctgcagcatcctggggtcctcggcttgtcctgggagggggatcctcccagccgctccaggttcagacagggcggcgccagaagctttgctgggaggggcgggacctgtgtggtgggagcgctcttggtagaggatgcgatgagccccagctgagagcgaccagcctcggcggcacctttcctctttctggcttttttcaggtcatccgcgcacccctggctattccctcaatctgggccctggggccatggcaatgtggaatggtccaggtgttcatgtcagtggggcttggggacatggccatccacgtagaagttcctggtgatcttgggaagggtgaattccgctccttccagctccggtgtcagcacaatctggcagcccagccgcgagttctcctggaggaggggggccatgtctagcatgtcgtcttccctctcctcgggaggaggcaggagatccaggtggtcttcactcacatacacatggcaggtggagcaggccagggaggcttcacaggccccttccaggtccaccccgtggcgctgggccaggtgaagaacattgtccccgactctgccactcactgggatccgctggcctgagcggtctacgaacaccacgttcaccacgtccccggcgctccgggccgcccgcgtcctcctctcccgccgggcgcgagcctgg

SEQ ID NO: 273767 - DNA, 811 bp, Homo Sapiens
gtcaaccttgtcctccaacatgacattattctccaaaccattatgtccactgcccttagttgctggtacagtttacctggcattagctgatggacttctgaaaatataatttacttttaatgagttgtgtgtgtttcatgttgtggataaccctaaacaaataaatgtaaaactacaatttgatgtccaaaaataaggaagaatgggatttgcctaaaatcagacgtttattaaataacaaggaaatagctttcagctatattaggtatcttaaaactcttaacattgttttgaattcactttgatgcgtgtctcactgttaagaaaagtgttaagacaagtgaagaatggtttgatgttaaatggatcatggaacacaggagatcatatttaaaacggaggttttcctccattttcaatatttcctaaacttaatctcttaagagtcttctcaaaagaacaatttatgaactctttaatggaaatgcattaaaataaaatgtggccgacctcttctttccttgtagcctcagaacactctatcagtcactactcagaacaaattagccaatttggctgtgagttacccacagtttttatcccttcactccaatagcctggatccctggactgcccactctaaccatgcaggcgggggattgtgtgtgagaaggagccatgcaagccacagggaagaggctgtaaactccctgaattgggagctaaaaaccctttgttcgatttggctctgtatatttttcaagatcatacatctacttatgatgccaatgaatcaatttcctcatctaca

SEQ ID NO: 273768 - DNA, 805 bp, Homo Sapiens
aggtttgaggggggatgctgtcatgaaaaggaactttcgcttttcaggttatgtatgtatagttttctgaactggtatcacaaccacatgctgcttctgtgtaacactgatttggtcaaaaagccctgttcctcctgagaatcaccaaattgcttcccaaagatgctatatccttcacaccaaacttaaatcactggctactgagaatatgcagtctttgcgcacaattgcgtcttctgtctgcccctcccgcaggtcccagacacaatttcttcatggcttcttcagcctttccaccctcagcctctgtctccaaattgtaacccattttacatgaccacacagggacacatcatcattctttatggaagaaggtgagatagaaacaaataatgaggtgttgattgattgaatttcctgaatcctagaccttaggatcttgaaatggccccttttcctgctacgatagcccatccaatgccttccggctccaccggctcctctggagagctcaaactcatgaataactctctacaaatgcatactctttcttcatgaacatgatgattttctggacttcctgctccctcctttgccctgattgagttggacaatctaggaagaaacctgaaaattgcctacacccttttcagtcatcatttagcctaagatgccagcttttctctattccaatgtcagctctcctgcttctcagggacccaaagatcccaggagaatttatcttctctttatgaaggttcattaccaaagtcaatgaggaaggataattgagagagaatgcctg

SEQ ID NO: 273769 - DNA, 730 bp, Homo Sapiens
atagcctcagaggtgctccttgagctgtttttaagagggatgaggccgaacttcagaattcctttttcatttctgtcctccctaccaccgtcttctcatcaccaaacacacagaataggagaggagagggaaagaatccctatgtaatgccaaacttgtaacagcctggctcggtttctagtgttggtgtcctgggccaactggttctgaggtcgcggggggagtctccaccctgcccctcggacagcacgaagccttctgtgacgctgcaggcatgcgaatgtcttggggaggtcccggcccctcagaaactggcaagtccagtttcaggcagaggcacaggccacactcaagaccttggatggaattcagggtatttggtccccgagtcacttgatttttaaaagatggtttccaaatgaaagtttatgtgcctataaacactgctaagagtgcagccttccagaaacataattagtgggtggaaaacaaaaatgctgtctgcctaggatttcagaaggcctgtaatcgattgggtggagagagtgagacaggggactgttttctccacttcccatggcaacttaccgatattgggaagggtcattcatttgcacgtttgacttcaccagagcttgtggcccctgtactttagcatctgtgttaaaatcttccaggtagatgaaagtttgagaaaacaaaagggatctttcaagatctcgcatgccat

SEQ ID NO: 273770 - DNA, 711 bp, Homo Sapiens
tcagattctctttcggtgattcagagctgaaggtgcctcactgccctgtggaacaggtcgaataaagccttcccagcatctctctctagcctattatctcctgttagacacagcccagaaaatgaatagagacaagtcctggctgggtctgggttcagaaacataatagaaggattcatctaatctgtcggccactgtggaggaagtgaaccttctagatcctgctgactcatacaatgagttttgtgtggaccatcagacaaaagggctggctggtgaaggtggctgttgtctggaaattcctcccaagctctcctctaattatgtcataaggactggaggccccttagcctgcttgtgataacacgcaaggaaatatgggccaactcttcacatgaacacaagatatttccatgctagccttttgcaagtaacaacagagagagctctgtgcagttttcactggaatgcctgtggattgcttgtgtcataactgtaatctaaagagttgtccatttgttgattcctttgtatttgtattggtagaattgccactatcaaaccaagatctttagctgcctttgtatcaacttctttggagcatatgtgattttccagaaaatttccaaggcatagttttgtccctaagtcccatgaatatgtaatattttgtgtctctctattaaaatagcactttttgtgcattccatt

SEQ ID NO: 273771 - DNA, 525 bp, Homo Sapiens
aactggaaggagccacgtggtatggggcgtgccctgcctgaacttgcacccactgaggggtgagtggcacaggctgtgtgtgttcttcaggcttcggctttcctcatttgataaactgctgcttcccaccgtagaccgcagatttctctgagtaggagtcaagcaacctggctacaagggcacgctcttccgatggcccacagagccaggttagaattgacttgctctgcacctgggcagggctgcagggagacacggtagtgttaactccaggtgcatgtaaaagccatcaatggggtgggaacccaagggcaaagagtaaggggacgcagactccatcctgggcccgagtctgatccagccagcaacctcggcctctgtgcatttcactttcctcacttgtccagcgacaaggctggctggagtcatgagcggagacagccttcatggaacagttgtgcgttcccgagactcagcaggaattctaagtcatggctttggaaaagaagcattatctagaattga

SEQ ID NO: 273772 - DNA, 640 bp, Homo Sapiens
attattctccccaatttaaagatgaagaaagtgaggtttaacgagttaaagatcatgctcaaggtcaccctggtaaatagcagactcaggattagaaagcctgggtttctggaactccacagcatgaagtcagtaatgccagcagctcctcagctctgatgtgctgtttgcacatcggaccccagttgctcgccacctgcggagactctgctttaactaagcagtggactgaagtggcatgacctccccatccagctttgccctctgagaggacagagccctgctccaggatgcttctgtactctcggttttcctaggggaagtattcagactgaccatcctctgccgtttgagagccacggggtctgaggcagaaaaggaatgtaaaaagaaaggcaaatgcctgaaagaagtggagctaatttgaagttttggggatttgaaaatccagtctagggattaatagacatcttactttgacagtcctgattcccacttgcacgaaaccatttcactgcttggagcatgtcagtctaaaaggcaagagctgggcaaataagggaaatggaacccagtgactgttgctccccatgaatagctattatgaaaagtaagagagaggctgggaagagtggttcat

SEQ ID NO: 273773 - DNA, 1003 bp, Homo Sapiens
  misc_feature (869)..(904): n is a, c, g, or t
tagagcttcaataccctgtacacattaatcctgtattattactaagttaatcttcctaattatatcgctttcctgatcagaaatgtttaattcctcaaaatctatcaaattaagtctaaatgtcttatccttggttctgtgtactccatactatgacccacctactcagccttttagaggggagactatttcactcctaccctaagccccaggtaacctgttcttgccacaattcattcgcagcctgtaggtctttgcacagtagcagtagcaatagttacaattatagattaactgctatatatgctgctctaagtacttttaatttttcttaacctcataacctaattcacagtgagaaaactgaggcacagtttaagttaaataattagatcaagaatacacagctagtgactatgcaagcattcaaacccaagcaacccagagcccgtgctctgaatcactacaccacacgcattaacaattccccagacaggaacccaagtgtttatccaagtgacaaggacagattataaatgtgttatagccttctctcagactatttcagagatatgtcaagcaattaaacaaaaagtataatatcataaaactaacttgtgtgtgtaccctgtaggattattctcattttatgggatactttatacatttaaatgcaagatggttgctttggtattacatctcaccgtgaggtttcttggtaggacgctatttggagtacgctatgaagacaaagggaaatgccaaataactaaaaagcaatttaagaaacaataaaatgcctctattaaaaaaaatgttaaataatggtaatgtcatgcttaatttaagccagctaacaggattctgcnnnnnnnnnnnnnnnnnnnnnnnnnnnnnnnnnnnngagatggagtcttgctgtgttgcccagcggagtgctgtggcgtgatctcagcccactgtaacctctgcctgggcaacagagcaagactctgtctaaagg

SEQ ID NO: 273774 - DNA, 1075 bp, Homo Sapiens
tgcaaagttctgaagcttagtgacaagggacttacctttgtccctgttcctacatccttctaggctctaactggtttgatgaagcgtgagtagctcagagatatacatgccaagaacggcctggaacagttttattgcccctcccctgcccaactcattgaaggaaacaggagggagtgaacccgtctcttctgctgaatccattgcagtccacttttttgtgttctaatgagtatattaaaattgcagtcgaagtcatttcagagctcctatcctttactacaagctgacttaggtgggactgctccagcaacttggggctaagaggcacagggtctgacttctctccctgcttccctactcctgctccattaagggtgagaggttggggagtttgctgtcctctctgtgatgacttgttgctgccaatctgattcctaatgctgtagatttattaaggctagatggtggaagattgggccctgatgacaacggagccatcctgggttcctctgaccgtgatgaacctcctgggagaggcagccacagctgaagcacacacagctcccttctgctgtggcagccccacgagcctgcaaacccccatctcatcacagcctcggttctcagctctgaggctggccagacctccaactggtgggtaaaacgcagacatttccaaacaccaggaaatattttcttgggtgggtgggaagttggggggacaaactgaatttctccctctgcagctgtctttattgccccagttgggaaccactgttttatacatcactatcttatgtgtctgctgatggagtttgcggatgcaaaacaatgtcttccaggtctccaggatggttttcttcctgtctgggtctctttctacacctcctgccaagtcctgcctgccccagtccttctctggggaatgggtctagttttcaggaccagatgcattgccagagattgtcagactgtgtcgagctccttttctcacatttgatggaaacagtctacacacatcagcaagccctgaatgcactgtgttaaattaaaaataactataagcttccct

SEQ ID NO: 273775 - DNA, 985 bp, Homo Sapiens
  misc_feature (489)..(489): n is a, c, g, or t
acaggtgtgagccactgtgcccagccccattgcaaataatttttgtcctgtagagctgtaatttatttttgtctggttggaaacaacaaacccaagtatccctgaaagatattaatcattaaaaatactaacattaagatagtattccagctttctttctgtcactgtgtataatgctagtctcttgcattttttatttcaagaaggtttattgtgttgcttgtttcctaattacataactaaacagaattttcacaactgctcattacatattagttttacggggcctatgcttcatctttttgaaaattatgctttgacataacatgttgaaaagcttttttttaaaagcgctaaaacaattagttcttgtaataggtcggatttgtgtgtggggggcagtgatagaaactcacattcacttaaatccctttaaaaagtgagtggggaaattattggatcacatgatcacaagtgcagaaactgaangtctgacttgatctagttcgacatatgttatcaggaatcttttctacctctcaatgaaactttagtctctgtgggtttctttcccaggcaggctgcctccaagtgggagcaaagtacctcagtagctgtaggcctaaaatctgccaggttagcaacattaacaacaaaaagatcttatttcccatcaattaaaatctcctgtctgctctatgaagcatctactgaaactctcactggctgtttttgggtcaccttcctaccctagagccacatgtggggtcagctgagctaatgtgtcagcagagagtgaagaaggtgggcctagaggataaatatagggcagtgacaaaaagaaaaaagcaaagcccctgagaaatgaggatgtatactttataataataaaagatacaatccataatgcatatctaattgttcagtatgtgtcaaatagcaacaatatatgtgtttagatacaacatcatggaaatacaaattt

SEQ ID NO: 273776 - DNA, 488 bp, Homo Sapiens
gttgttctaagctacccagtatgtggcactttgtttcagcagtcctaggcactaatacagaggttctgccatggtactgatccctcttctctgcatcccctgagtacacttggttcttggtcttgaagatggtccaactgagtagtggctacaccctgtccaagctgtggctctctaaactgactcaaaaactgcctctcttgcttctgcttactccctgtctgtgatgtgccctgggggcagacaagtttcattatcattatattggtttttcttcatttcttgactctgctctttactacactttgagattgagccagtttgcttcctgacatgctccaggttgagccttgcagacctgcccttctgcaccttgcctgggtctctgctgaagtgttcttattcatcctcctagaccagattggggacaaacctctggtgtccagtttttcccagttcctttggcccacaaaaatatctttgatagg

SEQ ID NO: 273777 - DNA, 714 bp, Homo Sapiens
gtgtgaactgtcccgaaccaaaaatgagtttccaaaacaactcatgaagaatattttcccaaatgctaatattagttagccttgagtagggaggagtatctgtttcttgaacattctttctttacgcttctctgtatttactaagtcttctataattaatgaacattatttacacaatggatgacaaaaaacgggaggacagagtgggccacgggaggatgacattcaagtcctgctcctgccctcattgcctgtgtgatcattgcccagccgctttgcttcgcttgctttcaggcctccctagttacggtaacaggttacataacaaggcagaggcaaagtgagtatttgctaaattgcaaaatccagttaaactcttggaagctgtgtgggaccaggaaaatcgctctaggagaggtgtcctgaggtcctcagtggtttttgctattgctcaatcatgtttatttcactagaaatgttcccagcatttctcccacgtttcctcctaataaataagaaaggcccactgacacaaccccactttaccttctgtgagcttggcctgcttctgctgtctggcccgtaacctgtgttccaccactgaaagcccgtgactgttaaatccatacctgcagagcacaagcacacgggaggggcagagtgagagggcaccatagccacttcccatacacttaggactttttcaaacaagag

SEQ ID NO: 273778 - DNA, 545 bp, Homo Sapiens
ggaaatttgagcctgggtttatctgtctccagatcagtggggtgaggggagtttctcccaggcccaggcaggaagggggtgcattgtctgtagaaaatgttttaggaaactaatctttggccaggtgggtttgttttttctaatcacttgcactggcaatcctaaacaatgccagggataaattactcttccctgcagggacctgcagggacggacactctcgctgcctgcgccctggtaaaccactgcaccatcttaaccactgtgttggttttggagcagatggaaagtggctccataatctaatgaagcaagacagccttgaactttgatttcctacatatttccttaaatggccttttttgagagatttgggtttttctcaggccttctcttcctctttccttaattcctgcttgcttttctcacctctctgcataggtcagatttgttgtttttttcactaataaattgtattttcaattaattcaattagttgaatattcatgcttattataaaaaacaaaattcaggaaagtaataaa

SEQ ID NO: 273779 - DNA, 861 bp, Homo Sapiens
  misc_feature (284)..(305): n is a, c, g, or t
  misc_feature (503)..(515): n is a, c, g, or t
ttccacggccccagccctgagtgttgatgggtaaacctcttaacacagctagtattgggataaatcagaccttctggctttttctaggcaccattctcactcttatctaaatagagctgtttgcttaggggaaggtgacagcaactacctagaacctttccctggttctgctggcttctcagtcccagactattatggccccatcccacactctctcactctcactctcccttcctccctctgtcccaagtgcaggagtgcaagctcatgcttgcgcatgtgtnnnnnnnnnnnnnnnnnnnnnntagcctcatggaaacatttagggcaaagagggatgtctgaggaaccctcgataaagtctctcctggagagactgagtccatatcctttctcttaggctatcaggcctcagacatttccaagaaatgttcttcctaagtagctttatgctgctatggcaatacagggtgacttccttggatttagcagtagtcaatggnnnnnnnnnnnnngcgaggactgctcctgttaattgcatcctgctgtctagattgcctgtcactctcttctctacataccccaggccatttgttgcagccaagctactagatttctcttcctttccttacatatagaaaactggttaaatgtgtcctattctgagaatttgccctgagtagagcatttctgaatttcagtccacaaaaaacacatgccagaatcatactaggattcaaaaccccagccctccacttagtggctgtgtgagttttggcaaattgctttaattgttctgagcttattttcacatctgtaaagtgagactgaaagaggttaataaaagccacttcaaagagc

SEQ ID NO: 273780 - DNA, 438 bp, Homo Sapiens
  misc_feature (290)..(300): n is a, c, g, or t
cccagttattccagttcaaggttgctggttgccagagcctaccttggcagctcagggtgccaggtgtgaaccagctctggccagtacgccatcccagcgcggggtgcattcatacatacatattcattcattcattcagactaggaccatgtagacatgccaattcacctaacatgcacagctttgagatgtgggagaaaagctggtgtactcaaaacccatgcagacatgagacaacatgcaaactcagtacaggcagtggccccagcctggaatcaagttttgtgtgnnnnnnnnnnnatcgatgttataagtaaaggacattgaaaagaccttatttgaggatcttcggtggtttaatatttgatagcaataattagctaagatattgtagaggtgagcctaatacaatgtgttatctgatgtgaaaaaacaaaa

SEQ ID NO: 273781 - DNA, 887 bp, Homo Sapiens
aaaattcacctaaccccattcttaaatccagaagcagggagagggaggggagggggcgttctgtgaatacctaaccagtgcctgaacagagaggaagttattatttaccaggggaaatggtgtgcctacataaagtttagctgctttaaaaagaaagtagaaacaaaactggcaaactggaaataaatgtcatgacttgatttaatactcaaactagcggttggacaaaatgcaagcagcttggtgagtattagtgtctgttcctgggtgggctctgagttgatataaggagagggaactgcaataactgaaatgttggagaagcagttagccgttctccgtaaagggtctgccaatcctggttttccatgacttagctatgactgccgatgaattctcaatgctcgtcacttccagggatcttcagatgttaagatgtttggggaaatcacaaagagaagagactgtgttgagacgcattcatccttaagcaaaagctgagagcctgcaaatgctggatgaaagctacaacctttctaaaaaccattaaatacagactttttcaaagagcatccaacaaagtagaatcctgctgtcaagaaaagccaaacttgggcaataggaaaaagccacgggaaaaatagagtagctcatacaattacagaagtagaatgatttagggattttgagagagtataatccaattattctctaaactattcagggatctattttaatacttgatgatcctgattcttggaggaaagtctcatctgtgcttagttcttgttggtattttttgtttacttggcaacaataatagcaaattggtccttaagagagaacatagagctcttcagggccactgattaagaaggcatattttg

SEQ ID NO: 273782 - DNA, 342 bp, Homo Sapiens
  misc_feature (195)..(213): n is a, c, g, or t
ggtcccagcgtctccacttctcagctgattcctagaagctgagtcccgtcccttctccgagcgtggtttcctctcccgccttgcctgcgtcgcaagcagttgtgggagcagaagtgtgtctgtgcatctgtgtctctgtgcaggtattttagaattgttaggatcattatcaccagctttacttttcccaaccannnnnnnnnnnnnnnnnnnctcttccttcttctgccacagcaagacccccccgccccaagcacagtagctttctcagcgtcgaatccctccgtgggaccatgttgcaatgaaatttcaacatgcaaatgaaatttctcgaaatttcgc

SEQ ID NO: 273783 - DNA, 430 bp, Homo Sapiens
gaggcccgagtaggggccttagtaaaggcagagtgaattcatgaatgggatcaaagctagagccatagtcttgtgccaagaaactgagtggcgctaaactgctgatttgggaggtcagaatcttgttctgggctttattagcatttcgctcaagtcaagcgaatcaccttgtcaagtcatatgcagagaaggcagaacatgacgttggaggaaagaaaacattctacacagtttaaacacagggcctttgtaaagtagtgttaggatcacttaacgtggtttatggaaccaagattttttgctgtgaaatgactttcagaaagtctttacagaattgaaatcctgtcatttcagtgtagaacaatgtacaaaaaaagtttagaaaatatatttctggatatagaagtaaaaatttgccatgggaaattgc

SEQ ID NO: 273784 - DNA, 645 bp, Homo Sapiens
  misc_feature (517)..(517): n is a, c, g, or t
  misc_feature (603)..(603): n is a, c, g, or t
  misc_feature (624)..(624): n is a, c, g, or t
ttactagtaaaaaatgttcaatcaatgccgtcacaaaagacagtacaaaaaccaaagtgcccaaatagaaggagcagcgaacttgcccaaaacagaaaagctctaaatagaactttagtatatacaaaaaccactcggtagagttttagaagtttcttccatgtaagtgaagcatcttgagtcactcaggacttggctgtcctcgcacccgtggcaggctggggacggcacggacctccaactgtttcccctagtccccggggcatcggaggctgggttcccacatgggagaggaatgaagactcactcaaagggaagggtcagtttaagataagttttcagtgaactccttcttccacccgggaaggtgtctttcagcctcttcacagtctcaagacaattgactgaagcacaggcattgctaacttcatgggccagcttgtggcggacctcttcaggcttgagaccatggcagcaagagccctgcagcgtgcagtgacccctgcgctctgggtgntgcacgcgagctcaggaggacaggatgtgctggccagcctaaaccctcgggggagactagcgcagggataaagcagcttgcaggcnatagccggatgtggaggcttncaagacagtacaaagatttcc

SEQ ID NO: 273785 - DNA, 432 bp, Homo Sapiens
gtaatgtatccagtcagctgcatggtactgactgagctgaggagtcaaactcttctttctgtatgacatatacatatacttgtttataaaataatcatttgcccagggaaaaaaccacaacgctgtttcaagctttagtcttatgtgttgaaatgtttttgtaagccttggcatgaattagtgttctagactctgctttgcacagcttgcacttacagtgattgtacatattgtacatctttgtacagagacatcttggcacctcatcccaacaaatcacatttgtagaaatgtaatgcggttctgagtggcatgaaatgtacagaatgttttgaaagtgttttattaagaatcacacaaaaataaatgtattaaaattaaattcattctcttattggtgacttatggaaataaagcatcaatattggatgt

SEQ ID NO: 273786 - DNA, 511 bp, Homo Sapiens
  misc_feature (491)..(491): n is a, c, g, or t
tactgggaaggctagttgtaaacataaacattctcactgaactactggccccccaaaacctaacctatctgacaatcaataatcatcttttgactataaaatcataaaaacttgtactctgtggctcttttgtctcgatgatttttcagagaaaaaaattagctgtgttaagtagtttcactgatttatccatcttgaatagctgccagttctggaacttcatacatcctcagaacgtcttcatagagcaaataattatgtaggcttctgggaagtggcagctgactaatataactgtcagaccgtagacgttctgattttagactgggaccgaatttccaaaccgacaaagatgggtcagggatggaacagtggcaatatgttgctgtagaatccaagcgtttgaggcacgagcagagagcatcctttcaacagctgggtgcaagtggccttccaattagtaaactccaaagtgaagataagggtggcantgctgactgagccatccaag

SEQ ID NO: 273787 - DNA, 486 bp, Homo Sapiens
ttagggtctttacagttatgataaagacaagcgaggccacactggattagagcaggccctaatccactgactggtgtccttctaagaagagggaaatttggacacgcagtcacacaaggagaatgctgtgtgatgaagaaggcagagagtggagtgacacatctttaagacaaagactgccaaagattgtggacaatactggtatcagaaacttctgccaacttcttctgaaacgtctgcctacaaacttgttttcaactaaaatcgtccattctatgagaaaacacagaatatgatgaaccattcagccaggaaactgctgctaattcctcagggctgtttacctatgatggcatatatcagaagctaggagtgaggcatagaataatattcctcagagcctccagtaggaaccaaccctagtgacaccttgctctcagacttctagcctccagcactgtgtaagaataaatttatgttgtttta

SEQ ID NO: 273788 - DNA, 468 bp, Homo Sapiens
agttaaggatgctttcacggataacagtgagagccagtgggggtgtgttttcagagtgccaacgctggcctatactgttgcctcagacactgactcagtgcagccctacagaagtgtgccttgaattaagtaagaaggctatcacatgagctttatcctcattaatgactgacctgatacaccacagaatgcaagctttggaggactgttcacaggccctgtaaatatcaggcaggcattttaaatgctctgtcccataaatatgtttaaagtaaccaaagtatgtcatgggagttcacaaaagttgtttaaatcgatgttctaagtcaaagtccaacaaataaggcttaaaaccttcaggagctctggaaaagccagattcagtgatataacaaaggattaaatgataccaatcagagctaggaactttgtctgaactgcattccctacggtaatcaagcatcatgc

SEQ ID NO: 273789 - DNA, 487 bp, Homo Sapiens
  misc_feature (454)..(454): n is a, c, g, or t
  misc_feature (468)..(468): n is a, c, g, or t
gagactgcatagggctcggcgtgggttcgatatgcttgtgttctaggcctcatcccttccatcatgccagtctccatccccaatatcaccacccccacaccctctaaatgttgacaggtcccttcctgagggcaggttcttcaccactcttacagctcagttgactgagaagtccaatcatattttctgagaatttaagcaaacaggatccctttgaagaaaatcaaagttggaatgtaaatcctatctccttatagggaaatctaaaagccttaaaaatatttctgtttatcaatcttaatacatataactctccttgtaatcagcagcagcttcctgcaaaattattcaatacaaaaagaataaaataatctctgtcctctctaatgcccaaatagtatgtatttggcaccaataaaagccactttctctcatgaattgaagagtggaattnggaaatcgactggnaagattattggaaaatacc

SEQ ID NO: 273790 - DNA, 479 bp, Homo Sapiens
  misc_feature (56)..(56): n is a, c, g, or t
aattatgtatcatatagatatactatgtttttctatgtgaaatagttctgtcaaanatagtattgcagatatttggaaagtaattggtttctcaggagtgatatcactgcacccaaggaaagattttctttctaacacgagaagtatatgaatgtcctgaaggaaaccactggcttgatatttctgtgactcgtgttgcctttgaaactagtcccctaccacctcggtaatgagctccattacagaaagtggaacataagagaatgaaggggcagaatatcaaacagtgaaaagggaatgataagatgtattttgaatgaactgttttttctgtagactagctgagaaattgttgacataaaataaagaattgaagaaacacattttaccattttgtgaattgttctgaacttaaatgtccactaaaacaacttagacttctgtttgctaaatctgtttctttttctaatattctaaaa

SEQ ID NO: 273791 - DNA, 482 bp, Homo Sapiens
  misc_feature (90)..(90): n is a, c, g, or t
ggtgggaggatagcttgaggccaggaattccagaagcaatgtggaaaggacactagggaatgtaggttctagtctttatccaagctcttngacttcaagcaaatcacatttttctcctggaccttacattcttttttctcattgcccttagtaccttctgtctgacttcaaccccacatctgcttgacaagaattaactcaaatatctcttcttaacacctacctgattctggcatacagtaagtgcttataaatatatgttaaatgggtgagaacctttcccttaggtctgtgggtactttcactgggcttgtatatctaccactccatttaaaactctacttacagctttttaagaaaatgtatttctaagccaggcacaagtcgctcatgcctacatttccagcagtttgggaggctgaggtgggtggattttgtgcttggaaattcgagaccagtctaggcaacgtggcaaaacccca

SEQ ID NO: 273792 - DNA, 491 bp, Homo Sapiens
tagctggatgtgatttgagggaaagagaaagcaattagtgaggaaatgcatgaaaatacctaaaaggaacatttaaaatgagattaactaaattcctacgaatgtgagcaattgtcactttcaaacttggcagaaccatgctgagtccccatcactctgaaacgttcaaactcagaagcaatgttaaccattcattttatttcctgtactttcacagaattcttcacgcacatgtactggtatgcagagttaacatagcaggcctgactgccatcctttgaaaggcctgattacaaaactgtcccttggctggcatctgggaatttggatttggggagggttctcactatcctaactgatagtattcctaaactgattatacaaacaatgtggtttatgctcaacagctgacctgcttttcttctgggaatctaggattttagtatatgccaggcagagggtacccaagtgtccagctcccagtagaaacc

SEQ ID NO: 273793 - DNA, 377 bp, Homo Sapiens
aatattcaaatgagggcctgggactcgtctttacactttcagaatccctgtgtgtgcctgaaaaaatatcctttgtgctcagcagttagttagcctcagcactttaaggtatcattccatgtttctctggaatctctggttgctgatcagctatagtgcttggaagaccaccagctgcccgcctgcttcctttcctcaatctgtcatttatctcagtgacttttaagattttctcattgtttttgaagttcagaaaattcactgcaatatatcgaggtatgaatttgttttcatttattctgcccagaactaagtgtgtttcaaccatcagagggatggtatgccttatttttgggaggtttctctagatgatctct

SEQ ID NO: 273794 - DNA, 457 bp, Homo Sapiens
aatctgagatgtgctttaaaaaaggaccgttgagaaaggggtggagtataaggaaaccgcaagtgagagggagtactctagtggggtgggggtgccgatacacagctaggcttaaggggccagggaaggaagtggtgccagaatcctagagatagtcatgattacgcaagagttgcccggcaggagagtccatagcaaccttgatgctgcagggtgggagccgggggattcaataccccaaactcagcctcctcctcctctccattcttctgctggggctccccaataatggaacatgaccaggagccagagggcgaaggagcctgttgataccattgagagagttcggcgtccccgggcaaaggaaggggagaagggtggggagtgggtctggaaggccccatgaaagacacctggcacaccccctaagtacactagcatccaaagtttatgaaaa

SEQ ID NO: 273795 - DNA, 535 bp, Homo Sapiens
  misc_feature (150)..(171): n is a, c, g, or t
ctctctgctggtttgaaagtcttatcatctatctctattctaccgttggttgcattttaattctcagtacgtaacttaaggttttattacaaagactaaagttaaagtctatctccccttctctctgttctccttcacacacatctgaannnnnnnnnnnnnnnnnnnnnnaaaaagtgacaccttaacttcagcaaaacatgtcatgttgctggcagacgttgctttcaccctggatccctgggttcatctgccttcgtattgggatacatcctttaattactcagagggtcgcaaggtttctgttcttatagatgtctgaaaatatttgtattcacttcagtgcacctatctccgtatcatgacaagcagtgaacatatgtgaatgggactctggggtagacaggaatggctttctgtacacagaagtgatggaacagaactgcacacagaagtgatggggcagaactcctggccatcctggcccccacacggccagccgggggcctagaggaaaaatctctcagcacctgtg

SEQ ID NO: 273796 - DNA, 485 bp, Homo Sapiens
ggctgggtcttctacccacaaaataatctgacgtacattggcacaaggtaggttcttttctccagtgataattctcacaggattatgcagaagctggcttgctagctgttctatgctagttggaattgtggctgaaaccaaaatggtctgacaatcattaggaatgttttccaaaatgtcaagcacttgttgttgaaaacccatctttaacatggtatcagcttcatctactaccacaatctttacaccacagagttctacagagctctgctttattatatccagaagtcgcccaggggttgctatgataaccttaacatgttgttgcagacgataaagctgtgggggtaagggtaagccccctacaagaagcacagttttcatgcgtggcaggccactcatcaattctttagcttgtctctctatctgaatggctaactctctggttggtgtaagaatgagcgcagatggagttttgctctcga

SEQ ID NO: 273797 - DNA, 483 bp, Homo Sapiens
  misc_feature (273)..(368): n is a, c, g, or t
ccccagccaggaggatgatataaaactgtgttgacttccttgccctcccaaccctggaacctggctgtctgtgctctgttacactgtgactaccattaatcaccctcactataaacgctgttacacttaaccatgcacattgtcagcagggtgaatcagaagcaggaacagttttgctgttttaaggaaactctgtatatctacaaggtaaatattcatggaacaaatattaagatgtctattttagcactgcctgtacattaagatgcagannnnnnnnnnnnnnnnnnnnnnnnnnnnnnnnnnnnnnnnnnnnnnnnnnnnnnnnnnnnnnnnnnnnnnnnnnnnnnnnnnnnnnnnnnnnnnnnatttctagtagaatacttggaagaagagagacttaaatctggaatcatgtttttgtctctgcagtccaagctggagacattaaaaacaacaacgtctccctcagttcaatcaagc

SEQ ID NO: 273798 - DNA, 386 bp, Homo Sapiens
gtcattcatgagttgagactgccctgaactgaggttctttgtgtctctgtgttaaatcggaatgtttaacaagtaggagtttggaagactccattcctggtgacagtcaggtatgggaccagtcctttataacgtttagtaatgactgccagttgactttgtaaagtgctgtgtcctcataacgttgcttacttccttaatttctctgtgatgagaaagagccttatcttcctttgtaagtgtgcagcagggaagggcccatctttggagtctggaaaggcactggtttaagtttagacggaaacgttatttcacagtccaatggaataataaggtttaaatgcaatgtctcccaaaacgttacttgccctagatgaatcaaagaa

SEQ ID NO: 273799 - DNA, 565 bp, Homo Sapiens
  misc_feature (464)..(464): n is a, c, g, or t
  misc_feature (502)..(502): n is a, c, g, or t
  misc_feature (515)..(515): n is a, c, g, or t
aagcattcagagcaacagaaaatgtaagagcatggtgaatgatccctacagccagagcttgaagcaaatgtaacttttttggcaggacagtcttatcttaaatgataacagcatcaaggaatgagggtttattttctatacaatccccttttctttataatccactatgggttcctttgtcacaactttgattttagagctacatgtgactgtgtctgtcatgtagctcagatgaggaaattgaagctcagaataaatgatttgcccaaaattacatggtgatctcagttcagttctagactgaactgagactagaactctacttcttttcatcctgcataatgtcatgggatctcctgtttgaatttactgctagggcttacctaggaccactgtcctaaatacctctgaagataatggaatgagagtgaggttttaattagtttgggctaattggttatggnattaccgcatgtagtataacctgaattttaaaggggtnaagaaaaaccccnttaaagccttgagtagtaatttttttccggatccttaataaattaaaaaa

SEQ ID NO: 273800 - DNA, 470 bp, Homo Sapiens
  misc_feature (78)..(78): n is a, c, g, or t
  misc_feature (105)..(105): n is a, c, g, or t
cctggtgttgtagaccccagctgggagaggtgtgggtcagccatggggcttggtatccccctggtcttcactattctngcttgcccattgaatttgtctcccagnggaaaagaaagaatggtaatttggaattaaattcaagatgttaacttgacatctatatattgcacatattcctgtatagtgaatggatgacctcctgggaatagttcctgtgactgattttagtgataattgatcatgaagaaatggcagtactgctccacttcaccttcctagtgactattatgtgttcctagtcagagtgactcagcagagattattttgttctcttgtgcaatttattctgtgtcattttatttttgtaatattgtggcagctaaatgattattctgtgtatgtttttcaaaatattaggtggcttatattttttaaaaggctatgaaataaaaataaactatacgtaacac

SEQ ID NO: 273801 - DNA, 397 bp, Homo Sapiens
gacccactgtaagaaagagcgatagaggaagactgatgccagcaccagagtgagccagtgaaggacaagagaactccgcagcagttttctataacaaatagatttgtcaggcaaggcagctggaccaagggatatggttcatctttttttcagagaaacagtggcagcaggggtccaagaagcagcaaattaacttgaggtgagtgccctcctataacggacagtctagaatgtataccgcttggtgatttagtatgacaagtaggtgtaaattacttgaggaattagtctaatactagcaggactctggccatagggatagggttaaataaataactcgagagttttatgtgctaaaaacaatagacaaacaatatccctccatcctcccagctgg

SEQ ID NO: 273802 - DNA, 365 bp, Homo Sapiens
agtgtagggagactgaccctagacaaagctcttgacatgacttactacctccaacatgaaacaagcagccccgcacttctcgaaggtctgagttacttggaatcgttttaccacatgatggacagaaggaatatttcagatatctctgaaaacctcaagcgttaccttcttcagtattttaagccagtgattgacaggcaaagctggagtgacaagggctcagtctgggacaggatgctccgctcggctctcttgaagctggcctgtgacctgaaccatgctccttgcatccagaaagctgctgaactcttctctcagtggatggaatccagtggaaaattaaagtagatgtagacttctgtcct

SEQ ID NO: 273803 - DNA, 318 bp, Homo Sapiens
gagctgacccagaccctgagcagtgccccgagtggagccacccttccaagggaatcagcaagtatggctgagaccatgtcagcgtgactgccaatgacacctcattgatgatgacctctcccgcccttccaggccacttctcttgggtatagaaacaactcttttgaacattcagcattcctacccctgtatgtgcttggatcaaaaacaaagatttaaatggaatttttagtctgtaaagtgttttatcctcatttttgctagtttgttatcaaggagtctcagagttgtattaagtgtatattgcatgactgattg

SEQ ID NO: 273804 - DNA, 351 bp, Homo Sapiens
cacagctctcttccagcactgtcctctccaccccaagctttgaggaagagcatccccttcctcctttccctggccactgctgctgcagccaatatcctctctgggcctgggaccctctccacagaggggatgtggtccctggtcatgacataacctagcagcagtaggaaaaacccccttctatgaaggggaagcagactgggccataaggaaacagcaggactggctcaagtgcccaaggtttgtttagggcctgggaattggccatgtgttaatttattgagtggagtaggtggctttttttccctccctcttcccccaacaagaataaagtttattaaattaaaaaaa

SEQ ID NO: 273805 - DNA, 499 bp, Homo Sapiens
agggaagatagtaaaattcatttaataggcatgttccatataaccattttgttacaaattttgcattttccacatgaaaaaaatcacagtaggcacatactagaagcaaaatacgtcagacaaaaatatcctaaagatgtttctgttatcaaacttttacaatttttccaagacgtttttgaggtttgggaaaaagtctggggcatttttggcaaaaaacaaacacactctatccatgtgagttttgactattgttctttctcaccaaaaatgtccataattttctacaaattccatgaagttttaaatcaatcatgtttgatttacatttaccaagaatgatttgcccatcaccataaaaattgaattaaaaatacatcaggctaaataaatccaaaagagaacagtgaattttgttgggtttacagacagtggtatgcatttctgtgatcatgtattattcttaaccttttccttcagtgcgatttggaagtaacct

SEQ ID NO: 273806 - DNA, 431 bp, Homo Sapiens
  misc_feature (147)..(147): n is a, c, g, or t
  misc_feature (192)..(192): n is a, c, g, or t
  misc_feature (416)..(416): n is a, c, g, or t
ctcttgagaagaaacgaaagacgaatggccaagaatatctttcacttttgctcacgttttggtggtgtaatattgggaccactgaagtaattggacaacttttccgagctgactcttctgaagtaaacccaaggcaaagggaaaatnggagctgctgctaggctcaactgatggcgcccacatggccgaacncccagctccttcagagactccatcatttccacagaagggccagatctgcacaaactatccgcacatcactggcatgatagaccataacagcttcttctgagccgttccggtctatcgtgtcaatgcgtactcggggagtcctcaacgcacgggatcactggacacggcactacataacggctccttagcagccattattgggtatcaagtcaatgcctactcangggaggctttatcgg

SEQ ID NO: 273807 - DNA, 454 bp, Homo Sapiens
gagatggagtctcactctcgcccaggctggagcccaatggatgacctcattgatcaaagtcagaagggagacactgggttggagactggaaactctatggtttccatcagggaataggttaggggtggggtggggtccatttcccatccactgtggcaaaccagtcccttactacaccagcaggccaggccttacctgctgggcaagctttgtggctgtggctggtgctgagtgttagcaaagacaggaggatgtgtgtgtgaagtgtacaggtggtggggggactggagggggggttcttagtgataatcagccgtccctgaagtggtattttggatgtggcaaaaaggctgactgacaccaaggctatccttgtcctttaattcctgcagttacagaggttgctctttgacataaactcagagtctccagtctaaaattccattacacagat

SEQ ID NO: 273808 - DNA, 436 bp, Homo Sapiens
  misc_feature (47)..(47): n is a, c, g, or t
gcttcccagttgccttaggggacagagacaatggaaatgaagagacntcagacatcttttccctccctctctctttcagcagggagctagcaggacactaggaccagtctgtgggatagaatgaacttaatgggggacggaagggggaggagtgctcaacggggagggaaatgatctatgactccaactgtatgattttcttgcctccccagttttcatcccagtggtaacgcctgatttttggtagctatgccatcttctgctgaggattaccattactgggtgtatcaccccgagtacttccaaatgcctctcctctattgattcagttgttattgcagtgtctgcttcatccgtggaacttgaggctcagatgccccctgctctgtaaccctggggaatgtcagaggcaggtaataaaggttgtttaaacaat

SEQ ID NO: 273809 - DNA, 546 bp, Homo Sapiens
gatgaggtggtacggctgctcaactgcagtgactttgcattcacagatatgactaaggaagacaaggcttccagtgagtccctgcgcctcatcttggtggtgttcttgggtggttgtacattctctgagatctcagccctccggttcctgggcagagagaaaaggctacaggttcattttcctgacgacaacaagtcacaaacagcgctcgccttatggaggccatgagtgaggtgaaagcctgatgtttttcccggccagtgttgacatctttccctgaacacattcctcagtgagatgcaggcatctggcacccagctgctataaccaagtgtccaccaactacctgctaagagccgggagcatggaacgtgttgggatttagagaacattatctgagaaaagagttcacttcctgctcccaggatatttctcttttctgtttatgaagtacaacccatgctgctaagatgcgagcaggaagaggcatcctttgctaaatcctgtttgaatgtcattgtaaataaagcctctgctctcagatgt

SEQ ID NO: 273810 - DNA, 419 bp, Homo Sapiens
  misc_feature (91)..(91): n is a, c, g, or t
tcatcctgctttttagaaactgagaaaacccaagactcaaagtgttgggattctccatgccaccactttgtaggtgtgtgccagcagctcnaattactttgcctttattcacttttcttatctataaaaagagagtaataccccctaacacctaaaattgttttgaggaaaaaaatgagttaatagagacaaacactcttaagatagtgtctcacacatcctaaactctcaatagatattaactattattatttgtcatataaaacttcgtgatgatctgattaatatctgctcaccccctcactaagataccagctccatgaagaaagaggccttctcaggttttgcttactatcaccaagcacacgcctataacataataagatcttggaatgaataaaataatgagatcaagatga

SEQ ID NO: 273811 - DNA, 466 bp, Homo Sapiens
tccgccccttgtccagtctcaaggcccccagtcccagcctccacattccagcccgtcaccacggatacagccccagccttcgccacaccacgtctcaccccagactggttccccccaccccggactcgcagtcaccatggccagctccatagatcagggacacttggggaaccccgaacagagtgcaatgctcccccagctgaacacccccagcaggagtgcgctgtccagcgaactgtccctggtcggggacaccacgggggacacgctagagaagtttgtggagggcttgtagcattgtgagagcatcaccttttccctttcatgttcttggaccttttgtactgaaaatccaggcatctaggttctttttattcctagatggaactgcgacttccgagccatggaagggtggattgatgtttaaagaaacaatacaaagaatatatttttttgttaaaaacca

SEQ ID NO: 273812 - DNA, 446 bp, Homo Sapiens
  misc_feature (429)..(429): n is a, c, g, or t
gtggacaaaatcatacaattcagtcaattttatttttagcatactgttaaatatcacatcacaataaaaatcaaattggcattaaaagtatagaagatataggaagttctatacccttccactgtacttctcaaagttggttattagaccaggaaaacttaatgtaatattatttttaaaatcatcttaaaggatccaagtccatgtaactctttagaacaagaggaataggtcagatagaagaagctgtgtaatgtattaatacatccgttcatgtgctgtccacatgaatgtgttgactgtgctctccatgttcaggtatttgtaagcagtgttgacttttatcccctcttcagtaatctttaagtccccaaaacattataactttttctttttttgttgagacggagtctcactcttgtcactcangctggagttgcagtggc

SEQ ID NO: 273813 - DNA, 527 bp, Homo Sapiens
  misc_feature (165)..(165): n is a, c, g, or t
tcgtcctctctgcatctagctcttcttcctctggctggccaccccaggttctgtgctgtggactcataaaaagtgagctttccttagacctctctgtgcatcccccactttgtaggttcactttggtgtatatgagcctggcttctgagttccttgcatacaaanctctgactggtccttctgctccagggcttcagaaggagtgattggtgtccccaccaggatcagtaccaccgccttcacttccccagcccctcacacactggcaaagtctaattgctgtaagcattcctcctgtcacgtcactggtaatggttctgcatccctgactggtacagcatccagcctcagttagaaaaaataaccacctaaaaacccctcagaaaatggaaggatataatgaaacaagaactggaattaagtggaaaaaacttttttacattagacaggatcaagaaagccaaaagtttgttctttgaaaagatgaatagagttgacaaacctctgccaagattgatcaaggaaaa

SEQ ID NO: 273814 - DNA, 293 bp, Homo Sapiens
atctaaagatgatgagaaagtgtttcactaaaatatattttaaatatatacatataaaaagaaagtgggtgaaagaagaaaggaaagaatttagattggtcattagagaataacttcctgacaacaaaaattgagacatgaaacacattatcaaagaacattatgttggataaactgaagaaaatacaaccttgtgaacggctgtcaacacacaaatagtgtcaacatacacacaagatggggaagtacaaatatagtctacttggctcagccccacttataatttaaaatag

SEQ ID NO: 273815 - DNA, 464 bp, Homo Sapiens
aagattctgttgatgggaggaagggggatatgttgcctggttttaccttctagcgagattatgaacctctgtgtgttctcgtctgagccttaggctatctagacagaaaaccaaagtggagaatcatgaacatcacccagagtaagacagccactcagcgactatactagaggagagcggttgaatgtgacagggccgggctcacatactggccgtgggacctcgggcaaggtacacagcctctccgagcctcattttcctcacctgtgtaatgggctattacttaccttctctgtttgataagtcagttttaaggtgtcatatgcgaatgagctctttgtaaacaataggaagtactcaacccttttattatgaaataaatcactggatgtgtacactgttcctaaatagaatcatacctaatttcttttgctttctaaaattaataaatcagctgttattta

SEQ ID NO: 273816 - DNA, 441 bp, Homo Sapiens
  misc_feature (28)..(28): n is a, c, g, or t
gcttcccatttctactagtgcatttgcncaggttctgctgttgtagtgggtttctttaagttagtactcttaattccttattcttgctcttaattccttattcttgctctaaccattttgaagatttaatcagctttgatattggggaactgttaagaattcgtacagatcagaaaagtgagattcgaaaacaaagtctgtttcgtgaaaaagagaaaccagctaccatctacaattagctcaggtttgactttgacctcgtcttttccactaggtggaccctgaggtatttgctgcccttcccgctgaacttcagagggagctgaaagcagcgtatgatcaaagacaaaggcagggcgagaacagcactcaccagcagtcagccagcgcatctgtgccaaagaatcctttacttcatctaaaggcagcagtgaaagaaaa

SEQ ID NO: 273817 - DNA, 406 bp, Homo Sapiens
cactgctgcctttagatgaagtaaaggattctttggcacagatgcgctggctgactgctggtgagtgctgttctcgccctgcctttgtctttgatcatacgctgctttcagctccctctgaagttcagcaggaagggcagcaaatacctcagggtccacctgtgaaaatgctggaagggctattaaatttattcctgcgtcactgttcgattcttgaggttctggtatttgcaacaagactgtcccaactggttgtggcaaaattcctgtattacagccatttactggttctttctttttgtcgccatgtgactctgcttgctggacagcacagacttgctctacttgttcccggagatcaggtggaagtgcttctaaaacagactgatccagctgggaaggtgac

SEQ ID NO: 273818 - DNA, 236 bp, Homo Sapiens
tttgagactgcatagggctcggcgtggtttaggaaaaaaggaaggttggggaagacatattgccttaggacaggttcagagtccaaaggaaagggaagagttggcgagtacatggtctgttccaagtaccatcaattcaggggacaaagtagatttctctttatcctgaatttatctggtttggatgttagcaatattaactggagaaagatcattttctaaatttcttttgaggc

SEQ ID NO: 273819 - DNA, 452 bp, Homo Sapiens
  misc_feature (20)..(20): n is a, c, g, or t
  misc_feature (31)..(31): n is a, c, g, or t
aatttgcccctcggaggccnaagaattcggnacgaggagagctagaccatgagcggaatcaaaaggaaaaccctaaattcccatgccctacgtaacaaaaggatcagaggctactccctttgcaactccccccaactttctgtgttgcagatgaaaaatggaaagtgcctcggattggtcccctcctgcaaccagtcagacatctgcatagagcgtaactttgtaacttcacttcagcctctgcttggtcaccttccacaaccaatcagactggtcatgggccactatttcatagggtgtaaaccaagtgaccaatgggaaacatctagagggtatttaaaccccagaaaattctgcgaccagtgcttttgagccttgcttgggcctgctcccactctgtgaagtgcatttttgtttcaatacagctatgcttttgttgcttcttttgttaa

SEQ ID NO: 273820 - DNA, 381 bp, Homo Sapiens
gcgcccacggtcaaaaggaatgagaccctgatgcactgggcgacacagacgggcgacacagacttggagacatcatgctaagtgaaaagccaggcacacggagcggacggcgtgatcctgctcacgtgatgtgtcccgaatgggcacgtccagagggaagaagggagatggcgctgccggtgcccgggacgggggttgggagcgacggttgctggtttggggtttctttctggggtgaggaagtgttttgatattggccgttggtgatgtttgcatacctctgaatatgctaagacccacagaattgcacactttaaatggatgaattgtatggtatgggaattacacaattatgtctcattaaagcagttattttaaaaa

SEQ ID NO: 273821 - DNA, 463 bp, Homo Sapiens
  misc_feature (111)..(394): n is a, c, g, or t
ctgtggacctcatctgattgaaagtctctcagcttttacactaaggtgaagacgcctattgtttttggaccactgttcaaataacagttactagacactctccaaaacctnnnnnnnnnnnnnnnnnnnnnnnnnnnnnnnnnnnnnnnnnnnnnnnnnnnnnnnnnnnnnnnnnnnnnnnnnnnnnnnnnnnnnnnnnnnnnnnnnnnnnnnnnnnnnnnnnnnnnnnnnnnnnnnnnnnnnnnnnnnnnnnnnnnnnnnnnnnnnnnnnnnnnnnnnnnnnnnnnnnnnnnnnnnnnnnnnnnnnnnnnnnnnnnnnnnnnnnnnnnnnnnnnnnnnnnnnnnnnnnnnnnnnnnnnnnnnnnnnnnnnnnnnnnnnnnnnnnnnnnnnnnncaacaactaacctatttaccacgttctggatatgtgtttaaacacaaacccagaaatgtgcataatatt

SEQ ID NO: 273822 - DNA, 377 bp, Homo Sapiens
  misc_feature (23)..(23): n is a, c, g, or t
tggggcacccccatcccacgttncgattctggatggacttttaagtgaactctgatgatgagtaggctcttaaaactctttctcaacgttctctgctgggtttgtgtgtcacctcccatgccctctctggtgtgtggtgattctcagatctagagcaatgcttcctgccttgtccccccatgcctttgcgtgtgggaagctaaaattcacatgtgcgatgccctcccatgtgccatttttacctggtcccttctgctcactctttattcatatttaaatgcaggtgagttggaatgtcatcttacaggcataatcctgaatctgctctatcgcagacattttaaaactaaattaaatgttagtactaagtagtaaaa

SEQ ID NO: 273823 - DNA, 340 bp, Homo Sapiens
ggattatataaggagcgaatttattccaaaggattgttgtgggggtgaccattgcaatagggaaacgttgcagtgcggccactcgcaggcttcccatatgatctgcaagtgtctcagaggttaggcaaagggctgatcttgtatagggaggcgtaaacgtggctagaaagaactgttatgggaaagtgggctgagcaagagtgtcacgatcgaggaggtcttaccctgcggacagcctgttctcaggagggaacctcaggagggctgcgggttggcacaagctgtgggtgggccaaagctcaagggcttggaaaaagagagaatctgaaccaaggtttgg

SEQ ID NO: 273824 - DNA, 470 bp, Homo Sapiens
  misc_feature (17)..(17): n is a, c, g, or t
  misc_feature (72)..(72): n is a, c, g, or t
tcttctgtaaagacccntgttctccctcggcacattacagccctccctggaaaagtcctctggtgggcgctnttttctagctgctgccaatgaagctggcttcattttggtctccttggaaccagccggttttcccatccttaccctaaggcctgggcccatcatgtttaagctccagtgaaaatgtcaaaccctgtaaccttcctgcaatatgttccctgagggcagtgtgactccgttaagttgagggaatgtgtcccagacatgggaaaagcctccgagagccccgtgcctccagaacacgggacatcgtggcctgtcctttgatggcattggcttcccatggtagacctgagcacgtgcatcagagatgggtgagccagaggaccctggactctgatctcctactcaagcaggggacggtgtaggggcagggcacaatgacattggcttgggaaattagccaaaag

SEQ ID NO: 273825 - DNA, 456 bp, Homo Sapiens
ttaagacggagtctcaaactcctggcctcaagcaattctcccacctctgcaccaaggtgttagaaaaggggagaggggagtgaaaaaggaaggaggatgtgcaggcaaaggcatgagtacaggtggggcaggagtggtggagctgcagaagggttcgactgcctggctaaggagtagaaatggaacccacagagccatgacaagcccaggacctgcacaggctggggaggtgatgggctgacaggcaggtctactccccaggcacccctccaggtagcttccccagtgtctgcctgcttcctccttggggcctaagcagcataccataggaacatgcttaagcacatccctctcctcccaagtggcatgggtagaggctctctcctgagtagaggatctgagtagccagaaagcagggcaaggctcaaacattcacagcacatgttgtgtacgtga

SEQ ID NO: 273826 - DNA, 430 bp, Homo Sapiens
  misc_feature (46)..(46): n is a, c, g, or t
tgtgatatatgtataaaaaatcagtttcttgtttgaaagacaaaanagactaatttatttttgtatcccaacaaagtcccagacagtgcatgtgaaatgtttgttgactgaacatagctcttcattcctgtctctgttgtcacacttatcaccatccacttaatattaattattcatgtatgtatctgtctctcttgcatggttttaagcttccggatgtcagagaccatgcctaattcctctaaatattccctcaaagcactcctaatatgcattgtgggagttagtactcaataaatacttgctgattaggagaatacttagaacaggggtgtctgatcttttgacttccctgggccacattggaagaagaagaattgtcttgagccacacacaaaatacactaatactaatgatagctaataagctt

SEQ ID NO: 273827 - DNA, 656 bp, Homo Sapiens
  misc_feature (74)..(74): n is a, c, g, or t
  misc_feature (82)..(168): n is a, c, g, or t
cgcagattacgttacctgtggccatatgtactaaagaagagggagagaactcaaggccccagaacaagagagangtccaggnnnnnnnnnnnnnnnnnnnnnnnnnnnnnnnnnnnnnnnnnnnnnnnnnnnnnnnnnnnnnnnnnnnnnnnnnnnnnnnnnnnnnnnggtctggtcaggagacacataacagcattctacatgtaactggagaaattgtgtcatggatagggaagggagggtaattaacccaattgcctctagagagcaaataattaacagaattgcttccagtttctccatggctttctaaagaggggtcaagacttgctggatgccagatgttttccagggatcccagagaattggtctatggaggcagtgctttactgtattatagaagaggaattaatcacactaattgcttactctgtacttttgcttaatgatacaatataaacaaatacaatgagaaatcattttaaagcaatcaaacgggcttcaagttattaaagctcctgaagaatcaaacattacctccatatatagaattattatactaggtgcaattaatgatttgatttatagatgtttttacataggtttgatatgcaacaagtctaggggtataaaatcaataaaatctgccttctaat

SEQ ID NO: 273828 - DNA, 887 bp, Homo Sapiens
ctatttttcccacagtctctataacataagggaaagtacatattctttgatctaagaattccactgctgcaacaaataagggattagagaaataaatgatcatacatcctcccaatagaatacgtacaagtattaaaaagaatgagagatatttacatgaaaaatctgaaagaatatatgccaggctattaatagtagctatatatcaggcaagagagcaagggatggcactgaggggaataagattatactggtcttcagattttttccatatttaaaaaaagtaacacacacataacttggtaaccagaataaatttcttttgcatagggaaagaattaggaccttccaaatgaaaacaagtagagttatagttttaaaggaaagtgcagcccaaggtaatacagaggaaaggcagtaaatgcgcatggggaatgggtgggcaggaggtgctggggggctgtcaggggctcatcaaggggcctttaccttggataattcatcagggcccaaggtcgagggtctgggcctctgccttgaatctctgcttcagggtcaaaaccctggccagcaagagatgagggtgtggaaggcacctctctttggaggctatggtcatgaacactggccaatttccagctcttaacgtgtccctttcttcctttggcctcaccatcctcctctgtcctaatgatcttccttccactttggaaatcacaattgcattctaatcctgcttccttgggattgttaccagagtaccaaaattggagcggtgggtgttcttacatgctttagtcacagatttgccgataatctcgtggttactcccacaggtgactgatcacatccatcaggcatgacttgattatatgagagtgtaacat

SEQ ID NO: 273829 - DNA, 442 bp, Homo Sapiens
ttaaaaaaagggggctcttttcgtagcctaagctggatcaccaacttaaccttctatagtgctgggattacaggcatgagccaccatgcctggccatctttacaatacagtttcctttccaccaatctcacaaagcctgtgaatatcaaattaccaatttattcaacaaatatttatcaagtgcctactatgtgcaaggtatgatccacccgagatatgaatttaatggaaaatttaatggaatttaatccccagtacaacttgtctgtttctcctatgggctgaggccttatgggctccatgaacccaaatctccgcttcatggagcttccattgtcataaggaaaacagataggaaatcattttttaaaacataatttccaaatattaagaagtgcagtaaaggaaaacaaaacaagataagattatagagtgatagatg

SEQ ID NO: 273830 - DNA, 470 bp, Homo Sapiens
  misc_feature (48)..(332): n is a, c, g, or t
aatgaaacagcaatctgaatggctgaaaaaggatggacccagcactcnnnnnnnnnnnnnnnnnnnnnnnnnnnnnnnnnnnnnnnnnnnnnnnnnnnnnnnnnnnnnnnnnnnnnnnnnnnnnnnnnnnnnnnnnnnnnnnnnnnnnnnnnnnnnnnnnnnnnnnnnnnnnnnnnnnnnnnnnnnnnnnnnnnnnnnnnnnnnnnnnnnnnnnnnnnnnnnnnnnnnnnnnnnnnnnnnnnnnnnnnnnnnnnnnnnnnnnnnnnnnnnnnnnnnnnnnnnnnnnnnnnnnnnnnnnnnnnnnnnnnnnnnnnnnnnnnnnnnnnnnnnnntactgctaacacgagtgggcctggttctggaggatttcccagtgggtcctgaagaaccacagtttattggcttgtgggcaaaggggtatgtgtatcagttggcctttactgtgtaataaacagccacaaaaattaaaa

SEQ ID NO: 273831 - DNA, 404 bp, Homo Sapiens
aaatgtatgtgaaatattgagcatggtgcctgacccatagcaaatgctaagtaagtagtagctgttattacttttattaacaagtaacatttgtataacatttatgacctacagagccctttcacatgctgtttcttatttgtgaactgagtgttttatacagaatgggtttttaaatgttccataggctttttattcatggcttcaagaggttgttccctttttgggacctgtacagcttgtgtatactcagttggcatttgtcacgtatcttcatgccagtgtctttgtatctgaattctaaaactgcgtgaacacaaaggttatgtcttttgtcttattcatctgggttgtcattggaacagagtcaggagacattcctatttattatgtgcgtaatcgta

SEQ ID NO: 273832 - DNA, 864 bp, Homo Sapiens
  misc_feature (291)..(291): n is a, c, g, or t
gcccgagggacaagccgcctttggacccctgcccaaaaactggggatccagacccccgcgacgcagacgggaggggccctccacaggagaaagaaacgccagatgtcagccgttaacccgagcagaataccccaggaacgtcgcgtataagactttcttttttccgatcgtcctgtgaaatgccgacagccaacatgtgctactcagactgcgacaggggcgagctctggcgcgtatgcagagatctggcgctcagactgtcacagccgctgaagcgttatctgagttctngttcttccaaccctctgattttcgcaccattacgcgctcaactatgcctcttcttttgtcctatggtctcaactaattaaaggaagaaaagcaatgcatgtgtgtgtgtaattttaaagaaactatgctgtcttatagaaaaccaaaccatcatttttatcttttgtaccaggtattcaagtatgttttgagcaccgacgggctgtgaactggactgtgctgaaagctcctctccctcttctctctttaagccctttatatttgacatcagcttcccccacattctccaaagcttctctcacaaataaagccaggtgctcaggctgagaagattcaaggaaagggttcctcacgtagttatacagttgtgttccaggggaaggaaaatattgttcggttttgttctgcaattccccacggtggttttcggtaagacttgagacttccttattctaaagtccaagcagcagtggaaacatttcaagatccctttttgcaatataacttttccaaagattcaatatttatttaaacccaaaaatcttgtcactcgaagtaaaacgattttctcca

SEQ ID NO: 273833 - DNA, 427 bp, Homo Sapiens
  misc_feature (170)..(182): n is a, c, g, or t
ccaataccacatgttcagctgatttccagtgtccaaaattgcatttcacgttttcattctttgcccttgccaatttctttctttttaatcccctgtagttttaaagaagtaaattggaagtgtgttcagtttaccatttcaattcagaatctttactcataggtgctttnnnnnnnnnnnnnttggtgaaacgttgcctatgaatagattgatttggaagttaccattttgtaatctaatatatcttttttgaatctgttcattttaaaatagttgtgaagaaaatgctgattattaaaatacatgtctgtcattcttggaaatttaagactttcagttgatagctgagaaaccctctttcccagaatctctagaaagcagcagccataatgattcctacaaataaataaaaagccatctttaaaaa

SEQ ID NO: 273834 - DNA, 445 bp, Homo Sapiens
ttccatacactttttgtatttgacattgtaagtgataaaattcatctgtttgaaaatgttatggatttgatctgctagcgtttggcacttttaaattttgactgcatgtagttaactgcaaaagtagagtgaaagctagaacctggggtttgttgtgcagcatgtgtcacttaaatttaaaaataacttctatgtctaagaccaggattaaattttaacttgcaaaccctagtgtgcatccatgacagccttagtttgttaccttgtggacagcaggtccatgttacaaaaggtacagacatacacagtagcttaataacaagcctcacggtgactaggaggcagagtggccagctccctcaaagggctcctgtgaatgcaggaaaggtcattgtccaagccccaaaaaattcccccggtacttggcacccacctgtgtttaaaa

SEQ ID NO: 273835 - DNA, 393 bp, Homo Sapiens
ttttaaggcaccaaagctgaaatagaatcatcaaagcaccaagctcaggatattcccaggattctctggggaaaaggcaaaagaagttggattgccattatcagcatatgctgtgaaaactgtgttgcttttattgagattcacattttagttcaattcaaatgttagacaggggctacatgacaccttcctagtactaatataaactctggaattgcttctggctaatagaattacttagataacagagagtttatatatgtagctgagatgtgataagggtgggagccagccgagaagttagtgactaactataactcagggcaggatagggaaggcccagcataaagtggggaagagataaaaataaggaaggggagggtctcatagagc

SEQ ID NO: 273836 - DNA, 390 bp, Homo Sapiens
aaagatctgaaggaagatgtaagcatttgttaaattctggatggtgggtccatggggatttgttactctggttctaacaaaatacttcaagtatcaagaaaagtacagatgaatgtctcactttgctagcagaatatacacttgaatgaaggggaagatgaagggatttaagttctactttttattcttggcatactcattaagcacactggcagaggctatggtctctcaatattcatcctcccttttagaactctgattttcagataagtgcaaggccacccagaatataaggattactttcccagcctcacttggattcaatcagatctgggctagtgatctgagcaacgttttgggacatgtcccttaaaagataaggagcatgtc

SEQ ID NO: 273837 - DNA, 409 bp, Homo Sapiens
  misc_feature (34)..(34): n is a, c, g, or t
  misc_feature (88)..(88): n is a, c, g, or t
agagagatggccagtgatgagctgaaggagatcnggtaggccatgaccaaggaggccatccgagagcaccagaatggcccgcactggncggcacgcaggacagaccctgttcacctgcggcaagtgcaggaaaaagaactgcacctacacacaggtgcagacccgcagctctgatgagcccatgaccacctttgttgtctgcaacgagtgtggaaaccgctggaagttctgctgacccctcgtgtagatgtgctgcagccttgggccctccccggcccacgtcctccgttgacacagcttctctggagaccctagaaggcggcatgtcctgccctcaacctgcctgcctggattgcacctttctgccctttccccctcattattaaatgtttctttttgccaaaaaaaa

SEQ ID NO: 273838 - DNA, 237 bp, Homo Sapiens
tgtcactgtggaagcttgagcatgttgcttgatctctctgaaccttgtgtttctcatctgtgaaaggtgataatgtggggctgctgtgagatttaaaggacataatagcacctacggtccaagcactgcctggaatacagcagaagctcagcagatactggacaacccatccccttagtagaggcactaaccatgtgacccaaggcaaaagtgcttaagaaaaagtgctttctctga

SEQ ID NO: 273839 - DNA, 190 bp, Homo Sapiens
tgctcagagttctctctttactttctctagatagaatacaaagtgggtggtaaatttgaatattttatatgcactggggtctgtgctaaggtataattttagttacttctcatagcctttttattgaactttatcatttcataatatagatgatgaaattaagtaatttaggccaggtgcattggttcat

SEQ ID NO: 273840 - DNA, 472 bp, Homo Sapiens
ttgtcccacacgacaagagtccagtcaccaggcctcaaaggaacttctgcttgtagcagccgccttcccctgtgcccccagcctcctttaatgtgtgcactctccagagggcacagctcgcgaggctgggtttgggggccaagtggcttgttcattccagcatctaacatcataaaggtgggcccagatttcttgattcgaccacagtgctgttcctaccacacaaatatccattcctgttttgttgaagcagccactggtcctcttgtttcccctgcagacggagggacctggcagtgcccattcattcagccccctcatgcatacttttattaggcgatagactagttaagaaaattgtttctatgtactgtatattttgtacctgtttacacttctaatattgatataactgatattttgaaaaataagagaaaacatcctgttaaaataaaacctaaccagcaccaag

SEQ ID NO: 273841 - DNA, 593 bp, Homo Sapiens
taatttcgtgagagataaaataatgttgatttggcagatatacaggtacaaactctgaagagtttagagtgaggaaagaaggtctctcgtgatgtgccaaacactttcaatgcctcatcctatttaatcttcactataacccttcaaggatgattttatcatccccacttgacaggtgaagtaattgggcctcaagaagctatgttaatgagatagcatcgataaagcctttggctccagaaggcactcaatcaagttaatgttctttcttccttgggtaacttattccaagtcactggatcagtaaggggcaggagcagaattcaaacctggacctatctgattccagacacccctgggctttctgtctcaccgcactgcccagacactaacaagccgttgggagaactgatgaaccgaatggagaccactgctcttttgctggttaaacaaaagtggtccaataaataaggaagggcctgatctggaaaggcctgcattctatggctcaggatattcctgtttatccaacttggcaggcatgtaaatattagcgtcgccactcctgtcccccatgcatggcgctgtgtgtt

SEQ ID NO: 273842 - DNA, 340 bp, Homo Sapiens
ggcatagagcaaaggtccttccttctcaaacatttgccaatttgatgagcttctgtctcttttaattgtattatgaacttgaatgggactggcttactttagtttataggaaggtaaacattgcatgtatcattattagggggattctgggctctttcagaatccacatacatgcaatctgtagtcatatgaagaaaaattagtcgttgttaaaatttggttagtaatacattggccatacttgcactttccaggatgagatcagttctgtgaaacatccaaataaaaaaattaaaacagaaagagacagtgaagaaaaacctgagccagatgtttatat

SEQ ID NO: 273843 - DNA, 439 bp, Homo Sapiens
taaagttcatctcccctgccccaaaaaactgatagcatgtgccatatcagaaaaatcctggtcttagcagatcaatatacatagttatttggtcattcgacatatgcactttttaaggaggttcaggcttcattttctgttgaagagtttgttaccatagagtctggctttcgagtcattctatccagttcttcctgaacatttgacaacacagtcttttgtcctgacttcttggctgtgctctgcacccaccagcaccaggacttccaggagagcctgtctttttactcaacagactgttgaagaagctggccaacaccccttcacttgatgcattatttttgatgtttgggtccggcttttttactgacgtgcctggggaggagctaggcacactggctggtcctccccgaccctgggtccttggagagccagaagg

SEQ ID NO: 273844 - DNA, 367 bp, Homo Sapiens
  misc_feature (338)..(338): n is a, c, g, or t
tacactaagaatatattactgtgctttggcattttatgttaaggtacaaatgactgtagattactgacacatggggctaatatctgttttgcaaaataaccaaatccattgtgtaaagggatgctttaaactatggtatttactggatttgaacttgaacctgcacaaggtaagagttttgttttctctatattttactcattttccaagacagttaatatctctgagcctggttttcccatctggaaaatggggatgaggaaggaagaacttttgatgcttgtccccttcatctcctgtattctaagattattctaaaggatggtcactggtactgngcagagctgaggcaaagaaaccattctgc

SEQ ID NO: 273845 - DNA, 787 bp, Homo Sapiens
aagctcagggtcaagttctgagcaaaaagtgtcaaggagcctttttgcaacctcctataatattgaaacagattctgtgccctttaaaggagataataactaacatctggggagcgctttacaatttagaaaaggcctttcacacacaggcctgtttcatcttcacaacaatcttataaaacagatatattgttcccatttcccaaataatgaaacggaagcgccgaaaagtaagtattgtgctcaatgtcacaggctactaagtggcatgggaaaccaggtctcctgaatctagcctccgggtttctgctctccaccagcccaacctcagaaaattctaataggtgcagggggctttggcaaatagacccatgggaagaaggggaaacttatgtctagttaagtcgctgcccgattcctgctgtaaacataccaaggaaagcaacaggctgtcttcattgtgttgtcgcaccttccttcctgaaagggacgccagaaagattacatcaaatggcccagatgagatttcgccgacagtattttatggtttaaaatgggtgaaattatttggatgaagaaaagcgccttacttaaatttaatatgatgtgtaatgtaaattggtataatgtgtgaaaataagcccctccctgccttctctgccttttctctttttaattttgtttgtctctactgctctgctcaactcttttattgtccacataattgaaaacctaattgatggatatttgcatttccaaattaaacctttggctacttgaaaaaaaa

SEQ ID NO: 273846 - DNA, 417 bp, Homo Sapiens
atactactgagttattggcacctgttaaattttgtacctgagcgaagtgcgtcactcatctcaccctagtcctgatcctgttgggaagtctggaaagtcaaggatttcatggagttagggatccttgactaattggtgcttcatatgttctcattacttgctttgggtaagtcttgtacaggcaggagccaccatgcccagcccccaaatatattaaatagggtctgttaccatctcagtgactgtcttaaaacaacctacaaacttccagcaccatttcctagcatgctggctcagcagactgttactccgtgtaaatcaccagactgcaattctcaagggcgaccaatgcttgtctcctttccattacagcaactcttttggagcaagggtaataaaagactttgtcaaacaaaa

SEQ ID NO: 273847 - DNA, 359 bp, Homo Sapiens
ttgttctttaatccaaacagtttaattcaagcaatctggaatataaaaagcactttctgatattagaaggagatcagactcccaaaaaagatcagcattctttagtcaagcaaaacttggaagtttacaaacagctaaatcagaagcttgaaattcaggtcctctccagtacctgctacattatatgtaattccaaacatgacttcagagattaaagaagaaagggaaagatgtttcccattcttttgtaccctatataaactaagggtaccctgccctaatcttttttccaacacttccccaaataacccttccttacaaagaaagaagtctaagagaactctctcatctaaatatat

SEQ ID NO: 273848 - DNA, 532 bp, Homo Sapiens
cttaattggcacatgaagaaacatgatgcagactccttctaccagttttcttgcaatatctgtggcaaaaaatttgagaagaaggacagcgtagtggcacacaaggcaaaaagccaccctgaggtgctgattgcagaagctctggctgccaatgcaggcgccctcatcaccagcacagatatcttgggcactaacccagagtccctgacgcagccttcagatggtcagggtcttcctcttcctcctgagcccttgggaaactcaacctctggagagtgcctactgttagaagctgaagggatgtcaaagtcatactgcagtgggacggaacgggtgagcctgatggctgatgggaagatctttgtgggaagcggcagcagtggaggcactgaagggctggttatgaactcagatatactcggtgctaccacagaggttctgattgaagattcagactctgccggaccttagtggacaggaagacttggggcatgggacagctcagactttgtatttaaaagttaaaaaggac

SEQ ID NO: 273849 - DNA, 414 bp, Homo Sapiens
  misc_feature (387)..(387): n is a, c, g, or t
tttgtaatttaaaagagctttacttggtatacaatctccatacaattcagtaaaacaaattataaaagctctttgcaagattttacccaaagggtgttaaaacagaaaatcaattgccacaagaaagtaagacaccctctcatctcaaaagcttttttccatgaacaaacattctcttaggccaaaaggttgccatggtttaaagtatctgggagcatattaaccaagatataggatctgagaatacttaattgattttgagatttgaattaaattttaaaaatcaaatattttgtatgttaattcaggtaggttttgggccaaagatggaactcaaattttttacatcttagacaaaatcaatatggaatcagaatagacattttnacttttagttaactggggaaataaaga

SEQ ID NO: 273850 - DNA, 341 bp, Homo Sapiens
gctccctagatactgccctggaatgttactctttgaaaacagtggctacagagtgatgcctttctccataactttaatttaccttaagaaaagctttgagtgctactgagtcgggaatgaaaaacctagagaatgttctgtcctgtgggagcaaggagtatagttagtccctgtattactaaccaaaggggcatgaggcttcaccctccttgggctccctagggacttataatgccttcctgtaattatcgggccagttaatttaatactaatccacttaattcagttaacatcagatttgtcctagggatcttgttacatccttttgtatactaaaagag

SEQ ID NO: 273851 - DNA, 381 bp, Homo Sapiens
gtaaaaaaaggaaacaaagtccaataagcaggagttagctaagaaaacctgcagaggaatcacatttacaaagatttcagatgttaacgttagtgtttgcagaatataaatgattgagaagtttgaggaagaaattaggaaatcagaattacataccaggaagagactgttaactgactaggtagatttcaaaagaaacaattgtacgctcacccctcccactgccctcacacaaaacaaatgaaaacaacattcaatggatggactgaacaacagattaggtgcaggcagagagtattggtgtactgagaattatctgaagaaattacacagactatagtacgaagacacaaaataaatgggaaatatcacagacaagct

SEQ ID NO: 273852 - DNA, 423 bp, Homo Sapiens
ctttcactgtagtatgcctgatttttaatgcatcaacagtaactcctgctaatatcatctatgctatgagatgaatgcattggagacggtattgatctgttctgcatgccacatgctaatcctgcctatgagcttggcaggaatgagcttgtcaaggcttggagatgggccttgggaaatcaaagcttcaggcaggcaggcagcacctacttgttacagggacacacacaaagcccgcagaattttcctaggtccgtcaaattcttttctgcttctttcatgtccttattgatttggtccatcccttcctcaatgcgttccagttgttctgattaaacacaagtattttatccccacagaatgaagcagatggaaaaggacaaagaaaaaaagacaaaacttcagacattcactttgacatta

SEQ ID NO: 273853 - DNA, 236 bp, Homo Sapiens
ctgggtcagtgacattggtggaagccttcatgcctcctcattccacagcacttcctcctatgttgaccttaaacactggcttcccactgatacagactgggatgagctgagggcagtctcatttactgtcaagagttgtatttttgtattgtcctttttgccaagtctacatgtgttgactctgtaatggatttatgtagcccacttcagtctgcaaataaagcaaagtaactgga

SEQ ID NO: 273854 - DNA, 522 bp, Homo Sapiens
  misc_feature (19)..(19): n is a, c, g, or t
acctctgcccaagaaagcntgggtgttgtccaggtttccccccagtgagacggcctgagatatggcctcgtgggaagggaaagacctgatcgtcccccagcccgacacccataaagggtctgtgctgaggaggattagtgaaagagggaggcctctttgcagttgagataagaggaaggcttctgtctccgacatgcccctgggaacggaatgtctccgtgtaaaacccgatcgtacattagttctattctgagacaggagaaaaccgccctgtggctggaggcgagatatgctggcggcaatgctgctctgttactctgctacactgagatgtttgggtggagagaagcatgaatctggcctacgtgcacatccgggcacagcaccttcccttcaagctatttgtgacacagatgcctttgctcacattttcttgctgacctctgcgtcttgccgcattcctcatgcaaagatagtgaaaatggtaatgaataaatactgagggaactcagagaccgggaa

SEQ ID NO: 273855 - DNA, 171 bp, Homo Sapiens
cctataatgttctgggtttaaaagccatcttttccacattttctgtaaataatggataatcattttaaaaatttttatttttagtgctgttttaacaatgtagatagatcataaatgtacttgctgaattcaatcatttttaacaagccaataaagtttgataattcaaaa

SEQ ID NO: 273856 - DNA, 425 bp, Homo Sapiens
cataaaaaagaatgagatcctgtcatttgcaaccaggtggttagaactggaagtcattatgttaaatgaaataagccaggcacagaaagacacacttcacatgttctcacttatttgtgggagtcaaaaattaaaacaattgaactcatggagatggagaatagaatgatggttaccagaggctgggaagggtagtgggggtgcagcagggaaagtggggatgattaatgggtacataaaatagaaagaatatataagacctatttgatggcacaaaaggatgacgacagtcaataataatttaattatacatttaaaaataactaaaagagtataattggattgtttgtaacacaaagaagaaatgcttgaagggatggatacctcatttaccctgatgtgtttattacaaattgtatgtctgt

SEQ ID NO: 273857 - DNA, 421 bp, Homo Sapiens
ttttgagactgcatagggctcggtggagaggcctttgtaggcagataaaccagggtcagaatgttgtaggaagagatgttgcaaaatctgggtgggtacatccccttggcttcagtgactccttacctgaggggagacagcagtctggagaagacacatgtatcgcagggcctagaccaggataccccctgtccagctctaagagcagcactactgctcatttccgatgttatatatgatgggtaggtaccccatgttcacagataagtccagttatccacgcaagtatcaaaaatatagtattaaatatactatcaaagctaactaccagcacacacatttcataactttcccaggtttatgaattctgatatcaccactcaaaacactttccactagaagaaaaagttggggaagagaa

SEQ ID NO: 273858 - DNA, 508 bp, Homo Sapiens
gaaactgaggctcaggagagaggcgctccaggccgctgcagccaacaaaccggcgccctcttcacacgtagctcctcaggccattccccatgagtcccccacacccaccccatcctcggtctttgcaaagaagggcccgagcttagtttccccaggactggcctaggaaggagcaccggccacagctgctccccgtgccactcagggtggacccagcatctcaggagcacctcagggtgtcggttaagagacaggcctccacccctgcaccagagcctgctcttagctcccggtgcccccagaccccgcagctctgtgcccggcaagaagcagctagacacacgccagggcgccaagcacggccagctccgcggacccatggacaagcccagccccgcctcagggaaaacagggcctttccctacaggacacgccccagagctgtggcagattgcaggagccatcgtgtggggagaatttaataaaagcccttttgaaaatgaaaaaa

SEQ ID NO: 273859 - DNA, 377 bp, Homo Sapiens
tctaaagtgggctgctctcccacaaaaacagcatgggaggcaggtcccaactgggcatgcatgcccacgccacacactgtcagactgaggccaggactccggtctggaccttgatgtgtgtgtactttggatgtgctgagcttaggggcagtgtagataaagatgttctctaacacaagaggcccaggtcccagggtcaacactcggttttcacactgaagtccccactaataaaatggtctttcaaagtcccttatctgtatatttatctctgtggtcccaacaaaggagtgaggaagtattttgggattcgtgaataaacataccccctggctgaaaacaatcacaagcaccttggatatcacccaaaatgggct

SEQ ID NO: 273860 - DNA, 457 bp, Homo Sapiens
agccctaagtctgggttttatcttaaaagaacacaccagtcattctggtctccccttattgccattgccaggggagggtcgtctagtccttaagcataaacactggctgtcttcctactggtgtccccgccccctctgtatcccccaccccaacactttgccagacagttctttatgatgaacaaactttggctttagagctttaccacttacccatggctccctccttactgggcaggtggtgtacctgcctcttcccagcccagaaggcagcttagtcaggtcatcccagtagtagctcctacagctcttctgaccagcccatttccatctttggagggccttagcagactctggggtattgtcctcagagaagagacaaggagatgatggatggggtgcatgtgtatatgtgtgtttgtctgctgtccaataacaccaaaagtggaacttaaaa

SEQ ID NO: 273861 - DNA, 465 bp, Homo Sapiens
  misc_feature (305)..(318): n is a, c, g, or t
tgtctgtatgtgcatgcatgcttgtgtctgtgtgtgcatgcgtgtatgtaggtgggtgtgggtgtacatgtctgtctttcctgggctcacagtcttttggtcaggtgggctatggtcctgcagggctgagtgtgacacctttccctgtgggccctgcctcacctttacaagtgccgcacctaagcaggagcttgatcaaatgtgccattgatagaatgcacttttggatcctctgggctgccatagagtcttcttttctccttgccatttgggaatagcactggaacatatgctcagtatgtacnnnnnnnnnnnnnntcagccaggaggcgggctgactgggccaaggaagattgttcaggagagcttgcagggaggagaaaacaatttccacgtcaaagtaccttgtttaaagattagagctgtatcagcccagaagctatctcccaaccctccccaccccac

SEQ ID NO: 273862 - DNA, 376 bp, Homo Sapiens
gaagatgagactaagccagaagattgcataccagatgtaccaggcaatgaacacgccagggaatttctggctcatgcaccaactaaaggactttggatgccactggggaaagaagtcaaagttatacagtgttggcgttgcaaacgctatggtcaccgaacgagtgacaaagaatgccctttctttatcaaaggcaaccaaaagttagagcagttcagagtggcacatgaagatcccatgtatgacatcatacgagacaataaacgacatgaaaaggacgtaaggatacagcagttaaaacagttactggaggattctacctcagatgaagataggagcagctccagttcctctgaaggtaaagagaaacacaaga

SEQ ID NO: 273863 - DNA, 345 bp, Homo Sapiens
  misc_feature (69)..(86): n is a, c, g, or t
caggtcagcaccagggcaggctctggacaagatcagtgcagaaaaagcagaggtcggtcggccagcccnnnnnnnnnnnnnnnnnnttgaaggaagcaaagctccatcaaatgctgaggccaaattattagagggtaagagtcgaagaatagcaggctatacgggcagtaatgctgagcagatcccagatgggaaggaaaaatcagacgtcatcaggaaagatgcaaagcagaatcagttggaaaaaagcagaacaaggtctccagagaaaaaaatcaaaagaatggttgagaaatctcttccatccaaaatgactaataagactacaagtaaagaagtatctga

SEQ ID NO: 273864 - DNA, 480 bp, Homo Sapiens
  misc_feature (28)..(28): n is a, c, g, or t
  misc_feature (94)..(94): n is a, c, g, or t
  misc_feature (153)..(153): n is a, c, g, or t
caacttcttaaaagcgccttgaaaaaantgggccccagggtctgggcaggcaaaaggcgcggcccctgaacaacgtggaagatggccctgctcnccctcctaaggaggtgcttcccaatgctctttgtaaatggcactacttggtccccaaantgaaccccccactgcttgctcacatcccatatcagaaggggatttttaaaaaactgttatcttcttggccaggggaaaggaccacaaggcaatctggggtgtggacagacccagtagacaatggaagccccagccagcagggccaggtgacagtgaagctcaccagtgggctcctttatggtactctatgcagttaacatgtatctagctgcatagggacacccagcgcagcagtgcaccactgggaagtggcctccaagttgcagcctctggccttattttatatatttaaatttttgataaagtttttcttactaaaaggaaaaa

SEQ ID NO: 273865 - DNA, 367 bp, Homo Sapiens
  misc_feature (76)..(76): n is a, c, g, or t
  misc_feature (117)..(118): n is a, c, g, or t
gccctgaccagcctcccccttgggtccaggggtctttcggctcatattgcagggcctgccaatgccttcacgcacncccttccccaaaggtgcccggcagggaggcagggcctcccnnccactcagcgcaggtcaggctaaggccagtcggctggtcactatgcaatgctgccctggggaggctccctgagggcacagtgggcgctggacccggccccccaactctcttgcctgctgcctgtgaccctgaagaacagaattgattcttgcccctctccctgtgtgagcttggccccgcctcttgccccaggcccctgctggcgggtctcaccccccacccctcgctttgaataaagcacttgcgccc

SEQ ID NO: 273866 - DNA, 547 bp, Homo Sapiens
  misc_feature (82)..(82): n is a, c, g, or t
ccttttccctgtacacagttgcatgtactgcattatgcaaatgccattatattttatgtaacctgtccactgttggtaggcnacttgagttgttttagtcttttgctatcaaacagttctgggatgattaaccctgatttactgcaaaattgaaattgctctgctattctgctggaatggtggtaagtgaactgaaaattccagtcactcttgggctagactcaacgttcttaaaaactatgtggccatcaccaaattagttattttgaaccttaatttcttcacctctaaaatggaggtaatacttaccttaagtggctatgagaatgaagatcatgtgtatgaattgttggtgctctaaagaacagcacaaataaaattattttcaaatttaattttaattgaactatgtgtaatttcttaattttgaaataattttatttgtaatgtgcataatcttatttaatgtataatgtatacattgtaatagaaacagatttcccgaaattccagcctggcatgaggtaataaaaggtaatgcaaaggg

SEQ ID NO: 273867 - DNA, 494 bp, Homo Sapiens
ttctttgatttaggcctgcttcctagctgttagatccttgggctctcctgtgccagggaagagccagggaaatgcctacaggagggggtagtgtgaggtgccctctgaaagagcatcaggcccgtgtgtctggtgtctcctgcacctcctcccagagccactgttgggggcactttgagaccattaagtggcttcccagaaacattagttttggagcaggagctgaatgtccttaccaaatcacactcctctctagccagcttcttggggctggctgtccttgtgccagtcttttctcttagtgtctgaactatccaaaggtccatctcctgtcctttgtagcagttgctgatgttgagaaatcagacccgtggttagtaatcttgaagtttaatgtatgtcaggtgccatgcagtgttccagcagtgctttcacaacataatttaatgtggtcctcataacttcacctcaaagctaaataatagccctgtgtt

SEQ ID NO: 273868 - DNA, 431 bp, Homo Sapiens
atagctagtccagtatggctaggatgctggcctttgccaggattgaacaaatattatttgactacaaagtacttgtggcctgtgccgattaaattatcccacttgatcctcatgatattcctatggtagggaaaaagcttatccctactgttgccattttatagataggaatgtaagctacaatatgttgagtgattactccgggtgtccacttggtaaggggttgggacttgatcccaggtcattgagatccggtggccataatcctttggtgccacagcactggatcatataaggacgcatcctgtcacctttggagagcccacctgcaggtctggacctgggctttgtcaactgaaaacagaactgccctggagtgccgtgggtactcaacaagtagggaggcattgatgggccccacttttcaacat

SEQ ID NO: 273869 - DNA, 477 bp, Homo Sapiens
ttagaggttaaatgaccccatttgtggggtggtttattgttaaaatgattaaacatgctaaaatcacatggagtggctattccacttttgccctgactccatagtggggcaaatgggaactacaggagtcacttggtttgtgtggcctctggggatggttagacttggagggttagcggtgaacaggttagcaaagccccaagcatccttcatgtagtacacttttcccagcagtaaaaaaattcagagatttcccccttcttcacttttctttcctccctatatgtgccctacttctcattctcctatggccctggaacctcttatgcttctgcccgttatggtcttagactagatgaggagggaggcttttccttgacaccagcattccagtctcccttccttggaactaatctactcagcatgcactattgtggtaagctgcttgatttaggtctgcctagggggaaaacgagg

SEQ ID NO: 273870 - DNA, 410 bp, Homo Sapiens
cgtcacagggatgccttcatctggtcccagctctctccctctcatagccgtgtactctggtgggagcaattggcatgaagtttggcagtggcatcctgaaccgggatgacaggaccatcagtcagcaccagcctcccgcccctcctggcctcggcctgccaaagcctcgtattcccacagctgtggctccagcctctgccctgtcacactcgcacacctgtttgccatcctgcttctggcccgccagcccaagccacagcccccaagcaggcttaaagggccgggcttgtgggaggaatcggcacaggatggtatttactcaaaatcacacaggacggtgaaacttggttaaaagaaatccttttgtagctgcttcattaaaaacaccaaagaggctgaccattcaaaaa

SEQ ID NO: 273871 - DNA, 362 bp, Homo Sapiens
tataagtgaaacgaactccttgcccttaaccggttcactctctaggagagagacaaatctacacatgagcagattattatgtaagcttggaagaaagttgcttaacctggccagaagaaacaggaaaggcgtcttggagtaagatgtccaaatcataaggggcaagcatgttgagaatcacacctagcagggaggatattatgagcaaagacaagcaagtgaaagtgggatgtgtataagaattacaaagagtttggtattgctagagcaagataaagtcctgggcaggcgtcaagggtatggtacttggtagcagagaaacattttgtcaagaaaattctcctcctaggctgggcttggtg

SEQ ID NO: 273872 - DNA, 411 bp, Homo Sapiens
  misc_feature (361)..(361): n is a, c, g, or t
agtcactgggatcctttaggactctgatttttaaaagccatggaacttcttccccagaaaaggatgtgtaccctcacacaatgtttgacatatactttccaggcattcacagacccctaggccccatctgggttccttcttgctacagaaatggcaggtaaaacacagtctccactggagtcaatcacatggagtcccttctgagcccagcacagcaagctgcatgttcctaacccccttatctctccgcaatcagtcaccacggagaggaacagtcttctgtgacaatcccaaccctggcaggtggcagcggaagaacgaggcccaggtcacctgaccccaatgaggatgctgatgattntcctcctctccactgttcagaggcagcatgcttctcttcaggaaaaagaa

SEQ ID NO: 273873 - DNA, 482 bp, Homo Sapiens
ttgatgtccatgagcaaagcaccattcaagagttattaagtctcatttcaactgaagaccatcccattacttagtgacccatgagctctgcatcaagggttattccaggggctactgaagatctaatatattccagccttgcacaactgctttgaggtactgtagactgctgaagtttccaccctcttcccctgggattgcacacatagctgttatttttttcttacacagcatattaagggaatataaagctttaggcatagaaatcactaaaaactgtgtttgtcatgacctttgtacttgatttatcatgactttgtatgactgagtaatatgtagtcagatcactaatatggtatttgtaattaaactacaaatagtttgtcatttcccagaagtcttccaacgatgcatgtttcatacacttttgctaaaggaggggtaaaggagggggtagggaataaagctatattggaacaaaa

SEQ ID NO: 273874 - DNA, 497 bp, Homo Sapiens
cagctgtgaagagtccaggcactcagcgtggcatcttgttcaccctttcttgcttccgaggctgcattcaagccccaatgagaacaaaaccatgtgtgtggggaggggcgtggggggtgtcggcagttttagtttttcagaagtgacgtttgttggcagatggctccctgtcctccaggcagtcactcatggactggccagtggacaggccctttctataagaacccagccagccttccctctcccaaaccctgtcactgcctgggcttcatccagggagctagaaatagggtttgcactgatgtgtggaagcagcctctccttgccttctgtgctcctcctgtggctgcaggagtgtggctctgggtgtctgtgtgtggtggacggtaaattcgctgcccagtcaggtcccacaaggccacggggctcagtcacagccagtggggagaaccatggtgagccatgcaggttgagaacaggaccagtgcatttgcgag

SEQ ID NO: 273875 - DNA, 663 bp, Homo Sapiens
ctaagaacttcggacatgttatctcacttgtataagtacttaggtgcctacaacataaacagcacctggtaaattaagtattgaaaaaatgctatggggcagaggaagaaatgctaagcttctgtgagaagagaagacagcttgttacacaggtgaaaagaacaagctgcagctgagagaagaaaagtataagagttgctaggtgtgacaatctcaagacttttcaaccactacaaatttaaacagccaccctaaatcaccccaaaggacagactcgagttgttctttttgtctttaatgtttgcgcctctccgaatcagagaagaagctgccaggattccagtacataccaaaacatgatgacaataccctcaactgtgcaaacttttgtgcatctaccgctatgtaaaggaagctgatgtcagtagactggggggaacagtaaggcatgtttgtgaccgaagcttaatttgccatcacagtgtggccacacctacctcactaatattctaatagtgggataaataattcaatagggataaagcctggattttcctcttattctctcttagtgcttacattcttggcatgatatcgatgtgccatagacaagccaatatgtgagtgtactctatctgaataaagtatagcctttctacatta

SEQ ID NO: 273876 - DNA, 487 bp, Homo Sapiens
  misc_feature (226)..(409): n is a, c, g, or t
tttactttcccactactaacacatcccaatggtagatatgtataagtgaaatgagtgcgttcttcctgcccctataatgacaagcctgacagagaacacatcacacagaagaatgtgccaagaatcaagacctcttagaagaatgttagaaagttttctctccaaatggattctgtctaagtaggaaggccttggcaactagaaaggtctaagatcaaatttatgnnnnnnnnnnnnnnnnnnnnnnnnnnnnnnnnnnnnnnnnnnnnnnnnnnnnnnnnnnnnnnnnnnnnnnnnnnnnnnnnnnnnnnnnnnnnnnnnnnnnnnnnnnnnnnnnnnnnnnnnnnnnnnnnnnnnnnnnnnnnnnnnnnnnnnnnnnnnnnnnnnnnnnnnnnnnnnnnnnnnnnnntcacttctctcactcctccaactgaactgcagttatgtaaagaaaagcaagcatccagcagttttgaagaatgtttgg

SEQ ID NO: 273877 - DNA, 346 bp, Homo Sapiens
  misc_feature (26)..(26): n is a, c, g, or t
  misc_feature (126)..(126): n is a, c, g, or t
aaggatatttagtctgtcaaaactanaataagatttcaactccccaaccccctctaacaagccagctaaaggtggactatagtgcagacccagcaaccttgtgaccaagcttaaaacccctcatcnactacaaattcagagggcatctcatcaccctaagggcccaacgaaagatctttatcttctaacatcagtttatgaaaacttgaaaaggtgtttgctccatcaaattcagacaccagtacaaaactatattatgcccattgtctggttctattttaatgtagcactggaagtgtgtggccagaagaattagtcaaagaaataaaaatagccattgaaattg

SEQ ID NO: 273878 - DNA, 354 bp, Homo Sapiens
ccatgacaagccagaagttctgatttttagtttgttttctgatttaaaaaaaatattggcaatagtccgtgagccactgtgccaggccaatgtcaggcatttagtagctgcctcacagatgtgagaaaaatcctgtgtaggtcatccagaaaattagaggaagaaataggcttagaacttttctctcatgactcccagtgcagagcttgttccacattacatgggcctactttcatgggagtttccaaaggtgtctggacacaggggtccttcttaactctgggaaattgtaggttattttatgagagcctttttccctccagcctgggtgacagagtgagactccatctcaaa

SEQ ID NO: 273879 - DNA, 321 bp, Homo Sapiens
gtgggctgtcaggagaatagaaaggtgcctgtgcttcaggcctgagacttctttccgtgtgtaggctcacactgcctgagaaatttgggttccttgtttcgtctttaaacagcttcttcctttactagtcgaggctttttcaggtgcccattgcaggagacccctttgtagagtcacgggggcttaatcagaatccccttctctccatatacccaaccccgtagactgtggtgaggattgaatgagacctacttagcatgattcctgacagagtgtgcactcaagtagatactagctattatcgttactattatttctctt

SEQ ID NO: 273880 - DNA, 362 bp, Homo Sapiens
  misc_feature (217)..(228): n is a, c, g, or t
  misc_feature (316)..(316): n is a, c, g, or t
gagaaaaagaaaaagactggcacttggatctttgttctgtcaaattctaggtatatacgtttattttttcagttctttgcagtgaaaaataatgactttttaggcacttgaaaccaggtagaataaatacaactgtgaagattattttattttatagccagcaattggagaaacgaattttaatgtaaaaagcaaatagatcctagagtgtaaaagnnnnnnnnnnnncctccaaagtgaggtctatgtgttgctatgtctgggtgcattggggaattgccttctgatttcattcttgaagtatacaaaaaatatntcagtgtagggtaagtactaggaaaaagctaaaatgagaagatact

SEQ ID NO: 273881 - DNA, 395 bp, Homo Sapiens
aaggcatatcatgaggctagtgaagcacctacaagaaacttataactcaaggttgtaaaaatggcatggtgactcttacaatcatatcacagtgggcctctccaacaatttaaacctcatgacctaggtgaaagctgtgaaaggatccacattaattcttcagaggcagggcttaagactttcaagactgaaaagagactagcataaggagacttaacgaggaacccagtcaaagccattcatggcccatgggaccacgcataaatggagaacgagtaaattttgctaagtccaaggacattggagagatagagtcactattactgatatggtgactgagtcaacaacatactgccactatgaagtaataagaaaataaaaagttaaaaaatgta

SEQ ID NO: 273882 - DNA, 362 bp, Homo Sapiens
ttttataaagcaagaagatattcttaatggcaaagagaatgagattaaagagttgcagcaagttatcagccagcagaaacagatcttcaggtgaggggtctgggcccggctgggggttgttgatgacactggggagccagacctctggcccctacctacccttggctgtccacagcccaccaccagccggctccgttgcaggaatcacatgtctgacttccggatccagaagcagcaggagagctacatggcccaggtgctggaccagaagcataagaaagcctcagggacacgtcaggcccgcagccaccagcatcccagggaaaaataaaatggccgccgctttcctgttctctgggtgt

SEQ ID NO: 273883 - DNA, 452 bp, Homo Sapiens
gtatagcttagctatttatagaagactatgaggtactgttgtgagttatttgcttatcctgttttattctgaaaaatgaaagtgctcaatagaatttttaacgttggcaacacccataaggatttcttatgttaagtcccaacttggggttgcaaaatcattttttcccttaatacctgggtgttgtattagatctcataatttgacaagttaaccttttagaaatccacatatatctcaaatctggctactgcaaaaccagttttgacaggtcagattttcatatgtataggtataaatagccaacactcagtgaacaaaatcctttaagcattttggttacataaagttgtatgttttaagtgatcaaactaagaatattgtttataggttttaaaaaccaaaccaataaaatttttatttattcaataaaatatgcacagaacagatgc

SEQ ID NO: 273884 - DNA, 349 bp, Homo Sapiens
caagttcaagcccaggactggggaatgagactgcttaggagttcattcatccagccaacacttctttaggccagatgctgtgtggggcactggggaatgagactgcttaggagttcattcatccagccaacacttctttaggccagatgctgtgtggggcactgggaaatcaacagcgaccataatgcaatccctgcccttgagttgaccccgtcacctaaccccaggctagtgagaggggagaaataaaataaacagataacagatattatgaagtaagatctggtaggagccaggtgagaggtgtgcaaagggcatttggtggcaaaagaagaggagcaagtgagct

SEQ ID NO: 273885 - DNA, 293 bp, Homo Sapiens
aaattgtcaaacttggtaaaaagcaccagcatggccaagtttctctagggacttcatttcattttcaggttttcaatccagctataaggaatatgtaatggaattatatacagcacacagcaggcagcaaggctgactgacatgtcatagttttcatagtagtcacaaatactatgatgggtttcatggtcttggttgtgaaatagatatctgaaacaccgtgagcttagaataaaaagtagtagtgagattttccactttctgcctgtatacctttgagctcttaaatattt

SEQ ID NO: 273886 - DNA, 970 bp, Homo Sapiens
  misc_feature (270)..(270): n is a, c, g, or t
  misc_feature (280)..(280): n is a, c, g, or t
cgtacaccatgattgtcccttagggaactgtgagtgtggggctcctctgtcctcatggagttggtggagctcatgaaggacttcagcatttgggtccttttggcaacatccccaacatcgtggcagagttgactggagacaacattcctaaggactttagtgaggatcaggggtacccagaccctccaaatccctgtcctgttggaaaaacagatgatggatgtctagaaaacacccctgacactgcagagttcacgtcgagagttccangttgcaccangcatctctttgatccggaacatgactatccaggcttgggcaagtggaacaagaaactcctttacgagaagatgaagggaggagagagaccgaaagcggaggagtgtcaatccatatctaccaaggacagagactggataatgttgttgcaaagaagtctgtcccccatttttcagatgaggataaggatccagagtaaagagaagatgctagacgaaaacccacaccacactgttaagcctcagcatggcttatgtgcacgtgtaaatggagtccctgtgaatgacagcatgtttcttacatagataattatggatacaaagcagctgtatgtagatagtgtattgtcttcacacccgatgattctgctttttgctaaattagaataagagcttttttgtttcttgggtttttaaaatgtgaatctgcaatgatcataaaaattaaaatgtgaatgtcaacaataaaaagcaagactatgaaaggctcagatttcttgcagtttaaaatggtgtctgaggttgtactattttggccaagtctgtagaaagctgtcatttgattttgattatgtagttcatccagcccttgggcattgttatacaccagtaaagaaggctgtactcaagaggaggagctgacacatttcacttggctgcgtcttaataaacatgaatgcaagcaaaaaaaa

SEQ ID NO: 273887 - DNA, 367 bp, Homo Sapiens
  misc_feature (318)..(318): n is a, c, g, or t
ctacacacgacaaatactttgatataatctaggataataaaatagttgaacaactttttaagatttatatttgtatagaaacaatctgtggaactcctcccctcaaaatgaaggtgtctaaaaacagtgattcatcagcattgctttaaataattgtttggttaaaagttgtggtttccattctcaaccgaaatgcgtctccatgcagttttccttgggtccaaagcttaaggccttgggaagggggccaagaaaaaaagaatggccactctcctttctgtccttcccttgtgtggaggacagtgattgaaacagggngagttaaaaagccaggaagaaaagaaatcaattgcacatctctagttcg

SEQ ID NO: 273888 - DNA, 334 bp, Homo Sapiens
aaaccttttggttcatatttgttctaatatatgctttgaatatggaggagatcccagaggaaagccctggatagaatcagtaatggtttgggagcagctggtgaatgtctggggagggattgcagcagctcagaaacagacatcatcaccacaaatgcccagaacctcactacttggcagaaaggtcagcctgacagtaaacatctgttctaggagatttaaaaagaaatgaattcttgctgtcgatgtgagagggggaatttgtcttagaaggtctcatacatggatgagaattacttatgattgctacagtcagtgaatacaaatgttgttg

SEQ ID NO: 273889 - DNA, 443 bp, Homo Sapiens
ttgatctccttctccagaaactcagagagactgtttttagaaccctcatctcccaatataggggtgggagtggtcagagagttataaatatcctgtcttccaaggcatggcttaccacaagtctccagtttgaatagttttagtacaaatctaatagctttgtttcaaacctttcctgaaacatgcttgggaacttagaggtgcggttcataagccaagttttgttgagccaaataatctaaatgattctgggcaaggtaatcaaattcttaacaggcagagaggctccaggacaaataagggtatctatccaatatttggggctttactgggtactaatgtctgtctgtcacctgcatttatcctccaagtactcctttgttctagagaagtgaatcccggtgatttttagcagttcccccaaagagaagatgttaggtatt

SEQ ID NO: 273890 - DNA, 655 bp, Homo Sapiens
agagtcctccatcaagctcagtgggtggggaatgggacggaaagccatcacttgctcagctcaacgtcatctccccttcgcctgctctacctcagttagaaaggcccaactgggaacacaaagacttctggtttcagggccaagaaaccagcttcccagccagggagcaggaactcacttcagcaagttgtggaaaataatggcaaaagcaatgatgcaaaaatgcctgatgaataccaaggcctcaacttcattaaagaaaggcccatccttcagtccacagatccctccttgcccctgtggccaccacacacccaccagcctttatctcctagagaagcggaacaggaatgaggatctgatgagcaccagcgcttcagtgacaaaacatagtgacttaccaatgtttggggttcttacatcattgaagggaaagggcaagtcacaaaaggaaccatatcaacttatgtaagacatggcacggaacagagaaatttcgcagagaagaacagcaaactcaccgacttgctaggattcatgaaacctcccacagttgcagattgccccaaaccatgacatcagggaggctgggaagccacccaacttcctctatttatcaagctggctaaaacccagggtaataccagcgtgaccc

SEQ ID NO: 273891 - DNA, 478 bp, Homo Sapiens
ctttttataacatttatccatctatgctgcagaaaaactgggaagcacaaagaaaaaaattaaaatcacccatcatcttgcctccagagagccagacatacacacacacgtatgtgtatgtaatgttggatagaaactgtgatggttatcctatgcattgttttagaaaataaaaaggaggtgatacatggtacagaggcagaggtgcctagtggttaccactcactctgtgaacttgggaaaacacgcatgtagtttttgaggatgaaatctatgaacatatgtgtctggcacatcgtttatgctcagtaactattacccagcatttttattaaacactttccagtgtctctatgttagtctgttttgtactgctatgaagaaatacctgagactggatcatttacaaagaaaacaggggttactttggctctcagttctgcagcctgtacaagcacggcaccatcatctgctcggc

SEQ ID NO: 273892 - DNA, 636 bp, Homo Sapiens
tttcaaaggaaaaactccagtcttaagttcaattaaaaaaaccccttcaatattcttaagaatattgcttcggttacgtgttgctaagaatgataatcctgagttggatggacagcacatccatatacttttttccttttttaaacaatgatctaagagaccctctcagggcattttggaataatgctttcaaaaagagaactgaggtccaagaaacagtgacatggaggacaggaagaacaaattttatagaaaccttgtgttatccaaatgtacttcagtctgatttactcttctgataggtagtcagattttttattttcaaacgtgccaggtacatttcccacttttgaataacagcaaaaccggaagaggatgctttcacacataataaatgttctccatcctttctgaaatgcaccaaagcaaaaagcctctgaagtcaaaacatgagacataattccttgctcattgcaggagacatgcaggtgccccctcctttacccaataccaagagacagacggccgggcaggttgtaagggcgggtggcgctgcagcttgaacatgggagaagagtctaaaatcttgaaggacacttttccacactttagggacaagttcttcacttttcatgg

SEQ ID NO: 273893 - DNA, 395 bp, Homo Sapiens
  misc_feature (272)..(272): n is a, c, g, or t
  misc_feature (279)..(279): n is a, c, g, or t
  misc_feature (306)..(306): n is a, c, g, or t
  misc_feature (318)..(318): n is a, c, g, or t
  misc_feature (334)..(334): n is a, c, g, or t
tctttacatactcaaagttctctgatgatcactgctaaggtgcaagtcactatgcttctaggaggaagacaagggagataatacctgcccttcacagagggagagtgcagtctcagtgttgcattggtcctggaaagtgctgcttacaattaccagtgagccctgcatcataggggcataggctgacagtgccttcaacagagctttctagatggctatggctcttaaaggtctacagctcagttcaatcacttgagtcttgcccttgtttnttggaangaactgcctgacagtggtcagtccaantctatcctgttntgccttgctccaccangtcaggtggcactcatctgtgccatggccatgagtatgggtggcagacagccagaggtgct

SEQ ID NO: 273894 - DNA, 431 bp, Homo Sapiens
gccttctgtgcctcagttccctcctctgtatcacatgaaggtgcatggatgggactaggtgggacaggcactcccacccactcagagctcccaagtccaactacctcacggaaggccgcctttgtccttggccccacactgggtccagtctgtcgcagtggagtgcaggcctgtggtacaatgcaaggcgaccacatgtagttcctgcaccagagagagccatgggatggggggctgagttaaaaactcatagacccctcatcaacacagtggccagcacatgtgcagccctgtgccagggaccctggagcttaccacccatgctcctccagcccatctggagctcctgcccccaaccccagcaccctatttatctatagctactgcaccctggaatgcaccctaatacattttcctggatctcacctgtg

SEQ ID NO: 273895 - DNA, 655 bp, Homo Sapiens
ttggaagaatctcttatatatatccacaaaattagaatgtaatagggtgaggccaaatggaatattggagaatcagttttcatttgttccacggcaccccatctttcctgtgatacccgtgaaacgtctgcacaatacttataagctggtgctggggcactctgtcttccttcttcctgccaaatgcatggaggtgatcctgtctcaccaaaagtcctatagacagggacaaatgaacttctgcccattgttctcccagaagagcggcacccaccacgaatgctccatttcacctcatgtctagttcacctaatggcctagttctgggtttatttatatttacatattcaaggagtacatattgaacacttactaggtgcaagacaccctgatagtcccattacggaagttccaaaagaatagtttataggtatttctgtttaatcaatcctttttatttagaaagatataaaaatgacttacattattccacattccatgaaatatttccactttattcagcataaatgacattaataggctaacataagctctaaatgttataaataaaacagagccccaacactgttttattaaaactaccaaaagcccattaaaatcatgaggaaaaatgaatactttttgtgagttaaaa

SEQ ID NO: 273896 - DNA, 479 bp, Homo Sapiens
atcatacttttaatcttcaaaatggcagttctgagagttgacactgcaccttcccatcaaggataaggactgtatatcaatgagatatatacctaaattacttaagtatattttggctagtctaaaatgtctagggtaaatatctcaaataacagtagattagtgattataggccaaatatgtttttaaaacttgagcccaaagtttttaaaacttgagccaacatttagataatggaagaattcacataaaagtcagaagctctaccaacacttgggtacaccttaccacatgattaagtacaactacgactgcccccttgagacaaggcctgagctctgtccagccccgactcacacaggaaaagtgagcccttttcactgggtggcctttcataaacaaggccttcaaggactttaggcctctgagtatgtgactcctagatgcctattgtaagtaacacacaagaaaccaataca

SEQ ID NO: 273897 - DNA, 182 bp, Homo Sapiens
ggccttttaagaaactagccaacaaatactcttgacaggtttgtgtttggttttgaaaacacacaccttagtgtactgaaagaaaaacaatttcttttaatttggtttgttggtcccacaccccatctatcaatgtatgtgctatttacaaataagttctatacagtatttttgcagtaaaa

SEQ ID NO: 273898 - DNA, 184 bp, Homo Sapiens
attcacatgatttctaagtatatttttcatgcaggacagtttttcaaccttgatgtacagtgactgtgtaaaatttttctttcagtggcaacctctataatctttaaaatatggtgagcatcttgtctgttttgaaggggatatgacaataaatctatcagatggaaaatcctgttacaaagta

SEQ ID NO: 273899 - DNA, 515 bp, Homo Sapiens
aaagaactcctgacctcataaagagttggaatttattgctctttgctaccctagctccccgttgtccttccacagaaggaacattatttctgatgtcctggttccctgggcaaagggtccaagcacaccggggcagggcaggttgctctggacagtttagagagctttgtcctttcccaccattgcacagcacacaccagaacaatgcccacctgaatccctctgagtacatgtgtgcattcagcatggagccacagctctttcaagaatcactcttgctatatgcagagttatcaaaagtcaaagtctggggagaattcaaggatcccagtccagtccttccccaacagttgcatgagtgtcaaaaggcactgtttgtccagggttggggtgaaaatttaccctaacccaggaggcagggacaacactgtctatatcagtgtttcccagtcttggcaatattgacccctggagtcagataattcttggctgggggtagtgggactatccatgcc

SEQ ID NO: 273900 - DNA, 377 bp, Homo Sapiens
gccacgctggaaccattgctctagggctgaaggtggaagtagggccactgccgcagcttcagccagagcccctcgctgcgtcgcagaatttaacaagcacacgactgggattcctttggatatgagaaaggaaggcaagtgcgggcaaagggaagctcctcccgtttttcataaacagaagtaagatgtcctctttcccaggtttgcacaatcacttctggcaaattaattgaaggtccttgaattcagccagtgcacgaaacctttgcatgttcttctgaaactgtacttcttccctattctgtctacccacactctgcgaactttgccttttccttaaacacattccagaccaaacactgttcagtttgttaaaa

SEQ ID NO: 273901 - DNA, 798 bp, Homo Sapiens
atctcttaggaccactaaaacttaggcctggggccacccatcccaagtagatgccttcctcacctgggcaaatgggttaatcatcaaaccctggcattggctgagctaaaagcaaactggcctgcagaatgcttttggagaatggacaaatgctggcctgggagagggcattcagccctgcatctctctggaacagaatgcaaggcaatagcttatgtcaagaaaaaattcactggccccttctgacttcctttctctaaatgcctattgcataattcccattaagactcaagtgttttgggtttgttcactgcagatgacacagggggacctatggaagagttggaaatgaagcagggaagagtgagacacaccttgaacttctagactcctctccatttgtattcaaaccataaaaaccctagatctatgcaggtcccaggtccctgaaatttagaggaaaccagaagaaaatttgaaataccctttcaccagggcaagaaaaacataaggaatgggatcctgattgcaaagaaccattctaaattctaaaaccactctctgaaaaaacctcatcaagagatggctaggctctttgaagttccccacagctaagaaggaataaaaaggaagagagacttagctgtctcagtcattccttagaggccttggataaccagactattctgggcaatcagtataatttagtcttccaaactgtgtttttcccatctcctgtggtccaaaaaccttgtaacagaaagcgattgaactccttcctaattctaggtctcaaaa

SEQ ID NO: 273902 - DNA, 471 bp, Homo Sapiens
taaatgtcgttgggcatggtggactgactgcagttgtctattttgatttaaaagatccttttacttcttagaagagggttcatcatgatacccacacaaacttcggacaaacagcagccccagtgatctctcatctttgttcagcagctacagaacacaggcttctgtctggacttcagaatcaagaatcctatgggctgaaaggaattttacgcaggtgggaaatcttaaacaaaagctcaatccagtctctaaataaacttatctcttagagttcaacattttcactagcctgaaaagggcattatttcctatttggaccccaattctgaatgtatcggcttcatcagaaaccgcctgcgtgccctccaggcctggaggcacaaattccagcttatggcgcctgctatgtgcagagccaactgctggggccccagctccacccagtccaggtttgtcccaccagctcca

SEQ ID NO: 273903 - DNA, 394 bp, Homo Sapiens
gtttgaatgctttaaaaatcttttaagtctgtggatctgctgatgtacagtgcctttgctgctatggatcaaaatcaaaagaaccgtgtagatatactttattgtataagtagaaaattacttaatttcatactagaaatggatggatgctgcaagttgaaatggactgtccattgacgttcctaatgtggtagcagaaaaaaatggtgtcttaagtgcttagtgtttgatgtcattaacagtttcgtaaaactctacagtgtagaaagattttgatactaaactgtgcgttgtacatagttctaatgcattgtattgaccaccagtacttctataatggtagattgtttgtgaattcagacttttaagcattaaacataaataacttctagta

SEQ ID NO: 273904 - DNA, 454 bp, Homo Sapiens
  misc_feature (135)..(135): n is a, c, g, or t
ggtcacagcctattaaagtgaacttagcccctatagtccaaacaaaacctgcattcaggccctgacccagcctggtccttcctcctccatccatgacagtattcatgtgggctcaagagatggaccaaaatgatnaaaggccacaggaacatatgtgattgactcttgcatgtgcctaggagtcagaacaggattcaagtggcacatttaactaaaggaaacttgggaaaggcttcatccttctttctggattccccaaagctcacagtttggcactgaatcatatacaatctcgtagtttggatggctgtgtgtgactgcagactgctagacagcagggcccacatcacagttccacctcccccaacactctgcaaataggatgtgtgtggcggggagagggaaggtagctggggagaaacacaataaaaaatgtacacacacttttacaaag

SEQ ID NO: 273905 - DNA, 381 bp, Homo Sapiens
agagcagcctgagctgagtccttatttcttcacttttgtaaaacaatgataagtgttcatgagacaattggcatccctgacccctccccttgtgtgtggaacgcaggtcctctcccagcctgacttactgggttacgtttgctctctgggctgggttgtgttcacctcagaggtcttggtgaaaatgacctctttggtctcctgaagcctcatttcgttattttggctctgtgggtggtatctttcatgcgtcagtcgagcatgctgtttaaatcaagagttgtcactgattctcccattccctcatcccaaattcctggtgacctgtggctgaagcactagccaggattttagaatgaataaacctctttatatttgcaa

SEQ ID NO: 273906 - DNA, 428 bp, Homo Sapiens
tctgcttcaagacttctgcaagaaatgtgaggatcgctgcggaaaaataaggccctgattgggccggaccagaaggagtaccaccgtgagctggagcgcaactactgccgcctgcgggaggctctgcagcccctgcttacccagcgcctgccccagctgatggcacccaccccacccggcctcaggaactccttgaacagagcaagtttccgaaaggcagacctctgagcccacaaggaccaaagctgtacctagaggaaccagcacccgggcctcagctgtctgtgctgcgaggggagtctgccctggtgcccactgggctgtggggtgaccacactgtacttggggctgggccctctgcccctgtgtccccatctgtgtgcactgatgcttcctcccttttttaatttaaaatggtttttataagc

SEQ ID NO: 273907 - DNA, 868 bp, Homo Sapiens
  misc_feature (128)..(128): n is a, c, g, or t
  misc_feature (145)..(145): n is a, c, g, or t
  misc_feature (341)..(341): n is a, c, g, or t
agcaaggggccccactggttgtttgggaaccatgagccgtaccttaaaacaaatccaggaccggccgccaactggcctccctgagatgaaactgcgtgggaatgtacggctgaaggatgaggatgggncaacctcaggtagttanctagattctacccattcgccagtcgtctcgtgccacaagaacatcaggaaagggaacatcttgctgctctcagagccagaaaatgctgacagcctcatgctgttggacttcgagtacagcagttataactataggggctttgacattgggaaccatttttgtgagtgggtttatgattatactcacgatgaatgcnctttctacaaagcaaggcccacagactaccccactcaagaacagcagttgcattttattcgtcattacctggcagaggcaaagaaaggtgagaccctctcccaagaggagcagagaaaactggaagaagatttgctggtagaagtcagtcggtatgctctggcatcccatttcttctggggtctgtggtccatcctccaggcatccatgtccaccatagaatttggttacttggactatgcccagtctcggttccagttctacttccagcagaaggggcagctgaccagtgtccactcctcatcctgactccaccctcccactccttggatttctcctggagcctccagggcaggaccttggagggaggaacaacgagcagaaggccctggcgactggctgagcccccaagtgaaactgaggttcaggagaccggcctgttcctgagtttgagtaggtccccatggctggcaggccagagccccgtgctgtgtatgtaacacaataaacaagcttcttcttcccatg

SEQ ID NO: 273908 - DNA, 367 bp, Homo Sapiens
tgccctccagacctaaggatgatagatctaccagcagcttgtattctgcacctggaaaagccacaggcactcaactgcagcccatgagcgcagccttggattctttaccctgcaaagccataggggcaggactgctcaaggcctggggagcccaccccttgtaccagtgtggcctggatgtggaacatgatgtcgaagattattttggaactttaagatttagtgacttccctactgggttttggagctgtgtggatcctgtagaccctttcttttggccaatttccccctttttgggatggaaacatttacccaatccctatacccccattgtatcttggaagtaaataatttgtttttgatttta

SEQ ID NO: 273909 - DNA, 436 bp, Homo Sapiens
tccactgaaaaattcaatgtctcactacaataaagataactcttccaactgatctctctagcactgacttttgtcctgagctccatgttttcagctctctcactatgacagatgccttccctcatctcagaactccaaactctccatgtccaaaatttaaaacaagactgcagaatcaagcaatcttgagcttcaaaaacaccttagtcacttattatttattattggcagaagggaattataatatctactcttagagctgttttaaagattgtataaactcctagtgttgagtttggtatacagaaggtgcttagtaaatcttgggttcattcctacctccagttactttaccttccaaattccccatttcttttagtgacaccgacattatcccaccaacgctagacttagatttattatttcttgaccctgc

SEQ ID NO: 273910 - DNA, 273 bp, Homo Sapiens
ggcatgcgatctccactggcaggatagccacttgcagcacattatcagcagtgacctatacaccaactactgttaccatgacgacactgaaaactccctcttcgactcccgcgggtggcccctctggcatgaacatgttcctacagcctgtgcaagagtggacgcattacgttctcatgggtaccccagagaagcactgagactagcaatagctattgttaatacattaagacgacagcagcagaaacagttggaaatgttccgaacccaaaa

SEQ ID NO: 273911 - DNA, 548 bp, Homo Sapiens
  misc_feature (446)..(446): n is a, c, g, or t
aagattgactaagtaaccacctggaagttccacataaattactatgattaacttcctgataaggatgaaattttccaccctctactcagacaatttctcatggccagaaaaaaaatgattatttttgccacatctgaagtcttcagtggactttaaaaagctgctctttttttctttctccctcacccaaggtttagattacaataagttaagagacctagttgcagccatcactggggcatttatgcttcctagcttcacctccctgttttgagatgtttacgcagtctaattcctcctaaaatcatcagagatgtagcattgttaagaagttaacagtgccttcaattaaacataggaatatgtgggtcaaaatttcccacatagcacaagcaatttagggtgtgagtgtacatgtctgtgcatgtgtatgcacgtgtgtgatngtctcagtaccgcaatcctggctgggaaaacctctgtcctcgctgctctcaacagctcactcttggcaccctcagttataactggaggttcagctggctacc

SEQ ID NO: 273912 - DNA, 567 bp, Homo Sapiens
  misc_feature (12)..(12): n is a, c, g, or t
  misc_feature (27)..(27): n is a, c, g, or t
  misc_feature (45)..(45): n is a, c, g, or t
  misc_feature (63)..(63): n is a, c, g, or t
  misc_feature (72)..(72): n is a, c, g, or t
  misc_feature (111)..(111): n is a, c, g, or t
  misc_feature (213)..(213): n is a, c, g, or t
tcaaacacctgnttgaccacaagaatnaggacgcaaactccaaancttctcccattgaggaantgtacagcnttgcctgtttttccacgaatgacttactaatgaagactngttgaaaatggtttgtgctctagttcatttcctaattctggtgggccatcacaaaattttaccagtaacagttctcgtgtttctgttataagtggtcctcangaacacaagatcccagtcatttaaataaaaagggaaacagtgcttcttaagagaagaaagaaagttgctcctccactaattgcacctaacgcttcccaaaacttggtaacaagtgactttaacaacaatgggacttcatagcaaagagtgttgaaatcccaactactaaccttcattcaaatgtaattccaacttgtgaacctcagagtttggtggaaaatctaacacagaaattaaataatgttaacaatcagttatttatgactgatgtaaaagagaatttcaaaaccagtcttgagtcccatacagtgttagcccctttaacattaaaaactgaaaatggtgattcccaaa

SEQ ID NO: 273913 - DNA, 445 bp, Homo Sapiens
tatacacaacagaaatttatgtctcatagctctggagtctgggaagtctgcaatcaatgcaccagcagattcgatggctggtgagaacccactttcttgcttataggcacctgctggctgtgttctcatgtggtggaaggggcaaggcagctctccagggcctcttttataagggcactaatcctattcatgggggctccaccctcatgatctcaccacctcccaaaggccccacctcccagtaatatcactttggtaattaggtttcaaaagatgaattttggggagacacaaacattcagacaatagcaggatgcaacttacttttttgcttctctcactgagttgctggaaagatcaagtggcaaaaagcatgtgaaagaacatggtcaagcatgtgcacagagaacatgctaaaggatcccatctctatgaagttcatgca

SEQ ID NO: 273914 - DNA, 420 bp, Homo Sapiens
tgcgcctcagttgatgctgctaaattccctgggagccagcatggatctggctggacccgatgctgtccagaactgggaaggacacaggggtggggcagccatcccggccattctgaggtatgacattcctccccggccacactcctcaagacacatccagagactgttgctgtctgtgggcagagttctgtgttctggccaatgtgaccgtagtgccggggactgggggaggtgggttggatgtgcttgccacccccccggctaagctcccccttctgctgaaccatgatccccaccccctccgccggtcagtctcccataccttatttattggagtggagggggaagcccatgggagaattttggggatgttttggtcttttcttccttttgtaataaaaattatttaagttgttagaa

SEQ ID NO: 273915 - DNA, 432 bp, Homo Sapiens
tgtcattggaactctgaagctctctctgccctttaggtttggaccaagtgctgtcaaagccagagaaagtaggattaaagatactgatcagccaggacagataggggttttctgctggaaactgcgatacctaccctcggtacatggggatagctcacgtaagtgacttggtcacttggcaagatttcttcgcttctcggatagctgcaggaattaaaacatagtgtatagaatttaggtgttttacactaaaaatgataatgtcttgttccaattaagaatagtaaacaggtccaagtatagacaataaatgagattgggattctgttctcatttctcaatgtgaacagttactcccatatcagcattattttctatttggccttcttaaatacagagaaaaaataggatatattaatagtaggtcacttg

SEQ ID NO: 273916 - DNA, 441 bp, Homo Sapiens
gactcttactataattacattaggaggtgggggggggcagtaactaggtttagttgaggtcatgagggtggagcccacacaatgggattagtgcccttggaagaggaaacacctgagctgtttctctccctgtcatgtaaggatacagtgagaagtcagccatttacgagccaggaagagggtcctcaccaagaacttaatctgccagtacattgattttggacttcgcagctttcagtactatgagaaataaacttccattgtttaagccacccagtctatggtattttgttatagcagcccaagcagattaaggtatccactcttcatgttctgttccaactaaccaatctcagtgggtctcttgaccacccagtgttcagcagacaacaagtgctcacttacagccctgtcaaatttaccatcccctaaggacaaaaa

SEQ ID NO: 273917 - DNA, 1017 bp, Homo Sapiens
agcagaaggaagggtccaaggactatcaactggtgacgtggtcccgggatcagaccttgagaatgtggcgggtggattcccagatgcagaggctttgtgcaaatgacatattagatggtgttgatgagttcattgagagtatttcccttctgccggaacctgagaagaccctgcacactgaagatacagatcaccagcacactgcaagccatggggaggaagaagccctaaaagaagatccccctagaaatctcctggaagagaggaaatcagatcaactggggctgcctcagaccttgcagcaggaattctccctgatcaatgtgcaaatccggaatgtcaatgtggagatggatgcggcagacaggagctgcacagtgtctgtgcactgcagcaaccatcgtgtcaagatgctggtgaagttccctgcacagtacccaaacaacgccgccccttccttccagtttattaaccccacaaccatcacatccaccatgaaagctaagctgctgaaggtgggggtctgggttcccaaattctccttgctgttctgcatcattgtctagatggattagtaaagaagaatgaaaactccagtagatgagattcggaagtcatctgtttcgtacacacactagtattagcaacgtaacctctgaacttgccatttactttgtgcagaaaacatcagagcagtggttcttaaccttttttgggtcatagacttcctttgaattctaatgaaaattatggacccttcctcagaaaaatctgcacaatgattgcatatgatttgagaaatattgcctgtaaatatgtgaattgcatagaatctgcccacagatctcattaatactatgcattcatctccggttaggagatttgcaatccaatttcatttagcagcccaggttaggagccctgcagtccaatttcatttacctgaaaacaacaagcaagatgtattctgaagctaaaagatattttataattagaaaaaaacatatgtaaggtcat

SEQ ID NO: 273918 - DNA, 449 bp, Homo Sapiens
  misc_feature (20)..(20): n is a, c, g, or t
gacacaaatctgctagcacntagatcttgaacttccaagcctccagaactgtgagcaatacatatcttttgtacataaattacccagtctaaggtattttgttatagcaacccaaacagactatacaatcacttaagttttatatgtcaactgcattaggcatagtacttctccatagtaaaacctaaatttatactgagagtgttgatataaagacatccagttaagtatggtaactgaacatactgatttacttcaactccttccccaaaatcctgctaaagtacagtaagaattttaaaaaggcttaacctccaaagagagaagggcaatagaaaataagagacagcaataaaattttggaaatagaaagtagatgaaagagtcataactgactcaaaagatctgagaaatcagtaagaagcacatcaattccctccaaataacta

SEQ ID NO: 273919 - DNA, 760 bp, Homo Sapiens
attttgatatgtcttacacgatggaaccattctgtgggataatttgcacaacaggatatcatcctatcggccagctgaattaagaacatgacctatgccgcagttgtactccttcctgaatctgcctcacaggtcagcgcctgccacggctggatgtctacaaacacgacgttgcggactctcacttcagagagagcagagcaactctcccacacactgacaacagatggcagccagtgagaaatttacaaacttcaatcttttctacagtgcatttgcccttccatgaaatcatacacgagtgccagaagagagcccgacagccctgccagctcatcgagcccgtggatggattccaccccaacgaggtggcttagctgttgttggcggatcattcctggaaaaaggtgcagctcaagtggccccaaatcctgggaaaggagaatccgttcaacccccagattaaacaggtgtttggagaccaaggcgggcaatgagcctctcaggagcatgcacccctggggagcacagggaggcagaggcttgggtaaactcattccacaaaccctatgggggctgccacgtcacaggcccaaaggactattcttcagcagcatctttgcaaaatgtctttctctcaatgaagagcatatctggacgactgtgcaatgctgtgtgctcccgggatcagtaacccttccgctgttcctgaaataacctttcataaagtgctttgggtgccattccaaacaagagagta

SEQ ID NO: 273920 - DNA, 391 bp, Homo Sapiens
cagcgctcagctctgtctcggccctggtgtccatctggtgtgactgggccgtttcacccaggctcctccttctccaagctgccgtctgcacagccagcacgcagcttggatcatgggagcactccctgcctggaaccgccagcaggacccccaactcacacacagccccaagcccctgagtgtggcagccagacccccgagggcgcgcctctccctgatcctgtctcatctcctgctcccagcccaccccctgccagctttagtgcccatgagctggctcctcgttcagaacgtcctcctccctcttccgggtgcccactctgtgcttgtccatctggcaattcctgtctcccttgtaagaccccacgccgagccctatgcagtctcaaaa

SEQ ID NO: 273921 - DNA, 445 bp, Homo Sapiens
ttttttcatccttaaaaaagtgatttattggtctctgatactaagttattcttcagtgtattatattgctgttcttcataattccattaacaaattgggtgtcatttcagggcccagtattaaataatgatctttcttcctcagtttgctgtacacagggaaaagacagaaaaaaattcctatatgacaagtttttgtttgtatccaattacagagttccataagactatgatttgaatattgtggtacaacttaaatttggcacattatttaattatccaaagtttattacatgtttgagtgcacattaaagagattatttggcataattgacaagataaaatttctgtaccttatttgactatcaggtgtatatgtggtatatttatgtatgtgtgtgtatagacacacatatactcctaaattaaatatatttgtataaaaa

SEQ ID NO: 273922 - DNA, 504 bp, Homo Sapiens
tagattcctattgctctaagtcaaagacatttctcatttaggcatgttacattaagtactgtgcccgtgacattattactgtataaccaattacagatttaattttaatgttacagtttactatctgtaaggacaaaaagtatccaggtgggagagagctgcctttgaggccaaaatttcttccaggaccaatatctgcggtgctcatgaagaaattctttatcaacacttaagaataccagttttggaattaacagactatattcaaattccagctctgtatcttactacgtgatcttgaactaattatacagtttcagtcttatgactctgtaaaatgtggtaacctctcttcagcttgttttgagaatgaaaagtgtctataaagccctcatcataatgcttaggtacacaggaagcactcaatgcagcactcactccattactaccactaccagtgctgtcaaactgacatccaggcagcaggtagcttccacactcaca

SEQ ID NO: 273923 - DNA, 408 bp, Homo Sapiens
ttgtttaaaggcaatctaacagattggaaccctgataagatcatgcctgtgcagccctgcacaggcagtaggagactgtgatcaagtctgttactcgttacagtactgtgaacgtcaacaagaattgctgcatggaaaacactgaatataggcagaacaatctctcgcttacgatactgtgtgttgcaaataatgcctagaccagagcaatgcaggcgctatgattcatcacaggcaagatcaacaaaggaattgttaggacaaagaagaggctgcatgcagacctcccctgtcaaaacaccttgcagctcattggcttcatacagcctgccaaatgcaagggaagcagagagagggatggtgggttaggaagagaaaacttttttgcctgacaagcaacagccctct

SEQ ID NO: 273924 - DNA, 441 bp, Homo Sapiens
tttttggacagctttgtaaatttttatttatgcatagattttttaatgaatcattctatacacagaatattctaatattatttttaatatgtagtagtacacacctaaaatgtcattttaatggctgcctgatatgccatcaagtagattataatttatttaactaatcacatttagattatctccaatttttgactatcacaaataacattataataaacatgcttgtacgtaacagctttgcatactttgtcctggggctgaattgctaaattaacacaaatacatatttcaaggcttttgagatacactagtacaagctggctttgaagtcatctttacttatcacaatataaaatgcttttcactgcccccaaatttattgcactcaatctgctggtgaccagggtaggctgaagtcataaaacagactcctggtac

SEQ ID NO: 273925 - DNA, 564 bp, Homo Sapiens
  misc_feature (424)..(424): n is a, c, g, or t
ggacatggagttatcagagaagaaggcatctgcaggcattctcagagctggagagcgctgagacaatgtctctcctctgaggctggttgtcctagagatgaccagatccaagaatgtgtcacctgtacctgcctcgaaacaaacaaaaagagggccccagcgtcagactctagcgacaaaggagtcctgaagaccagacacacctgcccaaggcacactcaggtgcaatcactggacaatgtgctccgaggactggccattggagtccagcgacagtcccagagggcacaggcaggctcagggagctccaccagtaacttgccttagaacaacctgacatccatgtgcttccctcaaggctgacactctctcaaggatggagaccaccagggagtggcaggtcaggggagtagcaggtgagaangcagcatcagctctgcgctccaccatccaccacccattcgtgtgtccggagaggtgcgaggttagtgctggacgcaggaagccctctgggtatgacttggtatggagaagaggcagatccatgtgatttatccttaaaaa

SEQ ID NO: 273926 - DNA, 373 bp, Homo Sapiens
cgtcaccatatctccaagcttcctggcaaccagtgggaaaagaaacatgcgaggctgtaggaagagggaagctcttccttggcacctagaggaattagccattctcttccttatgcaaagattgaggaatgcaacaatataaagaagagaagtccccagatggtagagagcagtcatatcttacccctagatgttcatcccagcagaagaaagaagaaggtgttggggtaggattcttcagaggttagcctggtactttctcatcagacactagcttgaagtaagaggagaattatgcttttctttgctttttctacaaacccttaaaaatcacttgttttaaaaagaaagtaaaagcccttttcattcaaaa

SEQ ID NO: 273927 - DNA, 466 bp, Homo Sapiens
caggagtaactgaggttaatcaatggaaaatgcttagaatagtgcctggcacatactaaacgctcaacaaatgttagctgctgctatcatcatcatcgtcatcattatcattaagtttattgtgataataggataaatttctaggatgatacaattcaagcctttagagcattgagagcgtaaacgtgtcatcagtactccacatttctgtgtagaaagaatgacaaaaggtattcctgttttggggaagataactttgaaacaagtatttaaaacatttctctgagaaaaaaaatagggaatcacagttaggtgctatacaagtcagctttttttaggtagggaaggttgcatattcagtccttaaactctgcaagaattgcactgcttccctgtgtgactcttgaccctgtggaagacaagtggggtgtgaaatctgcccaaatcatctcccttactggatgaa

SEQ ID NO: 273928 - DNA, 614 bp, Homo Sapiens
attttaggctcaaggaaacttccctgctagtgaaacttcactctcaacaccactcaatgatctaacagcttcctaaatccaacttcattctttttgcagtttaagcccagtttcaaataaggcatcactgggatggataaagaaaacactgagatgggggatagaaacattaaaaagcagaaaaactaagcaaaatctaaatcctgtcaattggatgtttaccatttcacactgaaatctttccctgaatagaccagggacatcactgcctcctgctcagatctcaaagcttcaacatgctccacaaagcacctccctaagtaccctagtgtgttccctgggagagttgctacacagcccatctactggatttagtaccatagtcccagcacttggcccagggtcctagactgctgggtaggtcctcagaggtatctgaagtcatgtctacattgatacaaagaaacgtatggctcatctgtaacaatacgtagagaaacacaattaagaacaataaggatcacagaactcgaatggatcattataacttcaagactcagtttaagttaccaagaaatgcactgtagcccttttctcacttttatattcagatc

SEQ ID NO: 273929 - DNA, 377 bp, Homo Sapiens
  misc_feature (32)..(32): n is a, c, g, or t
  misc_feature (50)..(50): n is a, c, g, or t
agtttgacaagaacttctcagcccacctgctngacctcctggcccggctnagcatctatagcaccagtgactgtgagcacggcatggccagcgtcatctccaggcttgacttcaatggtttctacatcggaacgcctggagcgcctgtctgcagagaggagccagaaggccaccccccaagtgcctgtcctgcgggggcccccggctcctgcacccagggtcgcagtcaccgcacagtgagccctggctgtgacaggaaggaagggtgtggggtcagcagggactggtgcaaatgggtccagaattttcaaatcgaatgctctgtgttctgtctttgcagtttaaatataaagcaggaatgattgactcagctcaaa

SEQ ID NO: 273930 - DNA, 377 bp, Homo Sapiens
aagaataaatcaccttcacaaaactaagacaaactttttcaaagctcagcttgatttgctggaactacacagagacatgtttgatcacacaacagcaactgtacatcctcccaagtctggaatacagaattgatggaggacacttaacttgcttaaaatgtatttgattattctgcatttatgataaaaaatatcatccagggattatattcaagagggtaaatttaggattacatgtttctagaacatataatatgtaacaccatccaaaaacaacaacaacataaagcactggaaccaaagaaccacttaaaatttagaataaattaggaaatttcaatctataagtgtcaaacaacaaatgagttataatattt

SEQ ID NO: 273931 - DNA, 681 bp, Homo Sapiens
tttttaatatcaaacgcttcatgaatttgcatgccatccttgcacagggaccatgctaatcttctctgtatcattccagttttagtatatgtgctgccaaagcaagcactccagcctactctaggtcctttgaccttgctgacaggaggaggggagtgcaggtctgggctccgaggggctggtctgacccggggcccagccatcctaccttgccataccacaggtagtgctctgcctgagttcgcagcagaaagacatcattggagtttagggaggaggcaaaggctggaacttccactgctttggtgttagatttgtcatttccatgaatttggaagagtcttactggagggtcaggctcggcatttcccttcctggaagtcccaccctcaaagataactaagcttccctttgaagatggccatgaagtggcgtggctccgttcccatcctgactcggaacctgaacagcagccccatcaaactgccgatccacctccactgcctggtatgctgaggctgccagctcatcctgtgaggcgtggcgccctgccagatgtacaagatgtgatgtggcttcccattaacctcgtatgtgtagaggaccagataacagtctcccccataaaagaagccataccattgatactccacagggaccagctccaggttctcaattctc

SEQ ID NO: 273932 - DNA, 454 bp, Homo Sapiens
ccgaggaactgtgagagtgaaagtctgactgtgggttaaagactgactggtaaatgaggaagtggagactgttttttcaaagcagcatgactggacaatgggagagggcgtgatcatttataaatagtgaggagacacagggtaaagctgcatcacggaccaaacaacaaggaaacagaacatggggaacatcaggatcagtaactcaccacaggaattcctactcctgggaaatagaattcttcactagtggctgactgtgacatatctttccaagagttaaccccagactccaaatcttaagaatatgggcttttcttccactatcattcacattctgcagttactggtagtattttacagtattttcagatgtaattttactaatttctaaaaatagttcatatctttaaaaatcatgggaaaatcatgactaataaattcaccaactttg

SEQ ID NO: 273933 - DNA, 399 bp, Homo Sapiens
  misc_feature (72)..(72): n is a, c, g, or t
tgtgtaactcatttgtttattaggtaagatcttgctataaaatttctaaaaggtttctagatgcatctcccnattgcttattagttcaactactaagcacatatgaattaatgctgctttttcctaaaggttatatttaaggagcaggaaagcatcatataacaatattttcataatgccccaaatttctccaacatgttgttttcattatttttgtaaaataatgtcaaaattatttgacaaaattcgatttctctgcaagtttatgaaactgactagtgagctgggcatggtggctcatgcctgtaattccatcactttgggaggctcaggtaggaagatcgcctgagcccacgagttccagacaagcctgggaaacaaagtgagaccctgtttcta

SEQ ID NO: 273934 - DNA, 344 bp, Homo Sapiens
cggtgggtgtttccttctccggggagagcaggggatcgcaggtccccggtggtgggtgtttccttctctaaggtttgctgctgtttccaggcctttctgtggggcctgggtcctgtcctggggccaagccacggggtcatcctcagctgcactgggcgtgccaaccacaaacgagtcacttgctacaagcagcaccatgcagcctcctgtctggacgagaccctgccccccacagactggagacgcaccccgatttcccaggtcacagggggaagtgtggatctgataagggactaaatgtggccgtctttcatatgtttctcttacatattttattttaaaat

SEQ ID NO: 273935 - DNA, 472 bp, Homo Sapiens
tgccagacgagacagccaacctgctcaacgaacagaactgtgtgacgcacagtaaggccaaccacagcctgcacaacgaaggcgccatcttaggccgcgctggctgcacccgcccaggcccgcacccgcccagtcccgaaggcccggccctgtctgcccatgacttcactggtgtgagcttgtccgccatgctgtaccctgcaacatcctgagaccaaagaccttgtgcccttcccaggagccgcggaggaggacagtgagggaggaatggaaacgagagatgtgaagttggcagccggggcatggcgttcaagattttggagatgaactgattccgcccaaatagaatcatgtttattttttcagctctcccttttatcattattcacactcctctgccctcgatttgcatgaagttgaaaattgttgcgatttattttttcaagagatcatgtttttaaagtgtcaaaaa

SEQ ID NO: 273936 - DNA, 674 bp, Homo Sapiens
tttcatagggctcggcgtggtgaactcacgacaggcctggggtgggagcacagacacgccggcctgtgactaggcagcagggtggcacagggcagcaggttccacagcggacagccgcctgccaccccctgtagttcacacaccggcgggtgactgttaagtaaatggaaagggctttcagtaacaatggaccacctctgcagcgaccaactgcatggactccctgttctgcgccacgaaagaaaggtggttagcgttccgtgtttcgctttgacaaatgcgcattcacatgacagaaactcttccatgcagaaagatcacctgttcatatttctctagctcagagtggtaaatctgtcggatctgggacagcttggccctgtagtcagagtgctcaatgctattgtcatttggacagccacctggtgttgctgtgccggccctggccaccgctcctcctcttcctctcttctcgggcctgcacacgccctcagccagcagcatgttatccagcctcaggagctgggcgtcagggggatcttcgtcttgaatgccacggatgcttaccactagataagagagaccgggacaagtcacaattcattttctggagagaaaacaaaccatgagaaaatgtgagcactggtgttatgtctgaaaatttttgcatatga

SEQ ID NO: 273937 - DNA, 186 bp, Homo Sapiens
atccccaaaggaaaaaaattcacctgaacctcaatactaactcaaaaactaactcaaaatggattatgcaactaaatataaactataaaactagaaaaagtatagcagaaaatataagacaaaatcttcatgacacagagttaggcaaagtgttctttattatcaataaacacaaaccattaaaga

SEQ ID NO: 273938 - DNA, 458 bp, Homo Sapiens
ccacacaggacaccgtgccagttccgggggaagctgactcaaatccaaccttgaaatctcatgaaaacaaaatgacttgtctttttatttgatagtgtaatatcattccattttataaattttttagggtttttctcgtaatattgtacagttttgcatggcctggtgtgatcattttttggttagaatataatgctgacaaatgtggatggaggggaagatactgctttagcctatcactccttattttattttgtttggttttatgccctcagtgtcttagggaactttttaagagatcctctgctaccaaacaatgatgtggattcttttgcacagaaatatttaaggtgggatggtaaaaaatgtcacaaaagactcctcaccaatactttatgttgatatcacttaatattaaccagactttgctgtattgcaataaaacagagaactgttaa

SEQ ID NO: 273939 - DNA, 494 bp, Homo Sapiens
tgaaaactaagtgttaagtgcttcttagctacacacaatgaatgcaattttcagtcagttgcaaatatggtttattagaagagaaccccctgggagaaggaagccaggaagaattgatgaggtcaacacagctagggcatgattacctgttataaggtgtagaaaacgttgccaggacaacatcacgcccgttgatacgaatcacatctgtaactgcctggagaatgttgaaataaaaatgagagtctccaggaactgagcagttcaagcgcgccttcaggaacgacgtccactgtttctccaggactctttgagatcctcccatatcattcttacaaacctgagccactcttgggaaaactacctgcagaggaaaaacacatagggaaaattaaatgcattcattttgcaaggagatcttagtagaatctgcattccttgaaaacagaaacaaaacaacaaggtgcttaatactgtttctaaaatcagtaaca

SEQ ID NO: 273940 - DNA, 584 bp, Homo Sapiens
agttatcaactcaccacctgttttgtttcctctaaaccctcatccacatccactttccatacctgttggatgaccttgaagcaaatctcagacctgataatatttcttagagaaataaatgtcgacaaagcactctttagattaaacccaggtccctcactgcagcactttctgttgtaccctctatactccaggcagtaatctgtccccatctcaccccgacccccaccttagcagcccacgtcacatgacaattatgaggtgtgatgagaagagctagcgcaggagactgcagtggtgtcttctccccatgtttggatatatttgtggaagtatcatctgacaatctcattttcttcctgtgggttcttgacatcttgtggtaaacatctctttctgtgaacacctggaaaagctacagaagggcctgagtgattcatacatcttcacctgagcttaccacttaggttcattcatgtctgtgccaaagtcacgcactggtaggtgaataacaaaattactacatcttatagacaaaatgaggtaaagatgaaggatacgagcactgctattccaaaagttct

SEQ ID NO: 273941 - DNA, 627 bp, Homo Sapiens
tgattgggcaaggtttctcgaacctgcaagttagctggcacgcagactggcacctgcctcatggtgagcttcccagcagggtagcacagtgaccgcccctggctggcccctgtctcccctctccctccacttgccaaggccaagtgctgtgctgtaggagaaaccacatggaggaactccactctgaggctgttcctcggtgaggcactctggtgatgtgactggtgggtgcagtccactggcctgaagaggagagtctgtgtccctgggtataaagctgtgctgtccagaggctgaagtccacagcccctcgtgttctctctcccctctttctctcccacaatacacataggtacacactctcatatgcacatacatgtacacatacatgcatattctttacttttcctaaatgatacaggattgaagaagaagctgatcatgacaaggactatgactagggggttaaaaaagaggcttggaggagaataagatcaacaagcctgattctcctgaaaatgacatcaaaatttagaggtgaccaaggaggcactggccacttcattataatctaattttagtagcaaatgatacttattagtttaaaaaaagagaaaatcattggta

SEQ ID NO: 273942 - DNA, 458 bp, Homo Sapiens
  misc_feature (244)..(295): n is a, c, g, or t
cggtaaacagagcttggatatttagaaacccattgtggccagaaagaaagttatgtcattcagttgaatttagcaaattgcaatttgccgaagtatgggggttatttttccaaatatactaaattttcagtattgcttaaaataaggttttcagtattaaaactagaatcttatagttttgagtaccaaaggaatttgagagaccatagctaatctctttaacaaatgtggaaaccacttagannnnnnnnnnnnnnnnnnnnnnnnnnnnnnnnnnnnnnnnnnnnnnnnnnnnagagacaatcttgctgtgtcacccaggcttgagtggactggtgcaatcataggctcactgcagccctgaacttctgctgaggctgtcctcctgcctcagcctcttaaagtagcttggaactaccggtacacgccaccatgcctggctacttttttagttgttt

SEQ ID NO: 273943 - DNA, 696 bp, Homo Sapiens
  misc_feature (50)..(50): n is a, c, g, or t
cctccacataggcagtggctgtggtttctaccccgggtggccggcggcangtgctgagctgggactgttgtttgcccagcctgggctgctagaaagcagcagttaaagttcgtttctggtcactgctccaggaagccaccttactctgagggtcaagaattgccgcttccttttagttactgtaagttcctcctctgcccctggtttgtttcccgcggcacttctggatacccccaggtcccagacccttccagactcaaaccatgaactttcggcagctgctgttgcacttgccacgttatcttggagcctcgggttccccgcggtcgcctgtggtgggtccccgtccctcgacaacaactcctcggtgggctcttggcgtggtcggtcctccaagtccccggcccactggaatcaggtagtgtcagaggcggagaagatcgtggggtaccccacgtccttcatgagccttcgctgcctgctgagcgacgagctcagcaacatcgctatgcaggtgcggaagctggtgggcactcagcaccctctgcttaccacagccagggggcttgtacatgacagctggaatagcctccagttgaggggcttggtggtgctccttatctctaaagcagctgggcccagcagcgtgaacacttcatgtcagaactatgacatggtcagtgggatctactcatg

SEQ ID NO: 273944 - DNA, 774 bp, Homo Sapiens
  misc_feature (88)..(170): n is a, c, g, or t
  misc_feature (525)..(525): n is a, c, g, or t
  misc_feature (677)..(705): n is a, c, g, or t
catttatataaagttcaaaaccatagtgggagattaaaaaataaccttttaaaatttaattttgtcatttgctaagaaataacaaatnnnnnnnnnnnnnnnnnnnnnnnnnnnnnnnnnnnnnnnnnnnnnnnnnnnnnnnnnnnnnnnnnnnnnnnnnnnnnnnnnnnaggaggattcccaaatgtgcaaatgtaggcacaaaaaagttaaataacttgtccaatgccacagagcaactaagtgctagagctgggaggtgaaggcagacagcctggctctgaacactatggcacattgactcccaatgagagaactttaatggaaagatggagggagggcaaatgtgcacaaggaggtgggaggaggaggatggcaaaattcccatcttccaaagaaaaagaatcagtagatactgccttaaacaggaggcggggaggagagagggatcaacaactaccagtaaaatgctgagtaccccttatctgaaatgctgaccagaagtgtttccgattttggaaaaanaaaaaagaagggtttctgatttaggaatttttcagaatttggaatatttgcattatatcagttcagcatttcaaatcccaaaaatccaaaatactccaatgggcatttcctgtgagtgtcatactgttgctcaaaaagttttagattttggnnnnnnnnnnnnnnnnnnnnnnnnnnnnntgcatgcatgttacgaaaaaatttggagaaaaaattagaaagaatagctaaatgtgaaggcaacagtaa

SEQ ID NO: 273945 - DNA, 536 bp, Homo Sapiens
ctcagcatgtactggtagttgttgatccctctctcctccccgcctcctgtttaaggcagtatctactgattctttttctttggaagatgggaattttgccatcctcctcctcccacctccttgtgcacatttgccctccctccatctttccattaaagttctctcattgggagtcaatgtgccatagtgttcagagccaggctgtctgccttcacctcccagctctagcacttagttgctctgtggcattggacaagttatttaacttttttgtgcctacatttgcacatttgggaatcctccttggcatctaatctgtagggttgttgtgaaattgaattcaaacacataaaaattgcttagaatggtgtatgtcgtatggaaagcatttgttatttcttagcaaatgacaaaattaaattttaaaaggttattttttaatctcccactatggttttgaactttatataaatggaattagtatacacacacacatacatgtcatttgtttctaggatgattagactgacatatgg

SEQ ID NO: 273946 - DNA, 705 bp, Homo Sapiens
  misc_feature (654)..(654): n is a, c, g, or t
ctcctctgcccccacccccaggctggcatacagggccgacctcgaaggcctgcaggtgtggtggcaggcaggggctgacctggggcagccgggctatgacgggcacagcgccctgcacgtcgtgagtgcccccaccccctgcaccctctccaaaggctgccacctccaggaaggacacctggacaattcaccagctcactgctctgcccctccccgctctgcccctcccccaaatgcctggccctccccatgcaggacccgcacagactgggtccccttcccggggctctgagtggtgggggtgacgagagtggaggagctgctggggccctgtgtgtgtgggctggggacaggggagggcatcctggggatggggatccttgggccaggctgctagtcagtggccccaaggcagcccctccccactgcttccccataggcagaggcagccgggaacctggcagtggtggcctttctacagagcctggagggtgcggttggtgcccaggccccatgcccagaagtgctgcctggtgtctaacctgaaggcgtcctgctgcagtataagccattccttcctcccatgacctgctggaggggtctcaggcatgaccccactgctggggctgcttcccagcctgctctcatgtaaancctgaaggcctttgttgggcaggacggcaataaagtctctgacatcccctc

SEQ ID NO: 273947 - DNA, 514 bp, Homo Sapiens
  misc_feature (132)..(189): n is a, c, g, or t
  misc_feature (303)..(336): n is a, c, g, or t
cacctaccttcccacccatctttaagagagcagcttgcctcctgccactccctaccctagtattttggactccctttgtctcctctattttccttttacctaaagttcttgccacctcttaagacacgttannnnnnnnnnnnnnnnnnnnnnnnnnnnnnnnnnnnnnnnnnnnnnnnnnnnnnnnnnatgctgagctcagaataggtcatttagcatgtgctcagtgaatgtttatagaatgaaagagcaagagcctgtgtgtttccaaggcttgcagggcctcagaattgtatgggaacnnnnnnnnnnnnnnnnnnnnnnnnnnnnnnnnnntacagagggttaggagactcacacattttctttttttgcaactccaagtagcttttttcagtatctggcatggttgggacttgttgaaaaaccctccctggaagtgacttgtgagggttggatatcacctgttaatgcttcatacgtcccagcagactcatttacaaatatggaattt

SEQ ID NO: 273948 - DNA, 800 bp, Homo Sapiens
ttggtatgaagaggataaaggaacagagcgtccaatatgccaaattttcctgcctttgaccactgtgcaggctgctccctccacctggaagtctgcttttacttccttccagaatggattttctcaaggttttatgacattttaaaaacacttatcagaatacaagcataaaaaaagagagaacatacggattcagggcttacctgtgtacaggatgcggctgatcatccccggcatcaccatgaggaacatgggcagcagcttcaggtaagcacacataatgcaagcggccttcacgtgagacatgtccttgccacacaaggcagcgctgcacaatgacctgccgggagaacgtgacacactcatgaaacaagccaggggatgatttcaaaggcagtcagcgtccttttccagagtttaatgttgcaataagaaataatgtggaccagtataccaaagagctatctgcactcctgtgttcattgcagcactattcacaatagccaacatgtggaatcagcctgagtgtccatcagcggatgaatggataaagaaaatatgcataatacacaatgcaaaaccattcagccatacacaacaacgaagccctgtcatttgcagcaacatggatggaaccggaggtcattaagttaagtgaaataagccaggcacagaaagacaaatgtcacacattctcactcattctcacttcctgaggcctagcttaggaagatactgaaggctttgatttgccctgaaggacggaataaactaagaaagaagacaataggcaatactgg

SEQ ID NO: 273949 - DNA, 828 bp, Homo Sapiens
ctatactagacacacaaagacagccccaagaaggacggtggagtagtgtcctcgctaaaagacagtagatatgcaacgcctcttgctcctgccctttctcctgctgggaacagtttctgctcttcatctggagaatgatgccccccatctggagagcctagagacacaggcagacctaggccaggatctggatagttcaaaggagcaggagagagacttggctctgacggaggaggtgattcaggcagagggagaggaggtcaaggcttctgcctgtcaagacaactttgaggatgaggaagccatggagtcggacccagctgccttagacaaggacttccagtgccccagggaagaagacattgttgaagtgcagggaagtccaaggtgcaagacctgccgctacctattggtgcggactcctaaaacttttgcagaagctcagaatgtctgcagcagatgctacggaggcaaccttgtctctatccatgacttcaacttcaactatcgcattcagtgctgcactagcacagtcaaccaagcccaggtctggattggaggcaacctcaggggctggttcctgtggaagcggttttgctggactgatgggagccactggaattttgcttactggtccccagggcaacctgggaatgggcaaggctcctgtgtggccctatgcaccaaaggaggttattggcgacgagctcaatgcgacaagcaactgcccttcgtctgctccttctaagccagcggcacggagaccctgccagcagctccctcccgtcccccaacctctcctgctcataaatccagacttcccacagc

SEQ ID NO: 273950 - DNA, 485 bp, Homo Sapiens
  misc_feature (299)..(299): n is a, c, g, or t
  misc_feature (349)..(349): n is a, c, g, or t
  misc_feature (396)..(396): n is a, c, g, or t
tgcaagccctgcctcagcttctctcccaacactcagcttttctcccaatacaggaacttttggaggtcacttctggggcctttgctgagcaggccactccttgcttctcctgcagatgacaaggtttccagcatgattattgctatgactgatggaacaatgatgaaacatccatctttggacactctcaaagaaaatcctaccatgtggttattcatggaaatggctttcagaatctaaagaaacgggatgaacgttatttgcagatttatcttcagtgaaagcactatcattgggangtacttcattgaagtcagcttgaacaacggcaaaacattcaagagcaatngtcagcatcaccagcaccacatgtgggcaatctggatatcttccgtngacctctctcacccaagctgctgccaggtgccatggatgtggtgtcagcacaggggccagactcgtggaacaaataccacggagcagca

SEQ ID NO: 273951 - DNA, 642 bp, Homo Sapiens
aacttcctcccccgacggctcctgctgacagggcccccacaggtgggaaagacgggctcctatttacagttcctcaggatcctcttccgcatgctcatcaggctcctggaggtggacgtgtatgatgaggaggagatcaacaccgatcacaatgaaagcagtgaagtgagccagtcagagggagagccctggcctgacatcgagagcttcagtaaaatgccttttgatgtcagtgtgcatgaccccaagtacagtttgatgagcctggtgtatactgagaagctggcaggggtcaaacaagaagtgataaaggaatccaaagttgaagagcccaggaaacgggaaactgtatccataatgctgaccaaatatgcagcctataacacctttcaccactgtgaacagtgccgccagtacatggacttcacctctgcctcccagatgtctgactccacccttcatgccttcacattctcttcttctatgctgggagaagaggttcagctctatttcatcattcccaaatccaaagagagtcattttgtcttcagcaagcagggcaagcacctggagagcatgcggctgcccctggtttcagacaagaatttgaatgcagtcaagagccctattttcactcttcgg

SEQ ID NO: 273952 - DNA, 666 bp, Homo Sapiens
  misc_feature (228)..(228): n is a, c, g, or t
aagttccatggatcctgttcctttgttggtagacatttggcttttcacagggttccttctgctgcaataaattccagaaaacacagacatgtttctgttgcatagattaagaaatggcattgtattgtcagagtgtctgcacttgggtcctaatggatgttacctgtccttcctccaccacagctgccttcgtaacaaccagtgtgactacgtcagagctcctcatcnttcttgcatggcccagggtgaggtctaggaattcaggccaagtgagcagaggttgggtggcctggggattggaacttgggcttcccggttctgctgatctcccagctccctcctgcacttcctctcggccaagggcaagatccttagagaaggccctcacacagactgacctaggatcctgaaaacaaagccctaagaggaaatccttaagtgtcataatcttcagcctcatcatcttccctgtatttttgttccaatagatgtatttccctgtgactgaaccaggagatctggctggggctaagaagccgaagcccaactcacagggctgactctcatccttccaaaggggccagttgttctgtgcacttgtccacccctgttacccccaggatctctgttccttttcacaataaagtatggtgtcttgttatgtca

SEQ ID NO: 273953 - DNA, 725 bp, Homo Sapiens
caaagtgctgagattacaggggtgagctactgcgccccaagaaatgacttcaaaggaaaaatgtgagcaccaacgtaagctggtgtaatgtaacgtaattcccaccaatgtaagttggcaggaatccttgctctgtatagaagggtcacattttctcatcactgcttgcaagtgtgacagcagtggcctcatggccttatctgggggaaagcacttccttccaagcaccatgaaggcctcacgtgctgagacaagatggaagctcctagtctcccctgaggactgacacgtcctgtgcttctcggtctctcaggacgcgcgcgcggccatgcgccccttcgacccctccactctgctgcccacctgctgggattactggacctacgcgggctcgctcaccaccccgccgctgaccgagtcggtcacctggatcatccagaaggagcccgttgaagtggccccaagccagctctctgcatttcgtactctcctgttttctgcacttggtgaagaggagaagatgatggtgaacaactatcgcccacttcaacccttgatgaaccggaaggtctgggcgtccttccaggccactaatgagggcacaaggtcctagagacattaggtccacatgaatagcagaactgactttgaaggaaggaagcgttgtttcccaagtttcacaatgtgattgtacatgacttctgaaattaaaaagagagcatgaa

SEQ ID NO: 273954 - DNA, 508 bp, Homo Sapiens
acaaaggtaccattccattggtcccaacaaaacatgctgtgccagcatgtcttctttctgtggaaaagggttgggacccctgcagtagattttgggtacatagtgggctaaatgctggtacacttctctagtgaggtcagttgcttgcagccatttccccgcaatctcctcggccgaacattccagcaaactccggtcgatggcctgcacctctggctctagctccgacgccatcttctctcctcctcctccccagcgctaccgccgcccggagagctgcagcctcacctcggccccggcggcctcgactgccacccctgccccaggcaatcagtcccggagccgtccaagtggctgcaggtggagcaacagagggagagaagggtgacgtgaaccggaaaggaaggacagcggcctcctgcgctccctcccaagcttagcgcccaagagtcaagtcactggctcgtccctgacccagggaaggacacagaaaaccccaggcctgaca

SEQ ID NO: 273955 - DNA, 487 bp, Homo Sapiens
gccaatgcttctcccgtcctttgcatggcacccaagaaggagaaaggaggaactgtgaacaccagttctaagatatgggaaccctcgctcatagctgcacagttcaatcagaacgattggcaggcctccattgcttttgtggttgggaaccagattgaagatgatcttctcatccaagcccttaccgtggctgtccaggtccctcagcgtaaactcttcagtatggtgtcgtggcaagacattctccagcagattaatgaaataaatacacttgttggatctgcttcatctaaaaaggcaaaaaaacctgtaggtggtaatgctcctttatattatgaggtaagtgaaagtgtttatagaagatatttttgtgtttttagaaaaaagaattgaagtaataatttgatagccatttttaaattccattctttgaaaataaatgcctgctcctcattggagatatttgttcctgatggtgaacacacac

SEQ ID NO: 273956 - DNA, 354 bp, Homo Sapiens
  misc_feature (153)..(153): n is a, c, g, or t
  misc_feature (295)..(295): n is a, c, g, or t
tagcttatccatgttccccccaaaaaggaaaggaaagccaattttttaaaaaagtcctacctgtccatgtaactaatgtttctgaataagttgtaaaaaataaaaaacttaaaatatttgaagcaccagttactttttaaataataaatgaangttgtatattaggtgaactcagtgtcttagtagcatgtcttctacccaagcataatgaactattataactgccagaatcagtaactgattaaccctactaaatgtgagattcaaatagttgtgcttcccactatcacacccntaccccaaaacacgagagactagcaaccacggtaaaagtacttggcaattacctgcttg

SEQ ID NO: 273957 - DNA, 479 bp, Homo Sapiens; identical to SEQ ID NO: 217375

SEQ ID NO: 273958 - DNA, 896 bp, Homo Sapiens
  misc_feature (602)..(602): n is a, c, g, or t
  misc_feature (668)..(668): n is a, c, g, or t
  misc_feature (701)..(701): n is a, c, g, or t
  misc_feature (870)..(870): n is a, c, g, or t
aaaagatttataggagatgaggcagagacaaaataagatgagatcaaatggtccatctatcaggaaagcacttcccctccaagggagcagcagcatgcaccctgccacctcccagatgtgatgtgtgcatctgaatagcaatgcaggatggagcttctaccctggtgaaggtctctgcactgcaagggagggtgtcatgcattgattgagactgagtggtcaccagtctccttcccctgattgcagagcccataaatcttgaggaattgaatcaggttgcagtgttcgtgaaacatcacaaaaacagagctcccaggtcttccgtacagaggtcaaataacccatttgtcttctgcagacttcaaatgaaaggaagtctgcctgtttgccatttctgttgtacaaatgtgcatcctcactaaattattgctaagactgaccttttaataaaaaggaaaatcacaaaggaggggaaccgaacaaagatactgctttctcagaatttggaagacccatatacatttatatagataaactccatgaatccatatctatcacacatatctctttagattgtgttttaaaacttccgtttcctgtcntagtttcatgtttagccaaaacaaacatgtgtcgacatctgtgtagcgtcgaatctcctcatcacntgagtgcagtcgagctagatagcctgtcactanacagcagatcgtctcgacgctgcgcgtacactgatggtatgagggcccccttgcagtgtgcgagttccgcggcgggcggagagtagaccctgggattcgacacagcccgagcttggttagtggcccgcgttttcacctgtgagggtttctgttccgtaaaaattgcgtnggcggcttgcgacacgtcctgggagc

SEQ ID NO: 273959 - DNA, 734 bp, Homo Sapiens
gctcagagcctttgccaggcctggagaactgcataggtgcaggactgccagtagttcttcctgctctttgatcattgaaatgttttcttttgtgaagtaatgatggtagaagatgatagggtttctgtttgtttctaattctagtctttacttggcattaagaaattgttagctgctagggttgattttgaaattgtgaagttggagagtccctcctggagctgtgggttggatggctgcagctctgtgactcagctgtgctgggtgcctccctttggggctcagttacctcctttaaaggtgtccctagggtgagagagatgatcacgatagtcccttccaactgggcggcccaggctttcctcgcccatttagtgcctttcatgtagaatttccacctgttgtctgctgtgctgccactgcttgtcctccctccctgccacacagagctgtgttctctgcctgccactcacgcctacttctctgatcagggtttgtggaacctccagcgtggtcaccattctggtacctgtggtaacacgctcagccttggtgtggcacattctaggtctaccgtttgtattcaccagcctgtgagcttgtgtacatgggacatgtatcttcgttttgggggctttctccttccacttgatgcccatcccttgagcgtttactacttgtggagcgcttggctttcaggccgtagagagctttccaatcagtggtgtccaggt

SEQ ID NO: 273960 - DNA, 437 bp, Homo Sapiens
  misc_feature (387)..(387): n is a, c, g, or t
gagccaggatccacagtgagaggaattagcatttggctctcatgatcatatcagattttctcagcgcttccgtcaaaggcccctgggtgctatgccagcctcatacctgtcttctactccatcagctcaacctgtggggtgcaccaccctgggcttttgctagaccctaggaaaagtggatgagggtgtcaagccagatgggtctcagatgcttccagtcctcagaaccgaggtgagtgactgcaaagcccttctgctttccttcccctccctgttgccttctgctttccagctgcaaggaggcagtgggatggtagttggttaagggcagaaagccaaacagcaagtaggggacacacttacatttttcaagtcaaattttttgtntttcctctgggacctggccagtcactgggtgtagaaatgtgttccgtctt

SEQ ID NO: 273961 - DNA, 402 bp, Homo Sapiens
atagactagggtccccaaccccgggctacagaccggtaccagaaccgggccacacagcaggaggtgagcagcaggcgagcaagggaagcttcatctgtatttacagccacctccccattgatcccacagcagcctgacgtccgcctcctgtcagatcagtggcggctggagattgtcataggagctggaaccctatggtgaactgcgcatgtgaggaggttgcgcgcttcttttgaaaacctaatgcctgatctgtcgttgttgcccatcacctccagataggactgtctagttgcaggaaaacaagctcagggctcccacggatcctacattactgtgagttgtatatttcactatatgttacaatgtaataataatagaaataaaatgtacataaatgta

SEQ ID NO: 273962 - DNA, 417 bp, Homo Sapiens
ccatcagtcctctgctcacctgagacaaatgcatgtctgattgcttcctctgccctattgtttatgtgaaaatgcagattcactgagccagactaaggcatcagtgactgttcctctacctgcctctcacatggagattgtgtgttcagtgaaaggctgatcaaagacccaaaggaatgcaacagtttatctcttatctacctatgacctgcgagctgcccaccacccccagttgttgcgcctttccagacagaaccagtgtacatcttacacgtattaattgatgtcctgtgtctccctaatatgtatcaaagcaagctgtgcctcgaccaccttgggcacatatcctcaggacatcatcctgaggctgtgtcactggcatgtccttaaccttggcaaaataaactttctaaattg

SEQ ID NO: 273963 - DNA, 424 bp, Homo Sapiens
  misc_feature (253)..(261): n is a, c, g, or t
  misc_feature (357)..(357): n is a, c, g, or t
cgtgcagccacgcctggccaaaactatattcttttttaaagggcctgtaatatttagagaataaagagctacttcagttggttagctgaacttgacattttgaaggagtatatggaatttttgcttgtaggaagtcagctaatacggtagagctggaaactaaaatcttaagtattttgtctaaaagtctaaggttcttggtttcaatctagtggctctttctacaacatcatcatgcctctcccttagaaannnnnnnnnataactttgctctaatttgtgcatcactttcatttttaggaataaataaataagttgtttcaacatttgtgctgctgttgttttagcatatgtacntgatgaattaattctcctcaggttccttagcctgcatgccttcaccgaagtcacaaaatgtcacaga

SEQ ID NO: 273964 - DNA, 425 bp, Homo Sapiens
tctagtgcgtggcctagattcacacatgctcactggtgaacagtgtctgtgggctgctgtgggctgcatttggatagctgtctgcattagcaggaagctgtacacactgtgtagggttagtcatctcttttcttttttgaggcacatttaacctactgtcaaaacgctgactcatgcttcaccctcacactcactacttggtggtgataaccttgaagctattctcccctaattaatatctcgagactgagcaaaatatctcatgtaagataaaagtacttgaattgctttttcatgttcatcttaatagtattatttccaaaagtttttaatactgtattatgtgaaatctaactaatttatctgtgaaataattccatcacagtctgtttaatgatgataaagttccataaatgaatacaggt

SEQ ID NO: 273965 - DNA, 445 bp, Homo Sapiens
ccactatatttgtaaaagttatgtgattgtatgactacagctcttctgtggtacctacaggttgatacaaatcattaaaaatcaaaacatcaacgtatctaagaaccaaatggtgcatgtgactccccggagaaggatatatatgccatgttgccacttgaaggagaatcttccaggcatcaaatcccgtggattctcttattttctttcacattccctctgcttttcctcacagtcggctaccacgctctgaggagcccgtgccatctccatttcccccatccctttttcactttgcctcacaccagtcaaatccaaatatccgagagtcagacactgggagactggtctgcttccttgggcaactcccaggtgggttaatgaatacgcttccccggaccggaacacttgacctacggaaactgaaatggatggaattcatggg

SEQ ID NO: 273966 - DNA, 487 bp, Homo Sapiens
  misc_feature (393)..(393): n is a, c, g, or t
tcctctcatttagtctcagagcctaaaaagaaatgcctccagtctctgttagccccgatgtttggaatgaaattaacaagattctaccttaaaagagaaaacttatgtgggcttttcaaattgtgaaaatttgttccctcttataaaatataatctttcccctgctgctggtttataaatatgggcatatagcccagaggccattataaagaaaaaacaaccaaccacaataaactaaggagcctcatctgatggctaaggttctcaggaaaaaatgagaagagcaccttgatcaggaaaggaaaaaaggatagaggataaaaacagtaacctttaacttctatgccctcactcagccagtaacttacggcaggtgttgctggcaaggccttnagctgtatttcttcattaagttgaacatcctgtctgccaactccataccaacccagctgctaataagcatgccctgagcacccaggaaaagaag

SEQ ID NO: 273967 - DNA, 473 bp, Homo Sapiens
aaccctgccagaagcccagcacgtccaaggtgatcctgagggctgtggcggacaaaggggacctgcaagtatgtgtccctgcacaccctgaagaaggctgtttccaccacgggctacgacatggcccgaaatgcctatcacttcaagcgtgtgctcaaggggctggtggacaagggctcagcaggtgaccggcagggggcctcaggctccttcaccctgggcaagaagcaggcctccaagtccaagctcaaggtcaagaggcaacgacagcagagggtgcgctcctgcagcgcccctttggacagcacaggtcactactgggctccaaacaggggcacaagcggcttatcaagggggttcgaagggtggccaagtgccactgcaattaatgaggcaggccaggcaagcagtcaggggtgccaagcatcccattggctcagtgcagtgggaataaaaggaacataacttatttc

SEQ ID NO: 273968 - DNA, 506 bp, Homo Sapiens
ctttgcccagattgcgctacagctaggccgcatgctggaagccaggaaggcatatgtgaacatgtcgctgtttgagaacttaacttacgcggacattgatgccacagctgaggaggcctgagctgccatccagccagaacgtggctctgctggccggagaaaactctgctgtctaacctgtgaccagtctgacccttacagcctctgacttaagctgcctcaaggaatttttttaacttaagggagaaaaaaagggatctggggatggggtgggcttaggcgaactgcgttcccatgctttgtaggtgtctcatagctatactgggcatccttctttctagttcagctgcaacacaggtgtgtttccaatcccactgctcacccaacacaaacccccactccagctccttcgcttaagccagcacgcacacaactaacatgccctgttcagctactccaactcccggcctgtcattcagaaaaaaataaatgttctaataagctcc

SEQ ID NO: 273969 - DNA, 433 bp, Homo Sapiens
cagacaggaatactacagggtggtcacaggataacaaattctaggcagcagatttacatgacttgaggctgtgggctgttaagacgctgaaaaaccagggtgtggaccaagctggctaaggctgagtggacccaacgtggtgctggattggatggaggttttacctaggccctcattatatgctcattaacatactaaatcacacacccgccagtgccatgacagttctgagaccagtgtttgatgtaaaaatggcaccacagttccaagaaatctccacctttacccaggaattttcgtgaatattccaattcttggttaaagaaacccatcaagatgaaaccccagaacccattattctctcttgggtatgcccaagctcccctttcttgagtgtgtactttttgctttgcaataaatctcttctttcact

SEQ ID NO: 273970 - DNA, 510 bp, Homo Sapiens
  misc_feature (404)..(404): n is a, c, g, or t
  misc_feature (406)..(406): n is a, c, g, or t
  misc_feature (408)..(408): n is a, c, g, or t
tttaatctggcatttagagagggagaactatggtcatctcacaattttttaagaaggttttcctaataaacaactctttccagaatttgtaccacaaaacaatgctaagccactgatttatctgacaggccagtatatctgtttcaaatgttaattgctagaaagagtactgtttttccaggcaccaaagaagaggagtgtggatagcaatctttggggttttcccccacctactactctgttggtagaacaagcactttggcctcactggctgggtttcttaagctacccttcaaggactggggcatgtaggagtaaacacacatactacatcaaagaatagttccagggcccatttccccaactgggaaggatgtccagaatccacactccaggcagagcgntntnggcaggctacatttcaccactctctagagcacctttccagctaccagggcacaggctccagtgcatttctagaccaaaattacttcctattaaaaggccaga

SEQ ID NO: 273971 - DNA, 470 bp, Homo Sapiens
tcacaggaggaggcttcaagaatcttcgaggtgctgccatctggacatctgtgtcattttgactaacgtgtgtgagatcagtggaggggagccttaggaaaatcggctgtggtttaataaactgaacttcccgctgctttgagccggagcctcctggactggaaaggcgatggcctcatggccacctccggcctgcgcagctgggtctgcactctcacaactgtgctgagcccacgcttgtgcccttactagtggcctgacctctgcgctgtggagaagggtggatattgtcgccaactctcagacttcttgtgtgtgttcagaaagtacccaaacggattcaaaggaataattagcgtatcctgtaagatatgaatcttaattcctaaattacatatttagcagattgtccaaaatagcacttgtaatggcaacattcaattagtttaaaaaatgtatattattgcaac

SEQ ID NO: 273972 - DNA, 447 bp, Homo Sapiens
agaccttgtgtccaacaacagcaacaacaaatttgaatgaatcaccaccctgtgaacaccagaatctgcacggccatcctctttgggaaaccctagggtttccgagccacactgggtccatagtcccatcaagtccactaactggagtgaacactgcaggtgtgcgccttctctgaattaacttaggctggcatcagaataactgcaggagggagaacggccatcttccccatttcacagacagaaaacaaggccagagagatcaagtaacctgccccaagttccttaggaaagtgggaagtgggattcaaacccacgtttaccctggttgcaaccatacccttgggttgtgttgggcagccgctgtgtcctaatgatctggggcccagcctcttcctcaatggcgtcacccgcctggccccgggttccctgaaacgcttgaggagg

SEQ ID NO: 273973 - DNA, 450 bp, Homo Sapiens
aggcaggaatgtggagagaagaaagctacctgacaagggaatctcaggatacaaggaaaacaccaaggaatgtaaatctctgtttaccacaagccctctgtctccacaagttctgtgtccagaactgaaggcagatccaaatacaatattcatgggatgcaaattcccatgtatgccaagagataactgctttattggaggcctagtggggaactgaaactcccactcctgcttagcaggaatgagaagccccctttcagaggtcaacagaagctgagttaagaaacctgaacttttaccctacctggcagtaatgaagcgacacccaccttcgtctgtgaggatggtgtgagatgaaggtagctaaaacaaaaggtttaaataagattcagagtctcatcatattgaaatgtccatatttcagtggaaaattactcatcatacaaaaac

SEQ ID NO: 273974 - DNA, 460 bp, Homo Sapiens
cacacccatgcgtggggacctgcctggtgccggcagaggccacaggagcccagtgtggttggggcaccgtgaatgaggcagtgtttcccattctcaaatgagacagaggtctgggacatgacattgcagagataccagaggtcaagttatgaagggtcttacaggctactgtgaagactctgctgtttttcagcataggaaataggaaaccattgaaggattttgtgcagaggagtgccatgatctgagttaaattttctaaggatcaccctgatgggtcttttgaaaataggtttggaaggtggagagtcaagagcagaagcagggagaatagttaggaagcttataggtatcataggaaattattatgatagatatatgtaggctctttttatgacagaatcatgtagaaactaagtaattgatgatgactgattacattacttatggaaaatttaaa

SEQ ID NO: 273975 - DNA, 439 bp, Homo Sapiens
tttctcctgaaacagattgatgtctgcagcttggcttgcagactgtgcgggggatgcaaactgaataagatctctgcagtctgaaggcatccaaggagacctgggcaaaatggctggtcaggactgcctgccaagtataactattccctcacttggatacccgcatagaggcgccagctgtgcttgggctgcagcaccgaccaaggtgaacacacacagcctcctttccacaattttaccgttaagtgtgctgcatttgcaaaggaaaatcttcattgtcacaaatgatgactgtatctgtctgggctttagattgtgatagggaagagcctctccatctcttttgtatgataagtatacttatcacttattacatgggaaggtgagcggtccagggtcctccctgccattttaggtgagacagcatcccaggagaatg

SEQ ID NO: 273976 - DNA, 165 bp, Homo Sapiens
ctgtggggtgccagtgctcccagcagcgcgttcaccagcactggcaggtttggaaagctgtatctgattgggccttgggaactgaggtaggctgcattgaagagatttgaccatttttaactaagttatatgagtttttttgaataggtgatacatttaaaaagt

SEQ ID NO: 273977 - DNA, 426 bp, Homo Sapiens
  misc_feature (60)..(60): n is a, c, g, or t
  misc_feature (111)..(111): n is a, c, g, or t
  misc_feature (123)..(123): n is a, c, g, or t
  misc_feature (154)..(182): n is a, c, g, or t
tggtccttgcctgtagtcccagctacctcagggaggtttaggtagggagaatccgcttgnaggccgaagagattgagaatcccaggctgcagggagcccaaattcatgccnactgcaactgcnagcctgggtgacagagcaagacactgtctcnnnnnnnnnnnnnnnnnnnnnnnnnnnnncacaaattatttaacatctcagattcctgtttttgtttgtatgcaaaactaccatctgattgcctaagcctgtagtaattattgtttaatatttgacatttcctgcatttccaccaagtgctttatgactttagttactttctacctagtaagtttgagacttgtggaagccaattgagaatgacagacgtgcatggggagttcttcaaaagctgtgtgtaaattaaatatttttaaaacgtta

SEQ ID NO: 273978 - DNA, 1137 bp, Homo Sapiens
ggagagaaaccatttaaatgtgaggaatgtgggaaagaattcagttggagtgctggtctcagtgcccatcagagggtccacacagaagagaaacccctatacgtgtcagcagtgtgggaagggcttcagtcaggcctcacattttcacacacaccagagagtccacactggagagaggccttacatatgtgatgtctgttgtaagggcttcagtcagaggtcacatctcatctaccatcagagagtccacactggagggaatctgtagaaatgagaggtgtggttcagccttcagttagagctcacatctttgtctccgttgggaagtccatgctgatgattgtgaaaagttcctttaaaactagaagcttcaaagaatcttgacaggaaagaagtctctcaaatgctgtgttttagacttggttaggacatgaattctttacaaacgtcatatttcacagatgcgagaaaactttggttctgtaaatatgatcagtgtttatatcagagtaccaggtgtcccggttctcaagatgtaacacagcagaaaagtcttgtcggagtctgcacaggagagaggccttcctttaaccaaaagtaggatggacagaaaaaatggatgtcaactaaaatgtaacctctatgtaaggaggtgtttttcacccactctatctctaccatgtagaattgtgcttggctcataatagggcccagcaattactgaagaaagtgaagaaaatacctataattaggacaaatacttgaaaattctagtctgttttctactctaaatttatattaatttatattcaaaaggaatcctgcaagtagccttaataacgttagtttcagtaagtactgaaaagtatataatactgccatccatactaacacaaatttggaaaaaagacatgaatggctcccatccttcagccttagttctttgtacagtgtatcatcagttgtgtacagtatgatttttagtgtcagtttatagactgaacaatactgtttttatctaatgtgaccctgcaatttacatgattagaatttttggacactaagctgtactgtaactctgaaagtgttaaaagtagttactgatgacaaaaagtttcttagtaaacttgaattgtt

SEQ ID NO: 273979 - DNA, 576 bp, Homo Sapiens
  misc_feature (95)..(95): n is a, c, g, or t
  misc_feature (207)..(207): n is a, c, g, or t
acatatacacctcaaatacttattgagcacctggtagtgagtctagagcagtggacaaaataggcgaagtctctactctctgagccgtacgcatnggggcaggcaggaaggggtcagaaaggttctcggcaccagagtcccaagaagtagacagaagacagcagaatcacaattaccaaggaggaaagtacatttttataaaaatantgggctatgagatcagcagctttacttacttgaaaatagaactaagagtgattcatcaactactatgtgtacagagactttgtaggatgcataaatacatcatctcatataattttcataacaaccacactaggctaggtattatttctctcgtcttacagaagagaaaactgatgctcaaaagaggcaaaattccttgttcaagatcacacagctagtaagtggcagacctgagactgtcagatctcaaagttgaagtttttttactagggcttacatctctagcaaacaagcttaacaaacctaatttcattaatatgtacaatgtctcctagtgcattcaaacaatatagaccaaatgactgccac

SEQ ID NO: 273980 - DNA, 462 bp, Homo Sapiens
ggttatgacctccagatccttactggtccagtcctcattccctccaccccatctccacttctgattcatgctgcccctccttggtggccacaatttagccatgtcatctggtggtgaccagctccaccaagcccctttctgagcccttcctcttgactaccaggatcaccagaatctaataagttagccattctctattgcattccagattagggttagggtagggaggactgggtgttctgaggcagcctagaaagtcattctcctttgtgaagaagctcctgccccctcgtctcctcctctgagtggaggatggaaaactactgcctgcactgccctgtccccggatcctgccgaacatctgggcatcaggagctggagcctgtgggccttgctttattcctattattgtcctaaagtctctctgggctcttggatcatgattaaacctttgacttaaaa

SEQ ID NO: 273981 - DNA, 466 bp, Homo Sapiens
aagttcatttaaagcctaaaggaatagagactgcttctgaaataacttcttgtaaaatatacagtctttcagtgacagcaatttctccttatctgccttcttgacttcagggaaaagattaaaatctccattcttatctctaattatctcatttaaatgtctttcccccttattccaaaagattagcaaaatgtgaagtgtgatggaaagtgtgccaagcaggcagcctccattcactgtacaatgtcacccaacatcttcaggactcttccccatctccaaagcttgaccttttcacaatgcctccaaggtgttgtgaagtgtgtgttgatggaagtgtgggaaacccatgaggtatgaaaccactccagtcactgttctgggctgcatcttaaagtgaataacgggactttaacatttacccattcttttataattttgagggattaaaataaaatgggaaatt

SEQ ID NO: 273982 - DNA, 786 bp, Homo Sapiens
agcaggaaaagcgaaagaggtccctgaagctcattctggagaagaagctggccattctggagcgggccattgagagcaaccagagcagtgtggatctgaaactggccaagctgaagctctgcacagagttctgggagccctccactctggtcaaagagtggaagaaactgatatttttgcatcccaataatacagccctttggcagaaataccttttattttgccagagccagtttagtaccttttcgatatcaaaaattcacagtctttatggaaaatgcttgagcactttgtctgctgttaaggacggcagcatcttatctcacccctgccgttgccctggcacggaagaggccatgttttgcactctttcttcagcagtgccactttcttgcggcaggctggccactcttgagaaggccatctccattgttcccaggccatggtggacttcaccttctttcaaaccccgacagcgtgaaagatcttgcctaccaaaggacaggtggaattctttgaacccttttgggacagtggagagccccgggctggggagaagggagcccgaggctggaaggcgtggatgcaccagcaggaacgaggtggctgggtggtcatcaacccagatgaggatgacgatgaaccagaagaggatgaccaggaaataaaagataagactctgcccaggtggcagatctggcttgctgctgagcgttcccgtgaccagaggcactggcggccctggcgccctgataagaccaagaattatcaataaaaaaataaatt

SEQ ID NO: 273983 - DNA, 359 bp, Homo Sapiens
aattaggctttgtgaaaggagccaaacacaagaggctatgtgctatatgattccatttataagacattctggaaaaggcaaaagtataggaacagaaatcagattagtagctaacaggggctgatggtgggaggatgggattgcctacaaagggacagtaggggcctttttgaggcatcagaaatgctttatattgggaatgtggtggtggttatgtaactatacatttgtcagactcatcaaactgtacacttaaaaagcgtgaatgttactatatgaaaattatacctcaatgaacctgacttaagaaaataataaaacaaacctaaagaaccaactaagtaaaaataaatctcaga

SEQ ID NO: 273984 - DNA, 370 bp, Homo Sapiens
gcattgaaacaattgcacatagaaggtgagacttccaatttgaacctaagtaggttgattgcctactaaattcatattaatttactaagactcagagttttcacaactaattcacaatgcccaggatacactctaaaattactcagccgtacaaagaaccaggaaaaactggatccacctctctcaggaaaagaaccaatagatggcaaccacgagatgacccacttgttggaattatcaaagactatcccatgttctgcaagataatggtgaacactggtgaatggaaagacagaggttctcagcagacacacacaggaacttcaaaagagaacaaagggaaatttttagaattaaaagggcaatatct

SEQ ID NO: 273985 - DNA, 501 bp, Homo Sapiens
gcttctgatttaagtctggccctagtagctggtgacactcatcaggcaggactattggccatctcaagtgtgggatgatgtgggaggctcccattgaccggcatgatgggtgaggactgagcatgcccttctggctgaggacacctctagggcagctcacagggcagaattctaaagtgtaggtagagaaaccagggcaaatttaatattaggcatggcgagagggcagaaggtgagagtagggaagtctactagccagggactcaggagccacaaggctgggggcccaagcttggtttccatagagaagtcccatttctgggccttcagtttccccaggccaatctacagtgcagacacaggaccagggtggttcagggaaggcctgggcaaggcttctgtcctgctccatgcctacaaagccctcagaggggaggctgactttgccccaagttgtaggtccagcccacaagctgaagagtggaggcagcagctctgtgg

SEQ ID NO: 273986 - DNA, 637 bp, Homo Sapiens
  misc_feature (191)..(191): n is a, c, g, or t
taagaaataaaaaaattttaaagtcgtaagcatctcagatgccttgcaggaatgtgggataaagtgctcagaatgttccctggcagatagtataggcttgttttccgtgaagagcctgtaactgccacttgggtccccttccacccctgacattaggaaatagttgtgcaatggttgttactctcagggtnggtcacttaggcaaactccagaggagggtgtacttccactgattatccttctagcccctttcccccaaatccccaaggaaggctgggaatcatcaaaatggagttggcctttacttgtcaacaattgagtaaagtcctaaatacggacgaacacccaagtagctccgtgaattacaattaaaggaaaaacatttcttaaaatggaaggtgtatgtactttgtagcggatattctgtaatctcagtcacagggccatgtcttactctatattgctactgtctggcccttgagaccagcttgttgctcagattggacacagacagcaacactgccactgactacctgggtgagaaggtgggcaagttagccagcctctctgggcctcagatcttgtgtaaaataggtataacacctacttacagggtattgatcatggtgctagctgc

SEQ ID NO: 273987 - DNA, 408 bp, Homo Sapiens
acaaattacctactttagcatttctgaagcaagcactcctcccaaaataattcccaacatggtaataaataaaagagtagaagtgccttattaatgcttgtccttgctttcaactatgctttttcagaaaagttctctattccacattaaaaattcttgagcatggcttatagtgttttcgacagctctcatgccaagtcatcctcccacctgtcagggctgtgcacccaagagaatgtctttgttccatgggccagagcacatcctgccactcttctcacacagtcttcattttttcttcttgacgttttataatgaaaattttcatacatacagaaaagttgaaagactttaacagtaaacacccatatacacatcatctaggttctacagcatttttactattct

SEQ ID NO: 273988 - DNA, 488 bp, Homo Sapiens
aagatatcccaggaaataccattctgaaataggccctggcaaagatttcatgatgaagacaccaaaagcaattgcaagaaaaacagaaaagacaagtgggacctaataaactaaacagcttctacacagcaaaagacactagcaacagaataaacagacaacctaaagaatggaagaaaatgcccacacactatgcatctgatgaatgtccaatatccagaatctacaagaaacttaaacaaaataacaagcaaaaagaacaacaactccattaaaaagtggggaaaatacgtgaagagatgctttttaaaagaagacatacttgtggcaaacatatgaaaaatgctcaacatcactgatcattagaggaatgtaaatcaaaaccacaatgagataccatctcataccagtcagaatgcctattattatactatgcatctgatgagttccaatatccagaatctacaagaaacctaaacaaaataagc

SEQ ID NO: 273989 - DNA, 511 bp, Homo Sapiens
acttgtattagattccaaaagacaaaaagtgttgggtgcttctagcttgaattccagtccctaaaatacatgaggctgggtgagcagatgaaaaccggtagcccactgtgctgatgcatgtgactcccattcagttggggattttgggttccatgtgggatccatactaagtattcttcagtcagtggattttagcaaggggaggtaggagtggaagagaggtgtgaagaaacctctccgaacaaatgaaccagcagtaagtttctaaaaatcagaatctagatagaagttctgcaatatgaaatgagcacattctttgataaggcgtatctattcatgcttttgtaccactgttttgtacctgactccctgaccgatttgtattttttatatacaactagaaggaagtcacaagattgccttctacagtgtgccatttccaaatggatctgttgttggaggaaactggttgctagtcaatgttctatatttaatgaatgtgtgataaatc

SEQ ID NO: 273990 - DNA, 529 bp, Homo Sapiens
  misc_feature (323)..(323): n is a, c, g, or t
aaaaaggatataagtaacaaaagtaaccagatgggtaatgaacacaccccctagacagtgctggagcagctgaggtggctctgagcgggcaaggagtgaggactaagcaaggggtcctgccgggaagctgctgaacggccacccccagcaccgggaagagccagacaagcagcaagcctgggccgcagcctcgagagtggagctccgcagagggagctgccgggcaggaacaggcttcatgcgtgggagcaggaactgaactcaagctcagacgccagggctaaggtgctttggagctatatgcttcgacgtctaactcacangccacagtcattctaactaaaaatgtgcggaagtcaaacgctgtaacacaaatgggacttccacacacaaggagatgctgctacttgctatacaggtatgtgaatcctcctcctgacccctcacctgcgcctctcccaggtcattgttcaccacagtgaagttcagcccaagctcctccacatcgtcttcgtagctcttcagaaag

SEQ ID NO: 273991 - DNA, 423 bp, Homo Sapiens
tcccagcgcctgggagagggcacgcgggacgaggagccctggggtcccatcggaagctcagagccaaattagtggctcccttcgagcgaatgcccaggacttcaacgcatgcactttgtgttgacctcatccctggcttcaccttggtttttcccatcctagttctccctatgcctgaatatcctgtcttttcttttttataagcaaccacactgtattggatgaccctagatcttctttgagacaaggcaggctgtggccatgtagccccatcacactgtgtttgtgattgtctgtgtgtctgtctcccccaccagactgtgagctccatgagggcagggaccgtgtcttgtccgttctctgtatccccagtgcttggaacagagcgagtgctcactgtgtatttaataaatggacaaagag

SEQ ID NO: 273992 - DNA, 360 bp, Homo Sapiens
gaaacggagtcccagtctgtcgcccaggctggagccactgcgcccggccaatatttgtgtctttttgtctcacaaaactccttaatgtccttttctgaagaaacatcattgtttagccattttttacgtattagtcaccaatcatccaaagagactgtaaacatacaaaggctaattcaaaaagtgaacacaaatgatgaggctacttcaaatggattctttgtttccccttaaatcatttctactggagatgaaattttgaattggtgacataaattaattcctgaatttctagttgcaaaacaaaaaatggggaaatagaaataataatgtcattcattggtgagctgttgttttctt

SEQ ID NO: 273993 - DNA, 376 bp, Homo Sapiens
  misc_feature (104)..(104): n is a, c, g, or t
caggggcctggggagcagcgctaaccctggaggcagcctttgggtgatggctttttcttcccttttcctcccgcgggcctgttttcaggtgttcctagcatttnctcctccaggcaggacggcaggggtgagcagctttgggagagacacctggcctttttctcctggagcctctccctcccggccctgggaagttgcgcagccctgtgttcccccagcttggcagatgggctgcatgcggcgctcccttccttcccacgctcagcgccccggccagaccctggcagacttcacacctcattgctttaccccctggggcctggggaaatgtctgtactttgggaagtcacagaaatacatttttgtgcaaaatggt

SEQ ID NO: 273994 - DNA, 723 bp, Homo Sapiens
  misc_feature (303)..(303): n is a, c, g, or t
  misc_feature (423)..(423): n is a, c, g, or t
  misc_feature (511)..(511): n is a, c, g, or t
attgggcaaccttggctcacttggacttgctgtcaaaagtcccccacggccctccctggttctgacattcagattcttgctcagaggaagtagggggcgggggcggcaggaacaaggtgggaacagcccttcatcaggatagagggatctgggcttggaatcctggagggctccaggctcatggtccctcactgccacccccaccttaccgacctgggggacaaccatctctgtgtgccaaggctgaggctgtgggtaggcaaaggtgagccggcagagaaaaggacacaggacctgtccttngggcactcccagcctgattaggcagttgtgtacgagtgtgtgtgtcagtgcaagtgagtgtcttgtacccaaagcaggggcagagcttcaggtcgtgatggggacacgttggttcctacnttctagtgagcactgaatctgagggtgaactagacacacacatctacatttaacatagtaacgggcaacgagcacaaggccatcccanggtggcagttgccagggcccaaggggctgggatgttggatgctgtagtagcaaccttagagtcacaggagtcccatcagagaaggcttcctggagaatgtgagtacaggtggaagagggtttagaaggagagattgggcaaggaggagaaacagggagaaaattgtcttttgaagcctaatgcctgtaaggagagcaggccagagggtggaa

SEQ ID NO: 273995 - DNA, 373 bp, Homo Sapiens
ttaaaggaaaatataccagaggtttattaagtatgacaaactgtactttaaatgttgctattgactttaggacttcttgcacaaagtttatagattagcaatactaataccttaaaaatgctttttgaaggataattcttacacgagctaagtaagcccttacagtctacagaataatgatggacgttatgaacaatactatgataacgtaaattgtccacatgcccttagaaccttatctgatttaaaaacttcccatctatatagaagaataagcttacagaaataatgtttccataccttcggggaaaaggatctaaaataggagagaacatgatgtatttaaggaaaagaaaggcaagccagtgagggc

SEQ ID NO: 273996 - DNA, 372 bp, Homo Sapiens
  misc_feature (279)..(279): n is a, c, g, or t
  misc_feature (305)..(305): n is a, c, g, or t
  misc_feature (329)..(329): n is a, c, g, or t
  misc_feature (362)..(362): n is a, c, g, or t
ttaagagataggatctcgctacattgaccaggctggattcaaactcctgagttcaagcgatcctctcacctcaacccccgaccgagtagctgggactaatggtgtgtgccaccatgcccagctttcatacactcttgtaatacataaacatgagactctgggattagaagtaaaaccttcattggagatgaagctgaggtaaactgttattagtgacacctgacctgctcttatgtatgactcagatttttactagtacttttggtaaaaaaggggaancaagcctttcaaataagaaagaattngcatggccttttttcaattgggtnaattaatgggggctattgttggggaggattatnaaataaattt

SEQ ID NO: 273997 - DNA, 335 bp, Homo Sapiens
aaagacacctggtcaggaatgtggaccacggccacctcgggctcgcccatggtgtcagactaaagacaaacaaggactctctgtataaggtactggtcgtgtgtgtgttagtggagatgaagcctgtgccctacagacagggagtcacgcagacacttttctataatttcttacgtactttgaatgttcaagtataaagtctaatgttaaatttgattgaacaattgtatatttgtgggatattttggaatggaacaccaaaaaatggtaatagtggttctttctggattgaagacaaacttttcttttttaaaataaatcttattttatataaa

SEQ ID NO: 273998 - DNA, 568 bp, Homo Sapiens
  misc_feature (68)..(68): n is a, c, g, or t
  misc_feature (351)..(351): n is a, c, g, or t
gctggatccgagaaattcaaaaagtgaccaaactggatcgagatcctgcatcaggaactgccttacanggaaattagtttttggctaaacttggaacgtgcgttataccgcatccaggagaaacgggagagcccggaagttctcctgactctggatatcttgaaacatggcaagcgcttccatgccaccgtcagttttgacactgacacaggtctaaaacaggctttggaaactgtgaatgactacaatcctctgatgaaagatttccctctgaatgattctgtctgccacggagctggacaaaataagacaggcgcttgttgccattttcacacatttgagaaagatccngaaacacaaaatatcctattccagagggcactgcgtttggtggaggcaatttcaagagacttgagttctccaattactcaaagtattgggcactaggaaatttgatgcatgttgccttatgaagaattttgaaaaagttatggtagcatgctttgaagtttttcagacttgggatgatgagtatgagaaacttcaggtattgttgagagacatcgtc

SEQ ID NO: 273999 - DNA, 519 bp, Homo Sapiens
cggcacgagcaacgacggtaataaataccagtaactgccacttacttctctcttactatgtgttgggcaccgggccacgcacgttacagcatctcagttaatctgcagagtagcccctatcagatggataacattgccgttttacagcttggagagcttacgtaatttgcccatatttacacctgggaagttaggatttggaccccgtgtttaactccaaagctaatgctaggagctgactgttaggctttactcttaggctacagtgtctcgtactgtggcgtgggtattgtgagagatgttcagatactggtcgtgccagaaaggaacgttttattcaatggaataagagatgggccagagtaagcagtgagtggtgcccctctaatggagtgggtggctcccttctttcccagggaatagtttggacaccatatggtcctataaagttggactaggggctggggctgcagacttaggtcatttttctttcgttcttccctccctccccccgccccc

SEQ ID NO: 274000 - DNA, 685 bp, Homo Sapiens
  misc_feature (533)..(533): n is a, c, g, or t
  misc_feature (550)..(550): n is a, c, g, or t
  misc_feature (561)..(561): n is a, c, g, or t
  misc_feature (612)..(612): n is a, c, g, or t
  misc_feature (636)..(636): n is a, c, g, or t
aagtgaaattgagcaattcactgtttcaggatacttgaggatctttagtgtactgctgactctttttcttgttttgtctgccattcttgaaagtgcatcttgagagcccccatttgttgtgtagagatatagcagctgaagcaggacttcattccagatagctgtgtgcatttatgtcatgccaattactataacatttccaaagtatgaaaggtcttccaggcttatgcatgatattgtgggggacttcatcccccagcctttctccccagcatacaatgagctgcctttgggggagcaatgccaatgataaggagcatacgtgccatgttttccgtactttcagaatagagtgccttagctaggccagaggctccgtattgtgtttctgctgaccaaagttgcatacacctgtaagaagtgtctttttaggttatggtattaaaaaaagtcgtttcaggcttatcagataataattctcccaaaatttgaggggggcatgggataaaaagatttaataatacctggatagngaatgctaatgctgccntttgtgatccnttaatattatccatgcttttataaagtgcagtacacattttgacattgccnccagtttacagtgtcattcttccncgaataggtaattgatagagtttatgggtcttagtcttaagggtaacag

SEQ ID NO: 274001 - DNA, 467 bp, Homo Sapiens
  misc_feature (28)..(28): n is a, c, g, or t
  misc_feature (42)..(42): n is a, c, g, or t
  misc_feature (67)..(67): n is a, c, g, or t
  misc_feature (75)..(75): n is a, c, g, or t
  misc_feature (189)..(189): n is a, c, g, or t
  misc_feature (221)..(221): n is a, c, g, or t
  misc_feature (258)..(258): n is a, c, g, or t
ggcgttaactgccccgtattgtaaaggnacttcaaatcaaantaaggcttaatccaaagtacaacanaccacaangaatggcttttaaataacaggtttgaaattgtagggtaatattatgcaggaaaactgtcattggaaaacttttcaggccctggaaactttaaactcagggctttcagtaacttnctgctttaaatgggacccgcactaagtttatnctctgtaatggacactattatattcgtttgtagaagnttaatttttggggtcaaataaacctccacttatctaggtcaggccaactggaatgtgagcatgagaaggagcgctggagagcaggtcatgagcagcagagatcaggaacaatggcgggcatgtgatggtccatctgcgccagggaatgagggttggcacagatgtagattaggaagatgtttctgggtatattttagtggctgctccaa

SEQ ID NO: 274002 - DNA, 635 bp, Homo Sapiens
  misc_feature (304)..(304): n is a, c, g, or t
tagctgtccctaatcttcatcatacatatctatgacttctctccttcctctgcacatgtaattcatcaactcctgtgatagataggcccttcagagtatctcacatctaccacttctatcttgttgccacttctccaatctaagcccccatttttcttgcctatgcagcaactaatattgtagcttctcctcttccccatgtctaatccagtcacaaccatccattaaatcagaacatgccacttcttaagacctccctcaccccctacctcaatgcattgggtataaaacaccaacaccattnaatgtggtctgtatggttgtctgtttcctgcctgccttctgcccacatttccagcctcatcctctgccactctgcctcccagtatcactcttttcctccaaaagtaactcctactcatcctttagatttcagcttaaatgtcacttcctcagagatgattattgatcttccaaactaaattaagttcttcagttatagtcctttatattgaatgtatgcctttcttctttgggatgatcagtttctcccaaactgtggctaaagaagtgaagtaacttccacaaggccaaagagtgagatctattagaactggaattctctctgttagagg

SEQ ID NO: 274003 - DNA, 639 bp, Homo Sapiens
gggcatgtgagtataatgaataataatgaattctcaaaacagtcaaatgaagataactatatatagcgtcatcaattcatttataagacatagagctagatgagacttggagaccaatccccaaggacctaatttacctctttattttagagaggaaacatctgagactgagacagcttacaccatctggttagtggcccagttccataattttagtccgcttctttaatgttgcaaaggaacaaccctctccacttggacaaggcttaaggaaaccagggttatccaatggaacatgtgtccatgatggaagaaactgtcacatgtcctggacctcagagacacagcactgaagaggggctgggaccagagagagccaagaactcttagcagcaggagttccctggaactttagtatccccagcagtatacattattctcagtgtctgcttctctttgcctaataccaaattctcacctctcctctgtttgtcttacagccttttagcctttgctaactggtaatttgtgctttcacataaattaggcttgttgggactctagtaatctctcttcacttttaatacacattatggacatttttcttctatttttaaatttaattctccccccgcaaaa

SEQ ID NO: 274004 - DNA, 500 bp, Homo Sapiens
  misc_feature (149)..(149): n is a, c, g, or t
  misc_feature (333)..(333): n is a, c, g, or t
atgaactgtgtcagcagtgttagcaaatcggctgaagtagaacggagctgcccaggatgctgccctgtcgctggggaatctgagggaggctgaaagatattgtaaaagagattgaagggctggactggctggaggaatggtgccatcgnatccatgccacaatactccaggactgccctgcctttgtcaggacagccatcagaggcggttttccctctaaccaggatgggcatcactccttgggcttgcacgtcttacctctcctcatgcaattgcatgtccaaggcatgccctcaaggggactggtgctgatccaagggtggcaaacccaangtgggggatgaaaatgctgaatctcatcctctcagagatctgcttgcaagtcagcgactaatacttgaggttgcatgatcttgaagcagcagtcgctggttggggaaggccttctttgttggaagtggggttctcagccacaagccttgagggttcctctcttggga

SEQ ID NO: 274005 - DNA, 899 bp, Homo Sapiens
  misc_feature (168)..(168): n is a, c, g, or t
catgtttgaactgccaacagacgtcacatgtggggcctcacaccggggttcaccctgggcccaccctccgcgggaaggccagaagaaatctgcagtggaaccccatattgtccaaccgaagagaacccaagagccatcgttcaccgagtcgcatagcgaggtctaccnataaccagctcagatttcctgacgcatcggaggccaagctagtcaaacagtgttgaatgtccctacctgtcgtttagatctgactgatctgccatttccttccctaatcaagatctattggtatgtaatggaacaacatgaagttatctgatccttccctttgcctttaaccagtgaccacacctaaacaaatccagatgaattagtgttcattatatctttaaagatcattagaaagtatttcacaatttcctgggcaactcatcccgttgttcttactgtagtgaaactgtctaacccaacatctttatgttgtagccaaagcccactttattatcttcctagaaaaggaaagcagctggtgttcagcctctcaacagcaaaccatgagactacataactatcaggttttcacttcactttcttctcttctgtctaaataatcacaatgcctttaggcttataaaaagcatctaatcattacagtgtcttatcctttttaatgttctttccttttattaaactgtggcaagactgaatgtttaggaaaggtagcaatgttttggaggtaattttatttttgtataaatttatgattagaatattaagtcattgattgttaaagtaattatctaaatagaagatgttggattacaaaagaaaatgggagttaacatgattgcatgtcaaaatgtgggaaattgctggagttggccaaagaaaacgttatg

SEQ ID NO: 274006 - DNA, 704 bp, Homo Sapiens
  misc_feature (196)..(196): n is a, c, g, or t
  misc_feature (655)..(664): n is a, c, g, or t
agctggagaattcaaaggattcaaaacattaacttgcctgaacgtatcctgtagcacaaagaaaaaaattaaggagtattttaaagatacttgaaaacctctaaatatattttcacatttttttccacctgaaagaatctgtccaaggctgccctgagatgctttttggccgaattctaaggtagatcattaatanaagaagaagaaaagaaaatgccttagaaccatagtaagtaaggggctttcttgaacactggcgtactgctctttgagaacaaagggaaggggattttactgtgtcccattcaaactggtttgctttcttggtcgagtcacaaaagggcctgggatttctgggaagctccgtgagatgcgtctgtgcatacacactagcaaaagtgtgccgctcctttcaaagtaactgttccactcattcctgctatgacacagcaaggccttgtgtttcggatttcccaggatatagtacgccagtctacccttcccagtgggggaagatcacaggcctgcaaaacaggttctgaacaaacaataacacagtattactttcataaaacccgaagattactgaaattacaggaatcatcctttccgtttttctcctcctagtttcatgtagagtaggaaaattatgagnnnnnnnnnnaacctttgtatgccaccaataaaaatcctacagaaaattc

SEQ ID NO: 274007 - DNA, 520 bp, Homo Sapiens
  misc_feature (437)..(451): n is a, c, g, or t
tctccttcccaagttgcagatgcttcccagtgaggggctgcccccagctgagccagtccagtataatcagaccttcctgatggtccagccccttccttcctgagcgccatgcagcgtcatcctcattcacccctgttcctcagctttggcagggtcgatatgattcacttaccacccaagctaacaactgaaatcatactcctgttcccccatcctccacgtgcatgtcagtctgtgtcctaaatgccacttggatccatccctgctcagcattctggctgctgctgttttaagtcccacaatttctcacctggaagatactgcaacagctacacaatggggtcaccttggcctccaagcctgcgcccccaactccacttgcggccaggatctgtacttagagtcaggccgacatgtgtctctactggacattttgnnnnnnnnnnnnnnnagaaggagttttctaccctgtcactccagcctgggcaacaagagtgaaactttgtctcaaaaaaaacca

SEQ ID NO: 274008 - DNA, 477 bp, Homo Sapiens
  misc_feature (186)..(293): n is a, c, g, or t
cccacttacactctacaagctctttaactttaccaaaacttgcagttcttcaaaacagctatcagttctatgtgtcaatctaccacttcaagctaattttttctttaaaatctagtctgtcaataaagtatatgacgtacagtgtggtataaatactgtgcagtttgaatctcagttctaccactnnnnnnnnnnnnnnnnnnnnnnnnnnnnnnnnnnnnnnnnnnnnnnnnnnnnnnnnnnnnnnnnnnnnnnnnnnnnnnnnnnnnnnnnnnnnnnnnnnnnnnnnnnnnctaacagtgtgtgacaaccagtaaaacaatttgatagactgtcctaggccttgctccatccattatgccattccttaagtctttctttctcttcttctccactactgacatgagccaacaaataaacttcaactactaacttcgccctaaatgactagcatctactctatgacttctctgcttc

SEQ ID NO: 274009 - DNA, 367 bp, Homo Sapiens
  misc_feature (120)..(120): n is a, c, g, or t
gccccgttgggttccccactagtccaacagtccacactggtgccttacaagtagggggaaagagagcttccttcaggttgggtaagtctggtaccttttaggggagagaaaggagtctcnaggtgacaggaacaaagatcactttctgggctaggcatttgtgaggacatcccccttgccaggcacactggccacccagtatctgtcagtggggaaggggagtctcatgcccaggagggaaggagaatgcttctccctggtcactgattgccagtggttccaaatcaattcccccttgctagagccaccagacttgcctagtgttggcagggctcttgtttaatctggggaaagaataagcctacct

SEQ ID NO: 274010 - DNA, 436 bp, Homo Sapiens
  misc_feature (80)..(188): n is a, c, g, or t
ccacactcaagtgatcctcccacctcagtcacccctagtagctggcactataggcatgtgccaccatgtctggctaatannnnnnnnnnnnnnnnnnnnnnnnnnnnnnnnnnnnnnnnnnnnnnnnnnnnnnnnnnnnnnnnnnnnnnnnnnnnnnnnnnnnnnnnnnnnnnnnnnnnnnnnnnnnngtgtgagccactgcaccgagctgagattcattcttgcaataattatttactgggggcctgggggccaacaaaatgccaagcactatgctgagaaggcagaaacctactcagaacacccctgcatttcacatgtcacaagtatggcagaagtttaggaggataagattagtggaagagagacccttaaacagttacaagtctttctagcaccaagatcatttcaaaaaagctgaccgacaactcgtgcc

SEQ ID NO: 274011 - DNA, 523 bp, Homo Sapiens
  misc_feature (47)..(47): n is a, c, g, or t
ggttactagcaggggctgattttcaggggggagtgcacccatctganctccctgctgttcccatcaatctattccagccctgtacccctgaccaccctactgtccagcaactaaaggattaacaggagccacctccaggagcctccgggacccttcagaaggtgtctgatttgatggatcagaggctaggccactgccagctctctgcacatattttacatatcacccatttgcaggtgttgaagaccggtaagtgcccaggagctggcaggtgttgcaaacatgtcagtgtacctggtgggggcgctcctgcccagctgataggagacagcttctacccagcccacccctttggtggctacaccagcttggcacagtctctcattgctgaagagcatccccccgccaactccgcccaatccccacctccagtcttgactacttttcattggtttgtttgtttaaattgacatctcctgattttcaaaaccttgctgattaacaaagcaaaaagagcacacac

SEQ ID NO: 274012 - DNA, 638 bp, Homo Sapiens
  misc_feature (304)..(304): n is a, c, g, or t
  misc_feature (327)..(327): n is a, c, g, or t
  misc_feature (461)..(461): n is a, c, g, or t
  misc_feature (491)..(491): n is a, c, g, or t
  misc_feature (519)..(519): n is a, c, g, or t
  misc_feature (525)..(525): n is a, c, g, or t
  misc_feature (552)..(552): n is a, c, g, or t
  misc_feature (573)..(573): n is a, c, g, or t
  misc_feature (595)..(595): n is a, c, g, or t
  misc_feature (626)..(626): n is a, c, g, or t
ccttttcgtctagttgatataattttatgtaatctctttggcagtttagtcaggacaatgaaacttgcataacagtggccagctctcccatcaacatttagaagaaaacttacctagatagtttgtgcctttgtgaatcaacacaggacatttataagccaataaatcccattttgaggatgccaggagtttagtttctggtcagccactaagtgtttctgggtagttttacttcaaacgtttaaaaagaaaattttttaatactcagatacattgtaagtaacccaagagcaaatttctatcngtcacaatttcggggaatcactngttttcatttccctccagggacagctgttccatcatttgcaactattcaaatacagagggaatgaggttcccctggtgaactaaaaagcaaatctaacagagacaaagcgttaactgcccgtaatgtaaaaggncttcaaatcaaataaagctaatccaaggtncaccaaccccagaatggctttaaatacngattgnaatggtgggaatatttgccgaaactgncctgggaaaccttccgggccngggaacttaacccgggttccgnactccggctaaagggcccgcctaaggttatncccggaagggcc

SEQ ID NO: 274013 - DNA, 560 bp, Homo Sapiens
  misc_feature (335)..(335): n is a, c, g, or t
  misc_feature (495)..(495): n is a, c, g, or t
aagctcaaaaatcggaaaaagggcagagtatttcaatgattatgggagatgggcaaaccaatcaatgaatgattcttaagccttcatgtttgccctgtaagcaaactgaagacgtgcaagtcatccttttggccctgggagagttaacgttaacccacagggacaatgagaaagggagaggagacccagcagatgagaaagatggagtaatttctggaagactgagggtatatggaagagtgacagatgaactcaggcagaaggaggaaagctgacactcaaaaattccggcagaggggagaacggagcagaatcaaattgcattcaccccactngaatcctaagaaggctcaggaatcagaggcatcagattacggagaaagtggggatgacgtgtgggaatttagttagactagttggggctcaggaaacaatacaacaaagttggatgcttcagaagtagccccagaaagcaaagtccctctctgactttcntcctgctctcctgtctctcaaccccctcatttgccctcgaggcaagccatagaaactagaattcc

SEQ ID NO: 274014 - DNA, 594 bp, Homo Sapiens
  misc_feature (359)..(359): n is a, c, g, or t
  misc_feature (484)..(484): n is a, c, g, or t
  misc_feature (523)..(523): n is a, c, g, or t
  misc_feature (558)..(558): n is a, c, g, or t
ctctgaatcttaatcaactacaggttcaacccctttccttctggctgctcccccaggtctacccaagtgcggggttccccctgggaagtttccctcattgctcagatctgggagtgacccccgattggtgcttaggtgaatgactgaagctcagccagatgtcattcttgctggatttgcacaggtgccagcactcctcagctcagctgcttccatcactcacactagtccttcctcccacctgttcagtccttgaggctgatatagtaattgatggacctacaggcctaagtttgggtggaggctgaagatgacccaattaactgggtagcatccccaagagaggaccctcaggctgntggctggagaccccactccacaaaagaagccctccccaaccagcgactgctgctcagatcatgcacctcagtatagtcgctgactgcagcagattctctgagaaggatgagattcaagattttcntcccactttgggttttgccaacctggattcaggaccatnccctgaggggcatgctttgggaatggcaatggatnaggagagggtagaattggcaagcccaaggagtgatg

SEQ ID NO: 274015 - DNA, 589 bp, Homo Sapiens
  misc_feature (234)..(234): n is a, c, g, or t
  misc_feature (320)..(320): n is a, c, g, or t
aagagaaatagctgcaatacctctgcaacatttgggatttttagctataggaaattctcgtgtttcctacaccaccgtctgtgcagaaagcactgtacacctgaatatggattcctaggaacagaaaaaatttaacatgctgtgaagaccggctactactgtgacagctgcccccaccccgtgtcctcacacacacgcccaaacaccgcttggaattccacctccagaccccangggaaggcgggggcacactggcctacatgagtctttcaaagtcctctgccagaatactaagcaatgaaagaacatcctcacatctngacagggcagtcaggatgaacatgtggcaaatgctgatgtgttagcaactggctctggtgacacgggcagcaaattgtaagcgaacactcgtggtatggagccaaaacgtcatcgtctgtgtccatcactgagacaatcacaaaatgggaggctgaacatttcctccggaacccatcctgcaagtgccctcctgcacctgggggtgaagctcgccgcttttccagtatgtacctctcctaatgctctgcataaaagagacggtgcagac

SEQ ID NO: 274016 - DNA, 346 bp, Homo Sapiens
gttgttgttgttgttttacggtctctgagggaatatagtaaaaatgcatatgcacgtgcaatttgcacggcagcatttcaccgattgtggactgtattggctaatgtgtttcctggtctttagatgcaaaccattaataacactatcttatctcatagttttttcaggggtgcttcttgattagtagggaattttgaacacctctttaaatacagctagaaaataaaaccaatttgtaaagccacatttgcatatgatgccagcctcacgcatttgtatatctccagaaattcaggtatgcctcaccaatttgcccgtctttaataaaatcttgtgttaaaatttg

SEQ ID NO: 274017 - DNA, 519 bp, Homo Sapiens
  misc_feature (479)..(479): n is a, c, g, or t
  misc_feature (507)..(507): n is a, c, g, or t
atgagccaccgggttaggctatttttctattttaacaatgatttctccctcctcgagtaatagtcctgaaattttttattcctgaaatttaattcatgttaggttcaagatgtgccaaatcgatagaaattgcagatagctttggtggttcacatttggaatagattatagagaacactctctgggaaggtgaaatggtgttcacttctcagaaagaggctctgtgttgcaaagggatgcacagtttccgtgaagtatcctaatcagcacttcaggcaagtcagctgtaaaacacactggacttcatgaagctctgagccaacttgtggccagtaggcactaaggtcagagacacatatggaaaagcacatgatgaagcctctgggattggagtagtgcctacagccctgcccaaggcctggatatggggattgaaggcaaagaagatcatgggtccggagcccccgttgaggaatggncctcccccagggaatggggcccattggngaaggtaaaccc

SEQ ID NO: 274018 - DNA, 183 bp, Homo Sapiens
ggctaagagacggtggcagcaaggaggccgagaggcacagcgaccctgccccagcccttctgtgcagtcaggcggcggtgctgctcgcgatctgcgggttccggcggggcgcgggggccttgctgacatcagacgggatatccgaatatctgaaagcaattaaaaggcagccttgattcgtaa

SEQ ID NO: 274019 - DNA, 189 bp, Homo Sapiens
aacctgttgtcacagctcgactgatggaggttttaagcccaaccctatgtgactccactgggagaggactcctgtaagctctggaagcttgcacctggtttcctccagacttcacgtgccttttcctttcgctgattttgctttgcatctatctcttcactgtaataaatgacagtcatgagtacagct

SEQ ID NO: 274020 - DNA, 431 bp, Homo Sapiens
ctgtatatgatatagctttgttaaatatgaaggtcctttaaatacaattgatgtttagtactatatatgtacttttcacattctttggatttctggaaggttatgacactttactgtttacagctaatgcatagttacttgcatgccatggttgtacagtagcagactatgaccctattgtgatattaagtgtttatttcataatgccatttatacatagctgaatttgatgaggattgaatgtcatatataagaggaatgatcatacaatatgtagttgcatcttatataagatttctaggttgcatctaaccatgactatgtcattattttgataattaggcatttatgaattatagtatatattcctcatgttggcatgataattttgctattttccatgcattaaaaataagacaaattcttagagt

SEQ ID NO: 274021 - DNA, 439 bp, Homo Sapiens
gccagtgcttgtcagggcctgttgtgtaggaccctgagtaattccccagaccctgtcctgtgcttatttgggtttgggcacatttttgcagctcgggggtgagcctgggacttctgttgattcatatacagaattagagcatccctcgtccagctttctccactgtctggtttatcccatgtctccaatttccagggttgttttttctcagctttatgctttctgaaagtcagggttttctctcagagttttagctgttcgtgttgttgtgaaggtccacctgactgggacagttctcagggaaaagttgtgtgaaaagagagaactaccagggacgtccacatcctgtttggactccaggagcccatcttcctgtttcccttgctctcatagaaggtgactacagtgtgccctaatagggctaggagaaacaaagagg

SEQ ID NO: 274022 - DNA, 466 bp, Homo Sapiens
  misc_feature (104)..(104): n is a, c, g, or t
caaacagacaggtgaaaaactgagacaggcagtctcagagatggacagagaactttatttggattgtgatgtggactttttggtacataaattaagaaaaaccnaaaatactcccaaagatgacttcccctgcctcctactccagtatgacagaggaggatgtaaggccttagccatgatctgcaggggtctgggagtcaggcccggcctattgcttgggtctctctctatttatatatctaagttcacagtgtttcttattcccccctaagcttctagaggctcatggccctgtagttaggcctggctcattctgcacctttccagggaggtggaaggaccctgtgccctccttcccaatcttctttttcaggctcccaaggcctaggacctatgttgtaattttactttttatttctaaagttgtagtgaagctctcacccataataaaggttgtgcatcttcc

SEQ ID NO: 274023 - DNA, 426 bp, Homo Sapiens
  misc_feature (193)..(193): n is a, c, g, or t
gtgtgagccgctgcacctggcattctctttttcctctttattactggttctgcatattccagctgccttaatctccctgaactctgttctgtatttcccatctctttcaatattatctctctacacatttttcccataggaaactccattattttccccagaaagcattaatgattcttgtcatcccatgcangaagggacacttgaattcctggaatgttattattcactgggtgctttatatcccctagactattcacgaaaaccttatgttctaaaatccatgctaaagaccaataaatcgtatgaaaacactaccatatgtttaaaatgtgttaagaaagaatacaaaccacaggaaattgatactgcttttgaataaggagagttgtgaggtaaacaatcagagattatttttcactgtat

SEQ ID NO: 274024 - DNA, 580 bp, Homo Sapiens
  misc_feature (148)..(297): n is a, c, g, or t
ggtcatcctgttatattctatccctgttgcatactgctgagatgttctgagattccaattttgttgccttggtgcctttctcagatcttcaacaatttggtaggcaagctcactataatttcttctaatgcagacataagtattaacnnnnnnnnnnnnnnnnnnnnnnnnnnnnnnnnnnnnnnnnnnnnnnnnnnnnnnnnnnnnnnnnnnnnnnnnnnnnnnnnnnnnnnnnnnnnnnnnnnnnnnnnnnnnnnnnnnnnnnnnnnnnnnnnnnnnnnnnnnnnnnnnnnnnnnatctttatataaaagaaattgaatgtaaaccagatgaccatctgacaagagatatttagaagaaacagctatttgggtcaagattagacttcataggttctaaggtttcttccaaactcctattaaaaaccttaaaactttaataattctttcacgccattagctacaaccaaatggatccaccagccttcacaagctatcccaacaaccgactgtcactagtgactcaagttccttcactaggtttcaagattatttttagggggtttagatggtacagaaa

SEQ ID NO: 274025 - DNA, 450 bp, Homo Sapiens
ggagaagcccgtctgtgggcccctctcccgcagtgtcgtcatcgccctttgacgtttctgcaaaacggggtcgcgagcgaaccgaccccggtcttgatttttctgctctcccttagtcgccatttgctttgattccggtgaggtgtctttttccccccccggttcttcgggacctcgaggtgaaatgagcggaaggatgagagatggacacattttgaggtgccgcatacgtttccagacctgcctttcctttctcccaccctcatcactgagcggtgattaaagagtatttgaagcctagtcatagtggataaataggtgagaagtgaagggaatttgtggaaattgcactgtgtcactaggagactgattagctgagtgaccttggataagacgagacactcaccaagtcttaatttcgtcatcaataaaaactaactggattttctc

SEQ ID NO: 274026 - DNA, 451 bp, Homo Sapiens
agcagcccacgggagctgctgggtcaggtgaacctgagctccccctcgatgagcaaacacaacttggaccatgtcctcccactgacgcagaacccgactgcccgagccctctgtggctggggagcaaagccatggcagaaaacgcagttctgatctgagcttgctggtctggtctggagaagcaattcagagcctgtagggccctggtcgagatgagagaacgcaagcctgtgtgaagccagttctggttccagccttggaactagaagactgtgggatgttgggtaaatcatttccaacctctaggcctcagcttcctcatctgtaaaaagaggctttggagagggtggtcttcaagtttcttccagcactaacaatctaaattattctatgtaggagaaaaatcagaatttattaaacttataaaacagatacatttctatcatgctgc

SEQ ID NO: 274027 - DNA, 495 bp, Homo Sapiens
  misc_feature (363)..(363): n is a, c, g, or t
cctctcaagcgtttcagggcttttgtggatcgacccagcacccctgccctgcactcctaggaaacacacgaagagcacacacaacggtattctcgtcgtgtatttgtgatctcctctaggcaagcttgacagccccacccactccccaatcgtcactcgctaccatccaccacggacatttgagtccttgaacttgtcatgctcagggaagtcctgtgatgtgccttgtccttctcccaggtgctcaccccctaacacaggtgcagatgttcacaaacagccacattctgccgtagctgtctccaatctgatgtcacccctgccttggccttgaagccctccagctactagtgctgcccaaangacccctcaaggggaagtttgttctcgcattccgccccatctcgctttccagcacacagtaggatgttcaataaactgttgatcagattctgaggtctgtttgtgtttaatcagacaatatgcaaagtattt

SEQ ID NO: 274028 - DNA, 700 bp, Homo Sapiens
  misc_feature (44)..(52): n is a, c, g, or t
  misc_feature (466)..(522): n is a, c, g, or t
  misc_feature (545)..(546): n is a, c, g, or t
  misc_feature (551)..(560): n is a, c, g, or t
atttcctgataattttgcaaagataatgattagctttataattnnnnnnnnnctattaaaaattactcagctgaatatttgggggagcttaatttatgattcttgcccaaagaaatggttgcaatttacatgtatgcagcacatttggaaagaattatcgtttgctagggtcccacttgcaaactaccgtatcagtcagtttattaatcataagcatttgttgagcatgcacaatgtgaaaaatatgatgcttcacaattcaagaggacagaagaaatttgagtctgccttaaaggatattagaactagctggggaatgaaaacaaatccacactattcattccttacaagtaactagttaggaatataagaattgccaatttatagctgggtgtggtggtgcacaccggtagtcccagctacttggtaggggagggagtgagttgggaggataacttaagtccannnnnnnnnnnnnnnnnnnnnnnnnnnnnnnnnnnnnnnnnnnnnnnnnnnnnnnnngagtgagaccctgcccccacccnnctacnnnnnnnnnncttgctaatttatgtccatggacagaaggaagtttgtcttttagctacttattggaacagtttcattcttgttagtatagaatgatattaatgctgatctccaatactttttgtatcatttaaaactctaattttaaaag

SEQ ID NO: 274029 - DNA, 409 bp, Homo Sapiens
  misc_feature (369)..(369): n is a, c, g, or t
  misc_feature (385)..(385): n is a, c, g, or t
gccagactgcctctttaggctgaccctgacccatccctcctcactgggtggggcctccctgcaggaactccagcaactcaagccagggaattagggagagaactctgatctctctaggtctgagtccctagtgggaggggtggctggctgttgtctccacaaaccggaagacttgttctttccccctgctcactctgaggattccaggcagcccagatgagtgggattttccccggcacagcatacccccttcccaaaggacaaatcaaaagtgcttcattaagcaaagtcctggatcctgtgcccctcaactgggtgaaacaccccaagtgggtcaccagacaccttatacaggagcatttctactgngcatcaggttgggtgnccctcaaggacagaagatcccaga

SEQ ID NO: 274030 - DNA, 646 bp, Homo Sapiens
  misc_feature (38)..(38): n is a, c, g, or t
  misc_feature (508)..(508): n is a, c, g, or t
  misc_feature (510)..(510): n is a, c, g, or t
gccgacagtgtagccttccatctgtgggcaaaggcaangaggcctcggcaaaccactggtgtaagtctaagagtccgaaagctgaagaactgggaggctgatgttcaagggcaggaagcatccagtacggcagaaagatgaaggccagaagactcagcaagtctgctttattctagccgctctggtagccgattagatggggcccacccagattgagggtgggtcagcctcttccggtccactgactcaaatgttaatctcctttgggaacaccctcacgacacacctaggaacaatactgtgaatccttcaatcaagttgacacttaatattaaacatcacaccagggccaaaccttgggagtcctgcctgacttctcacacccacatttgatccatcagcaagtcctacaggctctactgtcaagagcatccagaatctgcttttgctactcccactgcctcacccccgaatcctggccacctcctggaccagcccgcctcacctntntcctgccttttgcagctacctccccttcctgcttctatgcttgtctccctgtgttgtcttttctcaacacagctgctagagcaatcctattaaaatgtaaacaaacaaaaccaaaaataaatgacaattctccttt

SEQ ID NO: 274031 - DNA, 578 bp, Homo Sapiens
gttgacacttagcagtcatagggctgataatacacacagttactgacttagcctaaacaacctggtgcatcgaaatgtattcacctttcttttgtaaagagaccatcttctatcttctttccacctttctctgttttatgaaaccaactgttgacatacaaaccatgattgaaggagaaccctgtccaacatgttttatgtacacaaatccctatgttgctataagaaaagtgaaagtaactgttttcttcttggtgctatgacagtgtgagactcacggttgtctgtagagaatgaaacggagcacgtggcccgcgtgattgtggcatttaaggagcagtgggcccatgtgactgtggcattttcggcacttttcattactttctgcttgaccggaagttgaggcttagctatgtttccatcttcagtttctgaagactagttatatattccttactagaaatatattcataatatataaaagaaatatatctgtgattttaaaattttgctaccaaagaatgcatgttctgtgtgccctgaaaatgttaccgagtgttaataaatggatacttatc

SEQ ID NO: 274032 - DNA, 448 bp, Homo Sapiens
ttttggtttttgagtgtgtcctttttagctttgaaccagttttgagtttctggggaaaacttgggaaataggaattcttggactttacactgaactcacttagtttcaaaaagatctcaggcagcctaggctaacctgattgtcttgagcagattgggagactccaagtccccagacaaaacctgctgttatttggaccttttctcacccccatgaaactgaggtgattcccaaggacagggtgtttattcctctgaccaggagatctaggtgggtctgctagtaccttcaaggtcctctgcagtattttctgtgatttgggggctacagtgagctccctgaaacattctgcaaacatttgagtgttgcaaaacccacagggacctgaaatgttgtcctttacccattaatttacagcaatactacatgtagaagaaattggggccca

SEQ ID NO: 274033 - DNA, 672 bp, Homo Sapiens
ctaactccagcatcctgagccccggttttatgaaatcctcaaagtcatgcaggaagctgcggacagacacacccagaccctgccagaggtgccagatcagttttcatggaacaactttctttggaagccctggcttcagctgtgctgtccttccaccggccctgtcttgccagtgtgatagagaaaaacaggataagagactgtagccgctagcagcgcctggggaccagacagacgcatgtggcaaagctcaccatcttcactacaaacacgcctgagagtggcactggggaaacataactccatctacaccttggatttggactgattctccattttatcacctgaaggcttgggccagagctcaacagctactcaactggaggggtgagggggataaggtctgtagtatacagacaggaagatggtaggtttatgccttctgtggccagagtcttggactcatggaaatagaatgaatagaggggcattcacaaggcacaccagtgcaagcagatgacaaaaaggtgcagaaggcaatcttaaaacagaaaggtgcaggaggtaccttaactcacccctcagcaaatacctatgtcaacagtataagttaccatttactctataatctgcagtgatgcaataaccagcataataaaaaggcaatcacat

SEQ ID NO: 274034 - DNA, 396 bp, Homo Sapiens
aagctgcattgagacactagttccataaggagaatgtaaaaaattgtaatcgctcattcatacatgagttatatgtaaattccaaggggaaacacgaaaccataaatgactttcaggtacaatgcagatcataccacacattatactttttgtttgttgtatagttatttgttctacgttttgaaattcaaaaatatattaccatttcacagggtgctgctggcttccctggtgctcgtggtcttcctggtcctcctggtagtaatgtaagtaattgttaaagtcttttctcatcatacacttcagaaagagcattcatgtatgtataggatgagaaacttacacattgctacttatttctctagtaagtctcaaataaaattatttgaagtaagt

SEQ ID NO: 274035 - DNA, 396 bp, Homo Sapiens
  misc_feature (58)..(58): n is a, c, g, or t
  misc_feature (316)..(316): n is a, c, g, or t
  misc_feature (326)..(326): n is a, c, g, or t
gccgaaagaccctttctgctggggagcctcttgtgtccagcctaggcccgcgtgcagncccgacggatgatcgtcttcttggcaagaaagtgaataaacttaattgagaatgtctgaaaaccttgacaagtccaatgtaaatgaagcaggaaaatcaaaatccaatgattctgaggaaggcctcgaagatgctgtggaaggtgctgatgaagccttacaaaaagcaataaagtcagactcctccagcccccaaagagtgcagagacctcactctagtcctcctcgctttgtgacagtagaagaactttctagagancagcgagagngcgtcaccaacatggctctagcccattgaaattgtagtaaatggagactttcagattaaaccagttgaat

SEQ ID NO: 274036 - DNA, 304 bp, Homo Sapiens
  misc_feature (44)..(44): n is a, c, g, or t
  misc_feature (93)..(93): n is a, c, g, or t
  misc_feature (268)..(268): n is a, c, g, or t
  misc_feature (282)..(282): n is a, c, g, or t
gtaagtcctaagtgttctaatggaaaaacatggaggtttatcangtaatttaatattttatactgagatagcatgtcaatagtgtcaagagangtaatctttatatgaatataagtccaaagtatgaatctcaagcaccaagcaaatctaaaaagttattttaacctcttcataagaagttccctggttttcaaaggcttaatgcttttcccaaaatttttgaatttgggtgctattcctacataatttccttcccatttccatatanggtccccccgggtnccccaaggtggtcaaaaggggg

SEQ ID NO: 274037 - DNA, 439 bp, Homo Sapiens
  misc_feature (49)..(49): n is a, c, g, or t
  misc_feature (58)..(58): n is a, c, g, or t
  misc_feature (135)..(135): n is a, c, g, or t
  misc_feature (150)..(176): n is a, c, g, or t
  misc_feature (311)..(311): n is a, c, g, or t
  misc_feature (397)..(397): n is a, c, g, or t
aaaatccagccctggctttgcgtcgagctgctgagtgccgcgcttacgncgggcgccnagccggggctggtttccatctgccccttttgcctccgtgttaagttcgccggggaaaacccaacgatccgtgctgancccctcggaggagannnnnnnnnnnnnnnnnnnnnnnnnnngatcccgaccgatggaaaaaatgacagtataggtcagaacaggctgcccgcgagtattaatatggacggcctccgttcctggtgcttggggaaggatgggcgcttcgcaaggaaaccgccgaagaaggcgccatngaagggccgccttgccccttctcgggctaagaaaacgtggattctcagaagggaccaagacaaatgttggtcagataagctgcaangaacttaccccatctaaaatacaggttgcccgtgtatattcc

SEQ ID NO: 274038 - DNA, 487 bp, Homo Sapiens
  misc_feature (147)..(147): n is a, c, g, or t
gcaggtggggctgtgcgtggcctcagtgcactcggtgtcatgtctgagcctggtgtttatgccccactgctgtcctaaagtcccctggcgaggggaggtggaggagctgccccgtgggtgtttggagattctgttttactctgcctnagagaggaaacggctttggggagggagggggaagcctttattctttactgttgtccctgttttcctttgggggaatttactcagttagcagcccctcctcaccattccccccaggaaggccatgtcccaagttttctgtccacccctcctgttcctctgcactatgtctctgattttccctgccagggaagctaacccagagcacgcacctgtgctcatgagtgtttccgcaggataattcgttctgagcatgataccacagtgtggattgtctgtctgtaaggagatgccatctactaaccaatttgtattgtgtttccaataaattcctggaaatttt

SEQ ID NO: 274039 - DNA, 564 bp, Homo Sapiens
gaatttgctttttattacaccttcagttaaagtacactaagcaaccttaaaacagcatgaaattcctacttccgccttgcctcacatactgggccacattttggtctttgtcacttctggaaggactcaaagtggaactgtggctttgtgctagcccctgaagcgtggattacttcttatgttgaaaacaggcatgtttccgaagatgcgctgtttggggtttgtgttccagaatcttctttgtcctcaataagccagaatttcacaaggagatattttatgtgatgagaattcggaaaaagtctagaagctactagtgtctatttactcttcacaactgtgttgctcagggtgtggcaggaagatgtctcccactcattgcttctggaagtcagcgtcggccttcactattctgcccttgtgtccttccaggggtcctcacagcacctcactcagagaagtacagtccaacagcaagccactagttgacagtttaccaaaaagttgctgcaaaatctgcctttaagttgcaggaggtaaaacttgaggaaacggcatactcac

SEQ ID NO: 274040 - DNA, 449 bp, Homo Sapiens
ctgcttgtgtggtgctctgcttcctgaggatttggctggaaggggattctccgctggcacatgggagaaggccatcttctgtgtcggtgctgtgatctgccttgttctcacttgctgaggataagggcataacacgctgctcctcgctttcttgttgcccgaattcgtactaagcagctcaggagcagtcactcagacccaaatgtcttgactgtgttgtttttaatcactgtgacccttaaagtacaggccaagtgttgtcaaacaccttggctaaaacagtggagggtgatgggtaaagcagtagagggccctcaacccacacactggctgaaactgccaccaactgccacgatgaacccaactgctgtttatgcccccattttcctttttttgtatctacacccacacgattcccaatgttggatatttctacatgaataaagcaa

SEQ ID NO: 274041 - DNA, 329 bp, Homo Sapiens
  misc_feature (183)..(193): n is a, c, g, or t
ggtactaatttcttgaaataatgtattgattagataagagaagtatgttttcagcagttctgtctacagaaaggcttgttctaagaaccatacaataggaattttaaataaatcaaaagccttatattatggaaacatcttgcttatatttattctgttaatctgtaatgtaaagttagattnnnnnnnnnnngacagtgatacaacaataaatacctcccaaaagcaggcatagtcaactctgaatttcaaaggggcttattataggtggaaaaaatttcaacatttattaaaaaaataaagataatttttatagcattatctaaata

SEQ ID NO: 274042 - DNA, 448 bp, Homo Sapiens
tggtaagccacatttcttgataggacctggacctgaataagtacttgcttctggatagttccacctgatgactcatgggcaggacatattccttcccacccctactcctatccaatcctgattatcaacctatttccctatctcaatgaatgcttcaataaattacattatcatcctgcttcatattcaattcagcatctaggttttttctaacccatcttaatacttttggaatttattcacttcctttcaagtctattgtaattacctattcccagccctcatcatttcttaagttcctacaaactgatctctctacagctgtatcattcatcatgatgtcaaagagatttttctaaatgcaatctgatcatatcaccttcacacttaaaaatttttgaatagctcctaataggcttcaggataaattcaaaacctttagcaggaa

SEQ ID NO: 274043 - DNA, 487 bp, Homo Sapiens
  misc_feature (15)..(15): n is a, c, g, or t
  misc_feature (35)..(35): n is a, c, g, or t
ggaaaatacttaaantaccggtaaaggcatatccnattaataattcccccccaattttttaaactaacaaaatgggaatgttaactgaatgggaattaaaccatagcaattgtccaagccatcaaaattatatatcgaaccacttaggcatgttacggggtaaagtcctcacccctgcatttgagaaatattttattatttttattttaaggcaaaacagtgtttactgtgatgggcagaacagccttttgtatctaggagtccatttgagttctttccaatatttccatatcgttcataaatgtgtctgggggcttccttgtttggaaaatatggatatcgctttgttttcctttgaaagtaattatatcttaagaacatagtatcatgaatggagtagacagggaggctgcagaagccatttttctttgtagataaaaagcattatctatgattgttgtataataaattgatttttacattaaaa

SEQ ID NO: 274044 - DNA, 555 bp, Homo Sapiens
tttttgtttcccatttctgagcattctctctggattacagccgtgaccgccgtatcgcagcgtgtttgcccagcccggtttgagttgtaagctggtgaaatagaagaatccttgtgaaaatatgaacacacttttatttaccaaaggtaaatgaaacctttcactgttctgaagggtttccatttttctgtcttttgtctcctccctttgattacccataacattaaccttcaaacaacctggcaaatccaagtctgatttcccggcagcctcctccttcagccaggcagggcacctgttgcaggccctcttgggatcaccaggcagagaagcttccctgtgcttcacacccactcacgcctgtccccccgtcctgggggaaggcagttccaggctggcccatggtcactgtgaagcgctcctacttaacaatgcaagtagccatccctctgtccagctggctttgacagagctctggcgccgcagcttcttcccgtggctctgtgatggggaaaaaaggaaggaaaaatcagttccacgccgagccctatgcag

SEQ ID NO: 274045 - DNA, 263 bp, Homo Sapiens
cttacattaattcatccacactatcactttcctacataaatataaactgatataataaaaataaagcaaagaaaagttatttaatttgtcataacctgtaacagggcatcttaaacctctggaaaatacttacaagaaagtattttgatagatttatggaaagccataattatccctaaaaatataccacccactgcttatttttgaatggtctacatttctttctagcagttaattagacctattgaattgaaatttagaag

SEQ ID NO: 274046 - DNA, 407 bp, Homo Sapiens
  misc_feature (316)..(316): n is a, c, g, or t
  misc_feature (359)..(359): n is a, c, g, or t
gtgatgggggagaaaacacttcattgggttcaaagataatattccctatcataaatcagtggcataaacagccagtgggccaggtgggccaccgtgatgctagctgacaagggcagtcacacaccggtaagtgctgatacaggatcgaggggtgcggacgcgacggatgttgttctctttgatgaaggcctgaaaacttcccctggcccctgctgcccacctcagggctcctcaggacgaagggcatgaggacaggttcccactctggcccttcgctgggggacatggtttggtttccccatccgccaggctggcncagctggggcccaagcactggacccgtccttccccaccttatncccatcagctgccctgcacaggagcagaaaacccatgcctcagagcta

SEQ ID NO: 274047 - DNA, 424 bp, Homo Sapiens
  misc_feature (164)..(164): n is a, c, g, or t
  misc_feature (289)..(289): n is a, c, g, or t
tgatcaatgatatttcattctggttgccctctgagaattacgcagaaaatgatttctatgacttagtccgaaacaattggaggagacctggtggaaaaggttgatctcaatagacaagtttgtacatccaaagacgcaccaagacccagccgactgtaccgcantcacgtaccgccaccatggaacggactctgtcccagagagaggtcaggcacatccaccgaggccttgcaggaggctgcagtccagctgttgggtgtggagggcaggttctgatgtcaccacttcnactcaggctgcaaccctcttggggctccaggatttgctgaaagagaaaaagatatggtttgtgaactggggcatcaatcatcttttgataaatggatcagttttaggactttcagaaaataaaagatcgctcttg

SEQ ID NO: 274048 - DNA, 453 bp, Homo Sapiens
ctcctcctcagaatccttcctcccccgtggcccgcccgccgtgtccctcctcctccacggcccgcccaccgtgtccttccctcccctgtggcccacccgccatgtccctgcctcccacccgacatgccccttgagctgcctgggccctgctgttgtccccactgcctgtgtgactgtggcttgtgtctggacaggaatgtgtcatttcccacatcttctagagggctgccagctgggaagacagttatcagggcaagctgtgctctgagtttcgggttctgctcctacaaagaacgtgcggtgctgcgggcgagggccccggcacggacaagggccactgcagagtgtgtttctgctcggtcacgtgccctgggcagcggatgggctgggcgatgcagctggatgcacatctcattctgtcatgaatgtccagtaaaaatctgaattggttgc

SEQ ID NO: 274049 - DNA, 423 bp, Homo Sapiens
  misc_feature (11)..(11): n is a, c, g, or t
  misc_feature (54)..(54): n is a, c, g, or t
  misc_feature (78)..(78): n is a, c, g, or t
  misc_feature (92)..(92): n is a, c, g, or t
  misc_feature (129)..(129): n is a, c, g, or t
  misc_feature (147)..(147): n is a, c, g, or t
gcgacatggtnacacgtggttggattatgattatagttgaaggtcgaacaactngatttgctgatagattggataaantggtcctctctttntggatctcataatacagtaggagaaacagacacatanatagtcatcactgcaggntggggattagaaatattttgcaagggtgtaaaaggtgctaagaaagctttcttgtgtgacaaagctggttaaagaaagaaaagaaagcttcctagaagtgaaacctaaaatatacacttagataaatgaataaaagttatgaaagaatgtgagggctgggcacaatggctcatacctgtaatcctagcactttgggaggttgagtcgggggtattgcttgagtccaggagtttgaaaccagcctggacagcgtactgagaccccatgtctaaattt

SEQ ID NO: 274050 - DNA, 439 bp, Homo Sapiens
  misc_feature (99)..(99): n is a, c, g, or t
tatgtttgtgtatttgtttaatacattcccacaagactgaaagtcttggtgagggcaggaactctgtctaggttgttcatctggcagccagcaaacccnaaaataagtattagttgaatgaatagctaaatagatgagccatggggtagcatatctgttttagctactgcttgcctgttatcatcctgggatgctgcttgcttctccgtgatctcttcttgttcttaaattgtcttcagttgtagtactaagtactaatttgatctgtaatgtgatatgtggctgaagtttgctctgtaaaatcaccgtttcctgaggtatattcaatacctttaatttttccataaatctcttcaaggtttgtgtgtgttttcttttaaattatctaactagttggatgtatgcttgaagtgctagacaataaaagtttcaataggct

SEQ ID NO: 274051 - DNA, 523 bp, Homo Sapiens
  misc_feature (304)..(304): n is a, c, g, or t
  misc_feature (503)..(503): n is a, c, g, or t
cacagcaagattgtttattgaaccagttcgtggaagctccaaagactcctctgctgaaacaccgccagctccaagctctgattttgacattgatattgtcagatgagattaagcactggtcgtaatgaatgctggcagacttctcgttgaggtatgatcacccgtgttcctgtggctaagtagcaaagctctagacaggagcgaagctgtaggtcttgggagttattagttgctgtttttgtttctttttcctgctcccgtaatatggtttggctgtgtgtccccacccaaatcatcttgaagnataactcgtaattcccacatgttgagggaggcactcgagtgggaggtaattgaatcatgggggcaggtctgtcttctgctgttgtcataatagtgaataaatctcacgagatctgatacttttaaaaagaggagttcccctgcacaagctctctctctttgcccaccaccatccacgtaagatgtgacttgctcctccntgacttctaccacgattgtg

SEQ ID NO: 274052 - DNA, 723 bp, Homo Sapiens
  misc_feature (33)..(33): n is a, c, g, or t
  misc_feature (35)..(35): n is a, c, g, or t
  misc_feature (121)..(121): n is a, c, g, or t
gagctcctgtgtatggtatgtgaggccagaagnangatttcatgattgctgttttactgatggaaatacacaagagatcgaagtgacttgctcagggtcatagagggaggcagtgccatgncgaggctgaggtctttcgatttctagctcagtccagtcccaccactgcagtatctccaagccacagcattgggatttggttgtctcacagtgaaagtaaacctgtctgcactcagatccttttctccctgttgtcgggaggtgctgggacagtgggaattgtgagactggaggtccagaggctggctgtctgctaagccatccaccaggaggctgagaagtaagcctgttgtgcctgccctgccacattccagggctgttctgttctccccgagggaatgggggcctgctttatttttagctagttcagtgtgacagccttgttctctttctgggcaaggacttggccacttttaccagtcaggaagctccctttagaacctccaggccctactcaggttctccttaggaagagggggccaagggaaggggagctgaagttggagtgccgctctgcttgctgggggcctggggcatttggcttaactgcacagccctaggttccacctgcctcatgtggggttcataacagctaccttacacattgtgcagatttggatggaggagcttagagcagccagcgtgggccctgtccacattcac

SEQ ID NO: 274053 - DNA, 510 bp, Homo Sapiens
ggcacgagctaaaacaagaacaaactaaatccgccagttctttgattacccacagaaatgttacaggatatacagaggcacagctcagtaagtaggcttgctgatagtagtgatttacctgtgccccggacacctggctcaggggcaggggaaaaacataaagaagaacctatagatattatcaaggccccctctagtaggcgtttcagtgaagacagtagtacatcaaaagtaatggtccctcctgtcaccccagacttgcctgcctgcagccctgccagtgaaacaggaagtgaaaacagtgtaaatatggctgcccacacattaatgattctctccagggcagccatttctaggactacttcagcaactcctctgaaagataacacacaacagtttagagcatcttcaaggagcaccacaaaaaagcggaaaattgaggaattagatgaacgtgagcgaaactctcgtccttctagtaaaaatcttacaaattcatcaataccaatg

SEQ ID NO: 274054 - DNA, 508 bp, Homo Sapiens
  misc_feature (16)..(16): n is a, c, g, or t
  misc_feature (57)..(57): n is a, c, g, or t
  misc_feature (91)..(91): n is a, c, g, or t
aaatgcctttctgcanaacctgtgccgagcccccagagattcctcaagtaaaccaanggacacgtccttgcttgtgttcttgtgggattcntcggtgttcccgtggggaggcccaacaagcaacaaacaaatcaggtcggtgtgattggaggaaacgcacttcccgttcagagaaaacaaaccactttcacggactccagaaaccgctaagtacgcaaaaatcacagcgtataacaagtgaaacatttatatttccttcaaggaccacacagctccagacttggaaacactttgttggtggctggagtcacgctgtgtgcctggcagcattcctacatgcacttgcaaagaccttaacttttctgtaattcaaagtatctttcatttatgcctgtgtgtgcaggtatctgctctgattttacgaatgaatgccaatcgtgtcaaggtttcacatacaccgtcttatctactcctgggaggcaaatacttctattcctgttgttctcta

SEQ ID NO: 274055 - DNA, 410 bp, Homo Sapiens
ggtctgatatacagctgataggaaaaactacagtttagaaaacatggccaatttgaaatgagcataagatcaacgtcctttgtggagcttcattagggtaggcttcagtttatagagtgtgaagagtttaggatcacttcctaaagtttctgaaagtctctgcactgcctcacaagcataatatggaattagaatcatcgggtgtatatggccatcttttactttctgaaccactgtggaaatacgcattcactcttaagtattttgcatgccacaactggcttaagggttgtcctgcataaacaaagcaacacaaattgccttctctcacttcttatgcttagaaacgatggtgcttttgctggcaggacaacaaatgggaattagccaggatgcttctgtgctgtatc

SEQ ID NO: 274056 - DNA, 738 bp, Homo Sapiens
  misc_feature (151)..(151): n is a, c, g, or t
  misc_feature (310)..(310): n is a, c, g, or t
gaaaacaggactagaccaatgctgaccaaaagaagggttccacatacaagatgtgtagtgtggtcattctgagtgtctcatccatcctgaccaggtggggacctgccagacagaattccgagagaatccctggctgcatccaacagcgacntgcgctgtgcttcctgattgggcatcgtgtgctctgcgcccactccctacctgcttagaaggccccttggtgctgggtttgaatgtgggccatggacccccaggaaggccctgggcttcttaaaccgcccatggacacctacgcagaagaacaaagtgnaagaaattaaggactggggcagctgtcataattcatgtgttctgttctctctccagacatccaagaaaaagcccagtgactgttcctgaggggcgcctgttaagagctggctttttggctgtggtgaccagtcagtcacgaccactcttccgagagcaacaccaagtggaaaccgccgccaagtgggcttttcaggaaccctctcaccacccaaggcctttggatcttatatctaacaaattacatgttacattattttttaaaaaacaggttagtgacaactaagatagtctctccagaattagagtctgatgtcagattcagaaaatcccccgttccttgggaattcccatgtcactcattctgcattaatgatatttattctctctcattgttttattcttaaaaaatagctcccctggttgcaa

SEQ ID NO: 274057 - DNA, 758 bp, Homo Sapiens
  misc_feature (54)..(54): n is a, c, g, or t
  misc_feature (581)..(711): n is a, c, g, or t
cactttgtcatcagtggctcctttattaatagaagaatacatgtcatgccaggnaaatgctcgagtccttgcatttctagaatggtgtgagagtgaagatccgtttttcagtcatggtaacagttttcatggtacaggtggccgaggcaacaagtttgcccagatgcgttacagtttaagactcctgagagccatggtctaccttgaagatgagactgtaaacaaagatctttgtgaaaagggaacaattcagcaaatgataggaatctttaaaaatataataagcaagcctaatgaaaaggaagaagccattgttttggaaatccagtctgatatattacttatcctatctggcctttgtgagaatcacattcaaaggaaggtatgtatgcctgtgaaagtcttgttcaggtctcccagtcacctaacacttataaactatttttggaagtctctataattgtatttaattttgtgaaaatttaatatttttgttaataattagagcataattatataaagtaaaaggtacagaatatacaacagtatacacccatttaactcatacccccaacatggtnnnnnnnnnnnnnnnnnnnnnnnnnnnnnnnnnnnnnnnnnnnnnnnnnnnnnnnnnnnnnnnnnnnnnnnnnnnnnnnnnnnnnnnnnnnnnnnnnnnnnnnnnnnnnnnnnnnnnnnnnnnnnnnnnnnctcaccgactgcactccagcctaggtgacgcagtgagactccatctg

SEQ ID NO: 274058 - DNA, 368 bp, Homo Sapiens
tgagccaccacgcctagaaaatatttttattattgtgaaatgttaccctataccatataaaaatcaatacagatgtctacaaaatacatttttgaaggggactctttttagaatgtattggcatataaaagtacgaaatattctcatgggaccaaaataatggaaatggggtatttaatttttttaaatatttagttttgattagtactttcagatagctgataatttttagtagatgtaaaatttaatatgctacgagtaatggtatttttgtagaagacacttttgaagtacttttccatagggcttgtcgtatttcctttcatttttttcactttgtagtagaaaaatgggtacgtattggaatt

SEQ ID NO: 274059 - DNA, 220 bp, Homo Sapiens
catcaccccatgccatgtcccctgtacccctcatgctctgtggactgaggaagcgcagtttctggacctccagttcgcctcatagacctgtccttcgaggaacaaactctgtctgtctgcctcccctctcccacactgtcttctcaagacccttgccctctcatctctctgcctttttttagttatgctaaaatatgtgtgacataaaatgtaccatcct

SEQ ID NO: 274060 - DNA, 575 bp, Homo Sapiens
tcatctgatgttaaagtacggttaaaagtcttgctgttgatactaaacaggaaacaaaagcataacttaattctttccccttcttgttaagggtgaaacaaatgactttgagttgttgaagaacccagctgttagatccagacataaaggtaattaattttgtgtttgatcattagcaaaattattgccactttatacagacatagtttgctctttgggtcccattctgttctgcagaacttgctctctccatggtcctcccttactttaatctggtggttctcaaccagggacagttttaccccctagaagacatttggtgatggctgcagatatttttgtcacaactgggaggaaagggtgctactggcatctagtgggtgaatgacagagatgctgctaaacatctcacagtgcacagggcagcctcccataaccaagagtgatccagccccaaatgacaacagtgttgaggctgggaaaccctgctctaatgcttcctttctattagattactacctctttcctccatgctgcatgcaactcttttgtctctttaaagctaaaacaaaccg

SEQ ID NO: 274061 - DNA, 484 bp, Homo Sapiens
  misc_feature (19)..(19): n is a, c, g, or t
agaaaaggagagagaggcngagaccattcaggagtttgttgggccagcaagcatggagcttcttgcacaaaatccgggtccataaaccaacccccaaagtccctgctgatccagtagcccctggaggttccccaggtagggagagccagaggtgcccagccttcctgaagggccagaaaatttagcctggatctcctcttttacctgctaggactggaaagaaccagaagtggggtggcctgaagccctctctctgcttgaggtattgcccctgcgtggaattgagtgctcatgggttggcctcatatcagcctgggagttatttttgatatgtagaatgccagatcttccagattaggctaaatgtaatgaaaacctcttaggattatctgtggagcatcagtttgggaagaattattgaattatcttgcaagaaaaaagtatgtctcactttttgttaatgttgctgcctcattgacctggg

SEQ ID NO: 274062 - DNA, 541 bp, Homo Sapiens
gccacgcccagggccctctgtcaaagctgtgaggaaacatgctgcagagttgtcccctggggctgaggaaggctgtgagagagagccactccaactcccaatcctttgtaggtagagggccaaccgccaggctcttagctacttggaacttagggccagcttgaggaatatgggtgaggcacccatggcctctgctacattgtttttaatccagtctcaaaaacaaaatggtcctatcacagaaactctgcaaaaatacatgaaagagtaaagaaaaacatgtaaacattttacaattactctatccaaagataaatactgttaaaatgtcagtatgttcttacacaagtttttccatgcatatatgtgtagatttatatacattaagattgtattatacatagaaaataaatttctggacagttatataacctgcccttttcaaaatatatctaggaaatctttctatgttattgtgttgtcttctataacatgattttcatgactttactattatagtctctaaaaaggatggttcata

SEQ ID NO: 274063 - DNA, 407 bp, Homo Sapiens
  misc_feature (89)..(89): n is a, c, g, or t
  misc_feature (99)..(99): n is a, c, g, or t
  misc_feature (131)..(131): n is a, c, g, or t
  misc_feature (301)..(356): n is a, c, g, or t
gcttggcggaagcttaacctcccgcagatgctaagtcagggtccagaacaatcagccttctcagcaggaaactgtgtacaccgcccccnatttcttccnaatgccttaatttcatggaacaaacagaagcntcctattttaaaagggggtgtgttcggtcagatgtgattgaccacaggtgctaggaactgcctttcattctaaagccatcttaaaaccagaaggcttcccagtcacgtgtggtggcgcacacctgcagtctcagctgctagggaggctgaggtgggagaggtgcttgaannnnnnnnnnnnnnnnnnnnnnnnnnnnnnnnnnnnnnnnnnnnnnnnnnnnnnnncacagagtgagacaatgctgctaccccccgaccccaccccaccaccgaaaa

SEQ ID NO: 274064 - DNA, 645 bp, Homo Sapiens
ctgtcttacctccacataaatcagccttatttgtcggaggtatgcgtctcctttttagaggcttttcaaagcatttacctgattttcaaataagtaataaacctcttggtagtgggcacttactttgtctctttacataaagtaaattataattacaacatagaaaactagcataaataagtttagcaacaaacccaatggatatagtaagcaaaacagcctaaccgatggaagtagaagggcgcaggcttaacagagtacctgagcaaccacaagcgtgtagcaccccgtgagcaacattcagtatgttttacagaggaaaaggagagtctgttaatctatcaaatctgttaggtaaagatctgttaagagagcttctgctgtaaattctggaataatacatcagacatagggtgctttaaagaggatataacacagttaagtagagtgcttcagtggagactcttgaatagtagagtgataagaaaaaatttttatttcataattcttccttaggaatggcttaaccagaatgactacatgtgtcccagtatattagaaagatataagaaaccaaatgcattatacttttgggtatattactcagataatttgttacaacatttacatactcaaataactaaa

SEQ ID NO: 274065 - DNA, 446 bp, Homo Sapiens
  misc_feature (35)..(35): n is a, c, g, or t
atttggtgttaactccacaagaaaacaaacaaaanaaaatcagttactctggtgtacgtgaaatcagaacaatacaaccacgggaaaaacaatctcagcccaggaatggaaactggtacttcagtgctatggaaatgcaatgcgcttcataccacagtgcgtttcagcgtttgccaactttttaaaaatgctttttctttgtgatcatccattcacaaaactaaaaagccacactttcatctctgttgctgaaagcctctgagcttcagctacttaactatgaaaacaaataaatacataatttgtgaatccctttgctcacttcgaatccgtcccattcacctgtggaaggtgctgcatcttctcacctgtgtctgaggaagtgtgcacctttgccacctggagccctttcctaataaacagcagctgtccaaaatcaactgtgc

SEQ ID NO: 274066 - DNA, 173 bp, Homo Sapiens
aatgtcagaattataattatcttgagccttaggcccctcacatatttttctgtctcgtttgtgtaaacgactctgtcatgcttcagtatttgtgaaaagagtctgaaaattacagacacaagtgtttagaaatttccccttaaccctccctgaaatgacaataaacaaaaaaa

SEQ ID NO: 274067 - DNA, 463 bp, Homo Sapiens
  misc_feature (18)..(18): n is a, c, g, or t
  misc_feature (37)..(37): n is a, c, g, or t
  misc_feature (47)..(47): n is a, c, g, or t
agaatgaaagtccatttngggagtcttttccatgtcntaaaggattnaagttaaaaaaacaaagtgttacttggaaggttagcttctatcattctggatagattacagatataataaccatgttgactatgggggagagacgctgcattccagaaaacgtcttaacacttgagtgaatcttcaaaggaccctgacattaaatgctgaggctttaatacacacatattttatcccaagtttataatggtggtctgaacaaggcacctgtaaataaatcagcatttatgaccagaagaaaaataatctggtcttggactttttatttttatatggaaaagttttaaggacttgggccaactaagtctacccacacgaaaaaagaaatttgccttgtccctttgggtacaaccatgcaaaactgtttgttggctcacagaagttctgacaataaaagatactagct

SEQ ID NO: 274068 - DNA, 219 bp, Homo Sapiens
caatgtggtctaggcaggttaatggagaaactaattttattagctctctctggccttgttcttcacagcagtatccattaatgcacataaaagtagttgtaaaattcccaatactgcttttctcttcgggcctgtttgaagcaacactttccccaggacctgaagcaattggttgagaatccctgaaaattctcttgggcctatcccacatcaaaaaaa

SEQ ID NO: 274069 - DNA, 457 bp, Homo Sapiens
gcctttcaaaattccaatcactgtcttcagtaggtaatcccaaggaatattatgataaaagataacataaaaattcagatatgatattcctgttatttagaggttatatttaattttcctgtaagtcaaagtattcaaatatgtttcaaatatatttccaaaaatataattccaatcaaacttaaattggctttgtttatagtcggaacagtctatgttaactacgtttatcccatcttccataacatattaggggaaaaagcagactaagtgttgtcaagtatactcatttgatgattgctgatcggatttagttttaaaggcaccttttaatatacaaataaattaaaattctcatgtagaagatattacagagtaaagaagtagctctgaaacattggggtttctgaataatctggaggtccttgttaaaatggcagatttcccctcccactcc

SEQ ID NO: 274070 - DNA, 708 bp, Homo Sapiens
  misc_feature (528)..(528): n is a, c, g, or t
acaacgtggcaaaatcctttaatccaaaaatgtaacattaactaaacattaaattatagatacaagactgtttggtcaactcttgatgtgacaaaaactgagaagggaaaactcatttttctgattttttattttcatttctcttctagactacttacgaaatgttttgttttaactggtcttaggtaaggcacagacattaatatcttttaaaaggtacctaagtgattgtggtgaactgttagtgttgaaacccagtggtgtggaaccagccttccctgtgtccatcaacagaatcactgggcccccagtcacccagcctcggctccagcctcatccatgtccccatccatgaccccatccgggctgctgctggactgctgcaatagtctactcataattggggctttcctagtccatcctacctgttataaaagtgtgacgtaaagaaatgatcattgaaaacaataaaccaacacaggcaaactatacatttatataaatgtttttcttttaaagggagaaccnatttaaccccattcaggggctagtggcttgctttaaatatattgccacggtatcttcagaacttttctgtggaagccagatctctctgcatgacttgagttttggtgactgactcctgtgagaatgagccatttccaagttcactgtcatttgcagccaacagatctactggctcgtgcc

SEQ ID NO: 274071 - DNA, 462 bp, Homo Sapiens
tgtgattcgaggcatgtaatcataatcctgagctgtcagcagggcagtgattggtttccagatttcaagtccatgaaacaggtagccagggttggggaaaagaatatttccgggaagttaggaggcctggttgagtcttggatcttcagtgactgatgctgtgaccatgagatactcaactcaccactggtgggtctcagtttcctcatccataacatgaggagagggacacagtgctctctccggccccccagctgtcaggtctctaaatctattactgtgccaccgtgaggagatggctgtcacgtgagttctgcacggtattggcatgttcccttatacgagggtggctttacacatttgagcatggcaaagtttaagtggcccctctttcaaccaaaaatgaaaacttttcatacatgatttttagcagaatgtatacaaacgaccatcaaaatggaa

SEQ ID NO: 274072 - DNA, 425 bp, Homo Sapiens
  misc_feature (358)..(358): n is a, c, g, or t
gagatgaggtcttgctatgttgcccaagctggtcatgaactcctagcttcaagtgattctcccaccttggcctccaaagggctgggattacaggcatgagcaccgtgcccagcctattgtgtggtcttttgtgactggcttctttcacttagcatcgttttcgaggttcatgcatattgcaggatgtaccagaacttcactcccttttattgctgaataacattccattgcatggacacagcactaatatttcggtatatttgaagtttgtacacgcttgtgtaggatgaagctccttctctgttcctcacatcaccacaaccccagtgtgtgcatttggggaggtcagttggaatgngccacacccacccagaagagacttcttgggctaagcaggggaggcgtggatgatgccaccttctttt

SEQ ID NO: 274073 - DNA, 476 bp, Homo Sapiens
  misc_feature (35)..(35): n is a, c, g, or t
  misc_feature (136)..(136): n is a, c, g, or t
  misc_feature (286)..(286): n is a, c, g, or t
  misc_feature (367)..(367): n is a, c, g, or t
tctgatggcgttaccttgcctctcacccagggtgnccatggaaatgctcctgacttgcatctctcacctactttccatgtcccccactggggacgctacaggaaacttctgaaactgtcccctcaggttcaaaccnatggggaaccagcaagggtggggaccctcagaccctctgtctcaaccaccttgtgtcacatggtcatctctaccacccctcaacccccacagctgctaacttctggccgtgaaacaagtgttctcctcccataaggtcccaaatgggacnacaagttttattgctctagggattcttccaaacttaactggactctgaccctgacctgttcgaggattttgagaggagccnaaaacacgtgcctggcccctgtaggcatttgacattgcaactcctgtgccaacacatgcattcactaacaaagctattaaaaaaataaaacagacttttgagatcaaag

SEQ ID NO: 274074 - DNA, 441 bp, Homo Sapiens
  misc_feature (174)..(174): n is a, c, g, or t
  misc_feature (227)..(227): n is a, c, g, or t
  misc_feature (238)..(238): n is a, c, g, or t
  misc_feature (296)..(296): n is a, c, g, or t
  misc_feature (352)..(352): n is a, c, g, or t
  misc_feature (362)..(362): n is a, c, g, or t
gtccttcaaaatacagccggctcagaaagtgtctgaagaagcagttttcctggctttttgataaagacggtggacaagaatgggcgtgagaagaaatagttgttaggtcttccttagtaaggatgggcttttgtccaagtctatgtgactgtgcaggtgcaggggttttgtctnggaggtgatcagtgctatcagtctaatgtcttcctgggctacatttgagtganggcaatgacanggaagcctggcccttcaagtccctaggcaacgaaggggatgctgcatacaaggcctgnttctaggcatactccatgaatttctccctttttaatcccccatctactaacatttnggtctcactngtgcttaaaggttttccatgaacacccaggggtctttcccctctgagcttgggccaggtctccctgtgttatgaaacag

SEQ ID NO: 274075 - DNA, 491 bp, Homo Sapiens
  misc_feature (379)..(379): n is a, c, g, or t
gctactttctggcaagcagccatcaaattatcccctttgtgtttttctgccttctagaaaactgaaaatgctgtctgatatggtcactttttcagtttccgtctgatacactctaggattagcagggaatttcatggaatgcagttgacagggagatcaataactgtagaagccagaagttctaggaagataggaaaaaacttaattttgcaggcagtaggaggggagacgtcctgaatactgggtatggtgcttgattctgtgcatatcatctcatttttccatccacaatagccagaagtaggtactattacctttacattttgatgaaatcgtggctcaacttaatgacttgccatggggtcctagtacctacttntttctatagtttatactatgtccataaacataaaggataagttaggcatagaggagtgagaaagccgagtaggaagtttgaacttgaaggagagggaatgactttgtgtatt

SEQ ID NO: 274076 - DNA, 591 bp, Homo Sapiens
  misc_feature (36)..(36): n is a, c, g, or t
taagagcattctctccgttgcctctcgaggaggagntccgaagtcctggagtattgtttgggtctcggaatggcgcataacctgcgctgaccagtttaggggcttagcagatgcctgccagctgacctcgttggcaggagggttgggtggagatgtttttagcagagcttccattagtgtagacctgtagccacctgtcagaaggtgggtggcatattggggacctgggaatgtgtgaaggaggagatcaaatttcagtggctttggacagaaaagaaggctctggatttaagcgggtggtcacctgtgagaccaggtctaccttgggactgttatttaactgaatcagttatttccttgaaatttcacagtagtgggtgggcctgttttaaggctctgacagataccacgaaacatgaagcacgtggaacgtacgaagacccccggggtctttctgagtgcaaggctgaaatggacaagggctactcacgggggtggagggagccggagcctgccttgtgttccttttttgacttgtgacatttttcaaacacataattaaaaggacttatctctgctgtctcaggacat

SEQ ID NO: 274077 - DNA, 444 bp, Homo Sapiens
  misc_feature (26)..(26): n is a, c, g, or t
  misc_feature (28)..(28): n is a, c, g, or t
gaaaattctgctgttgttagctttanangctgtgattctgagtcaaacgacaacttccttcttgccacttatcggtgccaggcagatactacaaggctggaactcaagattcgctcaattgaaggccagtatggacacgtacaagcatatgtgactccaagaattcaacccaaaacctgtcaggtccgccagtaccacatcaaacctctttcactccatcaaagaactcactttattgatcatgacagacccatgaatacactgaccctaacaggccagttcagttttgctgaagttcactcctgggtggttttttgtctgcctgaagttccagaaaaacctccagcaggagaattgtgtgacattttactttcagaacacctttctagattacacaacttgaaagtacctacagaaaaggagagggagtttttaaatctgaca

SEQ ID NO: 274078 - DNA, 458 bp, Homo Sapiens
  misc_feature (41)..(41): n is a, c, g, or t
  misc_feature (96)..(96): n is a, c, g, or t
aaaggcaccctgcaccatcttggaaggactctatggttagnggacccattctggaatacctggcccatatttcttttcaactggctatttccccanggatcatgtaagagaagctgggcagaaagataaaaagattacatcagtcatgattcatgaaccagtcactgaatcagttgacaacaaaatttattgcacagaatatttctgtattttgtcaagctacttttaatatttaattcttttacttgataaaatgcaagtatattaagaaataagtatactgtgatgaattaatctatatatatgaacaaacctggtataaaatgaatgtaatctatgaacctttagagcttagactgtatttcacacaaataattgtcatgttttgttgctattgtgaattataaaaatgcagcatttaaaatttttaaggcaaaatttaataaaggatatacagt

SEQ ID NO: 274079 - DNA, 648 bp, Homo Sapiens
  misc_feature (438)..(438): n is a, c, g, or t
aaaataaatacattttaaaataattggaggatagaaggattacttttaaaagttctgttagtttgccagtacagagcaaaacagaaaatggacacatttttttcgatcagcatcctctgttctaaaaacttatttcacataagggaaagaatatgcaaagacatatatatagatatagacatacacccactccaaaagaatagtgatatctttctgggtaaataatatccaaagttggaaaagaaatcaaatatccattgaaagcaaactaatcttagggggataggattcacatttggaatgatctcatagttagtttactggatttctgttctggtcaacctaataattgtcttgaaagtgagatggctactgacattctagggtatggttagggagaatattctttatttttaaaacccttacaagattttttcnattttttaaaataaaatgtcttatttgttaaatatgatggttatgtaggtttactcaaaagtgattttttccattgctctttattattttctgcatctctgtgttacagctgaaataatttttagtattttctttagtgcaggtctgctgaagataaattctctcgagttcttgtttgtctaaaatatctttgggccgggcacggttgta

SEQ ID NO: 274080 - DNA, 510 bp, Homo Sapiens
  misc_feature (13)..(13): n is a, c, g, or t
  misc_feature (31)..(31): n is a, c, g, or t
  misc_feature (76)..(76): n is a, c, g, or t
aaaggtataaaantgttgctttaagaacttngatcctgctttgacacccagtccccaaatatcatcctctagattngaaaatcaccgaatctttctgctggatatcaggaaaaataattagaaatacccaattaatcccaaagaagtgtagaaacatctgcattaaaacaaaaagatcgttctgtgtctctttctcctccatgacaggtaactgaatggttcacatcaggtaagcagaacatccatgtcccagacagcagggcggggaggagccctcaccaggaagagtgtctctcagctgtgatcccagcactggggctgaggatggaatcactgctgactcactagcaagcaccaagctgctggctgagctatcatttcctataactcattcatctgacactgcagaaagcaatttctccccatgccccaccccctaccactctaatcctcccaaaataaagccctaccactaactgcttcctgtctctgcataaagctgtatttctg

SEQ ID NO: 274081 - DNA, 513 bp, Homo Sapiens
  misc_feature (83)..(123): n is a, c, g, or t
  misc_feature (321)..(426): n is a, c, g, or t
tcgtagagaggtttgggggtgagtgaaatgcctgtagatgtgagtgttggtctccatgtttatctgccacatttgtagaaagnnnnnnnnnnnnnnnnnnnnnnnnnnnnnnnnnnnnnnnnncattcatacatccactcttacctcggcacccagaggatatgcatctactgttagctgtttgggatatttacttttcatctttttcatttagtcatttaagaatacttacaaatagtgcacagacactctctcattagatttaatgagtattgatttatttctctccactgaattagtgctgtaatgaattttttttannnnnnnnnnnnnnnnnnnnnnnnnnnnnnnnnnnnnnnnnnnnnnnnnnnnnnnnnnnnnnnnnnnnnnnnnnnnnnnnnnnnnnnnnnnnnnnnnnnnnnnnnntgtgaatagccactgcagtgcagggggcaggtgtggaatagaccccatttcaattaaacaacaaaaaaataacaacagataaaaccg

SEQ ID NO: 274082 - DNA, 1075 bp, Homo Sapiens
  misc_feature (253)..(253): n is a, c, g, or t
  misc_feature (323)..(323): n is a, c, g, or t
  misc_feature (725)..(725): n is a, c, g, or t
  misc_feature (865)..(865): n is a, c, g, or t
actcctgtatcaaccatgagttcttctcagcctgtgtcacgaccattgcaacccatacaaccagcaccgcctcttcaaccatctggggtgccaacaagtggaccatctcagaccaccatacacttactacctacagctccaactaccgtgaatgtaacacatcgtccagtaactcaggtgaccacaagactccctgtaccaagagctcctgcaaaccaccaggtggtttatacaactcttcctgcaccaccangctcaggctcccttgcgaggaactgttatgcaggctcctgctgttcggcaggtcaatccccaaaatagtnttacagttcgagtgcctcaaacaaccacatatgttgtaaacaatggactaaccctgggatcaacaggacctcagctcacagtgcatcaccgaccaccacaagtgcatactgagcccccacgccccgtgcacccagcacccttaccagaagctccacaaccacagcgtctgcccccagaagctgccagcacatctctgcctcagaagccacacttgaagttagcacgcgttcagagtcaaaatgggcatagtactggtcatggagtgtcctggaggtggatcgaagctgtgccactgttgatagctaccatctctatgcttaccatgaggaacccagtgccactgtgccctcacaatggaaaaagattggggaagtcaaggcacttcccttgcccatggcatngttactctcacccagtttgtatctggtagcaaatactactttgcagtacgagccaaggatatttatggacgttttgggcctttctgtgatcctcagtcaacagatgtgatctcttctacccagagcagttaaaccttggngcctttatattttcctcttttaaaatttccaccttttggtcttgtttttaatcttgtgcatgataccccatgtaaaatccaccttgtgcaagatttcttggacagatgtgtgtatacactacatttgtttataaccagaagcaaaataaactcagcccacaaagctagaatcttttcctggacagtttaggctttggggtttggaaatgt

SEQ ID NO: 274083 - DNA, 576 bp, Homo Sapiens
caattaccggtcaccggattaaaagtggagttttaaatgtctggtttatactagaacagtggttctcaaagtgtggtccctgggtcgccagcagggaactcatcaggcatgcacagggagttttcagaagcccctcccaacggcctctgtgtgtgcggccagagagaacccatagcaccagaactttcaatgctaattctctagcaaaacagtaggcaagaaaataaaaacttctcctgcctccttaactccgtagtcaaatttttaaaagaagattctggttctgaattcatcttgaggatatgtaatagctaatatgtaatatgaatagtctagcaactcatgcaaacatatcttaaactaatgaggaagtatcaagtcccagagatgagagagtggggacctccgaggtcctactacatccatagctaaccatggtcttaagtgctgaggaaaggaaactcagctcttacagtactgggcccaagagacaaagcccggtcctgcttgtttctgccatgagacactgggctttgagcacaggcaagtcccaaaaaagcaaaccaaacgcaccga

SEQ ID NO: 274084 - DNA, 526 bp, Homo Sapiens
  misc_feature (179)..(179): n is a, c, g, or t
gaaagacccagaatagctttccagacacctctcccgcctttatctgcccccatctgtcccacccatccccatcagttcatccctgttccttctcaaaatgaagatttgcgcagtggactccagccagcgccccttggtgaaatggtgtctcccaggattgcacctctgcctccacctcnccctactaccacctttggctactaactatcgaactccttatgatgatgcatactatttttatgggtccaggaatactttcgatcccagtcttgcttattatggttcaggaatgatgggcgtacagcctgcagcttatgttagtgctcctgtcacccaccaactagcacaacctgttgtgaatacggttggacagaatgaactgaagattacaagtgatcaagtgataaattcaggattgatttttgaagataaaccgaaaccttccaaacagtcacttcagtcttaccaagaggtttgcagcagcagattcgggaaagagaagaaagaaggaagaaagaacgtgaag

SEQ ID NO: 274085 - DNA, 628 bp, Homo Sapiens
  misc_feature (255)..(255): n is a, c, g, or t
  misc_feature (344)..(344): n is a, c, g, or t
acttgctatcagctgaagcctggcctccaagaagagctgctccatttctatctggagaagggatgagggcattgaagagtcgtggaaggcagctgtgacaggctactttaaaggcaacgcaaacatttgagacgccatgtcctgcaggcctcatttcctccattctgtcttgctttctttcccagccctgaaacccaggtctttggtctttttcttctgttgcattcccttctcactcggtttccttacgaccangctcagcagcaataacaggaatggagagggaattgtccacattcacacgtacaatgctctggttttatcaaggtctagagccagagagnactcggaatgttaatggggccctcatttcccaagcagctgtcctctggatagcagatggcagttgttgacaggagagtgacagcaacctatgtgtagcctggccaaggtatgatgcagatttcagccagtccccagaagccaaaaacacatttgacaattggaaacatcctcataccctatggacaatataatgctgcggtgtctaagggctgactcatggcccaagcatgggcctttcttgaacccttggtaaagaacagagaaatatattctctccatctcc

SEQ ID NO: 274086 - DNA, 362 bp, Homo Sapiens
ctttccataaggcctgggggcaatcttgtccatctcattcgaagaggaagagggagcgccacaggcagtgaggttcccttggacccagctcttcagatccattcttgtagcgctcgatgtgcctggggtgggggaagtggaggacgggagaaaagtggtgcacgctgggggcttcggaggccgccctggaagaggtagtgcgccagcagggagctgacataggatttgccggtgccggtccagccgtgcagggagaggaccagcggcttggtgggggctgggtcccgcacaaaggccttcagcgccttcaccaccagcgcctttgccagatgctggccggccaggtgctgagccaggtcaca

SEQ ID NO: 274087 - DNA, 328 bp, Homo Sapiens
  misc_feature (309)..(309): n is a, c, g, or t
atggctcaactgatcctcccgcctcagtccctcaagtagcacccagctgcattttggatttttgaaacaggggatattcaactcacagtaccaaagtagtaatgaagccttttaaacttttattttaaaaaattacaaaggccctgtgtatttccttatctgagatgtttctagacgtaccgcttttgtaggctgaatttaggatatcttatgtccgatctctgccttcaaaatactagtttcattgttgattccatctactcttaatagtttagcttcatatttgtattatggatgaattccaagttntctataatattcttccagt

SEQ ID NO: 274088 - DNA, 541 bp, Homo Sapiens
  misc_feature (105)..(105): n is a, c, g, or t
  misc_feature (294)..(303): n is a, c, g, or t
  misc_feature (402)..(402): n is a, c, g, or t
  misc_feature (407)..(407): n is a, c, g, or t
gtacagctggccctcatgagttctagctcctggaatcagaaactagaaaggggacaggacgcaaaacagttaccgtttcaaactgtgaagcagcaaggcctctgntctctgcatctgtctttcactctatgcatgctccccctgctccattactactttggcatatcctaaatatggccactccagccccagctttaagtggcttccttaagtcaaattgtgcccaacagaaagtgtctctctgtgtaactatattcctacgacaatagagcaagccttcaaaattctgtgggnnnnnnnnnntttacctagaattatatattcagccgaaactataaacccaaatgtaaggaaagaaaaaagacactatcatgagatgcaatgactcaaaaaaatttgccnttccnatgtgatcttttcaaagaagctaccagaggatgtgcttcagtaaaacaagaaagtgaatccataaaggggataaaatgacgatacaggaaacaaggagtctaacaaggaagttctaggctggacacagtggctc

SEQ ID NO: 274089 - DNA, 439 bp, Homo Sapiens
  misc_feature (12)..(12): n is a, c, g, or t
tcattgcacgtntaatgcttcatgcagtattcagagcagagataaggggggggatggctcacaggtccacagggacgtcacaggcacaggcgggacacggcgacgtgcccggggcttgggcggggagggggaccccacgcatcgtaaccgccagcaggggaggggctgcaacgagcagctacggaccaaggacagcctccccgggacgcacgggacaggagcaacatcgggtgaactgcaatgacctcgcttgtctttcgggggaacccaggaatcccctgggaagcttctctgcactggcctgcaccctttcgggcctggctggctcacgtcatcactgcgggatccaagacacatttaagggacaagtcggttgagcgggtcggggctgtgtggggccgcggctggcttgacttctgctttcccccaacctcgtgcc

SEQ ID NO: 274090 - DNA, 567 bp, Homo Sapiens
aacttgtaagttcaggagtacaactagcagggtagtgcaggtttattacataggtaaacatgtgtcatgcgggtttgttgtatatattatttcatcaccctgggtgattcaggaagaataagtatccattattcttcctgatcttctccctcttcccatcctccacccttccacaagcggcagtgtgtgctgttcccttctatgtgtccatgtgttctcatcattcagctcccacccataaagggagaacacggcagcatttggttttctgctcctacactaggttgctaaggataacggcctccagctccagccatgtccctgcaaaggacatgatctcattcttttctatggctgtatattattccatggtgtatagagtttcttaaaagatctcatttctaagctattttgtaaactgggacacacctaatgtatttttagttaagccaggattcaatgcaaacagacctctggacctccaactccatttttttcccaaacatggctacactacattaataaatctctataactctagtcccaagatttcaaatccttgtttcc

SEQ ID NO: 274091 - DNA, 712 bp, Homo Sapiens
  misc_feature (39)..(39): n is a, c, g, or t
  misc_feature (460)..(460): n is a, c, g, or t
  misc_feature (487)..(487): n is a, c, g, or t
  misc_feature (559)..(559): n is a, c, g, or t
  misc_feature (658)..(658): n is a, c, g, or t
gggagagcgtgggtcactgcccctcctgccagcggtctntcatggtcctgctcctcaagggcgtacctttcaccctcaccacggtggacacgcgcaggtccccggacgtgctgaaggacttcgcccccggctcgcagctgcccatcctgctctatgacagcgacgccaagacagacacgctgcagatcgaggactttctggaggagacgctggggccgcccgacttccccagcctggcgcctcgttacagggagtccaacaccgccggcaacgacgttttccacaagttctccgcgttcatcaagaacccggtgcccgcgcaggacgaagccctgtaccagcaagctgctgcgcgccctcgccaggctggacagctacctgcgcgcgcccctggaagcacgagctggcgggggagccgaagctgcgcgaagttcccgccgccgcttcctggacggcgacnaggtcacgctggccgactgcagcctcntgcccaagctgcacatcgtcgacacggtgtgcgcgcacttccgccaggcgcccatccccgcggagtctttgngtacgccgctacctggacagcgcgatgcaggagaaagagttcaaatacacgtgtcgcacagcgccgagagtccgcgtggtaccggcccgccgtgcaccncccgtagcgccccaccccgcttctgtcgcccaataaaggcatctttgtcgggat

SEQ ID NO: 274092 - DNA, 319 bp, Homo Sapiens
caaattgaaccttcctggcaagtggcaaaacacctgttaagttaaatgggggcagcaggttgtgctgtgctaaaggtgtgggtgttctggaagcttgataagtggcagggacttagcttttcacccaaagcaggattgttgcccaagcatctccctcccaggtctaggctccttctgaggaaggagtacctcgagaggatagcacagataattgaacagagtctggagctatgggttccaatacagttgtcactagccacttgtcgcactgaacacttgcattgtgactagttcacactgggatgtgctgtgaacatga

SEQ ID NO: 274093 - DNA, 331 bp, Homo Sapiens
  misc_feature (48)..(48): n is a, c, g, or t
  misc_feature (51)..(51): n is a, c, g, or t
tcaacagtaactgtctttgagaaagtgagcaaagtgaaaacgagttcnttnctagacaaagacgtttaaatcagctattgtaaatatattcaaaaagctgaaactaagtctaaagagttaagttatgagagcaatacctcaccaaatagtgaataccaataaagagatataaattataaaatgggaccgaaatagaaattttggaattgaaaagtagaataactaaaagaaaaaattactagaggggcttaacagaagatttgaacagaccaaagaaagaatgagaagacttgaaacaggtaaattgagagtatccagtcagaggaacaag

SEQ ID NO: 274094 - DNA, 429 bp, Homo Sapiens
  misc_feature (379)..(379): n is a, c, g, or t
tagtttatggagtaaatagtagatctcaaataactaataagagatagtgaaggcttatgtttctatgttgtttagatttaaaggccatgaggttgtctctgggcctcagctgggattcctgatgacacgacactgaggaagacatttaaatattaattcttaccaaagctgtcttgtttcagccctattttttgaacttccatttgtttatgctgatggatgacatgcaatagtaatagatgttttgagaaatacatggctgcagtgtgctcttgtttgggaaaaatctgttaacgtcagccaaattgcttaaacctagcactgtttaccttccttggttttataatacaaaaaattatctagaaagcatcctgatttngccttttagttaatttgaataatttaagaatgaactagcgggccgggcgc

SEQ ID NO: 274095 - DNA, 317 bp, Homo Sapiens
aggggggatgctggagattgtaatgggtattttggtagttttctcatgagtcgtgggcttgtcagtgcatattggtgtctggaagagctctttcaagccagccaagtcttctaggggttgggcttttcccttaggagttcttggctgcctcttgctaccagttacacttgctgctgggtccagtttctgttttgcagtttccctgaacacgttgatgcctttatcctcatctcctggtactttgtctgtgtgtgtggtctgtgtgagctgcttcagggctgagagctcttccactatatcccttttccccaaaggtg

SEQ ID NO: 274096 - DNA, 814 bp, Homo Sapiens
  misc_feature (35)..(35): n is a, c, g, or t
  misc_feature (120)..(120): n is a, c, g, or t
  misc_feature (188)..(188): n is a, c, g, or t
  misc_feature (280)..(280): n is a, c, g, or t
  misc_feature (310)..(310): n is a, c, g, or t
  misc_feature (339)..(339): n is a, c, g, or t
tggagtcgatatttgcagtcaatggagcatccagntaggaaactggattggaccatttgaagagtgagtaaaagtgaggacgaggttaaggttgactgttttgagtagagagcttcaggnaaggattgttctctgggttcagggagccagctgaacctaaaggaaaaggctaaagaagctgaagaganggaggaggacctgtgaaccagagatgctcagtcattattagcgaggaaatacggagagcccctgtgtgcagtggtgactactcatgcaaaantgtcacacagccaatatttaacacagccangtatttcacacagccaatatttattagtnacatagcatataccagttattactctaggtcatgagaatggagtgataaataaaaatgaatcccagtcgcccatcactatatgcccatggtaaccattttgcaatgactgtggatccaggcctatgaaatttcagtattcaatttcaataatgatcctgttggtatctgtggttatttaaaaacatatacatctctggaatctaaaatttgagaggttataagtaacacccagtattacaaatttagtgctggaaatcagattgcagtttaaatctgagcatatagaaagtccgtttcttctatgtcagcagatgctttttgtgtgaggtttaggtatactgcattatttgacataaaccagtgtttctgccctatgtcttcagaatgacaattctttatgaaactaatagaagaacagaagacaattgcaaaatcatgatgaagatactaattgctttagaattaaggaataca

SEQ ID NO: 274097 - DNA, 604 bp, Homo Sapiens
  misc_feature (57)..(57): n is a, c, g, or t
  misc_feature (67)..(67): n is a, c, g, or t
  misc_feature (90)..(90): n is a, c, g, or t
  misc_feature (120)..(120): n is a, c, g, or t
  misc_feature (319)..(319): n is a, c, g, or t
  misc_feature (371)..(371): n is a, c, g, or t
  misc_feature (387)..(387): n is a, c, g, or t
ttgagcccaagattcgcacgagaggaaggctcagcttccggggaggccgaacccacntgacaaggantactccttgcccttccttcggtntccaccttgctctggagtcacaccaccccngaccccaaacaccatgggcgggccagccaccgggacagggctcttctcggtgactgccaccgtagggaaaaccaaagggaaggaccctgccccagcccagcctcccccagctaggaaacagaaccgtgggcagagacgtgaccaatgccatccccagccccaaacacttgaccgccccaatctctctttctaactgagnaaggactttgtggtacggcagaggcgggggaaagagagtttgcgtagcagcncctcacaaaaaggccnttgtaacggggagggcccaggggcaggactgtggagacccgtcctgaacgggcgactgtgtcttgactacctttcgaaaaccagcactgtgtgggaatgtccgcctgcagagctcggagcttcattgagacaggggagagagaaagacaaagaggggaccttcttccagatgccttcccagttgtaaccggtaaaactgttaccagatagtgtttgt

SEQ ID NO: 274098 - DNA, 199 bp, Homo Sapiens
ggagaagagggtaacaaatttcattaaaataatccagtcagttagtaaacaagcagataacaataacaagcccagttggtcaggggtggtagggggagagtgggctagtacccacattgttacaatatgttatctaaaatgtccaatttccagtaaattataagacatgcaaagaaacaggaaaatatggccaggtgtg

SEQ ID NO: 274099 - DNA, 553 bp, Homo Sapiens
  misc_feature (76)..(76): n is a, c, g, or t
  misc_feature (414)..(414): n is a, c, g, or t
  misc_feature (500)..(500): n is a, c, g, or t
ctcttgactataaatgcgcatcatttgatgagatacattcagggaatctcaagtatgtaaccacaggtcatctgcngagtcccctaaaatttatgttacatctacctcctaatctgtggtaaggacctacattgccatgccatacccagaaaggtgcctactgtagggaaatgcttaattgcatcccccaagtggagcatttaggaggttatgtagcctatttgccaggactggccagaatctggtgtcctgagtttatatgtgccctggagttttctttgccccttgactgacaggctcatttaccaagacttcggtggcttcctgtgctggagtcattcatctttgctttgggtcccaagtcctggcactgtaagacaagaatgtcgtgggcctctatgatgatgtattcangttgtccttacctggaaggcacaagtctgattggggttttgaattccactcatgctatttctatggacatccacatccataaaacnagagggcagtggtgtagtattaataaaatctgaggctgggtgcggtggctcat

SEQ ID NO: 274100 - DNA, 523 bp, Homo Sapiens
  misc_feature (212)..(212): n is a, c, g, or t
  misc_feature (281)..(281): n is a, c, g, or t
  misc_feature (327)..(327): n is a, c, g, or t
  misc_feature (385)..(385): n is a, c, g, or t
  misc_feature (388)..(389): n is a, c, g, or t
  misc_feature (398)..(398): n is a, c, g, or t
  misc_feature (426)..(426): n is a, c, g, or t
  misc_feature (428)..(428): n is a, c, g, or t
  misc_feature (443)..(443): n is a, c, g, or t
gcacctgacgtggagagagctcgtaggcttccccagtgcctcagccgcttcctggtggaagttaggtgctaatggaggtgtgttcaccttttagtgatatcactgcaggcctttgaggggcctgagagtgaatcagaggcattagagacaccggtgcagttatctggagcacaatttctttgcagggcagcagaatcagaagccagacttgnccatgtgaacctcgaaactcggtttcccggccgccatcaaccgccacccttactgcctagtcacacacngtcagggaaggctgccctcaagtggatgttggggttgagaccccangggtgggactttcacaagttttgccagcaatctctaccttctgacttctgcctcgcanganngtaaggatnaggggagcatctggcaaggggccatttntnagcacagtacatttnctgtctcagctctggaagactatgcacccaagcaccaaacttccaaccagagagagagacgtcctccgataacaaaaatc

SEQ ID NO: 274101 - DNA, 803 bp, Homo Sapiens
  misc_feature (351)..(351): n is a, c, g, or t
  misc_feature (399)..(399): n is a, c, g, or t
  misc_feature (622)..(675): n is a, c, g, or t
  misc_feature (737)..(737): n is a, c, g, or t
  misc_feature (753)..(753): n is a, c, g, or t
  misc_feature (777)..(777): n is a, c, g, or t
ggagattttgcagcagaggagacttaagttataccttaagttggctgtttttgaggtggctcttgtgcatggattgagttgacaggcagatagttgagcaatctggagagctttgaatgtctgaatatttcttagcatcttaactaggttagtagctccacggaaatgcaaaagattggtaacattggtgcctggtttgttgtcagggttggaactttcttgctttttcttttggactacttgtagagtgcttattatgtcccagccactccgtaattctatcctcacaggaatgaagcataggtacaaattattacacctgttttccagatgatggaaactaaaggtttnaagtggctaagagaaacctttttgtcctccacctgtgctgctccttcntctttcctgtccaggccttcttcccattcagactcactctctcattgacctctcagtttcccttcaccagcatctccccatctgccctcttttgtctgtgtctaccggtgtatcctttgctcaggtcctcatctcttcatatcttggcaacgtgttgtgacactctccatgccatcatttggactctagaattgttttatctaaacataattgggtcatgtcnnnnnnnnnnnnnnnnnnnnnnnnnnnnnnnnnnnnnnnnnnnnnnnnnnnnnntgagggcaaaaagatacctcctaggcctggcgtggtggctcacacctgtaatcctagcactntgggaagcagatcgcntcagcccaggagttcgacgccagnttgggcaacatggtaaaacccaccct

SEQ ID NO: 274102 - DNA, 735 bp, Homo Sapiens
  misc_feature (270)..(270): n is a, c, g, or t
  misc_feature (305)..(305): n is a, c, g, or t
  misc_feature (350)..(350): n is a, c, g, or t
  misc_feature (356)..(356): n is a, c, g, or t
atagggagaattgcttaggacttgatgagccaagacttggaggcgaagaagtggttggagaaaccaccccaggcagaggaaccccaggggtcagccaatgcaaggctctaaattaggaagtactcagtgaggctgagaacaataaggcactaagttcttttaggttctcaggcctttgcacttatctctgcttcaaatgcctccttttcccttcctatctgggaaacattcactctttcttcagtgtagcctccaagttcacttgctcangtgaaggcccctctgatttctcccaagaaatggantggtgctaccccatcctcccgtgctcacaagcctccggcccacangctcanggattaagtttttattacagtgtgggctttaggttttcatatctgacttccccaccagactatgaaccaaatcaaaggcaaagattgcgtttcattgagctgtgcttccccgaacatcaggcatagtgcataagacacactcactccataaacctttgtatgtcaaatgagagatattatgtattaagcagtccaattcctcttttcactgtgcattcttcatgcaaatggcagctgtgtcttaggtgtttcccatatgtagcgacaaggtattatgtactataaggaataaatgggaaattaccaaaccccttctctaagcagaactgagggcagggatttcacatcaaacagaccatgaaataaatggagagggcta

SEQ ID NO: 274103 - DNA, 536 bp, Homo Sapiens
ggcacgagcggcacgaggaaaccttgcatcttacatgtgaaaatagccacagaactggaaaggatggtctgaagaggggactttcaatatttcccagcagattctcagacagactcaccttggcccattattggatcaaagtcaatataatattaggttaacttgacttatccagctggtgagatgcatcctgcagtcttgagtgcagaggcttctttgttttgtttggggttttgttttgaagtgttttgcattaccagaacaagagttcccaaaactcgggaagttgaaaggtctctttaatgggcacggatgaaaataaactgacatggcaacaaattatatttggcaaatagacatcggaaagcagatattcaggcttcctgggcagggcatagtcctggcacttttcctgaatgtgaataatcaagcacagggcagatcctggaggagcacacttgctccctattgcttgatgaagcaaggccttctcttttacctgctgttgggctgagcaaacaaagcccgaggtgagc

SEQ ID NO: 274104 - DNA, 882 bp, Homo Sapiens
  misc_feature (561)..(561): n is a, c, g, or t
  misc_feature (631)..(631): n is a, c, g, or t
tagtggtacatgataatgataaatgtttataattaatgccatcataaattcaataaattaaaggtagagcttcttcaaaagtcgtcatgcatatttgcatatcaaaagattcaagaaattctgttgaaaagacaccaatttaggattagaaaattaagagtttaggattcatagtctaaccaacatcattatccttctatcaataagccaccatactgttcagaatattaatttgaaaaacctcgtgtaacatttgcttgctattatttgatttacaagcttatttctgaaatgttatcttgtttatagcaggtaatgtctgctccaattttacaaacaatgcaaaggggaaaaaactccatcttctgaacagaatcctggcatattccataaagatacatagcacacagcatggattgttgtacataaacgctgttcagttattgggggctgcctttgcaggcctcttgcagaattcctagtcaacagatccctgcctcactctcctgacccgatgcacatggtcacctgtcttagctggtctgcttggccctgtgattnttcataagcgtcctatgagaaaccatcacgtcaattctggtaaacatgtaatgtgggtatagtagctacnagtggagactaacttcaaatggatcgtaagatttctaattagaacattggcgatttctcttgagtatggctattagggccctgtaactgttgggtagggaaaataaggcgctcgtgtgggtggttcctcacccaccaagtgggacaggggtgggtcttgtgagtttggagagtctccacgcgggggctgggagaataggccctctcttgcagtctggaattgtaaaccgcgtcggcggtcccacactaacg

SEQ ID NO: 274105 - DNA, 992 bp, Homo Sapiens
  misc_feature (291)..(291): n is a, c, g, or t
  misc_feature (496)..(504): n is a, c, g, or t
tgtcctagggagttggcttttcagccagggccaaaggaaaaagccctgctgcatttaaaaacaaagtgtccaagctgtcagtggtgtgtttacaatctctcctggcagaggttggccctttctctaatgccttctggaaggcggaaaatgtgggaactataaatcactaggcggttgccttgttttgacttgagacacccaagaggaacagtcatgtttctcataaaaatcagtgggatcatttttgaattccatcatgcctttgtatgtgagtgcaaaacattttaacangttttctcaaatcaacaaacagccttctcctatagctgtacttgcccccctccccaaaaaaccatggagtgagaaagaaaggagtcaggggcctgataaaaaatacagacttaatgagcaactcaagatgagaaaactgctctttttccaaaaattaccaactgctgattacagctgaaatggaaccaaatgtttgttttctgannnnnnnnnaatagctgtttaacaaattagtctttgctgagtaaaaggggaaatttctaaacctagtgcactgtttggccagtgtccacagcctcttttctggctgtggtttagagacaggatttgagctataggctcgctcgctgttctcatctcacaaagctgccttgactgtggcctgcagcacgagtgcgttcgtgcaggtcctctgtggctactgcgtcgagacagagcctgctcagtgtgcacagatcatgtgatgaggctcttagaggggtcaagctttagactagctggtttatggtagaagcgtctgcgccaaactgacgcttgtgatcttgcgtctctcgtgttcgtaaggcggccgcttggggttgttgcaagagagatcttttgtggcgcacgcttttttcgcgtaaatgttagaacagttccggctctggtttcggtatacagtgcacccctgacgccctttccgggcgccccctctcctacgg

SEQ ID NO: 274106 - DNA, 704 bp, Homo Sapiens
  misc_feature (69)..(69): n is a, c, g, or t
cgaagtcctcctctttctaatctccagagccgcagttccatcctctgggtcagcggcttaccctgactnggctgcggtatctgccttccttcccccaacaaggcgacaggtagtcggggctggggcggaactgactgagtgggccgcaactgactgagtgggccgcggctcccgcctgaggaggctaggaaggactgaacagcagccgacttcccaggctctaaaaatcgtgcctctgagttagagctacctcaaaagcaagaccaagcatgagaaatggagtcttttggccaagtattggggtgttcggaattcaagccgtatgagagaagtggacggtagcgttgagaattttcatttgaagatctcgtcttaaccaccccaagtgtagtccagaggcggcgttttccctgcgagagtgccctggaacaaagcaaggatagcgtgggttagacatacctgaaatgaaagcgtcttactttatctaggtacatatttgcgtcagtaagcgcaacgccatttctctcttggaattcagaagtgaaatatggtgactgggacgcctgtacgattgctttgacttaaaaattgaagtccattattctgaccgaaagttaatctgatgattaattggttaaacatactatcgttgctaattagcataattattatttaccaataaagtgagctaaatagctacaact

SEQ ID NO: 274107 - DNA, 345 bp, Homo Sapiens
gtatttaatgtactgtaatcagtaacaactgatactgaggtatcagttgttccagcttatctaactcagagaagctttatatccaagatttcagaaccacgctaaaaaggaaaaaagcaatttctgacatgaatatgttatacaaagtggcaaattttaaggaatatgaattacttcaggaatgtcttttcagaacaaagacaaaactaatcttttcatagtgagttactatcttcatataacatcacactcaaaggcagatcagaggtaaagccaaaattctatttattttaaaggatgccaaagctagaataacttttctttgtttaacacgtcaaatacaaa

SEQ ID NO: 274108 - DNA, 807 bp, Homo Sapiens
  misc_feature (374)..(374): n is a, c, g, or t
  misc_feature (683)..(706): n is a, c, g, or t
  misc_feature (732)..(746): n is a, c, g, or t
tccatctcacagatgaggaaattgcagaactgagaggttccctaactgtctaagggtcaggccacttaccactgctggcaagtggtagaggcaggatttgcgatgtggttccagagcctactccttaactaccatgcaattccgcttgttcatctttcgggtggttacccaccgggccttaaggtagtcttttcattttttcttgaatggagacagtctgtcagagttcgcaggaagtgtggtgtgctggtgacagttcacattccaagttaagcccccttaccacgagcttcaattccgttggtggtttacgtgtggggggtgctggtgacagtgttggtcaatactagaggggcatggctaggcagcagctncccagtcatttaaaactgaacaataaatagaacggggttgttaggggcggaacgaaggggcctagtgggaagtggtttctcagagggagatagttcagtcgcactagaagaatattttcttcagttaacctatgtgtaattttcaggcttatgagaagaaaggccctgttctcatcaccctcccttttgattcttctttggtctttttccatcatcccatctgcctgccctgagatgctcatctgaggcctgattccatcaggtggtctgaagaaggtttctatgaagtctttatgagctggacttcannnnnnnnnnnnnnnnnnnnnnnnctgagacagagtaagactccatctcnnnnnnnnnnnnnnnttgagtgcctactgtgtgcacatgtaccctgtgtgaccatgggccaggcacagtggttcat

SEQ ID NO: 274109 - DNA, 455 bp, Homo Sapiens
  misc_feature (101)..(101): n is a, c, g, or t
  misc_feature (113)..(113): n is a, c, g, or t
gatgctcttgtgaggcaaagggattgagatccactgcagagaagctggcaacaggaggccccatcattttttcagtgggcaggacatctcccattctgggntggaggaagacncaaggctttggcaaatactaaaatgcttgttcgtctattgctctttctttatgtccatcacagtctgggaaccagtaccttgaagcactatccttgattaatttataattttctgccctatactgactgcctaggaaagaggtggtcagaggtacgagagggtgaaaatactgttcttaattatgaaaacctatatctgttctgtgtatccatggataattttagtcttctaaattgatttgttattttccaagctttatttttataaaaagtcatttttcagtaaacatataacattgtcaagaactacctaatccatgtacataaaatgtcatgtgaatg

SEQ ID NO: 274110 - DNA, 627 bp, Homo Sapiens
  misc_feature (122)..(122): n is a, c, g, or t
  misc_feature (133)..(133): n is a, c, g, or t
acacccaatctaattcataccaggtggcaggctcagcaaactgaacccaccacaggtgtcagagatacttgagaatgactggtaccaaacaagacgacaaaggaggttgccttccctcccangatgtgcccanatggagtctgaactctggttctaatttgtggaggtgggtccctactgtatgacccattgtggtcactgctctttgagccatacaacttgagagactggctttggattggacagtccaaagggaagtgggcaaaaccagctgagaacccgggagctggatgcatatattctggaatcagggcctgcaaactcaaagattggtttgtggctggtgacttctctctgctaagtaaatcaatgaccattcattgagaactgatggggacccagcgtgtggcccaatgagtggcagttttttcctagccagcttctgtggccaaatttggaggattttccaacctgctatggctggacccttgggtgttaaatcactaaattccctttctacctgctctcttcttcctgaaacactcagagctgacttcttccttctttctaatcaacaaagacaaaactccaagccccttttcagccttcacacaatttttctttcta

SEQ ID NO: 274111 - DNA, 642 bp, Homo Sapiens
  misc_feature (57)..(102): n is a, c, g, or t
  misc_feature (417)..(430): n is a, c, g, or t
  misc_feature (434)..(498): n is a, c, g, or t
  misc_feature (619)..(619): n is a, c, g, or t
agagacagggtcttgctatgttgcccaggctagtcccgaactcctgagctcaaaggnnnnnnnnnnnnnnnnnnnnnnnnnnnnnnnnnnnnnnnnnnnnnngtgagccactgtgccagccaggcagttgagttttgactgtgacatccacaaagtcgtactattggcaactatgttactttctacagtaataaccagcagttccatagatttctccagggatagagattagcaatgcagaaatgatggaagacaggagggtaagacagaatagaagaatcagctagaaattcaagccctcctgccagatccccatggtcactgattgaaggctggaactccttggagaaatcctaaaacgaatctcacacttcctccaaacaaagctacatctaaacctggctgaagagtttgttnnnnnnnnnnnnnncgannnnnnnnnnnnnnnnnnnnnnnnnnnnnnnnnnnnnnnnnnnnnnnnnnnnnnnnnnnnnnnnncagaccacactcttgagtagcaaagtgttaatcgaaagtaaccatcctagctagtttcgtttaatggtggcacctatgtcattctagtacttgtcaggggacactactctttctctctccngcagtccctactatttttaccat

SEQ ID NO: 274112 - DNA, 697 bp, Homo Sapiens
  misc_feature (40)..(40): n is a, c, g, or t
aatgagctaatgagagagtgagcaagaggtggcttgattnggcgccctccttcccagtgcccggtctgtgatggcctcacatttgacctctaactgtggctcacactattcactctgcttgcattgctctcttcttcactcctgcattgcttcactaaaccccagccctaccaccttaaaactctactcacattttaagtctccttcaggatgccttaatggggtacgagttctttgtctgaaggctcacagcattcagtacttctaaaagttgtcttttttcctctctcaagagagatcccaatatcgtcttctcttccatttcctggtcaaggataagcactaacacctaagtatttccaaggtgggaattgaaagaggcctttccatccagcctgtattcctgtccccagacatgtgccagacctgtgctaggatggctgaattaaatggaacaaatgataacattagcatttgaatttggaatttagggtcaggatggttccatagaagctgctatagtttggatgtttgtcccctccaaacttcatgttgaaatttgatccctagtgttggaggtgaggcttaacagggggtgtttgggtcatgggggcagatctcttgtgaatggcttagtgtcatccttgctgtagtgagtgagttcttgctttattagttcccacaagagctgattgtt

SEQ ID NO: 274113 - DNA, 524 bp, Homo Sapiens
  misc_feature (26)..(26): n is a, c, g, or t
  misc_feature (34)..(34): n is a, c, g, or t
  misc_feature (48)..(48): n is a, c, g, or t
  misc_feature (64)..(64): n is a, c, g, or t
  misc_feature (72)..(72): n is a, c, g, or t
  misc_feature (80)..(80): n is a, c, g, or t
  misc_feature (103)..(103): n is a, c, g, or t
cgccgaactttgcttcctccggcatntccttgancggcggcggaaaanccaccttaaattgggnccgaaggnttagtttnaagagccaaagggccctttactnaaaatggccgaagcccttccgtcggcgttgttttaaaatgggaagcctcggaccctgtattgaaactgagcttgttcgaaggcggcgttgtgtgcaattcggattaatgaaggggaagggttttgtgtggaaaaacgccttggagtgtgacatttctgcgagaatgcttaaataccgatttcccgcaggaacaatggcgctgtcttcagtggcacagtggagcagctctgaagatgcaaagtgagggtcgctgtctgcccattgatagaggcccagattgtcttggaagttccaaagttgcaacgatttctggctagtgccacgaggtttacttgactgttgtgtgaaaagctgataagaaaaccatccagaaaaaagctcttcgttttacaaacatgaaaataaaacatgtaattttgga

SEQ ID NO: 274114 - DNA, 638 bp, Homo Sapiens
  misc_feature (207)..(207): n is a, c, g, or t
  misc_feature (530)..(530): n is a, c, g, or t
  misc_feature (538)..(538): n is a, c, g, or t
agccgcttgccttgccccccggagactgaagacatggcacccaagagggccaagagaaggacagtagagggcggaactccagcgtcttctccatgttcgaccagactcagatccaggagttcaaagaggccttcactgtgatcgaccagaaccgtgatggtattatagacaaggaggaccttccgggacaccttccgcagccatggnccgcctcaatgtgaagaatgaggagttggatgccatgatgaaggaagccagcggtcccatcaacttcaccgtcttcctgaccatgttcggggagaagctcaagggtgccgaccctgaggatgtgatcaccggagccttcaaggtcttggaccctgagggaaagggcaccatcaagaagaagttcctggaggagctgctgaccacgcagtgtgaccgcttctcccaggaggagatcaagaacatgtgggcggccttcccccccgacgtgggcggcaacgtcgactacaaaaacatctgctacgtcatcaagcacggcgacgccnaaggaccnaggagttaggggcaacaccgcggcctccgctgcccgacgcttctgttcggcccgacctccaccccggctcccaataaaatttaactgatctttgtttctt

SEQ ID NO: 274115 - DNA, 641 bp, Homo Sapiens
tatgaggaagagagaaacaattagaagttctctgtcacacaatctacacactaccaggaagttattctagaaaaaataacgttctctaaaacgaaccatgcaatctgacacccgtcttccacctctcagggaagagaaacttcaaaggcaggaggcagggcaatgcatgatgtgttctattgtcccaaggagacctgcctgagccttgaccctagtttctgatggctttccgtgttgagtgtagcctaagaagccagaaactgaatcttactggaacctttctgaatagggtttatttaatcacatgcactgtttcctgtttaaagcatttccccaaaatggcatagcacctcctctccaatggtggtcaaattgcgatgtgtacccttgggggaacttgaagaatttctatgatgtacatgggcaggaacagcttgaaaggaccaatttctgagtctcagcttccatttgcactccgtaaaattgacctacctgggaatgtgtctatggtctgctagtattccagtcccccttctcctagcatacaaaataaggcagacttctcacccatcccaaaacttttatgttgtgtagggtgcaggggtgaggggctgtacaaactccctgaaacgcttgagagg

SEQ ID NO: 274116 - DNA, 768 bp, Homo Sapiens
  misc_feature (686)..(686): n is a, c, g, or t
  misc_feature (724)..(724): n is a, c, g, or t
aataccttaaatacttcttgactctcttatctttaaggcttagaaggaaaacttcaggtgtgagcccagggtgtgtgctgggggtgggcgtggaggtcctgtggtgtcacggccctccttgtttgcccagggcccagtcacacagagcaggagcttctccgcctgaccgacgactcccccgtcgacctcctgtgtgcgcctgtcccctcgtgcctgccgtcccctcagctgagaccagaccccgttatcctccaatctgctgatctcattcagtttgaggagcgcccctcaaagagccttctggtggggtgacttccatgttgtcatggggattttcttcggggtttaaaacaaaaccacgatgagatactgatatagtaaatgacggaagtgggaagggactacccctttttcaggtggaaaacacttgtgctgattattcgaccttcttttccccacctgggttcctgcagaatgggattcacagcctgaggttgcctggcgagcatcaggcaagggcgatttggcagctctggagggctggtggctcggggctgtgggcgagtccacaggggtgggtgggcctcctgggcttctgctctcccagactttgtgaaggttcagctgctctcaggcacacctgtcaccagatgtacacgtcacccatggtgggggtccagatggcncaagggctttataaaggggtgaatggagggaggtgtcntgtgctggagccccggactctgcccagtgatataacagaccagg

SEQ ID NO: 274117 - DNA, 381 bp, Homo Sapiens
attgacatgatttggatctgtgtcctcaccataatctcatgtcaaattgtaatccccagtgtttgaggtgtggccaggtgggaggtgattggatcgtggaggtggatttctcatgcatggtttagcaccatcttcttggtgctattctcgtgatagtgagtaagttctcacgagatctggttgtttaaaggtgtgaagaacctcccctctgtctctcttgctcctgttcctgccatgtaagatatgctggctccccctttgccttctgccatgattgtaagtatccagaggcctctccagaagctgagcagatgtcagcaccatgcttcctgtacagcctgtggaaccatgagccaattaaacctcattcctttacaaatt

SEQ ID NO: 274118 - DNA, 556 bp, Homo Sapiens
  misc_feature (417)..(417): n is a, c, g, or t
  misc_feature (464)..(464): n is a, c, g, or t
  misc_feature (489)..(489): n is a, c, g, or t
  misc_feature (510)..(510): n is a, c, g, or t
ttaccacttattccagttcagggttggggtggctggagctatctcagcagcttagggtgcaaggccggaaccagtcctggacaggacatccactgcagaaagcactcacacttacacacacagctccacacaccagtgaacctcacgtgcacagctttgggatgtgggaggaaatcaagagtacccagagaaaacccatgcagggatagggagaacgtgtaaactccacagacagttttttttctcaacattatcttgaaacaacattattcaaggacctgctgtaatctgtatatacatggactttctggctgaaacataaaagagagcaacttattctcaagaaactatattttatggtaaacaattctcaatgcttaaaaagttttacgttaagcttaattggggaagccactncacattttttaaaaatgtggttggtgtcctttccccagatactaaanttgggggtttctttcctaaatccanttttaagagggggtatctttnccccatctttccggggtagtcataacttaaaaccttaacctggtac

SEQ ID NO: 274119 - DNA, 445 bp, Homo Sapiens
  misc_feature (22)..(22): n is a, c, g, or t
  misc_feature (29)..(29): n is a, c, g, or t
  misc_feature (36)..(36): n is a, c, g, or t
  misc_feature (65)..(65): n is a, c, g, or t
  misc_feature (88)..(131): n is a, c, g, or t
  misc_feature (387)..(387): n is a, c, g, or t
tttttagtagagaccagggttncaccgtnttagacngggtttgtctccatcttcctgacctcgtngatccgccttcccttggctttcnnnnnnnnnnnnnnnnnnnnnnnnnnnnnnnnnnnnnnnnnnnnaagaaggccattcttagcgctaagaggagaatggcttaggataatgggtagtaaggggataaagatactttatgaaacttgtgcaatattctagatttttaaaaagtgttggtggccaggagctattgcagtagcagtgaatgtaacttaaactcaaggccaaaataatgggggctggaggggacaccacaagcaaaaggagagaaaagataactcttaggttcctctagagaaattgggaaagacagcatttaantggaaatgcggagaaagactaggaaagaaaaggggaacaggtctgaggaagaaaccaa

SEQ ID NO: 274120 - DNA, 657 bp, Homo Sapiens
  misc_feature (309)..(309): n is a, c, g, or t
  misc_feature (503)..(503): n is a, c, g, or t
  misc_feature (536)..(536): n is a, c, g, or t
  misc_feature (545)..(545): n is a, c, g, or t
  misc_feature (564)..(564): n is a, c, g, or t
  misc_feature (567)..(567): n is a, c, g, or t
  misc_feature (600)..(600): n is a, c, g, or t
aaagcgggagaagagtgtattatcgttaggcaacattttaggatataggataaacactggtgtcctgaaaacgttcctggccgcaacactctcagaggtttgcattctcgagtttggagaccatggctctgaaagactcaactcactccactgatgccagccaccagctactgttgatgacttcccaagttcgtactttcagtccacacctcttcctttcgctgggcaccaaacttgtctacattccgagtgccccggcacacccccgggcttcgctttccgcctctcacagtaggaagcggcgagccntcatacgttgcccacgccgctcctcggctgcccggcctgggttttccaccctcgcccctggaatcggcctccctagattcccttccctcttaaaatcatttggaaacgggctccaaaggggcgaccctgcgcagaaaaccaaattccattccagggagggcagggagtgctagactccaaggaagacgtttccnacattcggtggtgaggagtgtttggcggcacgnacggccagngctctcaaggaccctcttntgngcagaatatccagtcgtagccacgaaaatacgncgcgtcagtccctgactcgaaaggaagtcctccagagagccgcactaaccatctagc

SEQ ID NO: 274121 - DNA, 653 bp, Homo Sapiens
  misc_feature (31)..(32): n is a, c, g, or t
  misc_feature (349)..(349): n is a, c, g, or t
cttcattctctagggcagaccacgcccactnnaggaaggaatgtacatcctgggaggcctctaagctccccagactcaaatgccagcagctcacatactggagaagaggaagcctggaatttacagggtgcagaggggctgggcagcagcttcctgccattctgcagaacctgtcagcttcaaagggaggctccactctgcggtggcaaagctgggcctgacccttctggccaagatgtcctggtccccacagctccccaagcgcaagcactttggcccctaacctgagcctgagggaacctgattctactctgcctcccaaagtgggtgatcctccgtgcaagggganggacagcatcggagattcacactgcttcacagagggatcttcagctgcaaggtcactgctgtactggggccacccttcctaagacagagagtccccagggccaggaggcacctgggaacccaaatggggctccacagaatacacgagcctccaaaaagtttagtattatgaagcatctgaatttttttctcttccagaatggctttaaaaagtagactcaggcccagagtcctcaggacatatcagaaaagctttgagagtgtcctgatccctgcaaagcctctaataaattggtcatttgggc

SEQ ID NO: 274122 - DNA, 430 bp, Homo Sapiens
tcattcattctgactgagcccaacccaatgctgcagcatatgggtgcagtagacaagctggctcctgttcctcaaatagaccctactatacagtcttttgaaagattaagatgtattttagtgttaaaaattaaaatattaaaacaacacccacaccgtgtaagggaaaaaaataagaggttggagaagaaagcacctcatctccttaaggcaggtccaggggcacccccatcccgccgccatgctgaggctggccaagggtccggggcagctgcaggtgccagggcccctggtagggcgggggcaagctcaacccttctgcttcaatagcaggcaacagcaaggcacacacacacccacgccgtcttggagaagggccccttcaggatgaaggctgcagacagggccacccagctgtgtagcgagtacc

SEQ ID NO: 274123 - DNA, 478 bp, Homo Sapiens
  misc_feature (18)..(18): n is a, c, g, or t
tccaccctatgtttaccngcgaccaggtatgtggctctttgcctttattttggagatttgggggtagggcggactgttagtcattgggttaattttatatgacacatagtcaagatttctcaaacttggtaattccattaagtgaacatacatattttgatataggtttatattgttttacaagtcttgtattgaaagtgattcactgatatgctcaaagcaatagattagcttctatatttagaaaattataaggtgttaagacttcttttgtgatgtttatgaatacctttgagagaaagttattttatcaaaaacaacttaataatccataattaaaagggaaaaaccagactgggaaaattttattgcaaatacaattaacattgagttaatattcctataaaaagctttataaattagcaaacttttaagacctcagttgataactagataaaacatataagctgaaattcac

SEQ ID NO: 274124 - DNA, 804 bp, Homo Sapiens
ttgctacccatgttcccctgatattctatgttcctggaagaacggcttcacttccggaaacaggcgagaagctttccccttacctcgacccttttgattccgcctcaaagttgatgggagccaggcagggcaatccatgaacctggtgggaacttgtgtctctttttcccaacgctggctgaacttgcaggactgcaggttccacctcgctgccccgttccttcatttcacgttgagctgtgcagagaaggcaagaaccttctgaagcattgtcgatgccgggagcttggaagaggatccgtacctccctggtaatccccgtgaactgattgcctatagccagtatccccggccttcagacatccctcagtggaattctgacaagccgagtttaaaagatataaagatcatgggctattccatacgcaccatagactataggtatactgtgtgggttggcttcaatcctgatgaatttctagctaacttttctgacatccatgcaggggaactgtattttgtggattctgacccattgcaggatcacaatatgtataatgattcccaaggtggagatcttttccagttgttgatgccttgagttttgccaaccatggatggcaaatgtgatgtgctcccttccagctggtgagaggaggagttagagctggtcgttttgtgattacccataatattggaagcagcctgagggctagttaatccaaacatgcatcaacaatttggcctgagaatatgtaacagccaaaccttttcgtttagtctttattaaaatttataattggt

SEQ ID NO: 274125 - DNA, 441 bp, Homo Sapiens
  misc_feature (351)..(351): n is a, c, g, or t
  misc_feature (422)..(422): n is a, c, g, or t
ggtatggagtcctatgctgtcaccctggctggagtgcagtggcaaatcttggctcactgcaacctctgtcccctgggttcaagcaattctcctggggtatttggtttttatttctttttaactcttattttaggttcaggagtgcatgtgcagctttgttaaacaggtaaattgtgtgtcacaggggttgcgtgtgtacagatattttgtcacttgggtaataagcacagtatctggtaggcaattttttgattctcaccctcctcccaccatccatcgtcaagtaggccccaaggtctgttgttcctttctttgcatccatgtgtactcagtggtttaagctcccacttngtaaagtgacaaagatgcagtatttccgttttcagttcctgtggttaagttcagttagggataatggcttntcagctccagacaaacacc

SEQ ID NO: 274126 - DNA, 809 bp, Homo Sapiens
  misc_feature (170)..(170): n is a, c, g, or t
  misc_feature (172)..(172): n is a, c, g, or t
  misc_feature (610)..(652): n is a, c, g, or t
tgtaaaatgattgtgaaaagaatcaaataatgaactgggggactcaaaaaaattttttgtacctcatattctatataaagtctatgtgttagcctgtttgcattgctctaaaggactgtctgaggtaattcataaaaaaaagaggcttatttggctctcgggcctgcagntngtacaagcattgacaccaacatctgctcagcttctggtgaggcccaggaaactttttttcagtcatggcggaaggtaaagaggtagcagccaagtcatatggggatagcaggaacaagagagagaggaggtggcaggctctaaacaaccagctctggcatgaactaacagtgagaactccattatttaccatgtggagggcaccaagctattcatgaggaatcccgcctcccatgaccccaaacacctcccgctaggcccacctccaacattggggaatcacatttcaacatgagatttggaggggacaaacatccaaaccataagagtctttatttttaaattttgcactagtggaataacttaaggtggagagggtcttagaaataattttttccagtcatttttgtagattagaaaactgtacctgggattcagnnnnnnnnnnnnnnnnnnnnnnnnnnnnnnnnnnnnnnnnnnnttactaaaagctttgtcttttgatttccacctgatgggagcttaaaaataatgtcctaccaggtatggtagctcatgtgggaggctgaggcaggagtattgtgaggccaggagttccagatcagcctgagcaacatagcaagatgctgtctgtaccg

SEQ ID NO: 274127 - DNA, 379 bp, Homo Sapiens
  misc_feature (67)..(67): n is a, c, g, or t
  misc_feature (301)..(301): n is a, c, g, or t
aatatcagccttgcaactgttgatctccctggatccagaaccacttttatttccaagaggaggggcnattctttgggggtgttcatggggcctggaattgcaatcccttcctgggtccccatcttacctggtgaccaccatcattgttttccccatcctcttcctcaacacacatacatgcacaacacatatacaatactagtgatgtctaccagtcctgctacttctggggtgcctgtctcctggaatggagctggaggagcaatgctgttggtgaataaatcagtctactggaactccnaaggactggatgtaagcagatctttttttcctatagatgtctcagatgttcagttttcctgtcacaaggcttccagtc

SEQ ID NO: 274128 - DNA, 374 bp, Homo Sapiens
ccaatctgggaacacttctactgtaaaaatgtgcgtactctgtgtatagcatgtagcgggtctattggttgtacccattcatagattaatgtttccactttttatgcctcctctggttttctcatgccgtaatgagctgtgtttatggaattgcgaggaggcaatgagtgtgagttctatagatgacttttgtacatcttgcacatgtacaatttaacactttgttgtgaacaacagatatcttttttgaaaagaggtagtcatagattaatatcatagcaaaatggctgtgcaacggccatccagtcaagattactctttagcttccctttgccccaagcacataccaattagaaaatgtaaaaataaaaccc

SEQ ID NO: 274129 - DNA, 452 bp, Homo Sapiens
  misc_feature (296)..(296): n is a, c, g, or t
  misc_feature (359)..(359): n is a, c, g, or t
  misc_feature (417)..(417): n is a, c, g, or t
ccccatctgtgtccagttgtgctgctaatcatctttgtgaccatgatggttcatctttgtatgaagccgatcacctacatgtcctgggactcaagcaccgtgagcctcccccaggacccagaacccctttggaagtaggggccagacctttcaattcactctgggtgaaagaacccagtcatctcattctcttactgcccgaagactcatgggttttctgctttggttccccacccatccttcccctccacaactcttccttttctcttggggattttgatattctgaaccctttntcccatctctccacatgtcaaaagaggtgcttcgaccatacccaaccgtgggcactgctcttngatgatcaccctttttgccatttgtcatcctccccatccctgcatactttgtatactnccgcatacataggattcccttcaggcccaagagcg

SEQ ID NO: 274130 - DNA, 326 bp, Homo Sapiens
  misc_feature (26)..(26): n is a, c, g, or t
  misc_feature (81)..(81): n is a, c, g, or t
ggccccccacctaaccagggggaccncagaactcttacccctgcctctatccagggggaaattaagaagtctggacttatntcttgtaggatgatgtctggggcttcaggcaacatagccatttgtagcttgatagattctatcttttggatgccttttaaacaggtacttcaagatcctccacaggttcacagggtagcgactgatgggagctttgggttccagggtctggagctttaggtattgcaggcttgaccctcctggctggctcaccaaaatatgttaccagattggaagttgggagttccaggttcttggtgttatga

SEQ ID NO: 274131 - DNA, 440 bp, Homo Sapiens
gctgggtgcagtacctccggcttcttcaggagtccatctggcctggtggagttttgcctaagtttccacggcccgtaagacccaagagcagaaactggctgctgagaaacaggctttgcagagcctgatgggagtcctcccagatctcgtagtagaaattcttggggtgaacaaatgccggctgagctggggtctagtcctggagtcactacaacaacccctcatcaacaggcatttgatttactgccttggggacatcatcctggaattcttggatctcagtgcctctgttgaggaagtctgctgctaccacctctgcctcagataccccaggcaactctaagaggatgggtgtctcctcttaagctggttattcacgccttcttcccaggtcagggaagtagagttactcggccaccagagaccagtcaggaagcccg

SEQ ID NO: 274132 - DNA, 416 bp, Homo Sapiens
  misc_feature (178)..(178): n is a, c, g, or t
gccatttaaaacccaaggagtgggggtcccttctgaaccatggggtcctaatgtgatggcacaggtccacaaaaccatggagccaaccagctctgtgcccagaccttctccagcaccttccagataaaagcttaactaagagctacatactttccaaaggcaccattgcttcttcacntgggtgacatttgcaaaataattgcccgataatgccaccgatctaggacaatgagatcctttcagaattttctccaagcttgtatgtgtatatggatgtgtgtttgtgtatgtgtctctttgacacaggtggattgttcttaacaattgttgtactattgtgtcacttaaaattatagcaggagtatttctctgtattaataaatagtatttaagaataaaatttaaatatttacata

SEQ ID NO: 274133 - DNA, 468 bp, Homo Sapiens
  misc_feature (29)..(29): n is a, c, g, or t
gggatttggccaaccacacacatatttangaccatgtcattaaaggctgaggactcaaggattactggattttaggaggaaaaaacaaaacacacacaagtttccaaagttttaaaacccaaaagaaaaaaagaagcaataggtaatttttacagcaaagaaaagaactcaagagcagttaaattgctacttttccatagtttttcaagacaagcaaaagtaagtagttgataattttcctttcctaagagacacatagaaatgaaatgcacctcatttaaataacatacaactactccttcatccccaacaagtgacctctactgtcagttgttttacattaacaaattaaggtaacatcactagttcttagtttggtcctcataaaaggcatttttttcaattaatcttgaaatgtatttgccttatataaggctttaaaatcacagcattttataataatgtata

SEQ ID NO: 274134 - DNA, 594 bp, Homo Sapiens
  misc_feature (43)..(43): n is a, c, g, or t
  misc_feature (78)..(78): n is a, c, g, or t
  misc_feature (83)..(83): n is a, c, g, or t
  misc_feature (92)..(92): n is a, c, g, or t
  misc_feature (142)..(142): n is a, c, g, or t
  misc_feature (163)..(163): n is a, c, g, or t
  misc_feature (225)..(225): n is a, c, g, or t
  misc_feature (399)..(399): n is a, c, g, or t
caaaaagacttgccccaccctatggataattgtcccattcaancagttcctccatggatggaacccttgattgaccangccangagccattngaccagtgcttaccctggtccaatttcccttccttggtgaaattctcccntcccctggggaacttcccaanctccctgtcgcttctttcttacccaccacctttccccaggagcaagactttttttggggggnaacttttgaggaccctgttttggatgggccccccgcaggacggaccctttccccaccccaagggactatgaaagcaaaagtgaccacaggagtgtgggaggtcgaagtagtcgtgccaccagtagcagtgacaacagtgagacatttgtgggcaacagcagcagcaaccacagngcactgcacagtttagtttccagcctgaaacaggaaatgaccaaacgagaagatagagtatgagtccaggataaagagcttagaacagcgaaacttgactttggaaacagaaatgatgagcctccatgatgaactggatcaggagaggaaaaagttcacaatgatagaaataaaaatgcgaaatgccgagcgagc

SEQ ID NO: 274135 - DNA, 484 bp, Homo Sapiens
ttagatgaaacgttctcctctgagaaggcacggctggctcagattaccaataagtgtactgaagaagacctggaattttatgtcaggaagtgtggtgatattcttggagtaaccagtaaactaccaaaggaccaacaggatgccaaacatatccttgagcacgtcttcttccaagtggtggagttcaagaaattgaaccaggaacatgacatcgatacaagtgaaacagcattccagaacaatttctgaagaccatgcctcttgaagctttttctgcctcctgattctctctttgtaaactattttcaaattgtttttcaactccttatcaaaattgtttatacactctttcctccatgagctctggaaggtatatgcatcttctgtaatactcagataggtataagatttttcacaaaatccttatgtaagatacattccatttttaaaaattaaatgtatggttgcatctgtctttttaaaa

SEQ ID NO: 274136 - DNA, 411 bp, Homo Sapiens
agacagagaatcccaaggctcagacagaagtaattttctaggggttatagagcaaggaactggcagaactgggttcaaccttaatttcatttgactgcaaactctccctcttagtcctgatggttggtaccagggtgccatttttccagatgaatcttaaaattacagaattctcaatttatatgtgttcttaaccttctttggctcaatgaatattcgaacagaaaaggatcttggaggcaattttgcctgactctcacactttacagatgaggaaactgagacttggctgcggtaggttactgctccagttatggccttcccttttctggttctgaggaggcaggacccacttcctttgggaggtgatttcacgcttctgctagcatagctttaagtgcaccaaaagtc

SEQ ID NO: 274137 - DNA, 401 bp, Homo Sapiens
gactttcacagtgacacggtactctccatcttaaatgagcagcgcattcggggcattttatgcggatgtccactatcattgtggaagatacccaaatttaaagcccatagcaatgttctggcagcttcaagcctgtattttaaaaatatcttttggagccatacaatctgtatttccagccacgtccctggagctggacgatctcaaagctgaagtgtttactgaaatacttaattatatctacagttccacgagtcgttgtcaagagacaggaaacagtcactgatctcgcagctgcaggaaaaaagctgggaatatcgttcttggaagaccttactgatcgcaacttctcaaattccccgggtccctatgcattctgtattactgaaaagggagtggtt

SEQ ID NO: 274138 - DNA, 634 bp, Homo Sapiens
  misc_feature (37)..(37): n is a, c, g, or t
  misc_feature (68)..(68): n is a, c, g, or t
  misc_feature (77)..(77): n is a, c, g, or t
  misc_feature (95)..(95): n is a, c, g, or t
  misc_feature (135)..(135): n is a, c, g, or t
gtcacggaagatccaagcctcaaacccaggccctccntaacttccccggaaatattcttttccccaancccctggcntacctgtttcatgggacnttgaaaatcttggaaaccaaatcaactgcccttgctgacnagctcaggattatgattacatgcctcgaatcaccacgggcccaggagacaggagcaactttctggagaaggctgctttctgggtcctgcagttgacatatctgagcgagcacagatggtcctctgaccccgccagagagttgaagaccaatgtggaacttgaacatcatcatcaaggatttattaaatgcccactgtgttcaaagccctgtgttaagctcttggggaatttcaaagaaaatctaagctgtgatctcaagcgaagaatagctttcattatagaggggagcaagacacagtgcaatttaacacttatcaataatgaaacaacttatcagaaaaaaagaatataaaaatgaaaggcaatgaccaacagagaaagcaacagagttgcagaaacttcacagagtgccatgagatcatcttctaaatctcagctgctgtttcacgatgattaaaacaccagggacccagcctgggcaacagagcgagactgtctc

SEQ ID NO: 274139 - DNA, 445 bp, Homo Sapiens
  misc_feature (371)..(371): n is a, c, g, or t
  misc_feature (405)..(405): n is a, c, g, or t
tccagctaaacaaatttaaaatgtatatgcaacgctctttgccagtttctccctgtccttccttccccaagcctctcataaggcctgtggtactctacttatcaggcttctctgccaactccatatatgcacagcatgcatactttcttcaaatttttatcaaaattcacatcctttaagaatactttcctaaattctgatcatttctcctttaaaatttcctaatttatatgttatgtaataattgttcatatgctttcattttttttccattctgcccttaaagattccaatatagcaatatattcctggccatagcaatgaatgtttcttttataacttgtgactattccttataataatttcaaatntttttatagctaattttcatttacgagaatggcnggaatccttcccactgggaaattaaatcaccttaattggg

SEQ ID NO: 274140 - DNA, 439 bp, Homo Sapiens
  misc_feature (367)..(367): n is a, c, g, or t
gtaataaatggcataggatcctgtgaaaggaagttacattggcacatgtaaagtcagaagaaaattagccaagaggagcatattacatattaaaaaacattattttagtttctaactgcaactttagagactaagagtattcatttagaatctcaaatgggttctgctgaggaagaggagggtaattaggatacgtgtgctctgaaagctacacaaggcttcagagaattgaaaaccagcagggacgccatcaggggccatgtggcctggtgcccttgccatagctaaaaataatttttgggtccttttttcaagataaaattagaggcatttgggataagggacagatatttagggaaatgacctngagggaacccaggagtcaatgatatattgatggaggtttttgactcaaacagtaagaaccaacccaggaggg

SEQ ID NO: 274141 - DNA, 512 bp, Homo Sapiens
ttggtgggtgagtaacttggggaagtgggtgagtagctgggggaggtcggtgagtagctgggtgacgttggcgaatagctgggtgatgtgggactatagttgggactggttggagaataggatggagaggtaggggagtaggagggtgaagtgggggaataagagggactctggggtgtgtagcccccaggagagcggggctcgtaaggcaggtgacgttggcgagtagctgggagacatggcaccacctgtggggaagcagccaacaaaggagatgagcaatggacagactcacccagaactgtggaggaaacaaacctggcctgacagatggcggacaactccacctggtgaagggatgtaggggcttgagggacctggggaccccggggagcccggtgtgggagaccaggcaggggagtaacctgggctgaagccgctggcatctgacgcagcactgggagagaagccggctgcccctggggtcattccactcccaacactgggggacc

SEQ ID NO: 274142 - DNA, 312 bp, Homo Sapiens
  misc_feature (291)..(291): n is a, c, g, or t
  misc_feature (296)..(296): n is a, c, g, or t
gaaggaagttgtccattttaagaagagaacacagaccctgtactcacaaacggactgaggtgcagccctagccggctaggtagcagcctgcctttccacttctggcctgcagagggcagtggtcctagacatcagcagaagtcaggggcttctcaaggctcaatctcctaaggggcaaattaggccctcctgacatttaagtcactacagtctttgccactgttactcttttaattatttcttcccccccttctcaggaaactttggctaagtaagcagtggccggctctntgggnaaagagaaatctcagc

SEQ ID NO: 274143 - DNA, 440 bp, Homo Sapiens
  misc_feature (145)..(145): n is a, c, g, or t
  misc_feature (340)..(340): n is a, c, g, or t
  misc_feature (362)..(362): n is a, c, g, or t
  misc_feature (399)..(399): n is a, c, g, or t
ttaaagcttaaggacatttaataatgtagaagtgttccgatatagataaacatctttccagaatctcaggtaaagaacatcttggctgaactgacaacgaatctttttgagacacaacgtttctgttcccaaaatgattacatcngacaacaggtgcaggagggtagaacaaagaaagaaccgcggagattacattacaaagatatatgtttaaatgagatttgtaaacttaatttgtttgcaactccgggtgcaaagaagagaataattatttttctctatactgtagttaattgaacttaagtacaactgtggaaagtatatttaaaaagttagaccngattttaccaattttaagtttngatccaagtgttttcccagtttggctaaatcctaacnggggttaaccccctagcaagttcccctaggggcaatggaaa

SEQ ID NO: 274144 - DNA, 577 bp, Homo Sapiens
  misc_feature (51)..(51): n is a, c, g, or t
  misc_feature (109)..(109): n is a, c, g, or t
  misc_feature (303)..(303): n is a, c, g, or t
  misc_feature (319)..(319): n is a, c, g, or t
  misc_feature (338)..(338): n is a, c, g, or t
gggctcggcgtgggaagcgggcgaccttatctctgctcagctggaaaaagncccagggtaacaccgaagtgggcttatttgcgcatcagctactttcgcttctacttanaaacggaggatctgggtaaaagaaccgaaagctgtacgaacctaagacttgtctccgatgtccttctcaaccatcaatttcatatgcgagggaaaacacctgctgggttcacgcagaatataaaggtctttgaaataattcttgatctctaggccaaggagttttacattttaaaataatcaagcgtgcctacntgcttgccaggccccntgctctcagccttcactcngcattattcaattaatccgacacaggcctgtgcagtgcgtcttaatgacaaggactcctaccctccactgcctgtgttggaatcctggttctgccagttattagctgtgtatcctggccgtaagttactctctgccacagtttctgactctgtaaaataggataatagtatctaccttataccattattctaaagataaataaatttaacatatttaggttgggcacggtagctcacac

SEQ ID NO: 274145 - DNA, 476 bp, Homo Sapiens
  misc_feature (191)..(191): n is a, c, g, or t
  misc_feature (260)..(260): n is a, c, g, or t
  misc_feature (453)..(453): n is a, c, g, or t
gtggacgtgcttatggaagcagccgcacacggtgagagtgaccccatgaagggggtctctgagaatatcatgctgggccagctgctccggcggcactggctgctttgacctcctgcttgatgcagagaagtgcaagtatggcatggagatccccaccaatatccccggcctgggggctgctggacccaccnggcatgttctttggttcagcacccagtcccatgggtggaatctctcctgccatgacaccttggaaccangggtgcaaccccttgcctatggggcctgggtcccccagtgttggaacgtggaatgaccccaaggggcaagccggcttctctcccaagtgctgcgtcagattgccaagcggtttcaagccaaggttactccccttgccttggtcttcccacacccgggctccccgggggtccccaggttccctcaagcccctanatccgttcaacaaggtgagttgt

SEQ ID NO: 274146 - DNA, 522 bp, Homo Sapiens
  misc_feature (27)..(27): n is a, c, g, or t
  misc_feature (37)..(37): n is a, c, g, or t
  misc_feature (48)..(48): n is a, c, g, or t
  misc_feature (53)..(53): n is a, c, g, or t
  misc_feature (75)..(75): n is a, c, g, or t
  misc_feature (91)..(91): n is a, c, g, or t
ttcaaaattaggcccctcctgaaccantttaaggtcnattacagtctngccanctgttacctctttttaattatntcttccccctccttcntcagggatactttgctttagtaaaccagtggccctgcttctctggcacaagagaatcttcaagcaagttctgttcggttccattttcatggacctgagatgccctccctgcctgttctgtattcaagcagcctttcctttctccattcaaagacgcctgtcagcaagcagactctgcagcccccggaaggacatgctgcaggaaaaggaatctggagaaaatacctcagtagcaggatctgggagctgaccagggctttagcatctccctgctgcaatctctgcatatttctcctttaggggctacagaaacccacagagtttagatgatttgcccagagtctaactgttccaggtgttttgatcacatagacaggcccagaatgaggttccattcattggctgttcaacaatagagaaaggctgacctag

SEQ ID NO: 274147 - DNA, 508 bp, Homo Sapiens
  misc_feature (411)..(411): n is a, c, g, or t
  misc_feature (458)..(459): n is a, c, g, or t
  misc_feature (481)..(481): n is a, c, g, or t
ctcccaagcccaacatcgaaacgtacttcatgtccatttttgacaggggagactgggtcttaagcgccagtctaggagaagttcattacctgagtgaatgtgtaagaaaccacacgagttttcggcaaaatcagggagcctcctgcattagtaacactggctgcctctggggaaccgggagaccggaggttgattttcactgactatcctttgcaccttctaaactttgaatcatgtaagtatttacccagtcaaaatattgtaacttaaatcagctgagcatactgctgttttcagggtgggggaggaagcctcttggtctctaggcagcatgctgtgtaagtctgacctagaaattggctccatccaccaaagctggcctttttcccctgagaaccagggcttcttaantgtcactgtgcacacagatcaccttggaatcttgttgaaacacaggnnctgatttgggtggggggcgggngagctgggacctgcatttctagcaggc

SEQ ID NO: 274148 - DNA, 407 bp, Homo Sapiens
ccctggccttgccttcagggagttgacagtgtccttgaagtggtgaagtgcccaccacatgaaccaaggagagacgcccaaagcagctgccatggactctggcctgtccaagcctctgtgcacctgcagtctctttccactggcacttccctgctttgctaccatcgtggaagaatggaagggagggggagaaggtgggtgggctcagggagaacgccagagtggccagaagatgcagagagaagccccactgggatctgagtattccccaagggcactcagccacagggatgaactagtgtttgtttgtatccttgcagttatgtgacttaaagtgactcagagatatctatgtaatgcgagtgtactccgctggcaatgaagtaaatatatcaatttgtggaaaa

SEQ ID NO: 274149 - DNA, 412 bp, Homo Sapiens
aacacaaaaatgttcatgggaggggaaagttgtgaaatccagcctggtgtcccattcaccatatagtcttggaatttgctgcccaagaagaaaggggcaccattttgtaactgacacaaagtttctataatgtgtaagtggtgaccaaggttagagagagcagtaaaaacagcaatagatcgtacagtacataataaattttagctaagatttttgaagcacgcactgagtgttaggtagtgagatcacagtgatgatgaattcactgggccaatgacgagtggggtgaccataggccagtttgcagggtactaccccagtttgcatctgctttcccattgttttatctcattagtgtcccctttctcacgtgtgtcacagtttggacagtaagttatctaatcacccaaaa

SEQ ID NO: 274150 - DNA, 483 bp, Homo Sapiens
  misc_feature (23)..(23): n is a, c, g, or t
aaaccctgtataaaaaattaagnggttgtaaagatatggaaacattcccactaaaatacatgtcagatgccagctgaattttgggtgagataagatgccaaagtggatctgtcgtcaagagaacggaagttcaagtatccaaaatacctatctggaattttatgcagtgaatatgagaacactgtgaaaatctattgggaagtaataaatttgttacacatagaaacagttgagtattttacaagtggaacatatggctataatattactttgggaaaacatactgccaatatcaacctaagaaaaagaaaaactgatattcttctctctccaaaatgggctttgataaattatgtataaaatgttcaatttgttttaagaaatctatcttaacaaatctatcagtgtttttgttgtttttcaacacttttgcagtacttttagcatggtacatacattaaaaatattagccattaggcactt

SEQ ID NO: 274151 - DNA, 531 bp, Homo Sapiens
  misc_feature (37)..(37): n is a, c, g, or t
  misc_feature (74)..(74): n is a, c, g, or t
  misc_feature (151)..(151): n is a, c, g, or t
  misc_feature (187)..(187): n is a, c, g, or t
  misc_feature (381)..(381): n is a, c, g, or t
gttttgtccatcccgggatgccatcaaggcattttgntattgctgtcttgagatcttaacaaactgcagatccngaaagggctcgcaccggagtaatcggggatgtagacttggaggagcgaagaattgagctggttattgctgctccccnagtgttggtgtgacggcgtcaatcccggtcgcttcngactgagagagtctgagtgattcaagccacatgggcgaggaggggacttattttcacctggagaggctgtcagggccatcacgccatagtatgagaaggcgctcgcttcaaacttcataccttctttcccagcttcaacttccactttcccctgtggagagaaaaggcaggtattttcagtccagttgcaaaanctactggcacactctgtacaatatttggtccttccttagatttttgtctgatttcttttcccaacactatcgagggagtaaagcttcagctcatctttcccactgagaggagggggctcattcgctttaaatatgaaaactggattttgg

SEQ ID NO: 274152 - DNA, 295 bp, Homo Sapiens
gggtatacagcaaaaaagtctccttcccctctccctttagtcttctagctttctcttctggaagaaaccactgttaccaatttcttatgtattctcctatgtaatcactcttaaacatctgaacatttgggatgaatctggcaaaagagaaaataacttatatttgcttagctattttctgaggatgctagatgactactcttataatatgtctaaatatattattatttttattttgttgaggcagagtctcaatcatcactccaccctgggtgatagagtgacaccctgtctc

SEQ ID NO: 274153 - DNA, 421 bp, Homo Sapiens
  misc_feature (155)..(155): n is a, c, g, or t
  misc_feature (198)..(198): n is a, c, g, or t
  misc_feature (316)..(316): n is a, c, g, or t
agtaaagacaatttcgctcatacaaaacaacagtttacaacaatcgagtgctggacacaccatctgagacaagggaggcgctgcaggcacccagcgccttcccccatacacaaagacgaccctgggcgcccctccaccacctgcccctgagggangaggaaaggtgaagtattcctgccacctctccctccaagggangggggagtggggggccatggcacacgacagcctaccccagctgctcctcatctgtgctgggggaggcccctcccctcaccggccccgaagctgagttgtttcggggtgatggcaaatnggctgatgggcaagggggcaaagtcaggacatctttggttgcaaagactcccccttgacccaccaggccacacaatggaaatctgagggaagacttcaaaagtgg

SEQ ID NO: 274154 - DNA, 547 bp, Homo Sapiens
  misc_feature (336)..(336): n is a, c, g, or t
aactaagattaacatttaatgtaaaaaagttaaattaattcattaaaccaatattcattaaagatccgccattctacaattagggatacagtgttgaacaagacagacaaggtctctaacctcacagaaattacattctagtgaggagaaacaagtaaaaaacatataagtaagattatttcagataatggcaaatgtaaaacaggctaatgggatggagaatgatgacagagcttggagaactattttaggaagggttgtctgggatgacctctctgaagaggtgaccaaatgagctgaactgaggaatataaaagtatcagtcaggtcaagatngggggaaaggtggggagggagtgaggaaagagcactccaggccagagtaataggggacctaaggcagtgggcgagcctggcactttcaacgggtgcctgtgtgcatgtgctccataaaggaaaacattcttaattataataaacacgtgccctagcaagagcagggtcatgagctcttttagtatgcaaattatctcagtctgtatctaaa

SEQ ID NO: 274155 - DNA, 439 bp, Homo Sapiens
accaggagccctagcatccgcttcttaaagtccagggcttttgtctcccatcatctttcttcagcacccagcacaggacaggcccaagggaccatgattagtgaaatgtttattcacatacgtgcccatttttcatgtgtgagtttgccctgtttttctgaacatacttgtctgtaacttccttgaaggctggaggtggcatcatctgaacccaccatgatgattggcatggagtcacatgcagcaaacatttacagaataaacgggtgtgacgtgcagaggtcctgaagggtgagcagggaagagaggtggtccaggcaaggacactgctgtggctggagacagaacttggagaggctgtcagcatgcctatgacacacaattacagtggctcagacatttagggactttgtgaatagtctcttagactcaaaaatcc

SEQ ID NO: 274156 - DNA, 678 bp, Homo Sapiens
  misc_feature (16)..(16): n is a, c, g, or t
  misc_feature (76)..(76): n is a, c, g, or t
  misc_feature (129)..(130): n is a, c, g, or t
  misc_feature (204)..(204): n is a, c, g, or t
  misc_feature (236)..(236): n is a, c, g, or t
  misc_feature (447)..(447): n is a, c, g, or t
agggactgtagttagncctactaacctacctcttctaagtttcccttcaggaagagagacccatgggaaccatganggagttccctgaatgtgtatggggaaatcgatctgtgcagtgcagggggtaanngtggtagccatggaggtgtcccactcagatctccctacagcagacctgccacaaggggtggagttagcggacantgtcaagatctgcctcagctttcaagctgagnttacatgcttcccagacagcctctaagcaaaggccaggcactgcccatggtaacaagggctcaccatttctggcccagtatgggactcttcgggagggcaaatctttgcaccagcactccctgttttgcaaggcctaggctttctccagagcttgcactgcagtcccaagggctcctcctaccccaaatatctttcctggcccctctcctntctcaggttttagtcctacatcacgaactaaaggtgttccttgtctggtcctgttccctctcccttttatgttttatagcgttgcccctaataaaccttttgtatatctgactctgtacccctatattattgaaagagacagatttattgaaggtgataccctgaaatgaagatgtcctgttcttacagatgccctctgatcctatgttaataatagtattatatgtttta

SEQ ID NO: 274157 - DNA, 390 bp, Homo Sapiens
  misc_feature (102)..(102): n is a, c, g, or t
  misc_feature (107)..(107): n is a, c, g, or t
  misc_feature (202)..(202): n is a, c, g, or t
ttaaaatgtacttatactgcaagtcacctgtaattacgtatcctgctacttgtatcctaagaaatctagaagcccactgaagaacttgcctcaatttattanaatanaatcattatcttggagtatacactctgcattcccatattctttattctagatgtctggagaattatgaaatcatttcctgaatacttacattctnatttaatttagggtacattttttcccaaagacagaatgtaaccacgttgtatagtatttatgacaaaaacattaagaaataacagccgagcgcaaagtgtcacgcctgtaatcccagaactttcggaggcttaaggagggcagatcacctgaggtcaggagtttgagaccggcatggctaacatggca

SEQ ID NO: 274158 - DNA, 816 bp, Homo Sapiens
ggactgatattacttctgtgactcttggggatacaacagctgtcaaaaccaaaatactcttaaagaaagggagaggaaatctggaaaaaaccaacttggacctcggcccaactgccccatccctggagaaggagaaaaccctctgcctttccactccttcatctagcactgttaaacattccacttcctccataggctccatgttggctcaggcagacaagcttccaatgactgacaagagggttgccagcctcctaaaaaaggccaaatgctcagctctgcaagattgagaagagtaagacgtcttaaacaaaccgaccagcccaaagcacagggtcaagaaagtgactcatcagagacctctgtgcgaggaccccggattaaacatgtctgcagaagagcagctgttgcccttggccgaaaacgagctgtgtttcctgatgacatgcccaccctgagtgccttaccatgggaagaacgagaaaagattttgtcttccatggggaatgatgacaagtcatcaattgctggctcagaagatgctgaacctcttgctccacccatcaaaccaattaaacctgtcactagaaacaaggcaccccaggaacctccagtaaagaaaggacgtcgatcgaggcggtgtgggcagtgtcccggctgccaggtgcctgaggactgtggtgtttgtactaattgcttagataagcccaagtttggtggtcgcaatataaagaagcagtgctgcaagatgagaaaatgtcagaatctacaatggatgccttccaaagcctacctgcagaagcaagtaaagctgtg

SEQ ID NO: 274159 - DNA, 564 bp, Homo Sapiens
  misc_feature (227)..(227): n is a, c, g, or t
cacatttacatcacttttattacagtgcactgttataattgttctatttgcagttattgtttatctcttgctgtccctgatttataaatagaactttatcataggtatatatgtataggaaaaaacagtgtatagaggtgtctatactatccatggtttcagacgttcactgggggtcttggaaccgtatgtcccatgggtaagagggaactactatattttccaanttctatacatttcttattgcttatctgtcctgtcattctgcccttgaatattacacaccacaaaaaaatccaagctgacaaaaagctattagactactttttactactaaaatgaagaaaattaattttatgaatctggctcacactgaaagaatatttattaacactaccaatcagagatccaatgacagaaacactgtctggaatacaaaaagaacaaaaaatgaggtcatttgaattgccctgaaaaactccaaattcttcaagatggtgtacttgtatctatattctgaagtactagtgttttaattttaactaaaaattaaataagagtttg

SEQ ID NO: 274160 - DNA, 509 bp, Homo Sapiens
  misc_feature (125)..(125): n is a, c, g, or t
  misc_feature (466)..(466): n is a, c, g, or t
  misc_feature (485)..(485): n is a, c, g, or t
gccctctgcaatatattaaatgtatactaaatgtatatatttaataatgtcatgtataaaatatgaataaaatgtccacataggaaattaacacatatataccttctctgataagcactcctcanatgtgtcctgattatttactttctcttatcttttccttagtgttcctcaaattatatctatcctctaaaccagggatcagcaaactataacccccaggccaaatctagcccactccctgtttttatagataaagatttgttggaacacagccacactcatttgtttacctactatctatgattgttcaaccatgggagagttgagtaattgtgacatggaccataggccctaaagagccaaaataaatatactttggcactttttggaaaaaaagtttgcagacacctgcccctaaatggattatagtttgagagaaacttaacagaaatggtgtttgggntaccggatgcataagagcnagcacccaataaaatgggcataaa

SEQ ID NO: 274161 - DNA, 641 bp, Homo Sapiens
  misc_feature (308)..(308): n is a, c, g, or t
gtcaattcttgaaaatgtgtatttgaagaaaaagtaaatttcgcctactgttgtcagatattagcagtccagatattcgctctagcttgtaaactcccctgtggtcaagcctaagctcttaaccccctattctacagctttagactgaaggcaaaagctcaaagcatttaaggcctcctcaaatttcggcccctgctgctctgtgctctgttccttggtgtagctttgttccagctcctgcagcattgcaccattcctaaccacaaccttaacagcatgtagggccccatactctaggccccatcttngctgtcttcctgtgttggaatcttgcctaccaaggcctgtcaagagggtcctcccccatactgtttgcccacaaggttcaagagtgattggctcccagtcttcctggactgaactacttggatctaggggttgcctgttatttagaagagatcccttaactggtagggccctttcagtaggacagtatttgggtaaggggagggtataagatgagaacctttgctaagttaggttcctttgggagcctccagtttgtttctccctctccccagccatcttgttggatctgccaagggattggactccttcattgtcctaggtttttaaggttt

SEQ ID NO: 274162 - DNA, 374 bp, Homo Sapiens
ctaattctgtatcagacttcagtacaaatatagtcacagttaagaatacccaccccgttttgttatcattattatttttttacctcagacttgaaatgggtgagatgaagatagtaaacgacaacatgactttcttttaacagcaccttgaaaaaatacactgcactagcaaaggcattaagagggggagaaaagccttcagacccaatggttatagggccccgcaacgtgtgtgagagcataaggggacacggtgacaacattgtcatgggttaatgttaatgctttatgagaaggaatttggttcaattcatttacttcagaggactgttctggaccttcattagctgcctggtctttttgctctgaggcct

SEQ ID NO: 274163 - DNA, 861 bp, Homo Sapiens
  misc_feature (340)..(340): n is a, c, g, or t
  misc_feature (370)..(370): n is a, c, g, or t
  misc_feature (516)..(516): n is a, c, g, or t
  misc_feature (828)..(828): n is a, c, g, or t
gtagatgaagtacaaggaggttctgaggatcagcatcttcaaaaggatggtgcctcatactccatgcctaggggtaatagatggtgcacattaatgctttaaagcacagctccgccctgcaccatactggcatatgagttgactgcagccacccctcaaacttttcatgccctaccacagctagtcaaaggaaaatgcccgaacttttctaaacagccctggactcttttttcccttctctgtgctgaggagttgaggactatccccatttaaaactgcagctgttcccctctttaccctcttcacacatgtggaagctggccaagggaaggcacaagcntcaccacttgggaagtctgaagagccaccngggtttgccctgatagcaccatgctctaacagattggtgggctgggatgaaaatgcttccagggttcacagcgcatcacgtaccaccttccaaagacaaaagctgaaggtcagtagagtggagctagagagggggtgcttgctgcnaaagggactgctttacccataatttcaccttccaagaagaacagggacaggaccaacaggcaagccaggcaacaacagagaatacccccgccctgagtttgtgcctctcaggttccagcctgtgtagtgactgccgatcgctccgactaaacaggaaggggaacccctttcggagccctggtgggaaagacattgttttaaccagttcataatcagccattagagaagaaagcagcatctgcgatgtcagcacaggctgatggtcactggtacactacggaattttataaacctggtggttcgtgtgccttngtcccgctggctgcaaatgaagataattttccc

SEQ ID NO: 274164 - DNA, 795 bp, Homo Sapiens
  misc_feature (53)..(53): n is a, c, g, or t
  misc_feature (250)..(250): n is a, c, g, or t
ggcacgagcgagcaggagctccgggtcaactgctacatgccggccaatgggangacggtgacgctgcaacacaagccccagcatccccgtagcatctcgctggggctgctgaagcgggagatggcgcaggggctgctccctgaggccaagaagcctcggctcctgcacggcaccctgatcatgaaggacagcaacttccggctggtgtcctcagagcaagccctcaaagagctgggtctggctgagcacnagctgcgcttcacctgccgcgtgcacctgcatgacacacgcaaggagcaggagacggcattgcgcgtctacagccacctcaagagcgtccttgaaggaccactgtgtgcaagcacctcccggacggctctgtgacttgtggagtccgtcctcctccaggccgccgccccttctgaggacccaggcaccaaggtgctgctggtctcctggacctaccaggacgaggagctggggagcttcctcacatctctgctgaagaagggcctcccccaggcccccagctgaggccggcaactcaaccagccgccacctctgccctctcccagctggacagaccctgggcctgcacttcaggactgtgggtgccctgggtgaacagaccctgcaggtcccatccctggggacagaggccttgtgtcacctgcctgcccaggcagctgtttgcagctgaagaaacaaactggtctccaggctgtcttgcctttattcctggttagggcaggtggtcctagacagcagtttccagtaaaagctgaacaaaagact

SEQ ID NO: 274165 - DNA, 452 bp, Homo Sapiens
  misc_feature (414)..(414): n is a, c, g, or t
gtttggcacctaagaaacatgatggttgtggataatgccacaagtacacagggagacccagtaacaagacatgcagggtgagggcaagcggctgagctgcccaagcatttcaaaaccaggactttggcttcccatgcagttggagggtagaagggatgtgcggaactgatggacttcaccggctcctcagcagcatgtacattcaaattgaagatgcttgagagccccactataccaaatcgtgagtctggtcactcctccagcagagcttggtgcatgtgacagttagaaaacgctggagtgccaattgatgtctgttgcaccaagagtccgttttgaagacggctcattcaagagtaattattttgctttttgatgcagatgtacaagcacatccatgggaagggccatgtngaaaggatggttctccagcccagtccaattgatccaaa

SEQ ID NO: 274166 - DNA, 401 bp, Homo Sapiens
  misc_feature (283)..(296): n is a, c, g, or t
tatatgccaggccctgtgctgaggacagaggttacggtagaatataggacttggaagatcccctgttctaatggacttagctttcttgaagggaaggcagataataaataagaacattaataagattaatttcagatagtttctttctatgaaggtcaaaaggtacacacttgtagttatgtagaatgagcaaatttggatatctaatacatatgaggactacagttgatgatattgtgtactgcaagtttgctaagggtgtagacgttagggattcctaacnnnnnnnnnnnnnnacccactgactctgtgaggtgtgtaaatttgcttgactatagtaatcatttcacttggtatatgtatatcaaaacatcaagctgtacatgttaaatatatacact

SEQ ID NO: 274167 - DNA, 311 bp, Homo Sapiens
gccaccacacccggcccaagaataggaacattttttaaggagcttaccttcaactgagaaagctacttcggtgagttgtagcatatttcaaccagaaaaatcaaaatattagttcactttgaagagacaaactgaagcccatccttctgcaacttttgtagaaacagactgacagacttaattcaattgaccccaggctagttgattgtttttataccatctaatataaaatggtagcttaatcctgcctgtgcctttgttcatgtaatttagttgagtacagtgaaatgagaaagaaactggaagtcact

SEQ ID NO: 274168 - DNA, 732 bp, Homo Sapiens
tctcatttcgctatggcagctgaaagtctgtctatctctgtaattgcacacctttcaacatcgaatgattgactgaatatgctctgaataagtgcaaaggatgaaagagaaggttgcaatagaaaagccttatgcttctactacctgtttcctttcctagctcaataaatcaggatcttccatatgtccagaaattcatttctgctttttctaggcatatgtttattttgtatgccttgagataagacctctttggttacagtttagcataattgggaattttagtttaataatatgaggactacaattcttcaatgaagacaaactcagaaattcagtatctttgttcacattcttctgtatactttagtctcaacagagatgggccataatctgggtccaatttccactaggaactatgtctctaaatttggttgctttcagagaatctctcctctgtctccctattgcaggtctctaaaaatagcaaagactggtaaagagctttatacttttaccagatggtatctcactgaacccccaaacagacctgtaacatttttaggagggttattacccatttgataaaagagaagaaattaggaaaggctaatcaacttgctcaacacatccaataccaacagacctggaatttgaaactaagacaaaatatgttactcacactactagaaaccgtcggcagtgatggtactgataaaaatagacaagaca

SEQ ID NO: 274169 - DNA, 506 bp, Homo Sapiens
ctaatgggctaaaacaccataaggtattaagctccaagcctctgccccttctagccattctctaatccctactccattcagggaaataaaaggaagaaaggaagagagaattacttaaggtaaaatttttcagatacaaaaaggtgatctgtaagtaataatggaagcagtgagtcctcagcttctgctggtgggaaggttcatgctgaatatttagcaggcgctctctctaaagagaacagccaccacacttatggcagggactttgctgtcagtagctcaagaggcaaaatgaactacagactgggacaaaaggtgtgaagtctctcgtttacatagattggattcatcacaaatttaccaggtcaagaattccatataaagcgtttcagccttcacttgcagatcatgaaaaatatgacggagatccacagaatcctcagaaactgcatattgttaccagaataaaaaagtacaaaaaggtgtccatattgctcgtgccgaat

SEQ ID NO: 274170 - DNA, 668 bp, Homo Sapiens
  misc_feature (151)..(151): n is a, c, g, or t
aatttatacaaagatattaaggccctgttcattaagaaattgttcccttcccctgtgttcaatgtttgtaaagattgttctgtgtaaatatgtctttataataaacagttaaaagctgacagttcgcccttactcttggaggtcatgttcnggaggggcattcctttcccctggggtcaatgggtgtccccatgcccacatattgcacgtgcagggaggtaagtgcctgcatcccaaatcggttctaggtcaactggcctcaaactgatttgccatgagctcacaaaatgaatccctatgcttaatgaccaggtcacataaaatccagcccacttacaggttttctggcatctgtttgggtgtcctaatttttttggcagtgtcatttgaagaatttttttaaagcagtttatttaagaacatactgattaaatgcaggatcgctactaaaaattgttttgtatccttggtgggtgtcttctgctattttatctacttttgaacactttcaggactttttagccagtttgcctttcttgaaaaatgttatgttttcagcaataaatacatttgataatgactttgtttgtatcattttatgtttcacaaagtagagttgcttgatgaatgagatagcctgaaaaataaaatgcaaagagttcaatata

SEQ ID NO: 274171 - DNA, 554 bp, Homo Sapiens
  misc_feature (458)..(458): n is a, c, g, or t
  misc_feature (532)..(532): n is a, c, g, or t
gtagagacagggtctcactatttagcttgaactcctgggctcaagctatcctcccacctcggcctccaaaagaactatcacaggtgtgagccaccacacctggcaagtatttagttttaacagtattgtccagaggcaatcacatcgttcgtttactcagtaagcattttcttgagcatctaccatgcaccagcacttctccaggcactgaggagtaagacatgagaagatgcctgcccctcatagggtttgctctctgtggtatattttttcgtggctagtcaaggcttcatgtccactactaacacagaggtctggcctgagctcttggcccatctggcccgaaggccttggcaagtaagacaccctaataatttaagacctttttaggaatttcaaatttataaaaaaagttggaggacctaaatgggttatccagacccaatagccatttttcnaagggtaggaatcagagacccagagaaggtgctcaccaaaacttttgggggagatgaatcacccagaaagaggntttgtagccagaagaagaaccc

SEQ ID NO: 274172 - DNA, 618 bp, Homo Sapiens
tgaatcatcaaaaccattatattagggacatatgattgttatcattaccttagttttatagatgacatgacttaggtacataacaatgttcttataaaggtattaagtggaatagaaggcagtcagtactcagagtttagtgtgcaccactactcacttgctattcatttattcatttcattattacaatatgagaaggaatgaggttcagaaaagaaacataagttctgttattaggagattatcaaggttaagctttcctaagactttaacaggtgaggtgaaaaatatatttttcctgaggaaataagtttgttttaaatcataagcacatttacgtaggcttccattcacctgttttcctccttgccttcatataaagatactcatacaaatttattcgttttttgtggattatgaaaacccagtcaatgtagatcctttatgtgctttcttaatacaagccacatgcatttttctgctgagccatattagcattgggcaaaacttgagcctgtcctttgaaatgaaccaaaaatggttgattctcatcacaatgaatggtaaaattttagaagtcccagagagagactggcctgagatttgtgtatgaaggga

SEQ ID NO: 274173 - DNA, 556 bp, Homo Sapiens
  misc_feature (24)..(24): n is a, c, g, or t
  misc_feature (33)..(33): n is a, c, g, or t
  misc_feature (51)..(51): n is a, c, g, or t
  misc_feature (92)..(92): n is a, c, g, or t
  misc_feature (102)..(102): n is a, c, g, or t
ccccatggcttaatggatgggatnccattctgngaaatgcccctgttaggngatggccattgttgctacaaacatcattaaggggttacttnccccggaccntaggtggtatagcctcctattacccctacgctatatggtatggcctgttgctcctaggctacaaacttgtatggcatgttactataagagaatactatatactgaatactatgagagtgattaacaccaatggtaagtatttgtgtttcttaaacatagtgaagcatagaaaaggtacagtaaaaatgcaatataaaagaaaaattggtacacctatattgggcacttgcgggactggaagttgctctgagtggtgactgaatatgaagggacattattgtacatcactgtagactttataaacacacttaggctacataaaaagtaaaactttaaaattcttaacttctgaatcttttgtaataacacttagcttaaaacacaaacacggcaacctgcccgggtccccttccacactgcggaagctttgtcctttcactcttcataatgaatc

SEQ ID NO: 274174 - DNA, 565 bp, Homo Sapiens
  misc_feature (18)..(18): n is a, c, g, or t
  misc_feature (28)..(28): n is a, c, g, or t
  misc_feature (114)..(114): n is a, c, g, or t
  misc_feature (146)..(146): n is a, c, g, or t
  misc_feature (200)..(200): n is a, c, g, or t
  misc_feature (250)..(250): n is a, c, g, or t
  misc_feature (361)..(361): n is a, c, g, or t
ttggaaccctgaattggncctattactnggactaatatttggcccaatatgtaccggttcagctgaaggtactgttaaaggattgaacttcttccataccaaattcgtaaaatnggcactgcccctgagttaccctctgacacccntctggactaccccaggcccctcttctagagatacctccccacaaaaccttcccnatgattcagcagcaaaagtcccccttacacaatatggcgattccaggacncctgttcgcgagcacagccatctgcatctattctgactggcaagtgttcagtgcggtgcttgttatttaaatattctgaatataaccgtctgccacagccattaaagaaantggaaaaaatgagttaaaaactacctacagtactaataaaagagcaggtctgtcgagttttacaggtgacttctaccgaaatattgcaaataagagagaacattctaattttattaaactgatcagattattgaaaaagggaattcttacatcatgtataaaattagtatgaccttgatacccgaacttaacaaagataatatt

SEQ ID NO: 274175 - DNA, 538 bp, Homo Sapiens
  misc_feature (25)..(25): n is a, c, g, or t
ggcacgaggatatgccggtagatcngggggaccttgccacaaggtataattgtggtgggatggctgtgtcttgctcccattcaggatcgatggaaagctcctcctccttcctgttcccctggatgccaagcgatgggcctgagaccctggctttgcatgtgggtgctccccctcaggactttggatgtgcagtgattgctacaaaaaggccaatgaagatgcctgaaccacagccacacagtctccatcacagccagtggtattctgtggaatgagtactaattttctggccacattttctgttaaaaactggttgttgagctgcccacttgtcttggtccaagggatgctggagtggcctgggaaggcagttgttgtttgcttttcttaggatggaacacacttaggcatatttttgggtcaaagcaaaagaagaattcaaaggtgagagaagttgaagataaaaaggggaaaatgagggtagcagatgaagcaaagtcacacagaaagctggcaggcgagtagtagaatcagagta

SEQ ID NO: 274176 - DNA, 707 bp, Homo Sapiens
  misc_feature (90)..(90): n is a, c, g, or t
  misc_feature (145)..(145): n is a, c, g, or t
cttcctcatgagacggcagaaaaaacttataaaatactaatcaacagtttgcaagactaacgttccttagaaaacagcttaggaagtacngctgtgaacatcgaatggagattaatgatctaccctgtcctcctcatttcagcangaatgttctgaacctatgttctcacctttactccttaatggagagctgcatgggggaagtgcatcggtttcaggcccaacttggtcgcccaaaccactgctgggtgtcatctcttcacctctacaatgggagtttgggaatgaggcattcttcaatgttccttcaagttcttaatcatggttctacattaattgggtacacatgcatgcacacacacactccaatggtaaccacatataaagggcatggacaaagttgtttccctcatctcgtcaaaacacttgttgaagttccaacccccagtacctcagaatgtgactttatttggagatagggccttaaataggtgattaacttaaaatgaggccattaaagtagggctctaatggattatgactggtgtctatttttaagaggaggaaaagacacaagggatgcatgtgaagagagagaagggcatgtgaggacacaaggaaaaaggacaccgtctgcaagccaaggagagagccctcggaaggaacccaccctgacaacaccttcaccttggacttccagctcccaa

SEQ ID NO: 274177 - DNA, 761 bp, Homo Sapiens
  misc_feature (91)..(91): n is a, c, g, or t
  misc_feature (94)..(94): n is a, c, g, or t
  misc_feature (96)..(96): n is a, c, g, or t
caagctgtcaccgaagaaggcgtagagctcccggtagatgtcggccagggtcaccgaaagagaagggtcctccggccccgcgccccctggngcnangggaaggccgacccaaagctgggttctgcaccgcccccggagaccgattcttgaaagagaaggctgtcccatggcaggtcgtccaggcgccggcaccccctgccacctgggccacccctgttgggctctgctgcctgggccttcatcttcagcagtcgctctaccgccacctgtaagagccaaggactaagataggcaaaaaattcgaggaacctgggcccatcaaatattccaaagtaagcctgcttggctgctaagctcatgcagggaagggaggcttggaaggggacggtactcaccagaatggctccatagactttgtgtccatgtgctttgacctgggcattagatactgaataatcatccagcacagcctgcaagtttgtccagtaggtggacaggtgtgggtacaggactcgttctactgcctggaaggaagagaaggaatacagttaacatgtctttgatacttattccctcttcaaggaccctttcccatgaaagacctacctttatctctgatcctagacagggctcaatcctcctaaattccctgattggcatattcaaccatatatttatttggaacctactgtatacctaagctaggcattgggaataaagataaggtacaaagggagacaataaaaaatatacccaatatc

SEQ ID NO: 274178 - DNA, 818 bp, Homo Sapiens
gaacaagtaattgtgtaagagaaagaaaccattaacacgttttacacatctcaaaactcacaaatgaaatgccaagaataaaatgtattttattcacagaagcagcattcttcaagttctataaagtggtaccatggacacaccaccacatcacagactagagcgtgacaggactgctcagattccaaacacgttctgaacggtcctccctgtcactttcctcaacgggaacactttattctgtcttctactcaaattaagtatcttgcaagggagttgaagaaaactgcatagcgattttaaaacttcaatgcttttctcaatttttgccacgttctgatgcattttactgactacacggccagtaagtttaaagctttttgcatcgataaagacattgctgcttttagcaataggctttttctcttatatacaaacatctataacttaagctaggaaattgggcatttcacaaagattttgcacaattcctagcagattttaggcaaaataaaacccacgtgttatctttccgcaattaaataaccaaggataggaaactgcacggttagaataaccattccattattttacataaatacaaatgataaagtagaatatgctttggaaagcaatatttcaacatgctaacgatgaagcagaagacaattcctcagcagacagcctcatatgacgtgtgacaacggaaggactctgcccaagcccagctaaatggaaacagggtacatgtattagtgatcgtggtggggcaccctgatagccacagtccaggaaagaacaggtaacatctttcttct

SEQ ID NO: 274179 - DNA, 877 bp, Homo Sapiens
  misc_feature (45)..(135): n is a, c, g, or t
  misc_feature (140)..(140): n is a, c, g, or t
  misc_feature (191)..(191): n is a, c, g, or t
  misc_feature (276)..(276): n is a, c, g, or t
  misc_feature (841)..(841): n is a, c, g, or t
tgggggggtggggcggtggagaatagaaaatatagtgcaaaactnnnnnnnnnnnnnnnnnnnnnnnnnnnnnnnnnnnnnnnnnnnnnnnnnnnnnnnnnnnnnnnnnnnnnnnnnnnnnnnnnnnnnnnnnnntttanatttgaaagctgtggattttacttataagcctacctgaaaactggtaaacngaccatttctagactaagatctctggaaatttggtagactgcctattcaccatatttcagttaaatttccttattcctgtaagtnggtaatggatgggcaaagagtgatataaagcttgagagagattcctagttgacagaaaagcacagaagaactgcttacagagaattaaactttttggtctctcaaatgcagactgcaatactgaaagacttaggacccccttaactccaatatgtctgtacaccatagggaaggaaaaataaattggaatggtgagagctaaaatgcgtggaaaaccagacatatccaggagaaaagtagtcaggcaacttttgagaaaagccttcttagacttttatgttaggctactatagtatataaagttttaagatagaaagtgtgataatagacaagaaaacatctgaaatgaaaatagaaacaggtagctgtatatcagtgataaagcatgtatatgatcagataaaattgagaaaacagttgagataattgcttaaaacaaaatttctataaactaatactctgctgggcagtcctacaaacgtcctctattacttacgaatgtgataaaagaacacaagctcacagccaaatgttgtcaagcttacaggcaaaaacatgtatagtntaaattttactgtagagaaatgccataaaattgtcc

SEQ ID NO: 274180 - DNA, 570 bp, Homo Sapiens
caaaacatccccatttaatagccactcaggaagggtccatcatgcctgtctagatcattaacaggaagatggcacagatacacaccccaccagatccgtgtggcagagttcatgaataagagaatgcccagggggtcaggatgagagttggggcttccagatgcaaccacctctccctacttggagatgctctttccattaccagctcaagaatctggtcttgttgactaaggaaagaggcagtttccttacatgtttgctgaaataaacacacataaagtcctccatccgacaagagttgctgatcttcagtgcctttctaccaaaagattttcttacaaatgtccttctctcctcaaatctgagcacatcttgtgtttttttaatcagtaaaaaggtcatcccttacaggtggggctcaggagaagagaggcaggaaatgggaaggtgaattgggaccgaggaaatggagaagggcagtggaaacttatataggatagggtgaggaaaaaagagttggagccagactgtgagccccttaggaacaggaatcacctctgattcctttct

SEQ ID NO: 274181 - DNA, 423 bp, Homo Sapiens
actgtgtggcgaggtgtccttctagaccacatcagcccccaaggctgggagcagtcgctccagggccgcagcagttcaactcccacacatagaacccaggtcactgctggggcggattgaaacaggttgcctggcttttctctgctgtcagtttggtgtggaggcctatgttctgccccatacaccccacaggccctgcttatgggaaggaacacaagcctccagcccagaggactgtgccgccctgttcttggccgtccacgtttcctctccctctagcaccagcaatacatttccctggcatggacagaaaagacagagaggacttgtacaaaggctttgtaaaaccagaggctagcttctatctttgtctactgttatttcaagctcagggcgggtaataaacatcattggaactagcaa

SEQ ID NO: 274182 - DNA, 493 bp, Homo Sapiens
ttgctcatagaaattctggaaattaggtgcctgaagtcttacactcattttttaaaagtatagcatctgcttccagttttcagtgactccattgatgatgcatgcggtttggccgtatcatactgagctttaaacacaagatttataaacatggtatgtagtgcatcttttgcaaacaggttggcagcggtactgtgtgacttggtcttttgtggcttttttgagaaaaatgaaacactttgcatgtatagtttttttctcccaactacttgtgagtagttcctggttataaaacgttatgaaggtagcacataaccccttttctagaatgaagaggcttttgagctaccagtgtaaggggataggtagaaatagagatgaaaggcactaagatgtcctactctttaagagcattgaacgccagttgtgccatttattcaaagtcatctttgaacttatgttaaaatggggtaaaaacaggtaactacttcag

SEQ ID NO: 274183 - DNA, 455 bp, Homo Sapiens
  misc_feature (238)..(266): n is a, c, g, or t
aaggtagctcccttactgtgggacataaaagttgcttgttttcagctttgaccagtgatgaactgataaccctggtaggaaaatgaaacattggggctgggcttgtaatacgctttcttaaaagaatgccccattgaaattagagtggcacggtgccaccagaccaagggttctcatcccgatgccacagagggaccacaggtgttatgaagtggtttgcaaaattgaatgtatgccnnnnnnnnnnnnnnnnnnnnnnnnnnnnnccccgacaacaaaagcagatatggtctttagtgctcattagatctcaaagggtcattactcctcaaagattaagaaactgcttctttatgaggaggttgtcagaggagctgaatagtatcaataagaggaagatgtttgagattcaaaaggaagtaatattcgactaaggcatagcttctttccatctt

SEQ ID NO: 274184 - DNA, 588 bp, Homo Sapiens
ctacctacatgatctcctaattcccactaaatcctgagactacaaggtactgatcttttcagatgttccctcaaagtcatctgaaaaactgctttctaggaacactcttattttgttatatgagatccagccatgcaataggttccaatttgtgtttcaggatggctgacttcaggctgcggaaactgaaggcaataatgttggcttttggaagggggcaagacgagaaactctggaagaaagctctgactctcaggaagttatctggaaagatacctggatgtttactgccttgggacactgtgggatctccatgtttggactatgggacagagaattgaccctaactaactatgaactatttatttcctcctcccctacccctagttaagtgccacaaagactgtgttatgtagtcagtacttttctcatgtatctttctctagaccatttatatacgggtgaaatgaaagcttttttgcatgtacttgatactcagtctgtaaactcagacttcgctttttttgtgagactatcctttcaatatttttataaacttttgtgtgtgctgtggcagggaacagttaa

SEQ ID NO: 274185 - DNA, 756 bp, Homo Sapiens
  misc_feature (503)..(503): n is a, c, g, or t
caagactgcatagggtcggcgtggtgagggccgctgggttcgaagtacatcctgctctggcccagctccccatagcaggcctccagggggccactgcgctgttgccgcagcatcctgctcagtacgtcgacttcatcagccaggagggagagcttgtgaaaggctgtgatggagccacccaggctgatctgggcctcgggaacccagcggaagtagcacagtttccacagttttatgtgtgttccagagacacgtggcagaataacaccgtgcaggttggcgggtttggaaaaccattctctaaaatactgctccgtatcactgttctggctgtcggtttgctgagctggatctggctttggttttaatatcaatgaatttctccttggaagtaattcttggtcactgatgattccattctttaaggcagacggcattcctcttagtgtggagctgtagcttttctatacagaagagattttattatgttccggggattcccntttttagaaagattgaaggatgcaatggcaaatataaactcaatactatgaaaaattaatggaatttcagcctcaaagaacattttcctcccttcctttgtgtccttattctaatcctcctcccctggaattacacttttttatgtgttgactctacctaggctgttactatcagcctgaatgggggcgggatgagagtacctcctatccactaatttgcttaaggataagttctaagacgggctagaaaaaa

SEQ ID NO: 274186 - DNA, 532 bp, Homo Sapiens
  misc_feature (79)..(81): n is a, c, g, or t
  misc_feature (318)..(318): n is a, c, g, or t
  misc_feature (345)..(345): n is a, c, g, or t
  misc_feature (496)..(496): n is a, c, g, or t
aactggtaaagataactacagtgtttcactgagttctgtgaatagctctgttatattactgaacttgaggaaagttctnnnagcccccagttattaaacagtggctcagaagcatagatcagcccatgaagtttgtgactggcatctgcagttaaagacagtgttgtgggattgtgctctgaatccagggtctatgctgaactctgggtggtgtcagaattcaaacgttagaccaatgagtgttggaggattgctttgtgttcagtaaattctacagatttggtgccagaaaaaagatatcacagaggcctggcctgngaatggaactctgggtgcctggaatgnggaggctctgctctcctgtacacaagctcgttgtcctgtgatttcaggtctcctccaagggtgagcgaggactgaaaacttaaaggacaagagctgtgataacaaaccccacttttcccacagctaccaccacaagatttccacccacacnccccattcccccactccagataaagcttcagtttat

SEQ ID NO: 274187 - DNA, 590 bp, Homo Sapiens
  misc_feature (18)..(18): n is a, c, g, or t
gatccaatgacataattngattatccagatccacagatatatggtcaatggattttgacaaaggcacccaagggcaattctatgggtaggtaaagatttcttgcaacacacaaaaaagcactgaccataaaaggaaaaaatgtaccctatgaaaagtttaaattcagtttgaccttaaactttataatgatgtaaacaatatagatatagatatggtattctggagtgtttttccaaatggaatcaggtgtctttcttcaaaggctcactataaaatacagtttgcaaaatataacatgtatcaccaggattgtgacaaatccatcttgcttgattttagtccctacaggcagcccatcaagattcagacccataacccttcagaattatagaaagacaaaaagccctgttctatagccatcttctggattggaatgcaaagtattttgttgtggtaagtagggctttgaagaagaaagcactgggcccactcctgggtttgttactccagtgctcggcattcaaaacgggagccccggggtctcagagatcattttaatccccctatattaaaacaaaacgtgtctccc

SEQ ID NO: 274188 - DNA, 413 bp, Homo Sapiens
  misc_feature (78)..(78): n is a, c, g, or t
gacttcttaaaacctatttcaaggtggatgggaaaactaaaccaaccatggctcctggaatggaactttgggtaaacnatgccaatttaaggcgggaaattgaaaacaattttgaaataaatgaaaatggagacacaggcaatacttaaaacctctgggatacagcaaagacagtgctaagaggaaagtttatagcgttaaatgcccacattaaaaagataggaagatctcaagctaccaccatacatcaaggaactagaaaaataaccaaaccacacaaaaagctagcagaagaaaagagcaaagatcagagcagacctaaatgagataaaaaaatgatacaaaggataattgaaacaaaaagttggttctttgaaaggatacacaaaattgacagcctgctagctaagtta

SEQ ID NO: 274189 - DNA, 545 bp, Homo Sapiens
aacccagatagaaatggtgtgttagtgggaaaggacgggtgcagacgcagggccagtatgggccccctccctctcctctcctctcctatggtgagcccagcgtgggcaccgggccgtctcagccgtgttcccagggctgggaggacagctctggcccttcttagcctagcctcgtcccaagctaaatgtaagccagttgggctgtgttaaaggaagcagtgtttttggttcgattctgcctctgtagctcaagggggcagcccccagagtcctgtgcattctgccaaggctccattagctttgccaaaatgcacggagatctgccattccggtgcaagtgcaggccttgcgaagggtttatctgcattcgtctcggggggcggctccggcaggggagttgtgttcctgtgcaagggagagctttgctccaggacaggatgactgtcttccctattcttatggacaagtcccaagatgccagaaaggcagtctcccaaggacccaccatgcagaagtgtcaataaaccacaagttctgaactctgt

SEQ ID NO: 274190 - DNA, 524 bp, Homo Sapiens
  misc_feature (452)..(452): n is a, c, g, or t
gcataaaaaaaatcatgccattaatgtgtggaagcagcgaacacacacacacttctcggtgaatttttacttcctgctgacatttcttccacgaatttctcaatactggcagtaaaaacttatgatccttgactgaccgttcgctgttacgagtggctcttcttttccacatgccggatttctttcttcgttttcaccttaaaaccttctccctgcttttgctcagacccactggacccctcttcttcatggaggctaagccttggcttgcaatctgctggagaagtcctactcatctttttcatactgacaggcacacagggtttagtctcttctattataagcttgctggtttcttctagagatttctgatatgctgctagtggtgatgctggttcttcaacatgaccagatacatgtatatttggtttcagagtttccttggtactctngtttcctacatcattttgggaatctggaaagtaagatattgtctattgctctggagtgatttctgtatggct

SEQ ID NO: 274191 - DNA, 128 bp, Homo Sapiens
aaccactgtcccctattcaatgctttctttagtgttaggacacaatttgtaattgtttgtttaatttattgtctgtacctccactggttttgagaagatgaaataaaatgactgttattcaccagtgt

SEQ ID NO: 274192 - DNA, 541 bp, Homo Sapiens
  misc_feature (196)..(196): n is a, c, g, or t
gggagatagggagtggtgggaacagacagggtccagatttggggaagcccagaaatgcacattctggtcctcaacccaaaatgacagtgggcagtatgaccagtgagtttgatttcagcactatgtgagcagccccgtgaagacagctcccacccaagggcaccggcagcacacaggctgcggttttccccctacngtgtaccagcgcatcaataacggtgtcccaatatgcagcttctaattaaattttatcacagtcctgaatgcaccgctgacccacacactcttccaagtgggtccgattcacaggatatttgcgcagttccgcagatctgcagatttgaagaggtatttattctcatttctgccttcccagtccagcagaagttctaatttgtggacggcagctttggtaattaacaaagtgtgttctgtgaagtgaagcaggaaaactcaggactggggagtctcgctttgggtatttatatgcttagttgtaaataccagtgaaatctttgaaatgaagacctgtctgtcttaa

SEQ ID NO: 274193 - DNA, 588 bp, Homo Sapiens
aatcaaaaagaggagattaacctcttgtttttttaccacctggtgaatcagccataacgcacacacacgccacccagcctcttgtttctagtatgtactttgaaatgctaactgagggtcttgatgcttgagcctttgactgataaaactcaaatagcagtccccagtgatttgcctcttaggttctttcttaaattgttggtggatgactgtacattttagtgatttgaaaaataactgacaaaccattgaaacagtttattttatgttggaagagatggcgcagatgtgtgtcagaagggagatcacggtgtgagtttcgtagctatttaagtgatacatacctctagtttttgtatgtcttttgagatcctgagttcatcccctgtgaatcagagtgcacaagcacctctcctgtgagtggctaatgagaagagggacagaccgaccaccagcacagtagggcagatctggacagcagaatgttataacgcaagttcatgtgttgctcccaactccattctcttttctctcgtgcaaccagtttgcccattctcttcctattacttgctccagggataggtaaaa

SEQ ID NO: 274194 - DNA, 383 bp, Homo Sapiens
cacaaagcgtatacacagtttccaaatttggatcaattgtgaagtggatgagaatacattcgatgctcaaaagcttctactttctgaatgacttttttcagcccttgatcttgaatgcccatatcatcaatagggtctaataaggggatgccgtcaggaaaacgtttctgaacttcctgtattgattttaaaacactctgtctattgtccaccggccgaaggtctttaggaatgtaaagcctaacactgctgatagcagacaggagatgcaccaaaactgggacaacctgcatctctcctttctcatcaggtttagctggttttgcagcttctgtagctgaatttttcaagctctctttgctacagcgcagaagtacttctta

SEQ ID NO: 274195 - DNA, 300 bp, Homo Sapiens
  misc_feature (68)..(68): n is a, c, g, or t
tcaggggccctgaaagcttgcgggatgaataactcctcctcctcaggcccagtcccaaggtacaaacnttgcaccgagcagcaagatagcagaggcaggaagagagctagctggaagacacgtaccccctgaagatcaagagggaggtcgccctggtactacatagcagtcacgttaggctgggacaattcctgtttacagaggactataaaacccctgccccatcctcacttgggctgatgccattttaggcctcagcctgtctgcatgcaggcgctcattaaaacagcatgttgctcc

SEQ ID NO: 274196 - DNA, 474 bp, Homo Sapiens
  misc_feature (434)..(434): n is a, c, g, or t
ctctaccgatttctctaaaaatttagctgagtcaaaaacattccgttccccaccacatttaatggtatagttatatatctgacatttatattgatttaatacatttttatattcttctatattagatattttcatttactcatctttaaatatttcggtaacttttgaccctaagattaataatacttacaaatatttctgtaactcccagaagcaacatcagaaaatcacatgtgattcccagccactgtagcagtcctacacaattgtgtatagtagtatatatatactcaatctgcattaaagatactgtgacaaacatattcatttattttattacatacctccaaaattgcccctggaaaggacctctggaatggatgttcccatccaatcctggatggaaatggtaacgggatggtgagggatagccnggccatatcagggacccatttaaaggaagagctccctaat

SEQ ID NO: 274197 - DNA, 574 bp, Homo Sapiens
  misc_feature (519)..(519): n is a, c, g, or t
  misc_feature (561)..(561): n is a, c, g, or t
tgccggcacacataagggaaatgacatactttcttcattagtagtttttcattaaatgcagtgaggagtgaaatgtacattggcctggagtgattcaagaaactcagttgtgagtaaccaaaagaatgtcacactagcttaagtgcagaaggaaaattttgggctatgttcaaaggtgggccaattccatatatagttgctgcaatatgttggggtcctggctttgtctggcttcattctctgatagattttctggaagttgaaaagatgtctcttaattgtcccagttctacattgtaccctgtagcctatagcttcagcacacgtctagggagaactctgattggcctgagttacgatctgcccatccatgaacaaagtggccaggaaatgaagtattttgtttgtacgcttcgattgcctgctgatgcccagagcaggatagaagtagggtcagcaccacatgaactaagcaggattattatatagtggaagaaggatggttcctccaaggtaggnatataaggtcaatattttcatctcactttacccacgccgagncctatgcagtctc

SEQ ID NO: 274198 - DNA, 335 bp, Homo Sapiens
  misc_feature (304)..(304): n is a, c, g, or t
  misc_feature (317)..(317): n is a, c, g, or t
ggggctctatatgggggctgttgacaatttctatgctttcagccacggtgcagcactcagccttttgtccccaacccgcttgcaagttcatgaggctagacccataacttctgttttgcaacactcttacctctaacacagcacagatattaaaacatcttacgtgagctacatgatctgggagtaaatgcctcagaagtttctcattctgattctgttacgtagaaataaaacaaacacacgagtttcaatagcgtcagatgaaaacagttcctgtcttgctacccattaatctgtatgttcnatcagtgattaanggacagcagtggagaaac

SEQ ID NO: 274199 - DNA, 456 bp, Homo Sapiens
atggcaccctccttctcactgaagaatgagggagagcagtaggtcccctctgctaatgctggacaaagcaattagtgcatttcttatgactagttaattagctttttatccagctttttaaactctggccacaactctatggcctcgaagtagagtgtgagtcatccaggaagcaagtttctctactgtgtgcctgatgctcctgagtattatttgcacagtgatgtgtctgtggctgcctccatatgcccccacttagatggatgcttgtacagacgtttccaaggatatcatctgctggctcttttgttgtttctaatcaaagaaccgacaccctttgatcacaacagatcacggtattgtactacaaagactttgttagaaagacttaaattttacacgcttgtagctgtcacagaggttctgacagtatttacttttaccccgacatcaagt

SEQ ID NO: 274200 - DNA, 299 bp, Homo Sapiens
  misc_feature (48)..(80): n is a, c, g, or t
ttgtcacacgcgcattccagcctggacaacagagcagaccctgtctgnnnnnnnnnnnnnnnnnnnnnnnnnnnnnnnnntacgagtgagatatcatctcaccctagttaaaatggctttcatccaaaagacaggcagtaacgaatgctggtgaggatgtggagaaaattgaaccctcatacactgttggtgggaatgtaaattagtataaccactatggagaacagtttaaaggttcctcacaatttagaaatagagctaccatataatccagcaatcccactgcttggtatataccc

SEQ ID NO: 274201 - DNA, 192 bp, Homo Sapiens
ggattccacactctctgacacatccaggacagtcaatggccaagaggttctggatcaggactctaggattctctgatgtcttctgtcttgatgtctacataagctactttatgggagaacatcccttctctatgccccagcttccccatccataaaaaaataattcaaggctgggcatggtggctcatgctg

SEQ ID NO: 274202 - DNA, 459 bp, Homo Sapiens
acacaggtgagctgtgtgctcccggatgtgtcagctggtatatgcgtctgtcagaaggcagctggggagcaactgttagctcagagactaaagaggcagacccaggaagcccttctttgcattggtcagggtttgctgcattttcccaagcccaggaaatggaacccagttcttcttctttctgtgtaaaataataagcatcacaataggctgtgctcatgagaacgcattttgtttccacagaaatgttttttctcactctgtcctgattttgatttctgttaaactcagtaaacacattaccaaattttaaaataaggtgacttgttttccccaactcacagttcaccaaaggtatttcatctgtttgttctgaaaatgcagctgctgtctagatttatgtgtgctctgacaagaaatgttttgtgtaacaataaaaatcatttcctttgatgaaaa

SEQ ID NO: 274203 - DNA, 643 bp, Homo Sapiens
  misc_feature (420)..(420): n is a, c, g, or t
  misc_feature (549)..(549): n is a, c, g, or t
ccaaattaaacaactagcaacagaaatgttcaaatctgtcaaatccaagtgttaacagacctgggaccaggggttcctcatagtggcttagcacagcatacagaccactttcctttggcccaaccggcctttggggtctggagcaccaaacaggccctgaggaagcgtgcaaggaactggaatgcggggaaagtgatgaaatattttgttggttggcctttgcttgtttgcaaaatatatccaatgctcacacctgagagacaacaagacatccttatttgtgaataagtctgcactaagataattcagatttcaagtcatctgtcattcgtacttgataatgatttgttcttcatttaaagtggcctgggtacagagcaacatcccctgtctttatcacatggagctctgccttgaggngcttttcagcaggtaggcaggcaggcagatgggagcacagcccattctctgctgggtgcactaggaacagcaggcacgtgtggtggttagcagctaattaattaaaacaacgtttaagcagtgggttgngatttttaaacacaaaccaactcaaaaacacttctctgctttctatggtaatagtgctcacatcatttgtatgattgtctcgtctctttaaatt

SEQ ID NO: 274204 - DNA, 467 bp, Homo Sapiens
  misc_feature (73)..(73): n is a, c, g, or t
  misc_feature (118)..(118): n is a, c, g, or t
  misc_feature (134)..(134): n is a, c, g, or t
gacatttcaggaggcccgcttggcagccatttttagaatcctgccccgcgcggagagctcctggctgcccaanaaactgcagtcgctccgtgcccaagaccactcttggccagtggangataaaacttttgtangagataacaccagtccagaaaatatcttataattacaaaagcacagggggcagaatgtttttacaatacagctgtgctaatgtaaacatttaatttggcagccttctccacccacttttcaattaaccgggtttatgcagatactttaggtctgtaataaactttattgctaagagtacagtttatgaaacacagatttgaggggcttttttgaggggttttccatccatttaggaaagcacattgtgaatgttatgttgccgtgaatggaaagggtagctttctgtctcaaaagatccatgggcctggcttaactgaaacaattgctttagg

SEQ ID NO: 274205 - DNA, 506 bp, Homo Sapiens
  misc_feature (117)..(117): n is a, c, g, or t
  misc_feature (130)..(130): n is a, c, g, or t
  misc_feature (154)..(154): n is a, c, g, or t
  misc_feature (158)..(159): n is a, c, g, or t
  misc_feature (163)..(163): n is a, c, g, or t
  misc_feature (169)..(170): n is a, c, g, or t
  misc_feature (180)..(180): n is a, c, g, or t
  misc_feature (183)..(184): n is a, c, g, or t
  misc_feature (197)..(198): n is a, c, g, or t
  misc_feature (201)..(201): n is a, c, g, or t
  misc_feature (203)..(203): n is a, c, g, or t
  misc_feature (206)..(206): n is a, c, g, or t
  misc_feature (208)..(209): n is a, c, g, or t
  misc_feature (217)..(219): n is a, c, g, or t
  misc_feature (221)..(221): n is a, c, g, or t
  misc_feature (223)..(224): n is a, c, g, or t
  misc_feature (226)..(226): n is a, c, g, or t
  misc_feature (233)..(233): n is a, c, g, or t
  misc_feature (235)..(235): n is a, c, g, or t
  misc_feature (240)..(242): n is a, c, g, or t
  misc_feature (246)..(246): n is a, c, g, or t
  misc_feature (249)..(249): n is a, c, g, or t
  misc_feature (254)..(255): n is a, c, g, or t
  misc_feature (258)..(258): n is a, c, g, or t
  misc_feature (260)..(260): n is a, c, g, or t
  misc_feature (263)..(263): n is a, c, g, or t
  misc_feature (273)..(275): n is a, c, g, or t
  misc_feature (283)..(283): n is a, c, g, or t
  misc_feature (285)..(286): n is a, c, g, or t
  misc_feature (292)..(292): n is a, c, g, or t
  misc_feature (297)..(297): n is a, c, g, or t
  misc_feature (330)..(330): n is a, c, g, or t
  misc_feature (338)..(338): n is a, c, g, or t
  misc_feature (340)..(340): n is a, c, g, or t
  misc_feature (405)..(405): n is a, c, g, or t
  misc_feature (447)..(447): n is a, c, g, or t
ggggtgagaggctgtcatctggagggagagcggggggcctcagtagcctcttgagggaagtgggactcctggctccccagggcctggcctactcaatctctcccacctcatcctctngcatggacgcagnagggagtctgctccaaacagaccntggnngccncggcgnncgttttttgnttnngaccacccaaacnngtnanaancnncacacaannnangnnanatttggngncaccnnncgcnagntcagnnggncnacngcccaactannnaacataancnnaacgtnactgnggcgggaggttcagcagacccaacacaagtgtncttgccangngctggaatgaagctggcacccggggggccgctcacctgttgaagccatctggcgccaagccttgnaacggaggcgtctgcgtttaggcctggaccagttcgagtgcncccccggctgggaagggaagcactgtcatgtgggtgagtcagcttgtccttcccaccta

SEQ ID NO: 274206 - DNA, 823 bp, Homo Sapiens
  misc_feature (518)..(518): n is a, c, g, or t
cttctaacaggctactactccgtctagaaaataacactgaagtggacatttcatttgcatatttgcactgtttgtaaagataagttgttcgatgagtacaaatcttacagaatacatacattaaagttttataaatccaacggttaaaatgtaattttaagatggtcttgtctggcagaggaatcacctagaaaaaggttggtggttcagctatttccaagataatcttgtgtagtccatcacacacacatagccagtgtctacttcctgatgtgaggcaggttactgtctcctctttggcaactctaatggtgatcccaagtgacaaatggtaggaaacctgaggaccataagttgacatcagtgaggtgatggagcaacagtcacaggaggaagaatcaaagtttaagacaccctgcagaagtagagtcacaggaagaaacaaactaaaaatgagcattgcagagaaaacatctgtaagcagtgctactgttgcgggaggccgacatctcaggcangtcgcttgccaggcagtgtcaatgtaaaccaacacctcagacatgggaatttttgcttcagatcaaaaggacagcagcaatgccatctgctgtttgcttagaaaaatggtaagagcagatgttcccatgtgttgacctgccatcccttgactaagaggccacttgaaaaataatcatgaaatagcacaggagaaacatctgcacagtgtacagcagaccaccaatcatgcagcataggagagaaggaacctgcagtgtacccatgaaataatggtaggcaggtccccaacaagtggtgggggctc

SEQ ID NO: 274207 - DNA, 559 bp, Homo Sapiens
  misc_feature (503)..(503): n is a, c, g, or t
gttacagactagtttcataaagctcaggctgctttgtcctgcaaggagcaggaaatcctaaagagcaggaaagctatgtgtcccaggtatatggcctctacagcacctagcacagtatcatacacacggtaggcattcacacttgctgaataggttaattcagtctcacataaccgatgactgacttagacaacagcatcatcagtttcacagaggtccagaaatttgggggactatttgcattaacttaataataagtacaatgatgcacacatatcagtaactgttaaataactgggaaagccctgggccctctggtactttggccaataacattaccaggcttacgaagtgtcatatcctttgaaattcaggtgaaaaatatgtttctcattttgccagtatagaaaaaggatgtatccgtggctccatataactatagaacataaactgaaatgcaaactgtttggttgcctttaaaaagcatattttgaccaggtacnagtgtcacgcctgtaatcccagcactttgggagccaaggcgggcggatcacctgag

SEQ ID NO: 274208 - DNA, 566 bp, Homo Sapiens
  misc_feature (114)..(114): n is a, c, g, or t
  misc_feature (182)..(182): n is a, c, g, or t
gagactgcatagggctcggcgtgggagaggcaggaggaggagtcagagtcggccaaggctcccgggccgctcccctcaaccggagcctctgagaaggcaggaaaagcggcgccnaggagcagcaccgtgaacgcacctcgtttggcatcgagtgcccagcggatgacttgtgggcgtcaaantcacgaaatgatttgcatggcacagggaagcatttggggtgtttctggaggtaacagaaaattactgaacgatttcaaccaaggaagttgaatgatctgtgttccagcaaattcctgtggtagcaacacagagtgagcatggggtgagctggcaggtgtgtaatcccaggaagaaagacccaggtagtccaggtagttcttccccagggtcaacacagaggacaaggccagagaggtggatggaagggaacgtagcattcatagatagatacataactagatctacagatgatatctcaatcgctcagagatgcacactgaattatttacagtcgaaatgacacaatgtctgagaatcactgaaatattccaggacaaatgaca

SEQ ID NO: 274209 - DNA, 495 bp, Homo Sapiens
ccagaagaagtccaagttacatggccccactgaaacctcaagctgttcaggtgccgcccctactgtggagatggatgaggagctgcattatgcttccctcaactttcatgggatgaatccttccaaggacacctccaccgaatactcagaggtcaggacccagtgaggaacccacaagagcatcaggctcagctagaagatccacatcctctacaggtcggggaccaaaggctgattcttggagatttaacaccccacaggcaatgggtttatagacattatgtgagtttcctgctatattaacatcatcttagactttgcaagcagagagtcgtggaatcaaatctgtgctctttcatttgctaactgtatgatgtcacacaagctccttaaccttccatgtctccattttcttctctgtgaagtaggtataagaagtcctatctcatagggatgctgtgagcattaaataaaggtacacatggaaaacaccaa

SEQ ID NO: 274210 - DNA, 519 bp, Homo Sapiens
aaccgtagaatgtcctgttagtactcagcctgtgtatgagtgctttcctggccttgatcattctcccaagtggtgaaagctgctgactggtgtgcttcagtgcaaaaatctggaagaaggcagcacacatggtgagagctttaatgtacgctggctcaactgaaggatggtcggaggctgggaggcagttctgaggaacaagtggtgctgcgggccccgacgttctttctgccacatttagctagtctccctcctgtgccttcacgtgcgacgatgacaaactgccttacaattttgagtgcggtaggaggaggagaaaaagctgattgatttctcacatgcagaggttgtgttggaattttacggtttgccttccatgtgagccagttctgcatctgcagattcaaccaattatggattgaaaatatttgagtgtgaaaaacaataaaaaattattaaacattctacatataacaaagtttcatatgtaccccatgcatatgtacaaatataattaat

SEQ ID NO: 274211 - DNA, 860 bp, Homo Sapiens
cctccggacgggatcgtgccgccatgcgtttttccgcctttttttggagagccgttgatttccaagagcggagggtgcagccccgtggcggctagagtaggaggggcccccagggggtttattggcaaaggccccaagcgttcccatggggaaaaccacaggacctggccaccaatgtgacaacctcgatgcagaaaaacgacgattctaggtcggcactatgtttgcttcgcaactaccaggatgacatcacacctgtccaggcttgaacgcacccacaaatgacaaatgctatgagttggcacactacagacacacgtcagaaccacctaggccgttgcacatgactgcccgtgtagtgaacgaatgtttccaccgacgcaagaagtctcagtacgttccgcggtgatggacacgttctagacctgcactagccacgtctgtctcttaaatgaggctactggtgactgaacagtttttttattgcatgtaatgctagttcacttaaattttaataatcacacgtggttagaggctacattactacacagcacagctctagatcacagcacaagaaggaaagttctaagttcctattatgagacaaacataacattggcatataaacgaggatgaagacagcgtatgtgcaaaagggaaaccttcaaaccagcctcatgtgtgcactctatgtgtgtgccacgacacacaccccaaagatccagcagcacgttaaaaacttcacacatagtaagcaagcgagtgactattctatacatacagacatggatgattcactgttaggaaaactgctaatacaactgatcacaccaacagatctaaaaaagtctaatgattat

SEQ ID NO: 274212 - DNA, 513 bp, Homo Sapiens
  misc_feature (152)..(152): n is a, c, g, or t
  misc_feature (181)..(181): n is a, c, g, or t
  misc_feature (218)..(218): n is a, c, g, or t
  misc_feature (451)..(451): n is a, c, g, or t
tatctggccaaactaagcttcatagtcaaagaagaaatcaaatcctttttagacaagcaaatgctgagggaattcgtcaccaccaggcctgtctgccaagagctcctgaaggaagcactaaatatggaaaggaaaaacttactggccactancagaaacacactgttttcttttacccagntaacactatgaagccagttacctcaacaagtctgcanaaataacccagctagccatcatgatgataggatcaaattcacacataaaaaatattaaccttaaatgtaagtgggctaaatgccccaattaaaaaacacagaacaacaagctggataaagaatcacgacccatcagtatgctgttgtattcaagagacccatctaacatgcaaagacatacaaaggctcagaataaagggatggaggaaaatttaccaagcaaatggaaagcnagaaaaaagcaggggttgcaatcctattttctgacaaaacagactttgaaccagcagtctca

SEQ ID NO: 274213 - DNA, 545 bp, Homo Sapiens
aagaaaagagcgtcccgtcgcgaccaagtcaagccaggttcagtcgtgtcacccagcaagcagtcagcgccaccgccacgcccccgcggcccactcggcgcactcagccagcgtctcccctgtggagagtcgggctccagccaggagcgctccaggggagtctctcaggaaaaagaagcccagatctcttcagcaatcgtttcttccgtgcagagcaaaatcactcaggatctcatggccaaagtcagagcgatgcttgcagcttccaaaaacctgcaaaccagcgcttcctgagacggggccagcggagtcagagccgggaggctgcgtgggcttctgggccaggtcacgcagacgccggccacaccatccacctggccgcctccatggacccttggtggcttttgtaaattaatttttgatgacattttgagttttaagatttctgaccagcagtctcttacctgtatatttgtaaatatatcatgtttctgtgaaaatgtattatgaaataaaatgggaggaaacaccttttctagctaaaa

SEQ ID NO: 274214 - DNA, 432 bp, Homo Sapiens
  misc_feature (42)..(42): n is a, c, g, or t
  misc_feature (362)..(370): n is a, c, g, or t
agggcttcccccgaagagccctgtgtaaggggtcctctttcntccaaggacatagccctcttggaaacactgctttatgtctccttgaccagttccgtgtctcccagccagcacatagctctgcatattttctctggggcccttctacaagttttgcagatgtcccccaagggaagtcactgtgtgtcccggagctacctctgggttctgcagaggcctttttatacatcctctggctacgtctgtgtcccttctggcccttcaggcaccaccccttccaggcctcgaaaggcagcgggtctctctaggtgcactccaccctctgtgttgctttgttctgaaaacaagaatcaaattaacgnnnnnnnnncaagcacaagtttatttatttatttgagacacagcctgggcaagagagtgagacttcatctc

SEQ ID NO: 274215 - DNA, 714 bp, Homo Sapiens
  misc_feature (85)..(180): n is a, c, g, or t
  misc_feature (339)..(339): n is a, c, g, or t
taactggtcctccaatgtcaacctcctgaatagctgggactacaggtgcacgtcaccacacccagataatttaaaacattttttnnnnnnnnnnnnnnnnnnnnnnnnnnnnnnnnnnnnnnnnnnnnnnnnnnnnnnnnnnnnnnnnnnnnnnnnnnnnnnnnnnnnnnnnnnnnnnnnatgagccactgtgcctggcctatggagagattcttgattcatgttcatgtgtctcacctacccaaagaaagtacatcttacaaatgaggggtggggatgatggtgtctgaaaacaacagagtttgtcccttagtaccacagggcacagttttgagcacnaaaacagatgtgccaagattcccagccttggagggctgctgccctcatacttctcaagcagagggaggttccttgaatgcagataaagaaaccaagctctggcacatgcagacagagggagaaggaggtggggggatgaaggagtagttcaggcactgcgctggaggctctacttggggttatcttattagtccttgttatggcctcataaatggggcatggcaggttggtcatttcatagattaaaaaactttagaggctgacaaaggtgaagccatttgcacaagggtacagaggcagagcagggatttgagattcttctctgaaaccattatgccccaacactccccactcaacctcccgctgccaacctgg

SEQ ID NO: 274216 - DNA, 593 bp, Homo Sapiens
  misc_feature (35)..(35): n is a, c, g, or t
  misc_feature (80)..(80): n is a, c, g, or t
  misc_feature (103)..(103): n is a, c, g, or t
  misc_feature (123)..(123): n is a, c, g, or t
gaaaaaatttcagtacttctgacataaaccaggcnttattctaggaccaaaaggacctccaatgaatgtggacctttatncaattgattaccaattactgttngtcattcacagtagaaaggncatagcaaatctgaggttaatttctctgtattgtaaggatttagtaaatgaggaccatgcaatactgttgtgacccagagttctcctggtaggaaaagggagaacacgtaggtctctgtggtgacactgtggtgaccaggccgagttacagaggtcagcatggatttattgaggctgggatgtgccactgtgccaaaaaagagagcagtgctaccctgagtgggagcgccaggacacaggggctggtatgaaggggttccagctaaatgtacaacagttttagcaccaatagtaacatgttgaataaaagaatctctgaaaatgtactggtgccaaaaaaaatacccatatttgttttctgaataaaatatgtattaataaaagattattttaaaggaagggcaaagggcaaaattagtatatggtaccatctttaaaagaaaaatcaggtcgggcacagtggctcacac

SEQ ID NO: 274217 - DNA, 481 bp, Homo Sapiens
  misc_feature (269)..(269): n is a, c, g, or t
aatatagaacatttacatcatcacacaaagctttcagactgggctgttctagagtatgtctcactctgtcctgtgatgaaaatgcccacttcttactgaggaccttctctgtgacaaccccatgcttaagtactttataatccccagaacatttctaaaattaagtgtgatttaatatatgagaaaccctgaggcttggtggtgataaggtaacttgttcaggatacaaagctggtaagtagcagagctggggattaggccctgcatcntgtctgccccgaagcctaccctcttagccacaatgctacactcactggagatatccaagtcctgcagtaaatgcattgcctcctgtgtttctgtttagcgtcttctgtgagccggtgagatggaggtggagctgcagaaatgggactgggcaggtgctggcactagggtgtgttgaggatggtgttggccatgcactgcacactttacatgc

SEQ ID NO: 274218 - DNA, 495 bp, Homo Sapiens
ttctagcctgggcaacatagtgaggaccctgtcccttaaaaaaatgttagtagttatgctacacataccattgtgggtgggatagtaggttttctatcccagtgattatctctactctctagaagattgccagtctccttggcagatggaaagagagactggggaattgccatgttggctcttaaacttgttctctgaaagcaacagatcctttttattcatattccattggttaagatcacatggtcaatcacttggacacacttatctttcaaagggccaagggtgtacagttcaactttgtacctgagaagagaactgaaaatatttcatgaatagcactaataattgtagcagtattgaaatataaaaatgaaaaccaaaaaagcacaaggaaaagattaatacatgtgactataaagggtataatctctgaattatattgaaagcataaatgaacagttctaaacatggaagtctttagatcgagtatga

SEQ ID NO: 274219 - DNA, 523 bp, Homo Sapiens
  misc_feature (17)..(17): n is a, c, g, or t
  misc_feature (40)..(40): n is a, c, g, or t
  misc_feature (46)..(46): n is a, c, g, or t
  misc_feature (51)..(51): n is a, c, g, or t
  misc_feature (501)..(501): n is a, c, g, or t
  misc_feature (504)..(504): n is a, c, g, or t
ttgatctccaacaacgncaattcttccccgccaaaagagngaaggnccagnaagcacagccaccctttttgcaatcgcagtgcggttcctcagggcacacgaatccggcccagcaggatgctgaggctctggaaatccttgtaatacaaagcagcttccacttccaggtttgcccaggttaaatacgaataagcccactgagcttccgatccacacacatcgggtgttctcagaagaaagacatccacatgcagaatttgggatgagtgagagatcacagggtgcaagtctcagtacaggaaatgttacttcaacctgctctccttttcccagagcacttgtagagggaagctggctttcttctgaggagagctgtcgtcaacaggaagcaactctggacagccagagaccaggtgaggacaaggttgctgggtgggtgcatgtggcatctgcaatgcgcaggagaccaggtgagtacgagggtgctgggcgggtgcaggncgnatctgcgatgcgcaggaga

SEQ ID NO: 274220 - DNA, 338 bp, Homo Sapiens
  misc_feature (194)..(283): n is a, c, g, or t
  misc_feature (318)..(318): n is a, c, g, or t
tttcaggtgactggccaacagggagccctaatgtaactatggacttcgggtgactggccaagagtaagccctaatgtaactatggactttgggtgactatgacccaaatgtcaatgtagcttcattaacagttaataaacatttcactgtggtgtgggatggtgactgtagtgggggtggcggtgtgtgtgcannnnnnnnnnnnnnnnnnnnnnnnnnnnnnnnnnnnnnnnnnnnnnnnnnnnnnnnnnnnnnnnnnnnnnnnnnnnnnnnnnnnnnnnnnaaaacaataattataaactggaaaaattctcttanggaaatcctaaaatatggaa

SEQ ID NO: 274221 - DNA, 763 bp, Homo Sapiens
  misc_feature (239)..(239): n is a, c, g, or t
  misc_feature (362)..(362): n is a, c, g, or t
  misc_feature (404)..(404): n is a, c, g, or t
  misc_feature (454)..(454): n is a, c, g, or t
  misc_feature (732)..(732): n is a, c, g, or t
  misc_feature (734)..(734): n is a, c, g, or t
aaccctcatgacctttgctcatacttcactcgtgatatttatcttaacctagcctgaatcacagtaattggtttacttaatttcctactagatctaatactcccttttctcccattgagaaaaggggcattttactcttgcaacccttgaagcacctactatatttctctgctacttatacaaatacagtaaaaaatatgagttctggccatcaatcatggtccgtaaccaatcctagncaaggtctcacccccatttttattaagaaacaatggctcaccccatatgtataatgccaatcagtgacaaagttaatgaatgctaccatgttctaacattaaccttcacccaattatttgacnttaataagaatgattttatttttgtagagacagtaaaatgantttttttaaaaaagacaaggtaccatttacattccttattttcttttccnttaaaggtttcagacttgagaagtctgaatattagggtcagcataagatccaggccagatgccagggcaaatactggcaatagcaaaggcaaagcagacctggtggagactgcaaatggagacctcagtacccacctaaaagggtcaaccgctactcagctctggcaatctagtctcaagcaggaatggccaccaggtatagccaagtcctgtgggttttctagagatgctagaagttgagacttcttaaatatgaaatcttcctattggccgcgagngngcacgcctgtaatcccagcactttgggag

SEQ ID NO: 274222 - DNA, 788 bp, Homo Sapiens
ttttaaacttatttactttatttatgagtgctcttttacttgtaagccaatttggtagacacaatgtattacaataggtgtacatacaaataaacacatctagacatgtagacccacacataaacgaagaaccaacagcttggaaccttagctgtgagacagcaatacaagcttgttggcatttactttgtctcaatagataatccaacaaaggcctgtgaaccaaaatttcaggtaaagcagtctccatggagcttgatttttcaagaccaaacctctccagattccaaagaacactggggcccaaaccagcacccaaggagcatgtcacatgttaacccaggccccctgctttagaacagcagcaaccaaaggctgggatacaatgcaaatgccatcccactttcccattcaaacaggaaactccagattccaaactatactggggctaaacagtattgcaaaccggagagaaaattctaaggggggcttagtactagacctcaaaacctctgccgagagcaccccctttggagaggttgagattcggaggatcctcagggcggtcccctatggggtccaaaagagtgtcagacgtctctgacctttctctgcatggtttccctccagagcctcctatgagctatgagcttgataaggatagccctgaactgtaatgatacataggaactggatgctgggtgggcttttttgtccttagatagttgaataggacaagcaaaaaacttagcataagaaaaggtttaagtcacctgaaacaagtgtga

SEQ ID NO: 274223 - DNA, 497 bp, Homo Sapiens
  misc_feature (238)..(238): n is a, c, g, or t
ccggtggagattgctgccactgctcggcctgctgggttcttaacctccagtgtccatcttcatcttttcccacccgtagggaaaaccttgagccatgtgttcaaacaagaagtgggctagagcccgagagcagcagctctaagcccacactcagaaagtggcgccctcctggttgtgcagccttttaatgtgggcagtggaggggcctctgtttcaggttatcctggaattcaaaacngttatgtaccaacctcatcctctttggagtctgcatcctgtgcaaccgtcttgggcaatccagatgtcgaaggatgtgaccgagagcatggtctgtggatgctaaccctaagtttgtcgtaaggaaatttctgtaagaaacctggaaagccccaacgctgtgtttcatgctgtatacttaagaggagaagaaaaagtcctatatttgtgatcaaaaagaggaaacttgaaatgtgatggtgtttataataaaagatggt

SEQ ID NO: 274224 - DNA, 898 bp, Homo Sapiens
gctgtagagaaaccatttaagtgtgatgagtgtgggaaagcttttaggtggatctctcgcctgagtcagcatcagctgattcacactggagagaagccttataaatgcaacaagtgtacaaaagcctttggttgtagttcacggcttattcgccatcagagaactcacactggagaaaaaccatttaaatgtgatgagtgtggcaaaggctttgttcagggctcacaccttattcagcatcagcgaatccacactggagagaaaccctatgtgtgtaatgactgtggaaaagccttcaggtcagagtcccagccttatttaccatcagagaatccataaaggagagaagccctacgaatgccttccaatgcggaaaagccttcagtatgagcacacagcttacaatacatcaaagggttcacactggagagaggccctataaatgtaatgaatgtgggaaagccttcagtcaaaactcaacccttttccaacaccagataattcatgcaggggtgaaagccctattgagtgcagtgagtgtggaaaagccttcagccggagctcatatcttattgaacaccagagaatacacactagggcccagtggttttacgaatatgggaatgccctggaagggtccacctttgtgagccgtaaaaaggttaatactataaagaaactgcatcagtgtgaagactgtgagaagatatttaggtggcgttcacacctaattatacaccagagaattcacaccggggagaagccttataaatgcaatgactgtggcaaagcttttaatcgtagctcaaggcttacccagcatcaaaaaattcacatgggatagaccacttacatataaatgtgtatatatgtgaataaacctacagccttaacttaa

SEQ ID NO: 274225 - DNA, 593 bp, Homo Sapiens
  misc_feature (29)..(29): n is a, c, g, or t
tctatatatgacacatgacaatgtccatntcacaggactccatggctggccagatgacctcaggctggcccaagatctaatttatttaatttttaaagcaaatacatatttatagattgtgtgtatggagcagctaagtcaggaaaagtcttccgcccgagctgggaggggagagtgtccatgcactgaccagtccaggggctcaagggccagggctctggaacaagccagggactcagccattaagtcccctcctgcctcaatcctcagcctacccatcttataaacttgatgactcctcccttacttacatactagcttccaaggacaggtggaggtagggccagcctggcgggagtggagaagcccagtctgtcctatgtaagggacaaagccaggtctaatggtactgggtaggggcactgccaagacaataagctaggctactgggtccagctactactttggtgggattcaggtgagtctccatgcacttcacatgttacccagtgttcttgttacttccaaggagaaccaagaatggctctgtcacactcgaagccaggcttgatcaataaacacaatggtattcc

SEQ ID NO: 274226 - DNA, 456 bp, Homo Sapiens
  misc_feature (287)..(287): n is a, c, g, or t
tccaaaatgtagttgcacaaattctgaatcccagttaaatggaatatgttgatgaattgtggtctgtccaaaaacttgcttaacatcctcaaaagttacttctcctttgccagctttgtcaaacagctgaaaggctaccataaacaaagcatcaggggcacacaggacagattcaaaggcaacaaattcttgaaaagatattaatccatctttggtctgatccaccactccacttaaaagttccacagtctttggattaaggctggctttctccaaaaatgttcaangtatcgatgtgacaaagtcattgggggacatgaaaaattcaccgtttttctcaatgcttgcatacttcaaaaatattgttctaagctcagctggatctgctctcttggttaaagcaccttggcggccgcattgattcgccccggttgcggcagctcgtgcgctcgtgcc

SEQ ID NO: 274227 - DNA, 516 bp, Homo Sapiens
ttatttctactaaggacccagagcaggcctgtccatgcccattccttcgcacagatgaaactgagctgggactggaaaggacagcccttgacctgggttctgggtataatttgccacttttgagactggtagctaaccatcttatgagtgccaatgtgtcattaagtaaaacttaaatagaaacaaggtccttcaaatgttcctttggccaaaagctgaagggagttactgagaaaatagttaacaattactgtcaggtgtcatcactgttcaaaaggtaagcacatttagaattttgttcttgacagttaactgactaatcttacttccacaaaatatgtgaatttgctgcttctgagaggcaatgtgaaagagggagtattacttttatgtacaaagttatttatttatagaaattttggtacagtgtacattgaaaaccatgtaaaatattgaagtgtctaacaaatggcattgaagtgtctttaataaaggttcatttataaatgtcagtat

SEQ ID NO: 274228 - DNA, 761 bp, Homo Sapiens
  misc_feature (381)..(381): n is a, c, g, or t
ttggaaataattgtggttgaggctgtagctggcaccctagctgagctcaaatcctgaagttaagagttgctgcattgggcccttgcttgatttttattagaaaagaataaatcattctgcaatttactgctacaaaaagagaaactctccttactgtagtggaacatattacatattataaaaaccaagtttagataccaattaagcaaataaatatttagtgagcatttatcctttaccaatgactctttttgtgaagacacaaagatgaacaagctctgatccctgactctgagaagttcagttctgagaagtctatttcccatgtcccccacacctcatctgtacgtgaagataagccagctggtcttgaagggctcnacctcatccccaaaaacccagtggttccacacccagatcacaggaggtgagctacctgcccaactagcgacatggaatcttcagcttactcaattattgaaataattgagtaacaataaatagcctttgtcttttgcaggtggaaatcaaagaatttcacagaaatcagtaattgtcagaaacatcgataattttacttttgtaccctttaattattttgcacacaaaatatgtgtaggttaaccaagcaattaaataaaacacacatactgatttgaatttttataccagaagcacttcatatgtaacaatgcgtatatctggtaataaggaaaggtaatttctatgaatacgggctcagtaaatgtttgcagaatgat

SEQ ID NO: 274229 - DNA, 899 bp, Homo Sapiens
agcttcaggaggaattcccattatcaagttcatctagtggtccacacaggagagaaaccctataaatgtgagatatgtgggaagggcttcagtcaaagttcgtatcttcaaatccatcagaaggcccacagtatagagaaaccttttaagtgtgaggagtgtgggcagggtttcaatcagagctcacgacttcagattcaccagctgatccatacgggtgagaaaccatacaaatgtgaagagtgtggcaagggatttagtcgtagagcatgatcttaaaattcactgtaggatccacacaggagagaaaccatataattgtgaggagtgtgggaaggtcttcaggcaggcctcaaatcttttggcccatcagagagtccacagtggagaaaaaccattcaaatgtgaagaatgtggggaagagtttcggtcggagtgcacatcttcaagcccatcaaaaagtccacactggagataagcccatacaaatgtgatgagtgtgggaagggcttcaagtggagcttgaaccttgacatgcatcagagggtgcacacaggagaaaaaccatataaatgtggggagtgtggtaagtacttcagtcaggcctcaagtcttcaacttcaatcagagtgtccacacaggagagaaaccatacaaatgtgatgtgtgtggtaaagtcttcagtcggtcttcacaactacagtctcatcagcgagttcacactggggagaaaccttataaatgtgagatatgtggtaagagcttcagttggcgatcaaatcttacagttcatcacagaatccatgttggtgataaatcctataaaagtaataggggtggtaagaacatcagagaatccacacaggaaaaaaaatctataaaatgattctttgtgaaaa

SEQ ID NO: 274230 - DNA, 795 bp, Homo Sapiens
  misc_feature (409)..(409): n is a, c, g, or t
  misc_feature (505)..(505): n is a, c, g, or t
  misc_feature (696)..(696): n is a, c, g, or t
  misc_feature (710)..(710): n is a, c, g, or t
aagtgctttaaaagtactaaggatgcttagtcctagaggatgacatcatgcatccatagctcattgttgacttgtgctcttcttcttgtaaacacgccctttccctttcttccacctagaggcacctgtgacatattgggtggtcatagcactttctcccagtgacatgttccggcttcctaatggaacccacaggctaaaggggaagctgttggcagtgtccctttcctttttgggccatgagtccatccaaataaggccccattccaatggcctgtggtctctgtgcctctctgatgagctccatcaatctgtcattcggtgctcctttggaggcactcgattctgagccccagccacagcttcctaaagcttctctttccagcagtttacacaaaatcaagtcagntgtgtttgggaaattgttcccatgacccagcctttagtctactggaaggattgactgttctttaagtcaagtggaaaggagctatattctctttcntgattcagtgttttcagatgtaggcaagcaatgtaggagggctacactgaagcatgtggttatattacgagtgacccagcacgttgcttccaaaatctgcggggaaacatttaaaccagcctgtgtacagctcagggttgaaccaggcctctgtgaggatgccaagacagccacaaaagtagcagggtctntgctgattattgcncctgctgggatattctggggtcagtggttcaaattggtcacttccatcagtcagataagttctgctgaatccccaagtagcataa

SEQ ID NO: 274231 - DNA, 574 bp, Homo Sapiens
  misc_feature (515)..(515): n is a, c, g, or t
  misc_feature (519)..(519): n is a, c, g, or t
acttgacaaaattttactttagcccttgcatctccctgccaggctgccggacagctcccccgacacccaacccaggaggcagcctgatcccaccttgtgctttggtaggggacatccctcacccctctctcccaggagaccagggccaacgtaccttgagagtctgtaaacctacgccaggactggggttaacaccccagcccaccagctgagtctgccaggacacggggctctgggaagcttctgaacccctcccatgccccagatcctgtgccacccacacccacaccactcaggactctggaaggaggtgagcggggaccataccaagaccccagaggtgcctgttggagagcagggcttgcttggggggaagacaatgaagcagccaaggatccctctcgaggggctctgtctctggctgtgcttctccagcccaagctgcccctctccccgggggcagtgacaactgttcccccagagcaagtccagagtcacagaccgtatcccctccnaccngcaaacaggaaactaaagcagtgaaaacatcaagctttgttgcccagagaaaaaa

SEQ ID NO: 274232 - DNA, 658 bp, Homo Sapiens
aatgtgcacaaacccatcagtttaggttgttcacacactgtttgcaagacctgcttgaataaacttcatcgaaaagcttgtccttttgaccagactgccatcaacacagatattgatgtacttcctgtcaacttcgcacttctccagttagttggagcccaggtaccagatcatcagtcaattaagttaagtaatctaggtgagaattaaaccactatgaggttgcaaagaaatgcgttgaggatttggcactctacttaaaaccactaagtggaggtaaaggtgtagctagcttgaaccagagtgcactgagccgtccaatgcaaaggaaactggtgacacttgtaaactgtcaactggtggaggaagaaggtcgtgtaagagccatgcgagcagctccgttcccttggagaaagaactgtaacagaactgatattacagcaccagaaccctcagcagttgtctgccaatctatgggccgctgtcagggctcgaggatgccagtttttagggccaggtaagataggttactatcttaccttttttattagctattggggcttgaggatgccaatttctggagctcggtgaatcctgagactcaacccgtctttatatgtacaaatcttgatataattaaagataaatttgtttttgt

SEQ ID NO: 274233 - DNA, 490 bp, Homo Sapiens
  misc_feature (88)..(88): n is a, c, g, or t
  misc_feature (108)..(108): n is a, c, g, or t
  misc_feature (151)..(151): n is a, c, g, or t
gacaaccctatgtgacaggtggtgtcgttatcacccccattctagagacaggtaagctaaggtggggagctgtgaagtgactttgctncaagatctcagagctcgtgnagaggccagccagcatgtggatccaaaacttgtgctttaaccnactcagttatcttccttccatctttcatcaaatactggggcttcaagttaatcctctggtaatttcaaaagttttaatctaaataaataaccttgttcatgatgtctgtatgtcttcctactgttttgcctgaaatgacgtgttctagaggttgcttgatctatgacatctgcaggctaaaagaagtccagaatctaccagggtgtacaatagccttgtctttgaacctctggactgtcgtgatgtcctggctctacagctccagggagcgtaactagtggcactgtgggagcttgtggggctccatggctattaagctggctagtggaaagaaaaaaa

SEQ ID NO: 274234 - DNA, 496 bp, Homo Sapiens
  misc_feature (295)..(295): n is a, c, g, or t
atatgatattgtgaagagccgggtccagagtaagtgagtgcaccattttaactcccttccctcaccttgagcttctattgcaattattgtccgaaaatctatttggcaatcatgaccatctcttctatgctatccaggattgttaattatcttagattcaccattgttatcagaagttatctgtgtccattcatttattcaacaaacatttactagtgtggtttttagcttgggcgaatgggggtgtggtggtgctgatgaccacagcaggggagataaggggctgcaggtgctnggtgggaggtgtgagagtttgcaagtccatcacgttgagcttccttgacacacaaatagggcgttccagacaatggttgctacgtgagacggctgacaaggagactcagaaatctctggtctgcaatagttgacataagaatggggcccacttagttcaggggctcctctctaaaaggcacataaaaagatctggaatttg

SEQ ID NO: 274235 - DNA, 578 bp, Homo Sapiens
tcaggcaaaagcaagcctccaaaagccccttggttcttctctgtgtgtctcgccccttctgccttgtacaccagactgccggcaagcaagcggggaggtggcgaacagctgggatcctccagtgaaaagtttgctcagcgcgagagatgtcaagaggctgggattgtcgcctatcgggaggtggggagctctctcactcacacttcctgggaaatgaaggagaactaataggcagcccgcatttgcagccagccagcctgggtggtattccttgaagtgaagcgctcataaatcccttctggggccagagccggtttcacaagctgcaggatttgggtggcctgcctgctctttgggagcgggcttgggaagctgaagaaattgaatcaggacctcaggccctttacagactcccttctacacttggttgctgattaagaacattatgtggcatttaaaatggcacaattatcttccgttggccgttcctagctaaaagtagactcctatcagcccgtgactgacgacaagaaggctcttcgtccctgtttttgaaataaacatgggtaaaatctgaa

SEQ ID NO: 274236 - DNA, 129 bp, Homo Sapiens
tggaaactattttaaaaatttaaacctgaaatacagtacctagaatctgtaactcattggatagacagtataaaacagaattagttaacttaaattcaggtcaacaggccaggcgcagtggctcctgca

SEQ ID NO: 274237 - DNA, 451 bp, Homo Sapiens
caaggtaataaagcacttcagggcttgctccccaagtgggcctgatttagcaggtggtcctgcgggcgtccaggtcagcaccttcctgtagggcactggggctagggtcacagcccctaactcataaagcaatcaaagaaccattagaaagggctcattaagccttttggacacaggaccccagagaggaaaaagtgacttgcccaaggtcgtaagcaagctactggcatggcaagagcccagcttcctgacggagcgcaacatttctccactgcactgtgctagcagctcagcagggcctctaacctgtgatgtcacactcaagaggcattggcagctcctagccatagagcttcctttccagaacccttccactgcccaatgtggagacaggggttagtggggctttctatggagccatctgctttggggacctagacctcaggtggtc

SEQ ID NO: 274238 - DNA, 722 bp, Homo Sapiens
ttaaactggttgtcattagtgggagctgttatctggtgagacaaaccagaataaagacttacaggcttcatggaatcgcagagttaaactgtatcttaaccggttgaattgtgatagaaaagatggcttcttgctttttgaaaagattacttacataaccgatagtcacttcactccaaatcccagatgttaatcatcatcatttcctggttattgcctcagtttgagaacccccgattcagtccgtcggtgctgatggaggggttagatgaccagaagtggtagcttcttaatcctacgtcacaattcagtggtgagtgactgtttgtgtgctcagtgggtgccaggcctggcggaacacagcaccagggcttgtgaccacgtaagcctccatgggtgaagagcagctgataacaaagcaacacgaacccacacagactgttctggcttggtgtctgctgttcccagcttttttccaaccttcgttaaaaaaacctaaaccgataaaaatgcggaattggtagttgatggcatacctgtctatacagtgcctacgttcagagtttttcccatttagtcagaagggctgcatctgcttttttagtgaacacttgaaaatacgttgcaaacatcatgatgcttcaaccttaagcactataatagaatgcatttcctaaataaggatattctcctatataactagaaccataggaattcgaaga

SEQ ID NO: 274239 - DNA, 515 bp, Homo Sapiens
  misc_feature (21)..(21): n is a, c, g, or t
  misc_feature (73)..(73): n is a, c, g, or t
  misc_feature (80)..(80): n is a, c, g, or t
  misc_feature (91)..(91): n is a, c, g, or t
  misc_feature (396)..(399): n is a, c, g, or t
aaatgagctgaggcccattcnaaggaggcctagaaagagggaaactggaatcccagagaggaaagagtcctanagtcatncaaagttgtancccatgcccagcctcccctccacagaggtggcaggcagcgtggctcaatctgatcccacctcccatgggcacccactgggtaggtgcttcataaagctttaccgagttaaatgtgaacaaggcctacccactttgccttgggcagctgcaccaaattagaatttccagatgtgactcatctcatattccaacagctggagtgggtcatcctttacccctgtggctccttcctacagctctcctgatctcagcacaagcaggggagcagctgggggaacacagctttatgtaattaccgcggttannnnaatatttagcaagttgcattgtaacattgtaactgtttgtttctccttggatgatgagctaccccaaagaaggggtcatatcagattgggtctcattaaaatgtctgatgaatgaa

SEQ ID NO: 274240 - DNA, 582 bp, Homo Sapiens
  misc_feature (51)..(51): n is a, c, g, or t
  misc_feature (159)..(159): n is a, c, g, or t
acataacacgctgctcagcctggaagggcagagagagagccacggagtagnggacccttggatgatagtgcttcccaaagaccaccccgacacagccaacacagaaagaaagggaaaagattccagagacgttccagcataaggccatgcagggcggcntggagctcgtgggcaggggctgccgacctctgagctgggtgtgctgggagccagggatcactgggtgccggccacagaggaaaggtccctgaggacacagtaccgaagtctgatcccagaggaggaaggaaggtgggccggggagaaggtctgagtgcagggatggtccaggaggaggactggaagctgcaggatggctgcagggggccgtggaccctcctgggcctgaagctcactccttccccgcctcctacaggggcaggggaagccagggctgcgagttctgtctgtggactctcaatggctttcactccttccctaggtaactatggctaagagacagaataatttgaaaatacgttctttttcctctttagctggatgtcccacagagaaaatggaataaatgtcatttggactgag

SEQ ID NO: 274241 - DNA, 575 bp, Homo Sapiens
  misc_feature (164)..(190): n is a, c, g, or t
ttaaaattcaagagataaactccaatgtattaataccttcacttacaaagttggttacaggtaaatattcataactttttgttttaatttttaacttactgagagcttagtatatggtaggtaatgtattatgcttttaaaaaaagagaaacaaggtcttcctnnnnnnnnnnnnnnnnnnnnnnnnnnntagttacgggtacaatcacggcacactacagcctcgaactcccgggctcaagcaatcctcctgtctcagccacccaagtagctggaactacaggaacttgccactgtgtgcattattattatgcactgtattatgcattttatatatattgcctcattcaatctttagcataaccctatcatatatggaatattattatcacaactttacttgataaggaaactaaagcacaaagtggtgaactaactcacctaagatcacatgtctagtaaagaacaggaaattcaaaaccagtttgactctaggactctgaggtttaatttacatttttccaaatcatattattttgattaacaactgagtacttctttttaaatacttagta

SEQ ID NO: 274242 - DNA, 254 bp, Homo Sapiens
tagctatcctgaaaattttcatctgagggtagattgcgtcatggtcttctgaagttgtctttctctttaagaccattcattgaataaacctattagacgctttggagtcataattgaatataagacagaaatggtttgatataaaagcaaccaacatgcagtagataacacagcaatagagtgaacacattgcagaagatagggcaacctctaatccagaaattatcagataaagaaaaaccaagacactttgc

SEQ ID NO: 274243 - DNA, 473 bp, Homo Sapiens
  misc_feature (21)..(21): n is a, c, g, or t
  misc_feature (136)..(136): n is a, c, g, or t
  misc_feature (338)..(338): n is a, c, g, or t
  misc_feature (392)..(392): n is a, c, g, or t
  misc_feature (405)..(405): n is a, c, g, or t
  misc_feature (455)..(455): n is a, c, g, or t
ggatgtgtgaacatggtaatnggggaagaagtgctttggagatgctgcatgttttgagcaacgggagagatgaccaggtcagttggtaaactagagctggccaccgattgctttgtgttgcccacttctagtggcntgggccaggccagggtgggtgagggcagtacatgccggtgctgcagttacccctttcccttcttgctgtgcaaacctttgagtcttcgtgtatttttctggagggaggaagtggtctcatcacagctggaatgactgtttgagcaaagttcccctgttggtctcatcctgctgaccggacaggactctgggtacctgtcctngcctaagcccaagccccccattcttactcatccccagcccccattccctctgcnattccccaaggtnaagatggggggaagctttctaatggataggataatttttttcctttaagnccccaacttaccccttta

SEQ ID NO: 274244 - DNA, 310 bp, Homo Sapiens
aagttccgggatacatgtgcatgccgtgcaggatttgttacacagggaaatgtgtgcgtggtggattgctgcatccatcaacccatcactgaggtattaagcaccacatgcattagctatttatcctgatgctctccctcctgtggccccgctccccgacaggctccagtgtgtgttgttcccctcccaaaggtatatttttttacctggaaagtaaaaaaggtaatttactttataaactcaaacaacacttatcaaactcttccagaagcatccagttcccctgcaagttgtattttggttctacttt

SEQ ID NO: 274245 - DNA, 388 bp, Homo Sapiens
ggaaaaaccattcctagctcacggggccacatgccatagtttgctgacccctgaattcaacctttctgcttttctgcaagctgcctctctctcgaaatgttttgacatctagcttgctgacacctttgattcaagcctggcgcacggagactggctgagctcacctgagtcttaaaggggccgcccacagagccaggcagcgactacagatccctcttatactccctcactgctgctgggaagagctggagggaaacaggaagcagtaatctcactgcaggaaggggcaactgtagacatccgggaagcatcccgacagtcccgttcctttcggggaagccgctgaaatctcctttcccttccctagatgggccctagtggacctaag

SEQ ID NO: 274246 - DNA, 409 bp, Homo Sapiens
agcatttaatggactagctggctcactgctgcctttccactcctgccctccatggtctgcagtatgccagtaaacaaccaagtcactgaggcaaagtggtcatgcttcctctgaaactagagacctaaaaatccatgactgtcctattaatatggcaaatgtagtctcttgcttgggaaatacattcttggtagttaaagattttgtgatctacatgttactttagtgtttatattactgaaaacagtatgataagtagtaaaatataaatttggttgctagtatttatttgtgatctgtggctccccacttatgaacaactacttacaatataaaaataattacaaaagatagttcttaaagaatgaaaagtggtttcttttcattcatttattcttttcgaaagaat

SEQ ID NO: 274247 - DNA, 493 bp, Homo Sapiens
atcttttaatgcagtcttgctggaggctgaaaatggtgcaaactccactatctggaaatggaactctgggctaatacctcagctcggcaatgtttttccttcttaccccagctggaggtgaagacagtaactcttactaagctattttctcctggaaacacagacgctccctgagagagaatgagagaatgaccagtgatgccatctcccgttgcagcgccatgctgtgtgtgcgccagatgggcctccatgggactgctgcttacccgtgggatcacggcccctccgtggatttgggggatctgagaacacgttttctcaggtgtttatctggcaacctacaaaatcccccagcccttctccagtagaagcccagaagggtgattatggtttaaaaagccaagtcataaatcgggctttctctactcaacttgctttgtagctgaggaaatccgcagagagcaatttaaaaggaaaagaaaaaggctcagaa

SEQ ID NO: 274248 - DNA, 347 bp, Homo Sapiens
taccttcgcaccaagaatatcaggctgaggctacatatacttcaacctgcatgagggctgccaccctggccatctctcctacaagcacagaagcacaaatcgaacagggattgaaaacagaagaaagtgctttttgactagttgaaacccagtcagtctttacaatgtgtagtccaatctcctggaaagaccaaaggaaattggaggacttcctggcccgttcttcggtccattgccgcaaatctctaaactttccctggtgcttcttgtggaattcacatggctatttatgcaacgcaaaatcccacaacaactttttaaggaagctgtaattatggggattaggg

SEQ ID NO: 274249 - DNA, 475 bp, Homo Sapiens
  misc_feature (19)..(19): n is a, c, g, or t
  misc_feature (26)..(26): n is a, c, g, or t
  misc_feature (38)..(38): n is a, c, g, or t
  misc_feature (60)..(60): n is a, c, g, or t
ggattagaaaaggattgcntttccanatataataatcnggggactgtgcccattttaccntggtacccaaatggggaatgaggttgaaatgtatgcagtaaggtactccagtaattaattggtattttttccccagctgacatgatttctcagtgttagaaaacaaacccttagaactttcctttctgcctcttcaatccatcttaccacacaatatttcatgattcaaattcttcaaagtcttatacgcaggaatgtttattctgctgtatttctgtgaaattaaaaacttggaagaagcttcaaaagctcttggaggctttaaagttctttctgttgggtgtgcattacagtttacttaactgatgtttgcgatttatataattttgccttgtattaaatgttacaaagttccaaatgaatcagtattttaaaaaataaaactatgaaagcattaaaatataggtgaattttt

SEQ ID NO: 274250 - DNA, 453 bp, Homo Sapiens
aaagaatgtgctgcttatatgcaatgggcttattattcctgttgttaattggaattggtatacagacattttccaatccttcaggtttcaactggcaaatgccagcaggacatacccacagagccagagctcctcaggctcctccacgtccaacggcgtctcacagtcctgaggatgaggacctgggtgaggggagcacgggagacacagccatcaaggcatccacctccaggacagacaccagccaagaaccccctcagggcaaggcctctcacaagtccaactccacggattccaccgtaagtgctgtcaactggatgcgcatttacaaaatctgagttttctcaaagaagctgaagctttccgtgtcctcagtgattctggactcccagcgccgtaccactccctgccagccacacagggggaccacaggaagcaggccttccccgtggc

SEQ ID NO: 274251 - DNA, 451 bp, Homo Sapiens
  misc_feature (24)..(24): n is a, c, g, or t
gtagtattctcaggtggtgacttntgagcagagcactgcaccatgctgagaggacctggggcaaatgtggaccttctcaccccactgtgcagtgatacaggggttgaagccatgacttagccggctggagagcaagtggtttttgccccagcaacctggtcaatgtcaaggaagccgatgtgctcagatgtaggctgggcacccccttcctgaggtgtttcctgtcacccaacagacaggctgcctcccagcctccagatggaattgggattgccacctggcttaagatgcaggtcccttttgtggctgttctttagctggaaagcagtgttttgcattttgttaacatactcaggaggcctgactcctggctgtggtcactttacaaagaaagttttttccatgtaacagaaaagaaacccaatatgggagtttttgtacttcataattt

SEQ ID NO: 274252 - DNA, 614 bp, Homo Sapiens
cttgcagggccttctccaccttggcaagatcattaaggacattcagagacacctgggccttattttctgaatcatttagcacatctttcagtgttttcagtgtttccagatatgcatgtccaggttggcccttcagttcattctctagatgttgttgacgatcctctacagcctcttgtacagcttggtagcggcccagaaaagctatcgaaagccccgctgggacaaaatctggggcagaaggctgagacatcagggccgagcagctttgcaacgagccatttcaattttgggggtgaaggccaagaagattttgtcaattcccgctgacaggaatccttcaagcttggcaaggactgccgggaagattcagaaatggaagtgtgttttacccactcctcctttgtcttgatgaccttttcaagctcatcaagctgcttgaaataagcatttatatcttcctgtagctgaatctttctttctagatcttccaaatgttgagatacattcttccattctgatgaaaccttctccagaacattttttatttcttcagtaggaaggccttcttttcccatttgctccacaaggatttgtccagtttggtttaattg

SEQ ID NO: 274253 - DNA, 769 bp, Homo Sapiens
  misc_feature (276)..(276): n is a, c, g, or t
  misc_feature (341)..(341): n is a, c, g, or t
  misc_feature (636)..(646): n is a, c, g, or t
catggctgatgagtgtgggtcgcaataactgatgcgtggccaaaggtgtttcccacaacagttggctttgattcaccgtgtatcttctgcactggctaccgtgtagttatgccttgcccttcatgggtcctgggattacttgactgctgccgaggctaacagcctcttttttattctgattgtgacccattatattagtctgttggccactgactcactagtacttggaagcaacccacagctatgttgtcacatccacgtattcccctcaacacngcagcaaattggggtgagaccaaggaaaggcccatgcacaaaggaacctgacagcttgtcagcangtaagcacctgaggccaattgtaaggcggtaatagcacacactcagaaaaccatacgccagcagtgtgtgtgcatcacatgcgggagttccatattgtgggctttcataacagggactctcctgcatgctttaatccactgtattgccaagctacctcagaggactggctaaatgttcccatattctcttggctcttcacattaggccacaagtctcttagaattgtacccatgattgagtccatcggagaatctacatgccggttatcttgagggaccacttaaggtaccgaannnnnnnnnnntgtgggaattttccaggatagccctctttttttatccccgcaggaataatcactccccggggggtttgggcccttttgaaactttttcggtgttttgggccgtgggttaactgacgggacgcg

SEQ ID NO: 274254 - DNA, 525 bp, Homo Sapiens
  misc_feature (12)..(12): n is a, c, g, or t
  misc_feature (425)..(425): n is a, c, g, or t
  misc_feature (427)..(427): n is a, c, g, or t
atttcggcacgnggagaaggctggagggagggcttgggtgcctgggctgggtgtggggcagggctggcacagctgcagagtgcacagggagggtcagaagtgccaagtcactggccgttaactcagcacccaggccaagcccccgcctcccacttgaagccccctcttacaactgttttgggggcttggagcagaagacacccttgtagacagacataagaggggcagaaggcttgaccagagttctcttgagcctcctcatgctctcagagcagggaacagcgggggaaaatgtttacactccatgcacaatctgtgcttccagtccctcaccctatgtggcccaatagctggctggatttcacacttaattggtatttttttctgccttcttcccctgcccccactgactcctctcctctccntnttgattgtactcaaggttctggggcctgggcctggggtgggtaccaacagctgctcgctgttcccatgtcctctctccagctttgctgtgtttctctg

SEQ ID NO: 274255 - DNA, 487 bp, Homo Sapiens
tgagtctttgcacttcacttcccctgcccccagtcacgatgacccctaaaagcttcctttgcccttgctttcttagggcatccctagtgaaggggcaaaacctgagatttctccgtggacctgacagccaaggcagggcactgtctcctgaggccagtgccagcacgtgcatggttcacagaaaaggatccttgggctcagaatctcgagaaccgcctgctcctaacaattcagcaagtcaggggcttcctctctgttagtccccaaatccttacttattttaaaaagactagaccctctctaaagactgttccattttaacatgtcctgattctgcatccgtgggttttgtgaaagagagctagctggcggttagagcctggaagaaggagggaagtggcacctcactagcatttatcacttttttccttctctttttaaaaataaaaccagactctgttctgaaaataaaaaacttgagacttgt

SEQ ID NO: 274256 - DNA, 281 bp, Homo Sapiens
ggcacgagtacccatatatgtcatctctcaataaactgaattttttaaaaattaaaggaatttacttaattgcaacaagaggactggaaaggaaaggctgccgagcatcttggcctgctgtaccccatcttccttcaaaggagggtgtggccacgtccgacagcagagttgaatgaagcctgcatgcttgcacaacatcagaactgtcagaatgtcaagatggaatactttcaattgagttttacaaaaagacaagaaatttgctgggtgtggtggcgcat

SEQ ID NO: 274257 - DNA, 717 bp, Homo Sapiens
  misc_feature (108)..(108): n is a, c, g, or t
atcaataaacattgtcaatgttgatgttattgttatcattattttggtgttgtctaattaacatgacatatttattagagtttcctacaaccttataaagcaattttnaagaatgtcaactacttaagtaagagctgtccttttacaatataatagattcattaaatgctgaaaaagaccgcagcatacctatttagataaaatatcaaatgttaccttttttgacatattaaaagtgatcataaaatcaaaaaattataaaaccgtgccttctagtaaataatcacaggtttagctgtattttcaaaagtgcgcaaatctgtactcattaggagaacatattgatttgtgtgcgtatttcaagcaaccattttacgcatgcggagcccatggccgacagcattctcccctgggaaggtggcttctctaattgcagtgaatggtgattctatttgtagacatattttcctatagcaagcattcctttctgtgattattatttaaaaatacttgtccttaaattatttagtcttcttggctataaaggagaaaaatctacagcactgcaaagacctcacagataatataagtctgagtagaaaatgcatattaagtcttaccaacaaagtaatctatgtttcctgcaatacagggaccacaagaagcattttaataataaagatcctcaaacaaccacttaggccacataagaatttg

SEQ ID NO: 274258 - DNA, 469 bp, Homo Sapiens
  misc_feature (23)..(23): n is a, c, g, or t
ttgatcctccaatgtctaatttnctttccgacacatttaccaaattgcttgagcctggctgtccaaccagactttgagcctgcatcttcttgcatctaatgaaaaacaaaaagctaacatctttaccgtactgtaactgctcagagctttaaaagtatctttaacaattgtcttaaaaccagagaatcttaaggtctaactgtggaatataaatagctgaaaactaatgtactgtacataaattccagaggactctgcttaaacaaagcacgtatataataactttattgcatatagatttagtttttgtaacttagctttattttttctttccctgggaatgggaataactatctcacttccagatatccacataaatgctccttgtggccttttttataactaagggggtagaagtagttttaattcaacatcaaaacttaagatgggcctgtatgagacaggaaaa

SEQ ID NO: 274259 - DNA, 608 bp, Homo Sapiens
  misc_feature (47)..(47): n is a, c, g, or t
  misc_feature (59)..(59): n is a, c, g, or t
  misc_feature (213)..(213): n is a, c, g, or t
  misc_feature (351)..(351): n is a, c, g, or t
gccatgcaacaagttagtattgcagacatgggccaaggagccagagngcattgcagtgntcagggtccgtgagtcgcctggggaggccacaggacacagggtcaccatggggacagccgccctgggtcccgtctgggcagcgctcctgctctttctcctgatgtgtgagatccctatggtggagctcacctttgacagagctgtggccagcgntgccaacggtgctgtgactctgaggaccccctggatcctgcccatgtatcctcagcctcttcctccggccgcccccacgccctgcctgagatcagaccctacattaatatcaccatcctgaaggcccagcgagcgcanattcatgcagatccagagtgtgatgctggacctggactacggggaccgcgtctgggtgcggctctttcaagcgccagcgagagaaacgccatctacagcaacgacttcgacacctacatcaccttcagcggccacctcatcaaggccgaagacgactgaggcctctgggacacctcccggctggagagctcagctgatcctgcccctgcctgaccccgccaagccctaccgtccagcgatgacaaaaataaaatggt

SEQ ID NO: 274260 - DNA, 447 bp, Homo Sapiens
  misc_feature (102)..(102): n is a, c, g, or t
  misc_feature (176)..(176): n is a, c, g, or t
  misc_feature (181)..(181): n is a, c, g, or t
  misc_feature (207)..(207): n is a, c, g, or t
acaaaagaatgagggacacttcccacaccgtttcccccaccgtgaaacatcccccagcaccttcagggcctgggctccaatgtgtcagtgacctgcatgtgnttgcattggcctgagcggagctggctgcatgcaaaccactggccaggaagaatcccactcctgctgctgctccntgaantgcgccgggtcccgcgaagcccaccngtgcgcggcctgtgtaaacagtgcgtcttctcctgttgcacactttgggctgcgggtcacgaccagggattatcaaattgacagagctcagctggcctctcactccacgtccgggcacattgcattttgttaattatcgtcttttgcttttgacgtaaagggtcggggtctgggtcagggtcactgtgtattttcctttccttctcattaaagttgcccaagctctcagggcccccagtt

SEQ ID NO: 274261 - DNA, 474 bp, Homo Sapiens
  misc_feature (380)..(380): n is a, c, g, or t
ttaaattgagatataattcatataacatttcacataacaaaaatttcaccattttcaaagtgttcaactaggtagtttttagtacattcacaaagttgtgcacccatcacctctatttaattctagaacatctccataaccccaaaaagaaaccgggcatctgtaagcagtcagtcccaattctccttttcttcaaacccaggcaactgttactctattttctgactatggattaagaggcactgtgaacttcaaacaaacagagcagaaggtgaagctgtgttaagttctatgatcttaactacgtatatatattaaaaactggaaaaaatacatcaaaatttgaacattcatttgcctctttggggatagtcttgttntctttgcatttttctctactttccaaatttgctaaaattagaattagaaaacaaaaatcaaacactcatatttcagtgagaggtcacaaaatat

SEQ ID NO: 274262 - DNA, 960 bp, Homo Sapiens
  misc_feature (680)..(680): n is a, c, g, or t
gaggttggccaagactcagtcatccaaagcctgcctcagtccaggcaggtgcgctcacaccacgggcagttggcactggctgacgttgcagaactctcctggggccgtggactcagagcacctacagttgacttctccacatgggttgggcctctcatggcaagggtaccatgttccaagcagagtttccctaggatgagcagtcaaaagagaagatactaggatttgactccttaagatgtatcctcagaagtcacacgacagcacgtctgcggcatcatcgcagtcacagactccacacagatgcaaggtagttcagacgcacactgcatctttccacgggttaagtggcgagttacattacaaaagagtatgtcagatggcagatattctttgcaggaggctttttgaaaatacaatctcctatagaattttaaaattatgaattgtgataattacaaatcatgggcagaatattgagagagaaaggatataaatccaattaggtaagaaattgtagcttagcaaaatgaaagcattttttagaaattatcaattataattatcataatgatcaataatggcaggtttctgtgagatacccaccccccttgtggtaatattgaaccatcattgcatactggggtgtactgcattctaatacctgtgagactgaagtnattggatttttacagtgaatatatgtacatacatgtaaatcccatgcgatgctgtgataatctagcgtcgattgaatacactcctcgaggaactgtttcgcactcaaatcaattcctcgggacgttcaagtggattatatagcgtctgggtgcacgaactctcgacttgagagcgaaaaaacactaatgcgggccttgtgttatcgcggttacagtgaaggcacttgcctctggtacgtgcctatgaacgccgtggctgccgcctgcggtgcacacagct

SEQ ID NO: 274263 - DNA, 463 bp, Homo Sapiens
cttcttggcggattctcaatttccctataaaaaagaaaattcatttccagccactaatgtaatgtcagcgtgctgtttactaagcatggatgatgtatagggggacaccactttcagaggactacttaatgatgcatagaattaaatcctgagctcctcagctgagcctcctccctccctcctggttcccaggctcccagtgcatcctgggagaagcaggcttggcataacctgtctccctcattactagaattctggggtctctgccgaagaagcttggaaatcgcccttaactttagcagacacatttgcccttgggcgtaagaccaagagtgaagctcctaaggcagtaagaagctgatggccaggggaaagcagactgttcagtgctgagggagatagaaacagggagttcacaggatgcaccagggtgttggggtttcctgtagggaaagggctggca

SEQ ID NO: 274264 - DNA, 414 bp, Homo Sapiens
accgaccgttcgcgaaacagctttccacacaatggagcttcatgtcctcgtgcaggaagtactcatcgactgatgtggcagactttgctccctggcaaaactaaagaactctcctattcatggaggcgaacactgaggatgctttccacatgaaccctgaagtgaaaatctgatacatttcctgcagcaagagaaggcagccaacatgaaggaaaatgtggcatctgcaaccgttttcactctgctactttttctcaacacctgccttctgaatggacagttacctcctggaaaacctgagatctttaaatgtccgttctcccaataaggaaacattcacctgctggtggaagggcctggggacagatgggaggactttcctaaccaattaattccactgaccttaccaaaggg

SEQ ID NO: 274265 - DNA, 514 bp, Homo Sapiens
  misc_feature (54)..(54): n is a, c, g, or t
ttaacctttccccctatttaaagctaggaaatgttttaaaggaaaaatgaaatnatcttcctttagcttatttttaaggtaaaacagctttttactctgttattgtggtaatggacagaatattacatacaaaaatattctgggagagctttttcctagttggttttaaatcattgtgccacctgaaaggtttttagattttataggagctaatttgtccaccagcattaatgtaacacagtgtagttatgaaaatatattgaaggacaggaagtggacacgaagtgatttttgtaacctgagcagttaatgaatgtgccaacattttctaggaagggacagcaagaatattctgctctgtagttaaaatactggctggcttttgatgtcttcatgcttaattgtgatcactttcttgcactgtgatgtttttacgtgaatatgttgaagtagaagtctaccatattattttataaaatgttttctgtatggcaataaactgaaaacatggatc

SEQ ID NO: 274266 - DNA, 744 bp, Homo Sapiens
ggaaaatataatttattttacgcttgaggggattttatatcaaaagagatgaattcttatatatactagtttatcatacaggtggaaaaaggaaaaacatgtaattacagctgattttctcgtttctaattttatacacacacacaccacccccccaacacaaacaggaaaacaatgggatttgctatgccttctttcatgtggagcccctggacccttactttggctcccacctctccatgtgacggtgccactaaagctccagaagccacatgttgtctcacacgtctcagcttcagccaacactgctccacacacttggaatcctgcctcaggggccaactctgacttgaaactctcactgttcatgagtcagaagaaacccctccttctgcctttccacagcatcaggctttagtacacacttctgacactgcccaggttccatgaatcctggcattaggaggggttatgcgttcaacttctctactagaccgtgcttccagaggaaagattcttatggtcctacgtgtggtctgacaacccattgccaagggtacagcatcatgcacataacaatcaattagcaagggtctgatgatgccaaaagctatcacctttaatccacaacaaatgtttacagagtagtttcaatctccatgcaaaacatgcatagacaggttataaagctctgtgttaagttcaacaaaagagtattaatctatgtacctctcccctcttctc

SEQ ID NO: 274267 - DNA, 788 bp, Homo Sapiens
  misc_feature (34)..(34): n is a, c, g, or t
  misc_feature (91)..(91): n is a, c, g, or t
acacattcattcattcaacaaatatgtattcagnatctactgtagaagaagctctgagattctgcggtaaatagacatgcaaagcccctgnctcatggaattcctattctggaaaggagagacaaacaaataagcaagggaatcttagtgtgtgtggagttctctgaagtaaaccagtgtgatggtgtagagagcaccctgtgtgagtctgagatgaggggatgtgatgttgtggacttcagccaggtttttggcagctagtgtctgtccctttttcaagtagctccaagtcttcttatgaagaatgagttctttctgtggtgtgtgactttagtgggagggcagctcttgctctatgcctctcagttgccttccactgtaaccagtcctgtaactggtctgggcacactcggagggggatccatggtagctccttgccatgaagatgtggggtagaggagggttctgtggggcctcggaggtgttcaacattttctagaagtgttcctggtgggtttatagaggcattgatatggtttggctgtgtccctacccaaatctcatcttgaattcccacgtgttgtgggaaggacctggtgggaggtgattgaattatgggggcaggtctttcctgtgctgttctcatgatagtgagtaagtttaatgagatctgatggttattttaggggggagttttcctgcacaagctctttttgcctactaccattcacgtaagatattccaagccacatggaactgtaagtccaattaaagctctttcttttgta

SEQ ID NO: 274268 - DNA, 160 bp, Homo Sapiens
tttagaaagctcatttttaatgaataataaaagttaattatctttttgagctaacgtgatttttaaaatcattctgactactgggtgtataaatgtgtttgtgtgtgtatgtatttatagatgttctttaaggtacccttgaaaactctacattatgtat

SEQ ID NO: 274269 - DNA, 1110 bp, Homo Sapiens
  misc_feature (87)..(87): n is a, c, g, or t
  misc_feature (510)..(510): n is a, c, g, or t
tcatgtggtaagtattgtagaaggaagcacaaggggctgtgataatgcagaagagggcacttttgatttagcaagacagtggcagantaggacctaaacttaagtcttctctgaaggtgatatctattctcttataccctgttatctcctgagtttgtgtatacatacagtgtacaaagagttttcctatatcctcttttctgcctacttttggggctagactctaggtactgctgacatgaaaaaaagaacaatcccatgtggcaggtcactgtgccatagccaaacaaacactcattaccttggaagggaaacagacttccctgttaacttctggctcgaggccactttgggtgactatatgctgagctccctctctgagtcatttgatctcttccttcctttcctccctggttccattttacttaaattcaatttctggcgggttgcagagtccagagaccagatgcagctaggctaggcattttcgcttccactggcctctatagnatagggatttaacacctcatagggttggtgaggatcagatgaaataatgaatgcgtgaaaatgctttgtaaagtgctatatagatatcatggtggttgttcccgagtgcattttcaagccgtgaaaaattgctcagatgctatagcctgaaagcctagggttgccactgacaggcaagaataggcactccagtatagacaccaagatttactagaccctttctctgccctcgaaaaactcacagacttaataggagaggattgaacctcaatcctccgtgagtaaaggaaaaggagtggggtagatagggctttaggactggtaatttagttccatggtcaaacaaaaaccacgaagtatgtgctttatttaaggtcgaacagatagtaggtggcaattataaaagatacttttagtgacttcttatgatgtaacacaaaaaggggaagggggacttaaaagtagattgacttcagttcaaatcctggttctaccacttactgttacctgatttttaatctttttaagcttcatgtataaaaatggaagatattcatacctactttgaagggttattataaagcttaaaaataatcatat

SEQ ID NO: 274270 - DNA, 786 bp, Homo Sapiens
tagaatctacctcatggatatgttggtaagattaagtttggtgcctgacatataagtatttaataaatgttagttgttatgattatttttctcttccttttctttttcaccagccctcattattaaaaagtaagctttgggaggaaggaccactattacgcttttgtattatgcttaataggaaaattataagcattcatccaagtgtgttgagtactttgtacttgtcttgaggaacagtagggataagagagacctgctgtcatagagtttacaggccaggagaatgcagacatttatagattttttaaaaccctacctataataaattgtatagcattactcaaaggggaaattgtaaggcatcaacctaaggtgagtatataccaggagaacccaataaaacttagtggattgttaaagcctctttgaaacctggaagcggggtaagagttagtagggagatgtcatcagtaaattttattaggaaaaagggcagaatttcaaatcccacaaggtctgaaggaactgggcacttttgaagaacagaaaaaaggccagtgaagaacaggaaagagagaagggcctagttctgtagaggaaaatggaaactagatcaggtagggcctttgtaagctgcataaaggattttggattttatcctaaactcagtgagaaagcatttttgaagggttttggtggggtaggatcagtgtacatgacctatcagatttgcctactttttaaagggttttatgagccatattaaacccattgtagctttta

SEQ ID NO: 274271 - DNA, 852 bp, Homo Sapiens
gaggccaatggggacacaccctttgacaccctccgccaaagaccggatccccaccccaacgaggccatcgagagggcggcctaccccaaggtccaatcgcattccaccttaacgccgtgcaaaataccacaaggacccgccacaaactttttttatagagatgcgtaccgctttccgggtcgctgttggacccagtcgcgaacatcgcatcgaagtcgaatgctgggcctcgggtaaccttaccctgaaccaattctccgggtgtacgcactgcatgctgtggcagtgctttgtgctgtctggtagtgccactgactgctggagattctgatagtacatgaagtgtgggactgctgggaagattcagaaggagtgttcatcaaaccttgttgactaagtgactgctcaaaaactgacttataaaggctccgaaatgaggcactaagatcttcaaaattatattctgagaaaagtagttgcttgtctctttctggaaggttgtactgtggttgctgctgaggagttaatgattgagagactgattctggatggcttgtcaccggtgtataactatgcacacttccaacactgttcaaattaacagatgccaaactctggtctgagagactgttgttaaggctactgcgtgggctatcactaccatcctgatcagtgttatacaatgttacccgttctacagatcgtgccctcttctttggccgagtaggcagcgcatcttccttcggattggtgtctattgcccagtaggacccctttccagggtcatccttagatcgaggcactttaaggaaacatttgttcaatgacagattatgtcgtatggaattcttc

SEQ ID NO: 274272 - DNA, 913 bp, Homo Sapiens
gttcttccagcacatggaccaatacaggcactctctcattggacctgcattaatttgaggttgcttcattttgcctcttacagtgactcctacagagctaggcttgctgagtctctacggtgactgatggagtcagttggaggggccagttgctactgaaaatgctcagagacctaactcctaatttacccataaacaccagctagccaggctgtatcatgtctgctgtaattagttagcgagctgacttagcacctcagtgctataatttaaagtaaaccctgaacagtcttagacttgagtatgcacggtacagttaagtttaatctgtatacaggttgtctctttggagtctgggaatcagtttatgctattggtcttctctgacaatctccaggtcacgcagatttgtactgtctaggacataattagcctagattatactcagtgattgccagcttcacattggcctgtgaacaaattattttgtttaatgtgagtgaatcaataatgtgtcagcagtagcatcactactcacatgcctataaaatgcaagacagagttcagatgtttttatattttaaaatagaatgtatattccttactgtgttaggtgattactagtttttttaacagatgaatctgcctctataatagtggtctaccccaagaaaatattgctgacacaaattgatttatggaaagttttatttgctactacctataaatgagttgtgctggaatttgttgctgtatctgcagttcttagtatttgctaatataaaagatccttgttatcttagtgccaaaaggctacttaaatgaattcataaaatatccttaccagaaattcataggaaacagtgaaaaaagtttgttactttactttgaaaaataaaaacctcaaaagttt

SEQ ID NO: 274273 - DNA, 955 bp, Homo Sapiens
  misc_feature (827)..(827): n is a, c, g, or t
ccttcctttttgtccgataggaagtactattctgaatctaccagcaaggctggcatgtgctctcttataaaaggaaaagacttcaccatgcatagcctcttcaccctaactgctcagttgtttgctacccctggcaaggatgttctaattgtgcagtggagggtgtgaactcgttgctttaactgcagttccattagctaatcggagtcctgatgtcagtgtgacattgtggtgtaaatcatgaaggggtttttctgccacttcctgtggagagaaaacagttttgcaggatcacctgatgattggccattgtggggttgtcttcttgaaaaagaaaagttgttctgacctgggctgtgctcaggatgcctacattttgcctttgcaaagcgatgaaccccccagaaaggaagtgtatggggggcactgttggagtctgagtgctcccttccctcagcacttctggagaagcctggaaatactgtagacacagttttggagaagagaattcaaagggcttacaaaaggagagtactttgttggccacttctctagaagaggcacagcaacttgttgagtgtgtgttgcggtgtgttgttttcggcaccaattaagggttccaatgttgtggaaggtaaaagggctcaattctgtagaagtacgccctggaagatggggaatataccccaattgctgtttcaatatactcgttgtagaagggttgacccacagagttcttggggactagtgggagtagagaggtggagaaaatagaagctgttgttgcgcgcgctggactcttgtgagatttatccgcgcgtatatangggagatgtgccaatcgtgaccccttcgcgttaagagccgtccgctccgtcgagccgcgcctgcggttagcgtgagcaccgctttcttgtgtgatgacgggtccgaaggcgtgtccgtgccacgagcc

SEQ ID NO: 274274 - DNA, 884 bp, Homo Sapiens
tttagagtgacacccgcttggacacttagaaggatcggctcgccacccccgcggctaccataggcggtcttcacgagaggtccgtcggctgtccgcgttaccccgcagatcccacaagacatcgcatataagctttttcttggaatctctgcacggaacatatctccgagaatagtagacctgtaccttaggagagccgacaactctgcaactgaagcttcgtgccacaattgacgctgattgaagctgtgtccgtaaagagcgacgtatcatccttctgacgatgctttgacactgcacgccaggtcctacatctacattttcatgagcgatagaagtctgtatgtaaaaacactggcagataatctctttcagaattccgtgacaggctaaccaaaacccatatgttgaccagatctgtcccacagtccaccagcttacaagttctgatttaaatgcaaaaatgaaatcgtacaagtgccagcaaagaacacatgacattattttcacaatcttggaggaggaaagacctttctaagcacaatcaagccagaacccataaaggacaagacatttaactacataaaaatgtaaaacgtatgtgtaaacccaacattatgaataaacctaaagacaaatgacaacagctttcccccaggctctagcagaatgtgaactgcagcagccagggtcaactaactgtcttccctttggtgaggggagagagtaaaccaagtttagcagcccacaatgatgaccaggaattgaataatttcctaaatgaaccagaaagggggagaagtaggagaacatttgggatggtccacaattgcaggcaccatcatctattctgttgcattataaataagtctgagtctacattt

SEQ ID NO: 274275 - DNA, 871 bp, Homo Sapiens
tccaagcactgtttggtgagcctggaagcaccgtatcctgtcccaggagtacagtgaaatttccaagcaagagctgaggtgccaataccaaaagaccatggggagtctgcacggttctggttagatcaatagaaaatccatgtgtacaactgttaattcctcatcctccactagcactaaatttgtcactttaaattttgaaaccagggaaacaccacctgtcattctgtccccattctccatagctcttcaatctttacatgccgcaagacttttttgatagctcgtactcatcccagtgtctcctgaaaccccatcatgtaatgtactgggcaccttcttttaaacaaatgtttactctgtgggtttggttcatttcaatttctgcgttctgacacatatttttttaataaagatgagaaagagaaaatgactgttgcagtacctttctagacctactttaactttacctcagatgacagtttgttaacatatatggacacattatttttactttatgtcaatgcatccacagacaagcaaatttttagaattgtcattaattctgtacacacatgtaaactggtcaaatgacatgttgagacgacaaaaagaaaagaaaagtcgtattagcgccgagctatccgtaggtaggtatttgctgccagccgtcgttacagggctggaaccgggccgcttatgctggggtccgttcgccggctagggagcgaagtcggccaagtcgctggtgtggagtggccgttgggcgggacgcgtgtgtggcgagcacgcctggtttcttgtggcgctagagggctgttcacccaaaggtgcggcggcgttggatagccacatttggagaacacgtacg

SEQ ID NO: 274276 - DNA, 905 bp, Homo Sapiens
  misc_feature (849)..(849): n is a, c, g, or t
cgacacagcactctgttggcctctcccatgctgaagcgcttcacctggactgacagcaaacccaaggcctcgctcaagattgacttgagagtaaccagtaaaagtaaggagtcggggctgtctgatgtcagcaggcccagtttctgccattccagctgtgggcacgtcagcgaaggcaagcgcaggttcacctacgaccacgctgagctggaaaggaaaatcgcgtgctgctccccgcccccagactacaactcggtggtcctgtactccaccccacccatctagagtttgacacgaagccttatttctagaagcacatgtgtatttatacccccaggaaactagcttttgccagtattatgcatatataagtttacacctttaactttccatgggagccagctgctttttgtgattgttttaatagtgctttcttttttgactaaccagaatgtaactccagatagagaaatagtgtcaagtgaagaacactactgctaaatcctcatgttacgctgtgttagagagatcgtcctctacctaaatgctttcctggctcaaccgccgcgacgtcagggcacgcaggaccagtttgattgaggagctgactgataccaattgatacgtacccatgggcaacttgagccgaaacaaggaaaaccggtagctaggataatggtgcctagaaattcggagtcctacagctagaatttggaggaagaaaacgaacaacaaaagtgtataagcgagatttcttatgggtattagtcagcgggttacagtgctctggcaagcctccacgacctgcgtctagaggcccctcacccttgagcgtggtcgcggggtggnttcagcgttctgcgctctaggggttccaaggcgcatggtacccgtttggccaacgg

SEQ ID NO: 274277 - DNA, 594 bp, Homo Sapiens
attcggcacagagatgaatacacccacatagtcacccaactctacacagttttaggggtttgtaacataaaactccaatggaactgaaggagttctagaaagtatttaattttaccccctcccttttatagatgaaaaaacaaacctagtcccacagagccttgagtaatattgtggtaaaccgattaagactaattgcggtatgggagggggtttggcctaggacactgggtcgtttccatagggcagacccatgattggagaccatttgctttagagaacttgaaagtcctgtaggtctagctccttctcaaggctttgggctctttattttaaaaagtgataatgtaccaccttctcccattatgtatgcactttggaacttagtactaagtgacacacagtgggaaaatatctcaaatgggaagacactgaaggcaatgcccactgcgcaacagaggtgggattccgatgcagtattactctgctgtgcatgagtggtactagaccttccattagcaatgcacatggttgagaaacattcaagctctcagccattcactccgagagttacgtgccttattcccatataac

SEQ ID NO: 274278 - DNA, 542 bp, Homo Sapiens
caagtcaaggttgcagagtgtatgcagccaggggtagcagccacttcaggatctgggtctggatttgtgctgagaaccactatgaccttttaaagccagtgaggaggttttctgggggcccagaagccctgagcccattggccagacctcctgggagaagcggagcgaatttgcatcaaaaagaacactggcttcattgaaattctcctcatcttgagagaaacaaaaccacaaagaaaaggaaagttttaattctgagaaacttcactgaggagcaattttttttgagcttctaaaaatagagaggaaatgagcctctttgggtcactctagttgccgcctcccctgccccatgcccacccccactgctcactcaaggctagcctctctcagtgggtgactgagctgtcttcagtggaagcccgaggcagatgccacgcaattctggagctggatacggctgcccacacggggaccccagcatgctggacagcagagagacccacaggagagccgcaggcatgattgtgaggacacctagg

SEQ ID NO: 274279 - DNA, 382 bp, Homo Sapiens
atagaggatcatgctactcaaggcatgcagagaatttcttttcccctaggactgactctggaactgtgtgagaaactgctggattctacagtgccaaataaacaactttcaactgaccaaacaagagcttcttggtttatggatggcaattccaaggcacaaaatgctaggaagaactgttctgtttctcagtaagagagacagaaactggctatgggaaagatttcctggtgggaaggccctgaacatagctggcaagtgagactgatgctggcagccctgggggactacaaatggaataggaattcttgataggaatagacactgactctagtgcaggctttgcttatccaatggaagatgaaagtgttcagagtgccat

SEQ ID NO: 274280 - DNA, 442 bp, Homo Sapiens
ctaaaaaagaagcagagcttcaaaatacaagaaaagtcacatatcatctcctggtgaatctatcacctgcatatcactgcctttggataataccttaccttcacagtcagttaatgtccacaggaaaaccataaactgcatattcttatttctctggatagagaatgtgctctctctccccaagtctggggcaatggattgagagctagtaggctccagtacacatcagtgttcctttacaatactagctcttcccagcctatctgccacctaacactatgttaaacatactaatacttttaccaggaaagggagaaaaaaataaagtaaaaaggaaactgagaggaagagtggtgggaggagggaagtaaatatgatcatctctgcaaatgtccagtggcaaatagacttaagagtttatgactctgcaatcatctcagct

SEQ ID NO: 274281 - DNA, 397 bp, Homo Sapiens
aacacaagtagcagtatactatatactgttctgcacatttatttagtggtgttttaggggagaaattctatatcagttcataaagtaccacatcattcctttttcgtggtgctaggtattccgtggaatggatacttcataatgccatcaagccagtccctcctgatgggcatctgggcagttttcttctcttgtgattacaaacaatgttcaggaaataaccacagacagactttctttcacacatgtacaaatataccagctcttttattctcgagataaaagaccattgtgctttcatatgttctctctggtgtgtgcctttttataatgagcatgaacatgtatgtgtttaagagaaaccagctgtgttggtttcactgcctcagtggttgaa

SEQ ID NO: 274282 - DNA, 396 bp, Homo Sapiens
agagaaagtgtgaggtcaacttgcagctgtggatgtccaacaagaggagcctgtctccctggggctacagcatcaaccacgaccccagccgtatccccgtggacctgccggaggcacggtgcctgtgtctgggctgtgtgaaccccttcaccatgcaggaggaccgcagcatggtgagcgtgccggtgttcagccaggttcctgtgcgccgccgcctctgcccgccaccgccccgcacagggccttgccccagcgcgcagtcatggagaccatcgctgtgggctgcacctgcatcttctgaatcacctggcccagaagccaggccagcagcccgagaccatcctccttgcacctttgtgccaagaaaggcctatgaaaagtaaacactgacttttg

SEQ ID NO: 274283 - DNA, 362 bp, Homo Sapiens
tctgcgggctcactcagggaggcccaggggaggcccactgacagttgaggagcattattgaactagtatttagtgtatttgtatttcagcacacttaggaaattaaggaaataggaaagtacctctcatgtcctgcagttcgttcttccctttagtttttcctacgtagcaaatcccctacaggagacgaccttagactgtagcattatctataagctggttttaactttcccatggttctaggaagaaaatgcaagtataaattaagcccacagatattagatcaagtactctttaccttattcacctctataattccagcttcttttcttcttgggtagctaaatcaccaaaaaaaataa

SEQ ID NO: 274284 - DNA, 541 bp, Homo Sapiens
tggcgttggtcagttaggtgacccgttgtattaatgaaaagggaatctagtaggagtttttttacattataaaacacacgaaaatctcaattccgcaatgcaatgaaagagccagcatggtccaacgtacttcatcagctcggggtcctccttgtcgtccttggtgggtgacacttgactccacttttctttgcacgagggcagccggacaagctccggtgtgaagcgtagttccctgtgatgtggccaaagctgtcacagccgggcgtggggcacttgaggtcagcagagtgggcagccatgaggtttctgaggctcttgtcagcaagagggcaaccagagaggctgcggtgggaggcgtagtttccggtgatgtggccgctgcgtcacagccaggggtgggacaggtgagcagctccttctttatgtcctttgggagaaacttcagcttaaagttggtcagggtgacttcccccgggatactccgctcctcaaaattcttctccggaacttcctggttcatcttctttctaagaagaag

SEQ ID NO: 274285 - DNA, 505 bp, Homo Sapiens
aaagaggatctgaaatatcagaaacagagaccggagcaaggcacggagagggggtccccttgaagcataagattaaagggctctgctggacaaagtggaaatggccacatttgggcacagagatgtacagactgggcctccgaaagttgcataaacctttcccacaaggaattcacattcagctgatagtggcgttttcctcacttactcttattaggtaatagattagggtctcactgtttaataattgttttattaaaactaaagaaagtttgggaaccaaatgtgctccaaaagccatttgtcctccaagcgactacagggcaaagtagtgagaatcatgcccatctctctgaaataaacaatcaattcaggggcttctttctacagcccaaatgttggctagatggaacagaagtgactcaatctgtcaaatacaaaatcaggagtcaccccttccagtttcagttcatcgttcaaatggaatcatatccttcctctgttt

SEQ ID NO: 274286 - DNA, 305 bp, Homo Sapiens
tcatcatatccattgtcctttgttcaacgttaactggtttaacccttccacaccttcatttgttgatgtcttgtgggtgggcccagcagttcaacgtaccacattcataattcttcatctttcacaagatttccaatttcactttccagttgaatgagaaaccattggacattgatgtgggagtgagagatggaccctcttacaccagtgctgtccaatatggcaccactggccactatgtggtctgtccaaaccaagatgtgctgtaatacataaaacacactgggcttcaaaagcacagcacc

SEQ ID NO: 274287 - DNA, 479 bp, Homo Sapiens
ctttcttttccagataaaattggttaatgtgtcctgtgttaggctgattgttttgatgatccctattcatggtctcccctgtatccatctctttttgcctataacattgtagtcccatctcactctgatgctgggaccagacatgtgacttgttttagccaatgagatgtcgataaacatgaagcaaacagaagctttaaaggaggcctgccctcttgctctttgccagtgccatgagaacatggctgatcagctggagggttatgagatgtgtaggtgagagacatgcgaaagagccagagataccagctgaagccatcctagactagcccacagtcagcctacccccagtcaagatcaggagagtcacccaacccacagatgactgccgacacatgagtaagcccagccaaagcagaagaaccctccagctgaatctaagacttagaagcaataataaatgtttattatcttaagcc

SEQ ID NO: 274288 - DNA, 519 bp, Homo Sapiens
gccagacagagtctatcatgattgctggtgtagacaacattctccctctcagataggatcccttgagtttcatgatcacctttcttatcctattatttggagtactcatttaagagtcacctactgttaaggtgactcttaaatacaaatacaagacatcttttagacatcttgaccataaacctgtgagggcagattttcatttgctaaaataaataagagggcagtgtcgttgcatgcgttccatattttttgatggccaggaagagtcctggagcctacaagagatttatcaggaacagatgagcagcgtctgacttaaggccacatcctcaaagatgctgtggagtgggtgagcacgattcttactgagacgccccagatggactgtgttgggggttttcatgatttttttctacttttgtttagtgaaacaggaatggatttacaaaaatgccatcatggatagcataagagatttcaaaagtctttattctttttcttcataggctcaagttt

SEQ ID NO: 274289 - DNA, 542 bp, Homo Sapiens
cacggttcctttctgcttttctgaatgcatcaagggtacgagaacttgccaatgggaaattcatccgagtggcactggcagagaaggataggagtggaatgcccacacagtgaccaacagaactggtctgcgtgcataaccagctgccaccctcagacctgggccccagagctcagggcacccagtgtcttaaggaaccatttggaggacagtctgagagcaggaacttcaagctgtgattctatctcggctcagacttttggttggaaaaagatcttcatggccccaaatcccctgagacatgccttgtagaatgattttgtgatgttgtgatgcttgtggagcatcgcgtaaggcttcttgcttatttaaactgtgcaaggtaaaaatcaagcctttggagccacagaaccagctcaagtacatgccaatgttgtttaagaaacagttatgatcctaaactttttggataatcttttatatttctgacctttgaatttaatcattgttcttagattaaaataaaatatgctattgaaact

SEQ ID NO: 274290 - DNA, 346 bp, Homo Sapiens
  misc_feature (191)..(191): n is a, c, g, or t
caaggtcaccatctctacaaaagaaattttacaaatcagccggacatgatggcgggcacctgtggtcccaactaccagggaggctgaggtgggaggatcgcttgatagcccaggaagttgacggtgcagagatccctccactgaactccaggccgggtgacagcagagcgagatcctgtctcaaaaaaaancataaccgacatccagaagtgaaataaattagccagtgtcacaaagtattaatggttgagtcacaaattgaatcctgtttacctgattctttacgtgattcccatgtaaggaatgttaaaaacagtaaatactaattcctctgcgtcctgaaaaa

SEQ ID NO: 274291 - DNA, 485 bp, Homo Sapiens
tccttaaagagacgtccgtctgcccggggcagtaggcccatgtccatgtacgagaccggatcaggtcagaaaccatatctcccaatgggagaagcgagccgccccgaagagagcaggatgagactccagcccttccccgcgcacatcgggaggagtgcacttgtgacctcctcttcatctctgccttccttcccctccacactttcctggtcgagggacgaaagccccgaagggcatccaggctggagaagcagaacagcacacctgagagtgactacgacaacactcccaacgacatggagccagatggcatggggtcaagccgaaagggacggcaaagaagtatggtgtggccaggggatggcttggtaccagacacagcagaaccccatgtggccccaagccccactctccctagcaccgaagatgtcatcaggaagactgaacagatcaccaaaaacatacaggagtcttaagagcagccc

SEQ ID NO: 274292 - DNA, 289 bp, Homo Sapiens
tgaacactgggctcaggcaaacctcctaccccagcttctgggactacagaagcacaccaccacgcccagctaatttctttcatttcttggcagtgacaaagtctcactatgctgctcagactgatatcaaactcctacgctcaagcaatcctctcgcctccacttcccaaagtgctaagattacaggcgtgagtgagccacctggccaggccctacaggttaagtgttggttattttgtttctctgaaactagaaactttaacagtgaataaattcaaacacctttctt

SEQ ID NO: 274293 - DNA, 489 bp, Homo Sapiens
gctgcccggagtctactggcaaaacggactctctcctggagtccagagcaccttggaaccaagtacagcgaagcccactgagttcagttggccggggacacagaagcagcaagaggcacccgtagaagaggtggggcaggcagaggaacccgacagactcaggctccagcagcttccctggagcagtcctctccatccctgggacagacagcaggacaccgaggtctgtgacagcgggtgccttttggaacgccgccatcctcctgccctccagccgtggcgccacctcccgggtttctcagactgcctggagtggattcttcgcgttggttttgccgcgttctctgtactctgggcgtgctgttcacggatctgtggagctaagcagccttagatagcagcagaaggctttttggattctcctccttgaaaagattctcagttaccgaaacgtctccacctagaaaataaaaatacattaagatgtgc

SEQ ID NO: 274294 - DNA, 522 bp, Homo Sapiens
tagtgtagtctctttataatttctttggctgtaaacagaatcagtggtatctgtgatatcctcagtagcttagagtgtggttgttactggaggctgttatgtagttttgctggagactgggatactagggaagccagtgtttgggccttattattgggatgattatgcctttctttgggcctcagaatggcctatgctagcatcacagttagtcagctaggttaggctgattcttgggcctccaagtggttttcttgggttctggaaatggcaacagtggcctgggggataggcgggttctctagcccctgagcagcaagcatggcatgggtaatagcagcagcattggtgggaaagccctctagaacccaagtaatccatgctggtgttggcattagcagcacagggctaagtgggccagtgtccaagctcataggtatcacatgtgggtaggtgctagctatggtagtagcaagaaaagagataatacagattagagcaaaaatgaatgcagttgatgca

SEQ ID NO: 274295 - DNA, 479 bp, Homo Sapiens
ttgtgagaagtcaggagtcacatcagaaacttgcttttcctcagcagcacctcctgctcgtgacgggccctgttcctttcccctcagagacgtacctgggatccatcctggcctctcagtcagggccgacttccccaccccagtgtttgctaccatgattgtgacctgttctaagctgagtttctgcagctttgccggtcacatgcattctttcctccccaagacaacccctcatcacacagcagagacagtggtcactgagaacatggtctgcctcccatctctccccttcgtgggcacctcagtggcctcctctgcgctccgaacaaaagcaagagaccctgctgaacctgggatgggttggtagaagatgggctccccacgggacccgggcggggacagcccccagtcacacggcttcccagacagagcgaaggtctgtctctccacatgtcatcttaaataaagttagttaattc

SEQ ID NO: 274296 - DNA, 476 bp, Homo Sapiens
attgtcacaaaatatgaaaaccacatctgtaattgttctcagaactgcttagcaacctcagctttaattgtcagccagcttatcagaacatgcagtaaattatcgtgtctcatacctagaatgttcggcatgtgaaagagttctggagatggatcttccctgcagtgaaattgagtcagatggatcacctgcaggggagttcaccctgggagaatatttcagaatttgcctgcttcttcctggaaccagcctctgttagaatgcatgattccgtgatgaaaaacttacagattttccatggaggagaagacctcttcctgatcatatgtccattgttatgggactgtctattagtggtacagttgctgagccagcccaggtttagtattctcattaataacaggtatttggatgctcttaacagttctaggggaaatttatgagtgatgaggtaaaataaaatgctggatctgaga

SEQ ID NO: 274297 - DNA, 342 bp, Homo Sapiens
tctggtgtctgccagtgataagtgtggcaccccaggaaggctgtggaccccatcaaggtgctatgtgagggccatgcttggggtggtggtgggcccagtagaccctgcagccatccatccagcctgcccacccacactgcccttgtgtactcctgctttgctacgttatcattgatcaatgtccctggttacctatgtgtttgaattatcttcgtgttacaggtgtttaatgaattttgctccttctagcttatttgtatttcacctgtttttctttaaatcaacatggttacactctgtttcagcaactgtataaattaaacacaaattattactactgct

SEQ ID NO: 274298 - DNA, 323 bp, Homo Sapiens
ttttgctgatgatctctgacattgaggaggcaatatggttatcttaaggatcacaggggcatccagatatttctaatacattgatgttcttaaaggactgtaagaaaattctctattggatggaacctctgggaggtaaacaactgtgaattagaataagaactggctttgccagctagttctgtctattctcctaaaaaccatcgactcctatggaggtagatagccatggtgatgtgaggccctgaactagacagaagtgtcagtgactttggttcaaaaagtttcttaagattcagccaaggctgagcatagtggcccat

SEQ ID NO: 274299 - DNA, 471 bp, Homo Sapiens
  misc_feature (97)..(138): n is a, c, g, or t
caattttaatacatttattaaggcggcatgttcaaagtcttcaatggacagcaacaaaacagaaagccaaaaaatgactagggcttctaataagtgnnnnnnnnnnnnnnnnnnnnnnnnnnnnnnnnnnnnnnnnnnaaaggatttgattttcagtgcacaggttcaagccatagatttaaattggtaatagaggcagaattggacagtctaagatttgggccaagccaagctcttgaaagtggagaaataaagtgcctacagaaacccccaactccaggaatgagtaacacggagtttctttaataagctaccagtctccaggtcaataactaagttatcaacaattcatttgtttatacacttttgtttcaaacacccacatttcaaccccctcccccataaatcccgccacattttcagtgtggttgattaatctcccagctgttgatgggttcaggcaaaacagac

SEQ ID NO: 274300 - DNA, 496 bp, Homo Sapiens
tagccaggctcactgtggcagcacccaccttcaggaggccccgggtttctgtctattgagcggccggattctcgacctcctcgtgttggggacactctgaacctgaacttgcgagccgtgggcagtggggccaccttttctcattactactacatgatcctatcccgagggcagatcgtgttcatgaatcgagagcccaagaggaccctgacctcggtctcggtgtttgtggaccatcacctggcaccctccttctactttgtggccttctactaccatggagaccacccagtggccaactccctgcgagtggatgtccaggctggggcctgcgagggcaagctggagctcagcgtggacggtgccaagcagtaccggaacggggagtccgtgaagctccacttagaaaccgactccctagccctggtggcgctgggagccttggacacagctctgtactggcaggcagcaagtcccacggagccctatgcagttc

SEQ ID NO: 274301 - DNA, 442 bp, Homo Sapiens
  misc_feature (377)..(377): n is a, c, g, or t
tgcatagggctcggcgtgggagggaggcagtagaaccaagatgggggtggagaacaggccgcactctgctgcactttgaggaccatgggagagcattcagtccttacccaagagcaatcaaaagccgctgaagaccttgattttggagtcagggttgggatcggcggcaggggagggggggcggtggcaggcagtgatgtcacagacacagtccttcccaggacacatctgggagcccagtaggctgagaaccagaatgcagtcagccccctcccatggagtagcacttctccaggctggggagagccccttcccctcctgccgtaccctggtggagccagcccactggccttgtaccaggtgcactcggtgagtgngttggtgggagattctaaccctgggctcaggcatagctgtttgtgtgtgagctggagacccaccg

SEQ ID NO: 274302 - DNA, 500 bp, Homo Sapiens
aaaataaattccgtgaactcataaagctctcatctgcaatcaaatgcaaaagcagagcatcctactcagaggctctgaaacacacatatcagcctcaaagcaaatcagccttccagtctcaggtaagactggttcagtccagaaatgcaagggagatgcttctcctgaatccttagaggcaagaagggatcccttcaaatgggcttgtatagcagagtagtaacatacttcttcttgtagcgatgggttgcgctaaggaccatcacactgtccttaatggacaatgcatagagatggttcagcataacatggttgggctcagggagtaaggctgggtcacaagaaatattagtgtctttgttaagaataacttgaagtagataaggaggaaggatgggtggggatttgaatctttcctcagatcgaaacgcatacatttcttgaccataaggccctgggggtgagctggaaaggtctctacaagatgtctcagaactttc

SEQ ID NO: 274303 - DNA, 533 bp, Homo Sapiens
gaaaaaggagtttaaaaggtcctgctctatcgttctgtgtctggctctgcaaactgctggtatgtaaaagaccctctttccagacaggccacgaactccccgaagccgggctggctcttctctgcctctgtcccaacctccctgacacaccctccatccacgttaataaaacagggaacacaccagagggctcagtagagaaaaacacatcataatgactgatttataatttttatagctttaaaataataaatttatttttttccattaaagtattataacacgattacaaaaagcctatgaaaaacagaggagggaaaatatctgagctgctgccaccccacccaaacaatcctagtgaagcctgttgagctttctcttcatctcttccaggcatatagttgcaatgaaagtaaacaaaccagcagtttcaagagggatgagtgctggagctagatgcccaactcctgccttctaaggagaaacacggacccaagagctgcttctctcctggcacagctgatggagcactt

SEQ ID NO: 274304 - DNA, 397 bp, Homo Sapiens
ccggaaagcgactcaaagccgagcagatccagtcatgataaaggagatcctggagaagaagctgtcattgtgagatgtttgggatccccttgcccaagggacaacaacaaacagtgcagcctgactgggaacaggatcctgtgaaagctgatgcccatgtgccctgagagctgcctctcaatccctgtcccaagccacagctatggcgttaatgtcaccagtgttctcaccctctaggccctgtgcctggaggtgcctccacagccgaccagcagccaccccgcctgcttcatccacatcaggagggtccggtgaggctgcagcagtggttaaggagtaacaccttcttgtattaaggaattttaaactaaataaaatgtatgttggagatactgtt

SEQ ID NO: 274305 - DNA, 370 bp, Homo Sapiens
  misc_feature (212)..(252): n is a, c, g, or t
accagtatatgtggcactctgctgagagattaccaaagctctcactgtgaggtctgagcaaagacattaaataaagggaagtctgtgacttacctcctgagtagacgataccatgctgtaggggccctgtgtaggtaccaattttcagcttgccagtcttctgtatgaagaatatggattttgtaatactttatcatcctatcacaatcctnnnnnnnnnnnnnnnnnnnnnnnnnnnnnnnnnnnnnnnnngtgctacttggccagacagccaaatgaatggcacttactcttttcaattagtgggtttgtttgactgtttcagttaagaccaaaactcttaatttcaaaagagagatacggctaatta

SEQ ID NO: 274306 - DNA, 502 bp, Homo Sapiens
tgcaaactcatatgctccagacagctagatagttacaaacgcatagagaaatacttcaaggcctatatgcatatagcagcacaattcgcagttgcaaaaatgtggaaccagcccaaatgcccatcaatcaatgagtggattaaaataaactgtggtatgtatatatgatggaatactactcagccataaaaaggaatgaaataatggcattcacagcaacctgggtgggattggagactattatcctaagtaaagtaactgagtagtggaaaaccaaacaacatatgttctcactcataattgggagctaagctgtgaagatgcaaagccaaaagaatgatacaatggactttggggactcagagggaaagggagggaaggggatgagggataaacagtgtatattgctggggtgatgggtgcaccaaaagctcacaaatcaccactaaggaactggctcatgtcgccaaataccacctgttccccaaaaacctatggaaat

SEQ ID NO: 274307 - DNA, 322 bp, Homo Sapiens
  misc_feature (131)..(164): n is a, c, g, or t
ctgtgagggaggagatcagcaggatttttccaagcacctgtcaaaaccctgctgatcaaaacagaacataacaataacaaagaattgccaaaaccagctcggaataggaattaaaatgcatttgcataagnnnnnnnnnnnnnnnnnnnnnnnnnnnnnnnnnnatcccacggcaataacccaggaattatcttatatggttccaggaacttcctgttcctagtttatgaataacctgcctcttatttagcatataattagcagtgggtataaatatagctagccagcaatcctggagtgctattctacctgtggggtagcc

SEQ ID NO: 274308 - DNA, 472 bp, Homo Sapiens
cttccctttccccactctgtaatcagtaatcattgtctggtgtgttcagatgataatccagtttgccaccaaggggttgtgcttccttactgactgtatttgtgatctgtaagacttttcaaacacaggtttaaacatccagagactccagcctctttgacagtcattctcccactgtgtcccttttgacttcttttgtcatgtctctagtgcagatttcccagctgcccaatttgagcccttttgagttgacctcccttggatgagtagctctttgaaagctgatttaaagtgagtgttgctccacctaagagctgttggctgaaaaaagcactatctacaacagcagaggtggccgagaaaggcagacaggctctcctgaggctggtgttgcagatttgcattggtctagtaggaattatgcatcattagactgaacttcttatgtttgcatccaggtcatttctccatt

SEQ ID NO: 274309 - DNA, 426 bp, Homo Sapiens
gtccctcttattcagaatgtcctgtttaggaagaggtgctatggggatataaaaatgattaagacatgaatattgccttcaagaaatttatggtgacttaaaaagagatcgctagggtagaaataactataatttcaggtagaaagtatcaagtgttgtaaaactacaagacagcattctgtgtgtcttcaaaggaggcagaataatttccttcacctgtggctgtgatgggtgattttatgttatagatggcatttgagctaggccttgaagaacagatgaggattagatatacagagataagtacttagaaagttggagaaaggagacttgttcaagcaaaagggaacacatgtgcaaactagagacaataccagagcttatgggaggtcatgaggtcatagtatgtgggaaagggggaaagtg

SEQ ID NO: 274310 - DNA, 478 bp, Homo Sapiens
accacagcaaacaaaaaggtggacgtacagtaggaccacttctacgagcttctcctcaggatcagagggtgcaacctgaatttgagtacaggtttttgccacagatcttctccttagcttagagcagacagagagtgggacataaatgctcaggctcagctgtgaagatagaaggaaatggaaaacccattcagcacctcaacatctccagctacatctagagattctggctcctactctacggtattgtgggggtattgatggaatgtggtacatcctaagctcgaggggaccatcaaaaaagagacagcagtctgaataaacacagagataagagagcaccttaaaatttttggctggatggattggtgagatccttctcctacatgaggccagtctgacaagtctgggagaggttatattcttatgtaatgcatagaagctaacacaaaaatcaaagaacagagaatctattccc

SEQ ID NO: 274311 - DNA, 441 bp, Homo Sapiens
gccggagtgcgggagaaccaccaggcgccggaattggggagcacgtggagggggcagcgctccagccccagaccgccgcgctctgtcactttgcattaagaaagcttccggggaatgcacacggcctgccgccgccttcgtgcagcccgccctgcaggtgcaggaagaaaagaataatcgcacccgtttctcaggtgcttacttcaccatgtccgatccggacatgagctctgcctgcagtcagcaacttggaagattcagacttcagaccagcatcacagattataaccctccgtaaatcatctgcatcccagctcccatcaaaagccagcctgaaggacccatggacacgtgactccagtgttctcaacaacatcttaagatcaagttggtttgcacaacatttgcatctacttgggacaaagcaagaacaataagggc

SEQ ID NO: 274312 - DNA, 409 bp, Homo Sapiens
acatacgaaaatacagtatttaatattcaatatacacagacacatttatgataaatgcaactatttggcaatgcagtttctttcagggttttttgttgttgttgttgttccctatttccatatacatggaaacaaaaatgcttcgctaaaatctcctagctctggcggacatcttgaagcagtttgttaatctctgccaccagttcactggcatccatgagttcgtgtttcccatcattgaggtggttgagcacattgtcaaaatcatcttcctcataattttcagggatctcctccatggctggcagcaattttgaagaaggctgcacactggagtgagttccaagtggcggcccacagttggtggtgggattttgaaaatgcgtactggctgcccatgccgctaccc

SEQ ID NO: 274313 - DNA, 446 bp, Homo Sapiens
  misc_feature (114)..(126): n is a, c, g, or t
ccttaattgacagatgcaaaacatttcaacaagctaaacacaggaaaactttacagcattaaaaatcagcagcacaaaagcgttcataaccatttcatatgtctaactcgtacnnnnnnnnnnnnnaactaagtaaccaggggatcacagaatgcttcaaactgtgagtcaaattaaaatctactatttttctccaacaaaaagtgaaacgcctgaagtttgctgttgataaaacatttgaatggtagaaggaaatttgaacccctgagaatgtatgacctaatcatgtctaagtttgaacatcttagtattaacaaaaaaatactcttcttaaggttacaaatatattgaggcatttttctcccactgggaatcataactgtgaaaacaatctgattttggtgccaggaatcaagagaatcccgtaacactgggatcaatgtatt

SEQ ID NO: 274314 - DNA, 718 bp, Homo Sapiens
ccaaggtcacacagctggtgtgtgggatggttcccaggctgttggtttcttcagcctctgccatttccagtgcatcacatattcctgtttgatgggggtcaaagcaaagaagattcttcctgactagagtcaggagatcaggccctgattctgtcattccctggccctctgtcctcagcaattgatgacataaatgttgattgtgtctttgcaatgcacgtggtatcaagggctttacatccttgttccccacggcatccaccatgatcttaagacacatcctagtcctgtctccacttcagaaagaaagcaagaggcacgtgaatgttgagccgtgtgacagagtcacaactagaccccgaggtctgctggattccagagaccaagttctgtgcgggtgtgtgatttgaacaggtttataaaaggcacccaaattttaaaaaatccaaaatgtgtccccaaaagataaaacattctcttgaatttccctcctcagaaacaaacctgtcaccaattttattgtgtcattccacgaattttctatgcgtggaatgtacacgtatacgcgtgtgtacatatatacatctatatccgtttcgctatcagcaactacacagttcttcagtgtatcgttttcacttaatttaactgagaggttcttccctgtcacacacagatgtgcgttgtttccttgaacaatgggatagcattccactgt

SEQ ID NO: 274315 - DNA, 536 bp, Homo Sapiens
ggaacacaggccatgccgcctcctctctcttgggattaccaccagttgcacctggaactatgaagttgagccggatgtaaaagcagtggatgcagggtttgatgggcatgacattccttatgatgccatgtggctggacatagagcacactgagggcaagaggtacttcacctgggacaaaaacagattccctaaccccaagaggatgcaagagctgctcaggaacaaaaagcgtaagcttgtggtcatcagtgatccccacatcaagattgatcctgactactcagtatatgtgaaggccaaagatcagggcttctttgtgaagaatcaggaaggggaagactttgaaggggtgtgttggccaggtctctcctcatacctggatttcaccaatcccaaggtcagagagtggtattctaagtctttttgctttccctgtttatcaggttggtttttattcctttgttcttttctagttacctgaaagagtgaaagaagtggaaaaagtgattgaataaaactattctttttcattg

SEQ ID NO: 274316 - DNA, 725 bp, Homo Sapiens
  misc_feature (480)..(543): n is a, c, g, or t
ccacaggcatgcaataaattcccatttattgacagtctgaccttgctggcaggatggttccaaagttctgtgggaagccagctctatatcctcaatctagcaagatgagcagttttccagggcacaccatggtaagggggcccacccaatcctgcccatctgatcccacaggctggcccccggataggtaacttggtggcaactctagtctctccatcatgtacagggggtaaaccagttcatgcgaagatcatgtattaagctgcctaacatatacaaaaacactgctaggtcctgaggaaacagagatgaataaattacagtcttcctctgaggagtttgaaattagcaagggagacagacacataagaagtaaaataacactacagtgagatatgctatatacaaacctgcggaggagatgtaagggaagggcttatagagaaggtgacaattgcactgttcaaataaaaggataannnnnnnnnnnnnnnnnnnnnnnnnnnnnnnnnnnnnnnnnnnnnnnnnnnnnnnnnnnnnnnngaatccagagttatgacctgcgtctgttccgaactgggccggggtcacccctcactaggcatcctggttgttcccccgctcccgcggaggtactcgatatgtgatgccgaacttagtgtcggacacccgatcggtataacgacgctacagcccatagctccttaatctcaagcgagtctctc

SEQ ID NO: 274317 - DNA, 583 bp, Homo Sapiens
acctctgccgcaacctcgagcgaaggacaagaagaaagatggatagaatttaaatagagacgaatccattttatcactctgactctggttgcaatacagatcagtcttgatgttctaactctaattcacagtggtctcctttcagccctacccattctgcagcaaattccagctggtcagagagtcagtgctgtgctctgccatggaggctcataacccaacactggaacattccctagccaaggcagaagtccttaggcgggacttccttaccaccacgggtgctaaaagaagagttagtaggtcatgcttctaccagtaatctaaggactctctccttctcatcttcctcattctccagatttccaagccttagctaagagtaatttggcttgtttagtattgttttcttatggtccagttaattaccaaaaatatttttaaaatcatctctgttaatagaatgtctaccaacttctcactatcagaaaatactcaacctccaaacaatttgaaattatctttctgatccaggtaaagaagcaaattgaaaatcaataaagtaaaaagtgacggagatttt

SEQ ID NO: 274318 - DNA, 311 bp, Homo Sapiens
  misc_feature (51)..(150): n is a, c, g, or t
tataaagtgtactaaaaactcaactgaagtcaggcatggtagctcatgctnnnnnnnnnnnnnnnnnnnnnnnnnnnnnnnnnnnnnnnnnnnnnnnnnnnnnnnnnnnnnnnnnnnnnnnnnnnnnnnnnnnnnnnnnnnnnnnnnnnnaagtttttttaaaaaattaactggaagaattaattacacacaccagtagtcccagctactagggaggcaggaggatcacttgagcccaggagtttgaggctgcggtgagctgtgatcacaccaccacactccaacctgtgtaacagagtgaggcctcatct

SEQ ID NO: 274319 - DNA, 510 bp, Homo Sapiens
atgaaaaagggaattgaaataaaaactcaatgggtaaatagggatgcctagagaaatggttggttggttccaggtctgggacaggaaaaacagaggatgatcctagaacactgtggtgcaagaaagtaaggaagtgcttaaaagaatattgcttgccaatttaaaaaaagggaagaactgatacatgtgatggtatggatgaacctcaaaaacattgtgctaaatgaaacagccagacacataagactgcatattgtatgaaatttctagaaaaggtaaaactaaagacacagaaagtaaatcaatgtttgcctgcagttgggtattggaaccgggattgactgcagatagacattatagaacttttggagtgatgaaagtattctaaaactggattgtgatgaacgttgcacagctaaatacatttgttaaaagttgtacacttaaaataggtgaattgtgtgtaaattatatttcagtaagactgtaaaaaattttgagagatactgt

SEQ ID NO: 274320 - DNA, 507 bp, Homo Sapiens
aaaaataactctttaatcatatgcacataaggggaataaagggcaacaccaggctgactcaggaggggagcaagatattctccctttgtcccagtgtctgcttggcacagttctgagatcacacaaacaagttggagggggttgggaaatagaataagtgagaggactgaagagacaaaggcaagggaggagaggcaagggcttgcagtagtctcaatcagtggactctaacacagattcactcagcgcaaggtcccagtagtgttcagccccatgctttttgaaatgctcacgagccatgttctctgtaggacactgtttaaacttcatctctccaaagctccggtctttggctgtaccctcccagactagtacacatttgttggttttcttcacagcttcctcatcagactcctcatcatcatctccctttgtgttagatgtctgttcatcccactttatccgatgcagcataagacgcttaaatttcttctgggccttggggct

SEQ ID NO: 274321 - DNA, 499 bp, Homo Sapiens
ctgatggccacatgaaccacatgaggagaggcagggcgtgtcagcagcaaacctaagtgtgtgctcatttctgtgggcccttactctgtgacactgcagctctccagagagacgctttgaaaacaaaacaggaaagaacacacggccccgcgtctgttgcctgagtcactgtattccttaaaaggtgaaggaccctggtccttggcttttcgtgcacatgagaaaatgttggccaaggttagcgattatgcttctgtaatctgtaaccagaagtgctcttatgcccaaaccttgatgtgattctgctgtaatgtaacttcggagccagctggatggatgtgactgtgcaggtcctgagccccggcccccgtaaccaagcagtgggccgagacactgagccgggcagtcaaacaggagctctctaaggctgctcccgggctgggacctgggtctaggattctcagtaagacctttgaataaaactaacttgaattcttca

SEQ ID NO: 274322 - DNA, 488 bp, Homo Sapiens
  misc_feature (307)..(323): n is a, c, g, or t
ggctgaggctgcgccagactgcctccccaacaccctgcgcttgtagtgtgtgcgttatcagcccgctgctgcttgatgcgagcatgccttgccggtgctgggggcacagctgtctgccaggcactctcatcaccccagaggccttgtcatcctcccttccccaggccaggtagcaagagagcagcgcccaggcctgctggcatcaggtctgggcaagtagcaggactaggcatgtcagaggaccccagggtggttagaggaaaagactcctcctgggggctggctcccagggtggaggaaggtgacnnnnnnnnnnnnnnnnncgcgcgcgcgcgagtgtgctgtatggcccaggcacctcaaggccctcggagctgctgtgcctgcttctgtgtaccacttctgtggcatggccgcttctagagcctcgacacccccccaacccccgcaccaagcagacaaagtcaataaaagagctgtctgactgc

SEQ ID NO: 274323 - DNA, 368 bp, Homo Sapiens
gtacaataaagtttaatcacaattataaaaatgtggcgtcgggtttgcgctattaacatatgtacagtccagcccagcaaaagggacccaccccgccatcctggcctggctgagcgggggagtgacaccagggtggaagggtgaccctcaggtctggcaggaacagatgaggcagggttccaggcacggagtccccaggactgggggtgcagagcccccccagggaggagaacatggccactgccccagagacccctaaactggggaggggtacacgcagggcgtaaggggaagtccccattaacacaaagcaagaggactgtgtagcccccaggacagaatctgtacaggccggcaccccaggtttc

SEQ ID NO: 274324 - DNA, 365 bp, Homo Sapiens
acatctacctgagccccagccgtgtcttgaaggcccatgtgaaaaagcaggcagcattgagaaccggtgaggaactcatactcattatctaggctggggctctttacttatttggtcagtctgatgaatgctctgcatctccaggcttgaaagtacatctccacacagtatttgtgaatgtgtcaaagggttcagacccccaaaagcccatctaatccatatgtccactcaaacacttgtacacaactgttcattgcaccgttatccataattgccaaaaggtggaaacagcccaaatgtccatcagctgaggaatgaataaacgaaatgtagtacatccatacaatggaatatgattcagcaat

SEQ ID NO: 274325 - DNA, 544 bp, Homo Sapiens
  misc_feature (37)..(37): n is a, c, g, or t
agaggaaactgaaagatcagatccacatccctcccancctctgcccactttcacctagctgctgcccttgccatgcatatggtgatatagtgtgctatcagtccagtcacagtctgcctctattctttgcaagctgggtcttccttactcagaagcctggagccctgccagatgctgcttccggactggctgcccgctgcagtgttttcacgagagccaagccagcccgcggcctgtggcctcccatgtgacagagtttcagacaccacagtcctcagctggaccacagtaaacacttgccttccccaacccatgattcttgcttggaaacatgaacctgatgttacacgtgcgttcagccaatcaaacctcaagaatgtgattgagcagtgaggctgcgttttgggcaagacactgagctctgaaataagacttttcttggaatctcaagccctcaacttacagtgggaccctaagaaatgcacttcagtttccttttatgtaaaatggtggtaaaattaattgtgttcattaaattgcacac

SEQ ID NO: 274326 - DNA, 393 bp, Homo Sapiens
  misc_feature (306)..(306): n is a, c, g, or t
ttgcactcatagttacagtttattacagtgaaaggatacagattaaaatcagcaatgaagaaaggcacataaggtaaggtccaagagaacttccaattatcctctcctggcagagtcttcaggataatgcttaattctcccagcaatgatgtgtggctacaatgatgtgtgcacagagtattaccaaccagagtagctcacccatgcctaggtgtccagggcttttactagggattgatcacattggcatgcttcactgcccacatggctaacttagtctcttcagcttgaccttgcaaggtcaangctgatactgcatggcccaaggcccacaggtaaacaaaaacactcttatcaggcaagatattctaatggcttagaggttatctccca

SEQ ID NO: 274327 - DNA, 410 bp, Homo Sapiens
gagactttgtctaaccttttgggaaagagaaactctactggggttcctaagctataaagatgacatacgtccaaagctgctgggagtagaatgtgaagaccaatgattcctaccatcatttgagctggattcaaccgaccttgaagttagcaccatacagattttcttgccatataaaccagcaatttaatttcagtcttcccccatccctggaaagggagtatcttaaaccagttcagtttggttttctgtcattactaatgtggttgctattggtggtaatgaaacctggtaggaacaaccacatatcaatgggaacataaaacgtctagcatcttaaagtgccattcaaccttgagattctattattttatgctttctctctagaaataagtaaatccaatattaac

SEQ ID NO: 274328 - DNA, 450 bp, Homo Sapiens
actattttggcgtgtcccacacacagcatcaagggaggggggtacaagaagaagcagagtgagaccagagtggagtgcgagccaaaacaggtgggcgtctgtgcagaaagcaacatggatgcagctggaggccattatcctaagtgaattaacgaaggaacggaaaaccaagaaaggcatgttctcacttataagtgggagctaagcattgagtactcaaggacataaagatggcaaaagtacaccctggggactactagagaggggagggagtgaggggggcaagggttgaaaaactaattgttgggcactacactcaccacctgggtaatgggatcatttgtatctcaaacctctgcatcacgaaatatacccatgtagcaaacctgtgcatgtactccctgaatctaaaataaaagctgaaatcacaaaacaaaaatagaacaatcg

SEQ ID NO: 274329 - DNA, 214 bp, Homo Sapiens
cctgtgcccagctaaaaagtattttctatatgtttgatttttttaggagacagtatgccaaattccttaaatttggcagattctcatagtatatgatctcatgcactgaaagagggaaatagaccactggaaaaatggatagttctcagctgagtgcattacacgcacatgcatacacacattagaaacaaaagaagcaaaaacgaaaacccaa

SEQ ID NO: 274330 - DNA, 274 bp, Homo Sapiens
gtgtggggtttcggcccagcctacacagcaggagctggggagaccttatgcgtttcggggaaagtgacaacaggaatgagatgaagtgtgaaagtgaaaggaaggggcaatagctgagatgagaacagcctgaacaaagtctagtacaacactgcagccatccagagcttggagggagcggggaggtccatcaacaccaggccgctgtgccaagccacacccatgtttcttctctcatgtcagatttgatgaaaaggaaacttgggactccgga

SEQ ID NO: 274331 - DNA, 468 bp, Homo Sapiens
ataattagttctccatccaaggactctactaaacttacattaagactttctcgtgtaaggtcttcagacatggaccagcaagaggatatgatttctggtgtggaaaatagcaatgtttcagaaaatgatattccttttaatgtgcagtacccaggacagacttcaaaaacacccattactccacaagatataaaccgcccactaaatgctgctcaatgtttgtcgcagcaagaacaaacagcattccttccagcaaatcaagtgcctgttttacaacagaacacttcagttgctgcaaaacaaccccagacttctgtggtacagaatcaacaacagatatcacaacagggacctatatatgatgaagtggaattggatgcattggctgaaattgagcgaatagagagagaatcagctattgaaagggagcgcttctcaaaagaagttcaagataaagataagcctttg

SEQ ID NO: 274332 - DNA, 394 bp, Homo Sapiens
  misc_feature (193)..(213): n is a, c, g, or t
tggctctggttcccgcctggtcctctggcttcaggatcccacctccaaaggcctctccgctcaacgcctacctccctagggccctgctgggacatgggggcctgagtgcccacccaaggggctctcaaggacacccggcaaggcctccaggctctgagccccgcttctgccttcacctctgcctgggacccgnnnnnnnnnnnnnnnnnnnnntccccagaagatggcagctagggcctcgccgcgaggacagagaagggacagggtggctgggcagtcagggaaggagggtcgcccggatccgacattttggagagattctttcaccctcctgtcccccccacctctcctctctaatttcttctttttttaatgataaagtcttaaaacacag

SEQ ID NO: 274333 - DNA, 450 bp, Homo Sapiens
ttagcaacagggtctcttcaagaaagattataaagccttttcgtcctctttcttaaagctttcctgttgcaaggtatgttccttcaaactgcaaaggaatttaagaaaaacaactcattcagttaggttaaaaatgtaaattaacattcgtgtttatgggggaaacacagggtgatttaacaacaggtcccattaaaagtttagccagttttctgaaaataacatttgacacatgcagagcatctccaagaaggccaaataccaaacgtactcaggctgtgcagtgagctcattagcctttaatttaaaaagtgttgatatattcatatgcaggccacattaaagaaaaaaagtgagagttacagggaagtgcagataggacctgccttgaagccaatcgcctatgaaacctaaacaaggtggaaaagtacaaaaccaccaggagttttt

SEQ ID NO: 274334 - DNA, 577 bp, Homo Sapiens
atttatccgacaggcagaaatgaatcattatgctttgtttaaatgttacatgttcctaaagaactgtggtagtggagatatacttttgaagattgttaaagtggaacatgaagaaatgcctgaagccaaaaatgtgatagctgtccttgaagaattcatgaaagaagctcttgaccaaagtttttgatcatatgttttgagataattgtatgatcaagttgtatatttaagtcttagtgtttgaaattgcagttataattgttcataggattgctatttaagatgatttgaaactcaatccagattttctttttgtattttaccaatttaacttaaataaaaatctgaagaacatcttcactgagtcctagatagataatgtatgtgagagttgtgaaattttagtgtctcactggccccataaattccacgcttcaggaagttgttgcttaaaaaatttcagagatgattttgtttgtggcttttctcaggaaaagcctgagtttgctgcagtatttagcaacttttcttctcagaaaaaccataatacttccttttcagtggactgtagcttctt

SEQ ID NO: 274335 - DNA, 508 bp, Homo Sapiens
atggcaattattctctccatgctggggaggaggggaggagggtctcagacagctttcgtgctcatggtggcttggctttgactctccaaagagcaataaatgccacttggagctgtatctggccccaaagtttagggattgaaaacatgcttctttgaggaggaaacccctttaggttcagaagaatatggggtgctttgctcccttggacacagctggcttatcctatacagttgtcaatgcacacagaatacaacctcatgctccctgcagcaagacccctgaaagtgattcatgcttctggctggcattctgcatgtttagtgattgtcttgggaatgtttcactgctacccgcatccagcgactgcagcaccagaaaacgactaatgtaactacgcagagttgtttggacttcttcctgtgccaggtccaagtcgggggacctgaagaatcaatctgtgtgagtctgtttttcaaaatgaaataaaacaccactattctctggc

SEQ ID NO: 274336 - DNA, 345 bp, Homo Sapiens
acagatggtacatgcagctttcctcccctttcctgactactgatcattcagctatgtcagttacaaaatgaactgcactttcagactcgctgggagggctggactggaaatttcacgggggcggaggcagggggccacgtaattatctattatcattacatcctcagcaccagcacagcagcctgttagcacttagtaggtattcaataaatattgcttgaataaatgagttaataagactgcataaataaacagaaactgtattgatagtacaagcttgttaaaaagtattagaatggagaggaagtgacactttcccacattactttacaagtgaatgagatc

SEQ ID NO: 274337 - DNA, 532 bp, Homo Sapiens
agaccaggacctcaagatagcaggtttatacttagaaatatttgaagaaaaaaaagcgttatttatagtccaaagaaaccaaagacttagctcacctgcattctgactttgtttggagacacacacttcagcagggcggcgacttggcaagacaaatgatgagcaggaaaacaccactggatctcacaccttcaatccatgaccatcctcgctgtgcttggctgtttagtggtttggagcatagtgattttgagccattgagcggacatcttttaagatcgaactttctcatctgttctaccatgccacgaaggtgtatggtgtctcagtactaccaccaccagtggttacagacttaggcagagctggtcttcagaaatggttgttctataggagtgcaaccaacatggtatggggttgtctgagttcattggattaggagtgtgattttgctcgtctagcctaacgtttgaacctgccaggcccgcaacctaaatgcagattcaaacccagcaaagaaaatttgaatgac

SEQ ID NO: 274338 - DNA, 450 bp, Homo Sapiens
tttaggtgacgaatcctaagtgtatagctctgtgagtgttgtgagtgtctattatgtttacaaccaccgtaaccaccaccaccatcaaggcagagaacatttctattctctgaaacgtgtctccaggcaacaccaccagcagatgtaactgttcagacttccatcaccggagattagttttgcctgctcttgaacttcgagttagtagattcacacaatagatgctcttttgggcctggctcttctcacccaacattaagtgagattcatccacgttgtggtatgtgcagagcctgcatcataactgctctgttctgcctctcatcacattaactaattccgtgttgccttccagaaatgtttccttggaaagtggattgggttttgcagagctgagctgagcctgaaggagtggagcgagaacacagaaggttaagttcagagggtggc

SEQ ID NO: 274339 - DNA, 496 bp, Homo Sapiens
gcccctggaaactccagtggtctgacatcatgggaatttgcccgggcggctttgtgaagggagttctgccctactcttggctgtgtcttttgttgttgtctatatagtaagtaaatatatcatccctttgaggctcagttacataatttatgtttccccagtattcagagaagaaaccagaacaaatccacttccagattccagtccagctgaatgaggttatcagtagattaaaaagttttccttgatcaccagtgacactgcttgctttcctttacaaaatcttagtgtcctgtgctgtgtggaacgtctgtctaattatcagtacgcgtggaaatgagaaaaacggatgtgaacagcagacacgtcacagcacacctgggttccttggcaacattccacttggttcttttttcaagttgtcctacttttaagcattcccagttttttgtattcacccagcgtcacttgtgattcaaaataaaccttggattct

SEQ ID NO: 274340 - DNA, 418 bp, Homo Sapiens
actccctaaaaggtccatcccatgagtcttgcagggtataggaggggtgggtagtaatggtgcagaaatgggcatcacgtgcgatgggccttgagcattgtgcctttctttagcacggatgtgacaggcagtggcatcaggtcccattttcctgccttgtgcagaacctgtgccactgccctgccacgccaggcaaaggactcgaaggccctatttcctgggttcacatgagtcaagaaaaccttcctttgtcagccactggataattacaataaaaggggtattgcccccttcactgctgtcaaacaacagattcctccctgccctcacagtctgccaggacactccactgagagccctgcattgccagtggagagtctctgctatcctgctctcccaacccccactttcgggatgt

SEQ ID NO: 274341 - DNA, 478 bp, Homo Sapiens
  misc_feature (78)..(78): n is a, c, g, or t
atgagttccagctaagcctgatgatggagggccttctccacagggacacagtcggtgcccagactcaagcctccagcncacttatttccatggattcccctggacatattcccatggtagactgtgacggcgctgagctggcctattttggacgtgtgaggatgtggatggaggtgatgaaaaccaccctatcatcagttaggattaggtttagaatcaagtctgtgaaagtctcctgtatcatttcttggtatgatcattggtatctgatatctgtttgcttctaaaggtttcactgttcatgaatacgtaaactgcgtaggagagaacagggatgctatctcgctagccatatattttctgagtagcatatataattttattgctggaatctactagaaccttctaatccatgtgctgctgtggcatcaggaaaggaagatgtaagaagctaaaatgaaaaatagtgtgtccatgc

SEQ ID NO: 274342 - DNA, 477 bp, Homo Sapiens
ctagacaatcaaccaacttccatttattttcacaactgtggctaaaccagaggttcatccaatggtgacaatggaaaacctagtaagcaaagagtaaatctggttatagtcaacacctggatccactctaagggaatggtgcttatgtgtgatagtgacagcttcttggtccaaaaggctgacagatgaagagcacgtttctggggtttcccctttcctatcttgtctggtcatgacaagcagttctcatgtatttctttaactgaagtgttaaattgcatggtttctctcaggagtcacttgtataggccaagagctttctcctccacactttctgttggacaccttatccttcccactgatccattttacttacccacttttgaatcttaagcaaacactctttggaactggcctgcagttctaactgataggggatttgatgaaagaaaagagtaacagttgaactctctttta

SEQ ID NO: 274343 - DNA, 397 bp, Homo Sapiens
gaacaccctcctccacagtacaatggggacgcctcagacccttgccactctcttcagaaatcatctctgttacagcctgttcctgaggtttccacattaaagaactctctggattacctttgctatggcgacggccacctggtcttctattacagccttctgagttcaaagtaaaaccaaaggaaggcaggactctgcgtggctgatctcgggtaactgtcactctgatctttggatagtcacttattccattaggagatttattacccagtttcagcatgttgttccaggatccagaacctgtcagttcacaagatgaagagttcgaaaatacctctcctgaaggggccacattccttgttccattacaagcagaagttaccatgggctttgtggt

SEQ ID NO: 274344 - DNA, 436 bp, Homo Sapiens
gcctgcaccttatgtgtgtgtgctggtgttaggctggtgaaataatgtcgtgcagctagtaagccttccatccttttgacatactgcatataatattatgatccagatcccaatccagattctaactgtccttcaagtctcaccttttccactaatgcagtgacagtgggaaaatcacagaactcagctcaactggataactgcctcttctcagtaagcctgcggtattgggtcgaacagtaggaaacagacttttgtttcttttaacacagctgaatagtggccagttttctatgactcagcgcactttgcccctggttcggcagatagtcccctgtttgctgttgttggtttatgcaggggctctcagcctggctgcacattacaatcagccctgggagcttttaaacacaacccaccgagccctatgcagtct

SEQ ID NO: 274345 - DNA, 531 bp, Homo Sapiens
cactaaagacaaaaatgaacttattataatgtaagtggaatgggtagctcagtttcatcaagaggtctaaagacccagattctgagaatacacagccaaagataatacatctgcattctaaatcacatgaaactccaggaccaagcaagataccactgctgcctcctccaaggagcatgatactgcagcctccatgccatcatgaatggcattggccccatggcactgctactccaggaactccctcttgctgtcactgacaccatgaaattgtggcctcacctttgtattaataggttgaggaatctggatcttgtcactgccccagaacagaacagacccacactcagctaccccagctcacatgagactaatgcagaaagctgtttgacaacgaggaatacggttgaagtgagggtttgaaatagtagtccttttcagtgactactatccaaggctccctctttctgagtggctaggtacctgtaaaaccaaatgaacaatgaaaaactaacaagtatggagcaagaa

SEQ ID NO: 274346 - DNA, 514 bp, Homo Sapiens
aaatagcagcaatccaacatttaaaaaaatgcagcactaaaaaaataactagtccttattcccatgcaggactaactgcaggcagcacatttgtatcttgcttaagttttgactttggagtcaagtttttattacaggtgtcatgattgccaatactgtcttctctaggtgaagtatggttgctttgactttggatctaatcaagatagggaaagatcaaaagatttatttctgaagcttgctacagttttctaggggtcacattacatctgactttattcccagtcctcttatcctgtgaaggctggtacactaggaaagggatatttaaaaatgtcaagtgtgcatagctaatgctacttaaaagcatgcaacaaaatttgggtaagcatgcttgttaagagtcagtagaagctcttgcatttaagaaaaagatgcatgaaaacattcagacttatttctggcaactggattcactggcacaacataaaataatggtactatactgtaccaa

SEQ ID NO: 274347 - DNA, 565 bp, Homo Sapiens
acccctaagctgcaccagaggatccacactggagagaagccataccagtgtggccagtgtggaaaaagtttcgccagagctcaaaccttcaccagcatcaccgacttcaccatggggactaaaaggagcactccatgctttagattcacacggaagatgtttgtgtttctcctcccccttacttgcatgtaaatcacaaaaactgtgtgacttacaaggaaagcacgaggcccttgaggaatgatgatgcacattctgctgtgaggaggcccagaaaaggccaaccagggcccaaccgtgcatgatgacagggtgaagagaaggcaggtctgggcactggagcaaagagaacttaagtctctgcagagagcaaggagtaactactgagagagaatcaggacaatcctgcaggtggcccgcttactgttaaatcgtccctctgttgctttatcctctaaaatatgttaagggataaattctatatatatagttatgcatttgctgtcataccagacaattttttatcatgagcacacttctttaataaagatgagtgatctaccag

SEQ ID NO: 274348 - DNA, 469 bp, Homo Sapiens
tgacagagtgagatcctgtctctaaaaactaaaataaatgaagaagagagactatgtggtagtctcaatcaaacatcatgtctcatctacccagctggttaatatggaaatgtgattcctactaagttgtgattcacttgtctttaaaaccaaggaaattatgtactgtttttggtcagaatagataacctcaatctttgtctttctatgtgcttttaaaatcacttattcctttggattctaataagggttattaggattcagtaattatggactttctcttctgaagtgtgaatttgtaaactgattgtttaattgtcagaggggacttttggacatagaatactcaaaactatatgtattttgtttaattttcacttcattcaattcacgcattgaaaacaaatttagaaaatccaatttttcttaagcatttaaacgttctaaaattcactaataaaattttctg

SEQ ID NO: 274349 - DNA, 503 bp, Homo Sapiens
gtaaatgttaccagctctctgcaatgcagcacattgaccttccctagtcctatcccagaagtagattctagacatatcatgtcatgttatactttgcatatctctgttacccaggtaacagcaggtttctttgtatttgacatccctgcaaacttgggtgggcagcagagaaccacagcatagagggctgaggaagaagacgtctcgcagaaggcactgggaccaggggactgctgttgtcttttgctcactgtgtggcttagaaagcaaaagaggatcccagacactgtgcacagttatggtgtgagctcagccaagggggattggagcagatgatgaccaaatctgaaggccagccagtggggagggggttccagccatggggcttctgtcccaggaagggcgctcgtcctggatccagtaggaacaagcaagagagccaggctacaaaaagaaaccatgtaggttttcaaaaagaaaaaccatgtaggctttgaaccagg

SEQ ID NO: 274350 - DNA, 489 bp, Homo Sapiens
ctgtaaagtctaagtcagactgtccatccagactggaaccccccttttagagtacctggtgtggaaccagccaacatgggaagcatctgcatctccctattagtaaaccagggttaggcagaaacagaccaaggcaaaggcagctgggtgttcagtgccagacaatttctctgctgctgctaagcaaatggcagggtggagtactcaaccctgagatgagtgtgcctgaaaaagacgactactcaaaccactgaagaaacttcttatctgcccccacttggagcgtcatttcagtctttaccaaattagcaacaaaaggaggggtcccctttctagtcaaggggtacagctaacagctccccacctacgaacatccacccagccagaaggttgcccaaagtagcttgctgctgacttaatgacacttgacagtctatcagagagagtcaggcccacctgttttaggcaatatataatttaatagattct

SEQ ID NO: 274351 - DNA, 414 bp, Homo Sapiens
acagatagatattctccgaaagatcccaggaaagaggatgcaactgccatttattatgtgaagtgaactggggacttttaactaagccatctaagttaatctcccaatagcactatgcgtaggaagggggtattgttccttttttgcagataaggaatctgaaactcagaaaggtcaagggacgtgcccaaagtcaccctgttggaaacatgagttgagaatggaaccctggtatgcttagttctaaagctcttttctctataccatactgcattccagaatagaattatgtctttcttctcatgttttaggtatctaatgtgatttttcttgcagcaatataacttctgcaaatactatgaatcatcaccaatgtatgaaattgttgaaagaaataaaagaccatgaatttga

SEQ ID NO: 274352 - DNA, 459 bp, Homo Sapiens
aactgcctaagcccagccagcccttctttgaaaagccctgtggaactaggtcatcaggttgttggatggttcttacacagactgtgctgtgctgcaacttttaatgtgcactgtctatggaataccaaacttgtttccaaactaaatagtttccaatgaggatttaatgggagtttttcatttgaaatggattgaaaacaagccatttcctactcccatttcaagcaaattttggtccaattattttcctttttttaacataaagttaaatggactattctgcccatccctgactgagctgaaccgtgatttctcttgattatgcttttacactgcgaatcgcgaggctccagagacataatgggcgtctgtgggagagtggcagcaatttttaaaatcctgccagtgcttgtcagcttccactctggtgtctgctgtgcgggaagaaagcaccctacc

SEQ ID NO: 274353 - DNA, 417 bp, Homo Sapiens
aatcaaaatggataaacccggctgccgaaactccgcagagaacctgctctgcccgaggcttccgccccaccccacctccttgttcctgtccacaccccgccccgctgcctgtggccgcaggcctgctcgccgggctggagggcctagctaccccaactccgcggtttcaaagcgcagagagttgaaaggaggggaggccggcgtgggggagagggacacaggaggaaaggcctcagtcagagtccccggcagcctcggggtttcgcgatggttccctcctggtccctcctggaagtgggaggcggaccctgcgctttgcagcagaaactttctgggagcctggaagacttgtcacccagtccgcggtctctccagcagtgggaggagcgctgaaggtggtgattactatcgacaaac

SEQ ID NO: 274354 - DNA, 746 bp, Homo Sapiens
ccccaggaagcaccaactaataagcttctctatgccaaggatatcccaacctacaaagaagaagtaaaatcttattacaaagcaatcagggatttgcctccattgtcatcctcagaaatggaagaatttttaactcaggaatctaaggtatcattagaaagcagaaataagcttatatttggttactttacgtcatttcagaatctctcaacaagtctttcttttagaaacatgaaaatgaatttaatgaagaagtggccttgacagaaatttacaaatacatcgtaaaatattttgatgaggtaagattttaaataacattgtttttaacctttgaatcaggcacaaggatgtggttatagcattctgtcagtttcagaacagctctggcatcccaaaaggccagaaagggaagccaggaagcctgtctgagatgggggatcctggcactgagccagaccctgtacatggctgccccccttacagttttatcatgctgcccacatttggaccagcctgaatttacatttgagttcatggggcctacagccaccctgactcaagttaactttgatgagtaagtagtggccctattaaatggggtcagcttatgcttgattgtaatttgctaaaaatgaaagctaagcttgttaaattgcctagattctgtattcaatcgttatatgaaattatgacatatttctaacttaagcgactatttcaataaaccattctcctttatgatt

SEQ ID NO: 274355 - DNA, 539 bp, Homo Sapiens
  misc_feature (183)..(191): n is a, c, g, or t
ctgtctgactactgagatctgtagccaaacagcaaactgagaaatgtggaagcttaaagcaaagctgttcagagatgacatcttttgtcaaaccattaagagttagaaagatgatctgtatcaacagatctagtttcttgcatttttattatgttgctatatacttttgttatccgtatactnnnnnnnnngaataaataaatgttttgattgtttgaatttgaaaaatacacacgaatgtcctcagtatccaggaacataatggcaagaagcaagtcaacttacctattaaatattcctctattagatgtttcaacactataatttaattgggaaaaattgctttcagaattttattatgccatatttcccttcattatagtaaaatatatgctcacgaatcaatgctgatttttaaaatatgtataatctgaagtggaaattgttcgcttagagtttttaaaaacctagtctttgaaaagcagtttggtgcaaaacttttcccccaacccctccgaataaatcttaaattttaaaac

SEQ ID NO: 274356 - DNA, 580 bp, Homo Sapiens
gacgcctctttcccagtccatgtctgtcctgccgacttcaaagccagaaaaagtgctgcttcgtcccggagactttcagtcccagtgggatgaagatgacaatgaggatgagtcctcctcggcctcggatgtcatgtctcacaagagaacagcgagtacggatcttaagcaactgaaccaggtcaactttacccttcccaagaaggaaggactttcctttcttggtggcttcggtctaagaatgatgtcctttcccgctctaatgtctgcatcaatgggaaccatgtttacctggagcagccagaagccaagggtgagatcaaggatagcagcccgtcctcctccccatcccccaagggcttcagaaagaagcatttgttctcttctacagagaacctggcggctgggtcttggaaggagcctgctgaaggaggtgggctgtcttctgacaggcagctctccgaatcttccaccaaggactccttgaagtctatgaccctgccgtcctaccgacctgccccactggtcagtggggacctgcagggaaaacatggccccacgccgagccctatgcagtctc

SEQ ID NO: 274357 - DNA, 480 bp, Homo Sapiens
gcagccctcagttcccctcatggctctctctttcacttccctccatgacaccacctcatcgagttgaagatgttattgatgagtgcagtgggtgtatagtgtcctcccaaaattcatgtccacccagaaattcagaatgcaaccttatctggaaatagaatctttgcaaatgtgattagttaagatgaaatcatactgagttaggatgaacctgaaatccaatcactggtgtccttgtaagaggaaaggtcacaaagagacagaggagatacacagaggagcccatgtaatgatgggtacggagactgacgtggcacaactataagccaaggaatgccagggaaggccagctagcagaagctagggaaaaacacagagggattctcccctggagcctttggagggagtgtggccctgctgacaccttggttctggacttctggcccccagaactgtgagaaaataaatttcttttgcttg

SEQ ID NO: 274358 - DNA, 475 bp, Homo Sapiens
  misc_feature (372)..(391): n is a, c, g, or t
gatttaccaacattatatgcactcgtgccttcaatgtggaatcaaactggttaacctcagcacagtcctctcgtttctgtgtttctgctgcactaattgccagggggtaggggagaaggcgaatgaattaattcatagtaggaggcggcgataggtgcagcaaagggcagccacagtgttgattccacattataatgttgttgcctcttcttggcaaaagacaccacattgtgggaagatctcagcttccagggtaaaagttaatttataacttaaaagtgctattaagtttttattaccaaatatatcttttatggtttatattgtagtggtatgtatgaaacatttaaaattttactgtggaaattgtgnnnnnnnnnnnnnnnnnnnngtcgaaataggtgttcacaggtcacatgtgaacggagaactgcatgactgtacatgaaatgcaataaaccaactggaaaaagtg

SEQ ID NO: 274359 - DNA, 338 bp, Homo Sapiens
  misc_feature (203)..(215): n is a, c, g, or t
tgaaccaccgtgccaaacctacatttttagatttattatggtgttctgattaacaataaagctaggttattagctgcctgggaagaggaggaagtagatttttacagtcacttttaaagaaactgttaaattcacatgagaaattccaccttaccacaattggctccctaacatgtctttggactacctctgtttctctaagnnnnnnnnnnnnnctggtgtctgaattaagttggtgacagatttgggggatatttgagtagcactttatctagagttgcttgcacaaaagctgagtaggagcatagccctaatgagttcgcattaccgaaacaggt

SEQ ID NO: 274360 - DNA, 457 bp, Homo Sapiens
cctactaaagttagatgggtagagccatggtgatacttcatttaccacctctgtaatctaagaacagaagctatacacatgtctatgacatgtcagacactgctagcatgttcttacaagggaggttattattctcatttccagagaagcatccagtcctcaggactaagtactcttaatgtctgttggtttatctgttctttgaatagatcttttgtccatgcatgattttacattgtcatgttaactaccggtttactgagttatgaagatcttccaaatgttgacacatttcattgttcaatatccagaagccgccataattaatatcagcatcaatctctgtggaaaagtcttggagtgctctcagtcaagtacaagcttcccaaaattctaattttcacttgaaatcttagatattgttgttgacaataaacgctgtcagttgtttgccttg

SEQ ID NO: 274361 - DNA, 501 bp, Homo Sapiens
  misc_feature (381)..(381): n is a, c, g, or t
gtaaaccaagtacctgcgcttggtgcatttgctcaatgagactttcaactctcattatttccccctaagacttaactgtccaagggctaagaaacaaaagtttgggtgccttttaagaaatatataaaatatcagggccagacaggccattttcagacagtccctggggcctagtcagctattaaagatagaaattatatattcataacacaggatattgctgcttgcttatttataacttgctccatttcaagaatatttattctagacgaggaggcttgataattttttcatctaatctactcctcatagctcagggcaaaagaaggaaacagctcaatcgaaggagcagctttctattacaagcaggtaaggaagganacacacagctcccttttcacaggccaggaacccagccaggttgcggctctcagccctgctgcccctcaatctgaaccagcccctggggtgccccagccaggacctcaccatccctgggca

SEQ ID NO: 274362 - DNA, 511 bp, Homo Sapiens
atgctctacaaccccacaacgtaccagatggatgtgaaccccgagggcaaatcaagctttggtgccacctgcgtgaagaagtgtccccgtaattatgtggtgacagatcacggctcgtgcgtccgagcctgtggggccgacagctatgagatggaggaagacggcgtccgcaagtgtaagaagtgcgaaggccttgccgcaaagtgtgtaacggaataggtattggtgaatttaaagactcactctccataaatgctacgaatattaaacacttcaaaaactgcacctccatcagtggcgatctccacattcctccggtggcatttaggggtgactccttcacacatactcctcctctggatccacaggaactggatattctgaaaaccgtaaaggaaatcacaggtttgagctgaattatcacatgaatataaatgggaaatcagtgttttagagagagaacttttcgacatatttcctgttcccttggaataaaaacatttcttctgaa

SEQ ID NO: 274363 - DNA, 392 bp, Homo Sapiens
tgggctcaaatggtgctccctctgcagcttcctgagtagctgggactacaggcacgcgccaccatgctcagctaatttttttaaaaatttttgtagagacaaggtctctttatgttgcccaggctagttgtgtattcccagcctctagcaatcctcccacttcagcctcccaaagcactgggataacaggtatgagctgctgcgctcgacccacatcttatgtgcctggcagtgatctgagtgttttatgcatattaactcatttaattctcaaaataaccttgtgacgtagaaactattattttgtctacctaacatatagtaaagctgaggtaaaatgagattaagtaatctggccaaatttatataattagtaaataagtttgaatgaa

SEQ ID NO: 274364 - DNA, 460 bp, Homo Sapiens; identical to SEQ ID NO: 212764

SEQ ID NO: 274365 - DNA, 445 bp, Homo Sapiens
tcttcttccttacagacccctcccatcactttctacggaccactttaaaccagaaatgtgcactagaatcctatgtaaagcttctgcaaacagtttctccgaccacattccaggcttaacagcatcagtgtccacagtgattcttagccttagacaaaagcaattcttactgctttgtattatagttatttggaatgatgatatcttctctggattgaaaactctgtaataattaattccttttttatatatctgtattcctcataatgccttatacagctctttgtatgtaaaaagataattattgagtaaatacacatttggcaagtaaaaaactacacactataaaacaatttcaaggcaatagagaaagtttgtggacaaatgaggatatatttaaaagtagtagtggtacaaaagatgggttgtgaggaaacatgactgt

SEQ ID NO: 274366 - DNA, 310 bp, Homo Sapiens
ggcaccacatatcagtggggactgttcagaagatgatgttggaaagccagccctaaaatggaggaataggaatatggattcctaactgagcccctaggaaaagtagactccaaatggactaaatatttgaaagcaaaaggtagttgccatttgtttaataggagaaaaaatgaataatctccagggccagggtggccgtggggttcttaaacaggatccagaaagcacaaacctcaagactaaaatgtatgaacttgaatgcattaatgattatggattaaggatttctgttaaataaatccatcatggc

SEQ ID NO: 274367 - DNA, 445 bp, Homo Sapiens
gctggtcctgccatgtatctactctttataaatgaattaggtaaggcttctaatatctgtaataacatgctgccatagcttacttggggactacagacagctcacttgtgcaagtaattcaggcactcctctaattctcatctctttttgcccaggcattcagattgcccagagtttctggataaatacatttcttcgtaaatttcagatttcttgcttatgagcccagaatcttaagcagatttatttaatttagtttgtcttctactttttcaataaaatagtcttctaaagtctataaaaatgttccaggacaggtaaaaaacagaaaatcaaaggattctataagatatttttcctctgggtaaaataattcttattttttttaatcaatagtatttgttttaaatgcaagaatccattgtgtttaatatatttgagttgg

SEQ ID NO: 274368 - DNA, 388 bp, Homo Sapiens
gtcccataagaagagtgaacccttgcattttacctagactcaaataatccacctgtttgcttagtctaatctgttaacacaccctcgctgaagcccataacttctacagagggttaatgacttttatacagtactcaatacagttgatgaatgaatgaatgagtgaatatgaattcagtttcagtgatatgggtcatgtcactgtggagatgatcttttatttcaaatacagtatgagaaccttacaatagtatactttcatttctttccttctggccttttcattattgtcttttaataaattttaaaccctagaatatatttaaaaaaatactttctctttaaatacttttcttttaaataataataaagatctgtttactcagat

SEQ ID NO: 274369 - DNA, 651 bp, Homo Sapiens
  misc_feature (100)..(100): n is a, c, g, or t
aaaacaggttgtaaaaggcatcttcagcggctgccccacccatggctacctgggccctcctgcctccttgcagccatgctcctgggcaacccaggtctgntcttctctcgtctgagccctgagtactacgacctggcaagagcccacctgcgtgatgaggagaaatcctgcccgtgccttgccaggagggcccccagggtgacctgttgaccaaaacacaggagctgggccgtgactacaggacctgtctgacgatagctccaaaaactgaagaagatggtggataagcccacccagagaagtgtttccaatgctgcgacccgggtgtgtaggacggggaggtcacgatggcgcgacgtctgcagaaatttcatgaggaggtatcagtctagagttacccagggcctcgtggccggagaaactgcccagcagatctgtgaggacctcaggttgtgtataccttctacaggtcccctctgagccctctcaccttgtcctgtggaagaagcacaggctcctgtcctcagatcccgggaacgtcagcaacctctgccggctcctcgcttcctcgatccagaatccactctccagtctccctcccctgactccctctgctgtcctcccctctcaggagaataaagtgtcaagcca

SEQ ID NO: 274370 - DNA, 482 bp, Homo Sapiens
atcaaagtcatctccatggacaacgccgaagtggggaaaagctgtattataaagcgatactgtgagaaaagatttgtgtctaaataccggacaacaattggaattgactatggagtcacaaaggtacacgtcagagacagagaaatcaaagttaacatctttgatatggctggacatcccttcttctatgaggtaagaaagcctttttgacaaaacctatatccagtattgttggtggtttggggagagatccagaattatatgaaacaaccaatattgatatcatgtgtaaaattgcataattttagcttgatcgtggcttgccttcagagccttgagttaatagacaactgttgattttttaggttatcctgttaaatagtggtaggaaatttcattgccaatatttcaaacatttcaataagacattttgactttcagaggacttttgctttttacctcatactttagcctaaaatgtg

SEQ ID NO: 274371 - DNA, 453 bp, Homo Sapiens
aataagtaaaaagtagcagcccattctgtgaagtatcaggcagggcaggctatgcaggcatatctgcctctcaagaaatctcaagaggcttagggattcacactgaaaggctccatataaccaacctcaaagccatggtattcagacgagaacccaagtttatcgtgcattcaaaagttctgttcctcaaaaagcatctacaaagtgtgattagctaatgaatccattaatcaaatattcctacttggcacaagtccctgctgtgagaggacagttaagataggtccctgccttaagaatattgtaacccaactgaagaaataggatgtggaagaactaagatgtcgattaacagcacaaggcacagaagaactaaagtgtcaactaacagcacaaggcacacacagtgtaagtctcagccagttcatatggcccatatccaacaataccaac

SEQ ID NO: 274372 - DNA, 427 bp, Homo Sapiens
caccccttatttcttaagcagcaccaccagtccccagaggacaagagcagctatatctcatccacctatgcatttctgcaccagcgatgcaaaaaacaccctgggtgggccacagagaaaaccgtaactatggatacccaaggggcagagcagccagctggacctgctctgtaattcacttacttacttaccagagggtggttcaagtcaaacaaacaaaaccaaagacagttgcaacccatggtggatccaaaggtacagtatcaaaatcatggaactcttgcccaaagaaaagactgcaaatagtcatctggtatatcttgtggaaagatgataggtttatagtgactcaaaatattttagaaaaatttctgtagtgtcaagttctttcaaacttaaaattttaaccccagaggattttcgctga

SEQ ID NO: 274373 - DNA, 512 bp, Homo Sapiens
aacccaagctaaagaaagtacccaaaataaagaaattttatcaggaacaggtataaattttaagaaacgtatttcaacgcctgctaaaattaccacttatttttctattatggcaacaaattacattaatagattttcactgttattgtttatcctgggagaaagcatacttgtgaacttttttaggtactgtgctttggaaccaaatttggaagtgagatgaaatgtcagctgtactctcctggttaggtatgatttcagggtcaggtatgcctgataaatgaagtgagatgctttaactttgttctagaatagtttctactgcatgggaatgatctgttccttgaggatttgtcacagtctgcccacagtggactggatttggcatgtaggatgttaatttctatttactttgcaagaaaaatacagtttagcaagcaacagaaacatactgaacatgaacctcaccgtccctctctcagctgtagctccttctgcgtctgcaacctggc

SEQ ID NO: 274374 - DNA, 531 bp, Homo Sapiens
actgcatagggctcggcgtggagtctgaggtctgcactattctagtagtgcacccactgtctcaggaagcagtgaccacatcaaactgtctcccccacacctggagctcaaattccagaaggggcgacagacaccagagcaatcaataagtaaacaacactgtggattacaaagtgtccacaccagcttccctctggggacaagctgggctctcagagggtgcccctgctcccacctccttcatggagaatgtgagtcactccctccactcagttaggttggctccttgaactttcatctctagcaaacatactttcctctccctttctagttgctaagtataggggaaaacacagcaaaacacagggacctggggcctgtgattttaaggaggcaagcagggaagtcctcccagagaaggtgatgtttgaaaaggaggtgaaagaggtcagggagtgagcacgtgattctgggaacagaggtggatcagacatggcccctctctgcagggagctaccagcctggggatga

SEQ ID NO: 274375 - DNA, 409 bp, Homo Sapiens
gggagtgtggttggagatagaaaggctcctccccaccatgtaatggcttcctctcagaattttattccaggctagcttgctgcaggtctgggtagttggatcatggctccactgggattggggtggaaagcttgaggggagtagggttccagctctgggacattgtgctcaggaatttgaaaacgctgctatacttactctggttactacatttcttccactcccaattcccctacctgccttaaccaaggctcatactgtcctgtccttaccatcagatggagccaggaagctcagtgaaaggcttccctaccctttgcactagtgtctctgcaggttgctggttgtgttgtatgtgctgttccatggtgttgactgcactaataataaaccttttactcaactctct

SEQ ID NO: 274376 - DNA, 414 bp, Homo Sapiens
cggccccacgttctcctacattctctacaacacactgctcttcctgccctacctggtcttcagcatcctggccacacactgcaccatcagcctggcactccccctgcttaccattcccatggccttctcccttgagagacagtttcgaagccaggccttcaacaaactgccccagaggactgccaagctcaacctcctgctgggacttttctatgtctttggcatcattctggcaccagcaggcagtctgcccaaaatttaaggggacaagtagctccccccacgacatgtctccctttcctagaatatattaaagtcagagtctctgaggaaggaatgtgatttggcagtcagggtactaagcatgggtgggaactcctgccttataaaaattgtttttgtgttcttaaagat

SEQ ID NO: 274377 - DNA, 153 bp, Homo Sapiens
ccaaatcccctgggtaccaggcttctgccacccccggctcagatctttgcaaatcagtacgacagcctcagagcagagcaagggttgtttgggagaatcatacctggttctaaggagtcccacgctttttgccaagcctggtactgagttcat

SEQ ID NO: 274378 - DNA, 559 bp, Homo Sapiens
ctataggacttggacaggggtgttataattcattatgctatctatggcctgtttttaactgactgcccatagctccactagtttctataaacctagctagaaactataaaaaaatgctttggtttaaagaatgattcaaggattctggcaaaatggaaaggtacttctgataaaattgcaccaaaactacaaattaagaatctttttaactttagtggctaactttacaattacatgtacagaatcactccttttctagcagtcttaaggggaggggagactggagggagatatcactctcttttttaggtggagggtaaaagagagagcaccactgaaagccaaggttttaaatacaaaccacatactggtagatcaagagctttgagtgagatgtataagaaagtaagaactctcagaggctttcaagagtctgttgaataggataaaaaacctaaccaaaatgaattccagaaagcagaaatcctagtactgggagaatgatgtgaatttatcttttttaaagggagaatatagtagaagaataaggtgaagatag

SEQ ID NO: 274379 - DNA, 537 bp, Homo Sapiens
actttagtttttccactttgttgcaaacaattgcaaggtgtccaggttttctgtcttcccccagcctgcaagtgctcagaggacacccaaccctatgatctcagccaactcatgaagtttgatttcacaacttagtgatgtcttcccagtggaatcctaaatgataaggaaaatggtatagagccaagacttgaacattaacaacccaggagcacagaaacagcacagttagctgagaggcgttatggagagaagcaaccgaatgcacactgagcgctgtgagaagtccatgacagtggggaacagcgcccaccgtcacaaaaagaaagaccctcggcaggtactttagagtcacgttcatgctgtaatatgtggggaagaaagactattccaaatggatctggctttttaaaacaagggaattttccttgctcttgggaaccagcaaaatccagctgctcattgaactgcctgtctggaatctcacaaatttgcaccttgaagttgttaataaaggactaagttgataattcgaac

SEQ ID NO: 274380 - DNA, 314 bp, Homo Sapiens
tttcagtgaaacctttttactcactaagatagtttaagaaaatgatatcaccatcatttgaccttggagaaaagtggtacaaaggttagatttgctgaaggtcacacactttgtttctaagactgtgaagactaagcccaggtggctgacttccagctctggcctgcacagcgagaaaataaccacattcagagccatacaatgtcttaaattatttaaaatgtaatgtccttagggaattcttgattgtttccttttcctttgttttcatttttctaaaaagtgcttaaggcagctaaaaaaggtggactctt

SEQ ID NO: 274381 - DNA, 298 bp, Homo Sapiens
gggagagacccactgaccctgtgggctgggtccctacagtaattttaaagggaagagcaacaaactttcagtttgcagggctgggactgtttacagctgcaaaatttagagaggacatcaatctattattatccacattttacagctggggaaatcaatgctaagagaggaaattcatttgcccagaggtgcaccaccctggcctccaatgtgcaattcatgcaattgtgatttccgacctggtcccaaactaaccctaaagttagcaggccagaacagtgctgctcaaataagtcag

SEQ ID NO: 274382 - DNA, 356 bp, Homo Sapiens
tgaggtgccagaaataagtactttaatactttttctcttggatggaaataattaacagctttgttagtctgaaaattttctacaaaggtgtcatggggcagtgcatggataatggttatggagaatatttcacttttgagtgggttttgtcagaggatgctgaaaagaaatacaaactgatgtgtgtgttttatcttgatgctgctaggatgctgttgttataatctgaccaacctgattttgtaagccttaaattgcttaaaaggcaattcctgtgaagaacaacactgccaaggatgctgtttcctaccgcccatatcacatcattggtgtgtgtgcaaacagcacaacaatcc

SEQ ID NO: 274383 - DNA, 492 bp, Homo Sapiens
cagtagaaccttgcaggtgctgtagcaggcgcaagaccgtagatctcaggcctctaacacttccaactccagccaccactttcctgtgcattttcactcctgagaagtgctcccctaactcagatcccctaacttagatttggcccccaactccatttcctgtctgtcttagacagcccttccaactgtgtcatctcttctctggaggtcaatggtggagggagatgcctgggtcctgttcttcctacataaaatgcaagaaaacagcatggccagtaaactgagcaagggccttggaatccttgagaatcacatttatgtgcttatgattacgggcaagctaattaaccttgttgaatctcagattccccatttgcaacattaggttaagaccagtactgcaggattgttgcactaaatgaaatactgtatgtgaagtgcctggcacagtgtctggtacatttgtgtttaataaaagctaactccatgttc

SEQ ID NO: 274384 - DNA, 448 bp, Homo Sapiens
aagaaactggacccagagagaaaagtgcccggtccaaggttacagagccagttggactcagaagtgaagctggaacacatgccaatgccctctcggccgccaggtgacttctctgcagtcccctttaccatctgcccgggtcctttgggatacggctgactaggggtttgaagaacagcaattggcctttgttatgaatctttttgtggagataaacccagtagaagtatcacggttctgaccatgaaagtgtgttcaactctaatccagcacaattaggattccagatcatttgattctgtgtcgtctaaatatcacagaaagttaaaaacaaattagcctcaatggaattaatggcttaatatccataatttagttttaatgctacgcgaggaagggctcctgtgaatgtgttcttacaaatcaaataaagaaaatcaaatagaga

SEQ ID NO: 274385 - DNA, 447 bp, Homo Sapiens
  misc_feature (48)..(136): n is a, c, g, or t
  misc_feature (188)..(217): n is a, c, g, or t
gaaaccctgtctgtactaaaaatacaaaataactgggcatggtgtgtnnnnnnnnnnnnnnnnnnnnnnnnnnnnnnnnnnnnnnnnnnnnnnnnnnnnnnnnnnnnnnnnnnnnnnnnnnnnnnnnnnnnnnnnntgacagagttaagtctcaaaaaaaaggcatcttcctaaagcaattgtatttnnnnnnnnnnnnnnnnnnnnnnnnnnnnnntaagcactaagtgggctttaatacagcatattccaatggggaatcccaggaaccaaaagactaattgtccaagtccacaactagaagtggcacctctgcagaaacaagcatcaaattccctgctcaggaagaagccagatgagtcagccccattcgtctgtatgcccagtcccatccgtgtcctgctgtaactacatagatctcacctgagtaaagtgatttttttctga

SEQ ID NO: 274386 - DNA, 485 bp, Homo Sapiens
  misc_feature (110)..(163): n is a, c, g, or t
atacttgattgtaaagatattattgttgcaaaatctttgtggagtatttggggggccaaattgaagcattaactcaaaagaatgtcccttttcttttattgttatgttcnnnnnnnnnnnnnnnnnnnnnnnnnnnnnnnnnnnnnnnnnnnnnnnnnnnnnnccaataccagccgcatcactggggttctggtgaccacttaattttactgtgaagtagaagccagatgatggataagtcaagccccaatataataaagccaccttaactagttaaactgatattatagagcttagctctgactccagatatacatatataccattactttatagaacaactctctctggaatagccgtgttctctttaagccaggtatgatggtgcatgcctgtagtccagctactggggaggctgaggtgggaggattacttgagcctaggagttcaaggccaacctgggcaacactgaaaaactttgtctc

SEQ ID NO: 274387 - DNA, 435 bp, Homo Sapiens
ctctcctgctgcaacgttctcactccacaatcctggggcagggaggtgaggcccagctgagtttggatcataatcctgaaagacacaatcccaagcaccataatgtggaatgttgaaatccctaaagatcaaaatccctcaagtctaaaatccctgatatttcagatgaccacagctacagggctaggtgcacacaattagtaaccgtagcgatatacgtgtacgcgtttctctttggacttatttctttatggtctgtcttcttataactgctacacccatgccgccgtcgttagttacgtcagtgtttatgcaaaaatacctgttatcattgcctattttattgtgtaaagtggcctatgaaatgttctgttgtgtttttatgtttctcaaatacataccttttaaaaatgtaaataaataacatcgacatta

SEQ ID NO: 274388 - DNA, 449 bp, Homo Sapiens
agctggaatagtcctggggctctggggcctgcaggtatcagcttgctctctttgcactttcggggaaggaggactcacagtgaggaagcaaaaactgtgcacagaagtggatcacctgctggtggaaatgtggacatctcttgttcagcagatggcagtttttaaaaaataaaggttgtgaggaaaagacttatataagaagaaaagcatttccagtggtgtggcctgaaaacaaagaataacctaggctgctggaaagcacccttttggttgttttcattctgttccctcccattgtagattgaactttgttctctgctttctttttcatggaaagagaggacttagctttaagtcagcactgatttgggactgttcctaaggcatatcagtgcttcattgtcattgtgtttttaaactttttaaaattaaaacagttcattttgggg

SEQ ID NO: 274389 - DNA, 413 bp, Homo Sapiens
caaacaaattcaggttcagcaccgactatgaatttttagataaattcacgcaagtttttgacacaacactgttggctgaatatccagagtcatcagtcaaactttttaaggggatactaaaatgggactaaatccaacaaaatgcctttcacaacgttactgtgtcttttgagcaatgtgttagaaattgctttggtaatagacttctttcacaggattgagaaggtagtgcatagaaacaacttgtatacttggaacaaatgtaacaatactgcagaaactttctaatttctaagataatttaagattatctggttaatctaaatatctaaaaagaacaacataaaaacatgaaagtagctttgttggttccaacgaagttacatgtttaataaatcttacatggataaagt

SEQ ID NO: 274390 - DNA, 417 bp, Homo Sapiens
ctcgggcagaccctgccttggagggagactccgagcctgctgaaaggggcagctgcctgttttgcttctgtgaagggcagtccttaccgcacaccctaaatccaggccctcatctgtaccctcactgggatcaacaatagtttgccatggcccaaaagaactggaccctcatttaacaaaataatatgcaaattcccaccacttacttccatgaagctgtggtacccaattgccgccttgtgtcttgctcgaatctcaggacaattctggtttcaggcgtaaatggatgtgcttgtagttcaggggtttggccaagaatcatcacgaaagggtcggtggtaaccaggttgtggtttaaatggtcttatgtatataggggaaactgggagactttaggatcttaaaaaaccatttaat

SEQ ID NO: 274391 - DNA, 456 bp, Homo Sapiens
ccactctgaccagtatagcttgagcagctgtggacacagctaaggggaagcccatccttgactgacgagactctggcctcccctggctagaccggcagagatctgtgtgaacaccctttggctgtgtgtgcaactcctgagggctcttgctggcaggctacctcctgagcacagacagtagagcttctttgaacctcctaaggttcaggagctcttggatcaccctatctagaggcagagggcatggctttcatgtctatggagataaagcatcaagtcattatcagaccttcacaccttcacacagtctactgaggatgtgttttgatgggtgacaaaaataggtttagttatatataagacttgccatcagagggcaagactcagagaaccctgagcagcttagggaagcaggaagaataaaagagaaaggctcttgcttaatgatagggacac

SEQ ID NO: 274392 - DNA, 404 bp, Homo Sapiens
  misc_feature (249)..(249): n is a, c, g, or t
cattcagccctttaaaaatgtcatctaactccttcctggcctgtatggcttctgttgagaagtctgttgccagatgaattggagtttgtttacatgttacttgattcttttcttctgctgcttttagaatcctttctttatccttgcccttttagagatgattattatatgctgtgggaaagacagtttctggggtgccagttgagttggtttcccctgcatgagacattcatgggaagccatggggtncctctgaggagaaacgtctccttattgccttcatgtctttatgccctgagagcataaccgctcagcggcattccacaggttgctcagggagataacactccttgaagcagtggagtataatcaaacatcttggctcctcctgaaacccactccca

SEQ ID NO: 274393 - DNA, 472 bp, Homo Sapiens
attattctaccaccctacatccctttagttttccttctcggggtatttgtgtgaccctaagaacttggtcccgtttaaacgactcatgtccatcccccctccattcgagcagtaccacatgcttgatatataaatgttacagctgagcgtttgcagtagccttgagatctgagtctagtatcagcccaaatgaggtgcgagtgacttctgatttcagggggataccattcttcattgagctggtagatggacctagtcacactttgtgggatttttgttgtttatattcaagtatagaaaatattccacagtaaatacttcattccttaagccctttttatgtgcataatactgtatttgggcaatgcaaaattgaattggatatagaatctgccctctaggagcttgactgtagtaaggcagagaaagcatgttcaaaattaagttaaacagaatagagcatgagtgccag

SEQ ID NO: 274394 - DNA, 488 bp, Homo Sapiens
ttttttccgttcaacgaaacatttatgtagccacaaaaatgaaggatgaggtgcttgctgcgtgtccgcatggtatgatgtggcaccatttgtagaagaggtgggggagggaggataaatatgcatgtccctcatatgaacagactctctgaaggctaccaagaaacaggcaatggggactcccccagacaagaaagggacagaggcggaggaagcttttcactggacatctctccactctggcacttgagtgttgagtcatttgaatgcattatctattcaaagtatacatgaaagtagagaggtgagaggattttgctgtcttgacgtatgaagaacagcataagtgcagaattacctagttttatataaagttaaaaggttctcttacaaaggggccctggaataaatgagtctagggcattgctgctctaattactaatttttcctaagcccaaggcttacccatccctggttcccagtggaaa

SEQ ID NO: 274395 - DNA, 492 bp, Homo Sapiens
gcaaagggaaagagtgggaaagaagtgtctcttcatagctggcatgggtgatttagatggatttactcacctaagccaacaagtaaatgtacgatttgttactctccaaggtaagttcagaatctccctgttatgcactactctgactctctactgttggttagttcaataataaaattgacttcacagagagctcctctgagtctgaagggtggttggtctccaggagccacctttccaggattgcctggagtcctggggtatgttacagccacctggaggcccacacaagtacccttcactaggggccattcctgcctcccaggcaagatgtcaagtgacagtgtgagtgtgcgtgtgtgtcctgaggtctgggacacttgtccttcaggctgcagcaggaagccagggcataccttctaagattagaacaaatttcctaaggtcccagcccccggtctgcatcccagtcagctgtagcctctcctgtta

SEQ ID NO: 274396 - DNA, 361 bp, Homo Sapiens
gctctctgtctccttcttcggccatgtgaggatgtgtctacttcccctttgctttctgtcatgattgtaagttccctgagcctccccggccatgtggaactgtgagtcaattaaacttcttttgtttataaattatccagtctcaggtatgtctttatagcagtgtgagaatagaataatacatatggggattatatactcattaaagataggagccagtgaattcataatgaggatttgtatattgggcaggttactgtttacttttagccaaagctggaatgatttttatacgaaggtaatcactttgtaactgcaaactcattttggttaactctagagtacgttaggttgaaaatgg

SEQ ID NO: 274397 - DNA, 424 bp, Homo Sapiens
  misc_feature (18)..(18): n is a, c, g, or t
  misc_feature (57)..(57): n is a, c, g, or t
  misc_feature (256)..(256): n is a, c, g, or t
cttcccccattaagaagnatccaaaactttcaaggaaagggcagggccgaggcgaantcgtagaaaccgcatccctcagcagggactgataagccatctctcggagggcccccctaatacccagtggagtctggttctaaaccctggggggtgtgtcactgtgatgggacacgtaggagtccacccttaaaaccagcaccctgtccctcgaggctgccgagtgggtgtgtggactggggtgccttcccacaaaaanctcgtccggctctgggcccgagacagccgcaggccccagccactgaatgatactggcagcggctggggttttatgaactcctttctggtattttttcccctctatgtacaaatgtatatgttacgtctcaatttttgtgcttaagtaaaaataaaaacattttcagac

SEQ ID NO: 274398 - DNA, 461 bp, Homo Sapiens
ggtgtgttggatgccacctgtgcccctccctggagatgcttttggccccacagcttcctccagccaatgtagcagtgactgggtctgtgcaggttttggtcaccttcactcaggtgtgatggggtggtgcctttctttggcctgccccaggtatcttttactttttgggatgtatttgatgctatagtatggaatgctgcagagacttccggcaccaaccccctggagttggactttatttcacaggttgagggcaccatcctccacaagaatccccaacttccagccaccagctggcaacaggtttgggggtcctcagcccaccctcacttctggccagatggctacaaatttggcgatttccactaccccctcaggtttgatcacttgtcagaatgattcacagaattcagggacatgctatgcttacaactacagttttattaattgatcaataaagc

SEQ ID NO: 274399 - DNA, 121 bp, Homo Sapiens
aaggaccctttaaaaatgtaaaaactattcttaacttgcaagttgtccacgtaatgagcatgtagagagcaaatgattctcactaagcactaatgaaagagaaatgtgacaatgacaggtt

SEQ ID NO: 274400 - DNA, 469 bp, Homo Sapiens
ctgcacagctgcaggctgtgaggtatgtggtcaagaaatggagataaagctgtttctgagttcaaacacagtaggaaggctgcgaaatggctgcattgcccggctgtgtttgcatcctctctctgccatttgagggcagtggattcagcatgcatctttgaaatatatcccagcttgtcagaggtaagtgcctgttttgatggaaggagagtggggaatgcattacgggggaaatgtagcaaaaggcaagcagctctgagttctgcatcctactttcaatgatatctcaaagggcttgtgaatcaaggtactgctctcttgtagacatcttgaaaaatgaaagaattctaacgtattatggactttaccgtttatttaacaacagtttagatactttatggttctatttgttagatcccccttttaactttttgaaaatttccaacatatataacatggagagggtatt

SEQ ID NO: 274401 - DNA, 508 bp, Homo Sapiens
agtttagttgccccaatacccatgcagagaacttggagctaaaaggttccacagcttcaaacctaggcatacttgtgaatgcgtgtggccacccattgattatcccttggtgctggtgcttgtacctgccattgcggggacctgtaggtgggcatgctaggtccagccccacccattatggtccccacccctccagtgcctagcagggagttcagaccactgtaaattacataggtcagccatttcttgaggcaacaagaatcctttggtgaataaaggagtatcaagaatatacccagccacatgagctacagctggctcttacctataagtaccatctactggcttgttggttgaactgcgcagcccaatattaagcctaccaaaagaagtggatagggctatagaagcaaagacaaaagactctacccagtattctctatcacataaggaagaaggaaaagggaaagagaaagagcaagaaaaaacccacaaagtattatagggg

SEQ ID NO: 274402 - DNA, 285 bp, Homo Sapiens
atataagggatagtagggcaaacatatgcattcattcatttttgcatcaaatcactcttatgtactgcactgtgttaagcccaggtcatctagcagtgaatcaaggacataagattcctatcccttatgaggtctacaggaataaagaactgaaatgtgtttggccaggagcagtgtgatctttttgaagtttataagctccatatattggtaacttaaaaatttgcctatacctattttttgacaatatggaaaacatcagctgggcacagctgtggctcatac

SEQ ID NO: 274403 - DNA, 458 bp, Homo Sapiens; identical to SEQ ID NO: 213849

SEQ ID NO: 274404 - DNA, 331 bp, Homo Sapiens
  misc_feature (280)..(280): n is a, c, g, or t
  misc_feature (302)..(302): n is a, c, g, or t
  misc_feature (319)..(319): n is a, c, g, or t
acgaaaccaggtttattaaaatttctctacaagtcagaaacggccatctcactgttcacatatatacacgtatgtacaggaagaacctagtgtttctagctttcccggcagaaggccctgccagcccagagtccttagtcggataatgtatcacagatacaacagtcgagcaaccacgagagcgttagtgcgacagaggcctctgtcctccctcttcccaaagtcccatgattctgtcaaggtaatattgccaataatccattgcacatttcacgtgggntttaggacacgccggttattcngacaggacacaggacgnccaaaacaagcc

SEQ ID NO: 274405 - DNA, 472 bp, Homo Sapiens
gaactgggctaagtaagcacagttagaccctgctgttcacttgaccacgtcctaaacccgggacaagtgagcactcattcatgcacagcagacccggaggcatgggctggggcagcacaactgggttgcccgcagcgcccctgcctgcaggctacatgctggaggcccacggaacccaggcggcacagggcagattctgtttgtcaagcgccccacaagccttgcccagattgtcaagctcagcagcgagaatggttttgacgaggaggatggaaacagcatctgctctggaagccgctctggcgtgcgggagagtggggagagggtgcgcttgctgcagctgctgccttaggaggctcctctgtggccaggcttctagctccctgcaccctgagggaccattcgggtgcctcagggatgcccttccctcccaggggcactgacagcactggctgaaaggtctgaagagcca

SEQ ID NO: 274406 - DNA, 267 bp, Homo Sapiens
tggctaatggaggaaccttaaatgcatattgctaaggaaaagccaatctgaaaggattacatattgtatgagtccaactatatggtaatctggaaaaggcaaaaccatggagacagtgaaaaggtagtggttaccagtggtccatgggaagggttggatgaataggtggagcacagaggatttttaaggcagtgaaactattctgaatgatactgtaatggtggatacatgtcatacctttgtcaaaaccaataaaatataacaacc

SEQ ID NO: 274407 - DNA, 134 bp, Homo Sapiens
cccagcgaatgtgaatcatttagtgtgctactcaaaattaggtgtaaatgtatatgtacactataagaataaaaatcgataccatttctttaaagctttctaaaataaaattaattatttctaatagttaaaaa

SEQ ID NO: 274408 - DNA, 378 bp, Homo Sapiens
ttggaccctgaaaatccaaaccactgttgctattacaaaatttttctttaccctagtatgcacccctgggccaagcacagatgcattaaaaatttgccaagagaaacaatgaagtcactgataatacaaagcatgagagtatcatgaaattcatgtctttgttttcttcctctagatacttaattatttctcattactgatcattttgtggttattggcagaggggcaaggaaactccaccactgtaaacatgtagagacacatgctcctcagtagaccagaagtctgcatatgatgggtctgttcacaaatccaatgtgaacaccacttcattaatcagtgagaatgttgatgctactatccccagcctccaaagag

SEQ ID NO: 274409 - DNA, 516 bp, Homo Sapiens
tttttcggtagaagaacttttattgaacagtaagattcaagatttcaccaggtgagagggggaattgaaaattagtagaaaaattccaaggggaccagttagccacaacaaagaatggggttcagggaacttcttagggatgtatcttcccctcaatacaggtagaggagcagcatcagaagcagggctttggagagaggcatagaagagaatcaccttctcctggcccacgcaagctacctggtgtaccttcaagttcaggccagctgctgttcctgcccgctcttggagatgaaaaggtttcccatgcccccacctcctcccgagttaattctctccagggtgcttctctttgatgtaaacccaggggtgctattagcaggctccttgttctcttgctcaaatcctttccaacctttccaacctgtgggagctctgctgtttctaatttcttaacccccatcttgtttcttttcccccaatattgaatttctgccataatctttcagatcaact

SEQ ID NO: 274410 - DNA, 523 bp, Homo Sapiens
  misc_feature (16)..(16): n is a, c, g, or t
  misc_feature (276)..(276): n is a, c, g, or t
aacagctggctgggantataagagctgaatgaagtaaagaaactctggcaagaacaagttcaagcgtcttccaggaactcttgatcttggtagtggaagcgttttccaaagatgatggagcagatgatgttggcggtaatggaatggaagaggaaggtggggtccacgagggctcccttggatttccgaagttcctctatcagacactgagcctcgtcctgaatccgctcctcaaacactccgctttcccatcccgaagtccctcatggtggtcancagagaatcgccgaagcaccttccagcggtttccattggcaaagagcatgccatatccctggtagactgggtccatgatgacgatttttccacggccagagaaggcctcagcgttgtccaccagggcctcccgtatggcctctactccacacagcatgaccacgggcctcggtcccaggtgtaccgtgaagacgtccccatatttctctcggaacctcagaaaggatttgagtaggcctcttctgtc

SEQ ID NO: 274411 - DNA, 495 bp, Homo Sapiens
  misc_feature (321)..(321): n is a, c, g, or t
gcacgagttagctttcattatctaacccatttattttaaatctgccaggaaatcctctaactttccttcctttttgtttcagtaagtatcaggcagcttcaccatacctgagtccttttgtcttgaagctgccacagaaaaatcttacagcaatcattgctgattagaaactgtttcagacaatcagcatgggtgttatttaccaaattccccccagagtcctaggcctcttctccagaaatatctgatgatggaagtgaggggagggcaacggtgctacaaaacacgggaacagaggttaaagagaagggcactactttncttggccatacttgttaaatggattgctttgtttcaaacataaataatctttaagtccaacaccaaatacctgttactccttacatccaatctcattagtgggttttaaggacacagtactaggattttccatttttttaaaatcccttggggccctttaaaaaattttacagg

SEQ ID NO: 274412 - DNA, 403 bp, Homo Sapiens
tgttaaagagtcaacacacacgtccccagacccaaagcagcaactcccagtgaaagggtacccaagacacactccacgggacagcacaagaacttgaatccttctttggtctgttgccccaaagaacctgttcctttgagtctgttcccaggtgacttgtaatgatacctcttacggttttaaagtccaccactctttacatgctagcagaactgaagtccaagcgtgcaaactcagccttatgaaatcttagaataaggcaactgatgttctcaacaccaattattattactttgtttaaaagctcctttaaaaaaaattgcacatttgcatttcacttcctgtaacactatgtctgtagaggaaatgccttcaggaggattcggagagtgccatctcgtgc

SEQ ID NO: 274413 - DNA, 500 bp, Homo Sapiens
  misc_feature (23)..(23): n is a, c, g, or t
  misc_feature (30)..(30): n is a, c, g, or t
  misc_feature (47)..(47): n is a, c, g, or t
  misc_feature (112)..(112): n is a, c, g, or t
  misc_feature (119)..(119): n is a, c, g, or t
atggcccttgtaagccccatctncctccgncctgcccgcactagctncttggtgaactcctcggtcccttgtagatatacagttgcagccaacgaagtgcctcaggacccanttccgcnacttccttcaattgaggaggtggccccaggaactcaacatcatgcccgttccccagggactgacaggctcctcacagtggcaagctcgccgtcccacaattagaacgcgctgcatgccgtagcccccacacatattggcatgctgaccctctgtcctaaaacagaagtcgacagatctgtttcagcaacattccggagcatccttggatacagcttccatctggaaaatgctgcaatattatcagccaaagtttcttcatcatttgccccagacctgtaatagtcatatatagactttggaagtactgatttagcatgttgttcataatcattgatacaaattagccgggggagcattttcacaaggttattgctatccca

SEQ ID NO: 274414 - DNA, 597 bp, Homo Sapiens
  misc_feature (395)..(395): n is a, c, g, or t
ttagcaaactgcttggtaatctacaagttcatttctttgagatattaccatcttttttttgacatttgtgcaagaggcaaggtgaatgcatacatattaaaatgttcacatttaatgggaagaccacacataatggcagtctacattgaacccattttcaagtatttgttcacagattcttctgagtactgttatcagccctttatactggtaaggtagcccctgtgagctacacacctctttaagcttcaaacaaaagaaatggaatgaccagcaccttcctttgttttcaggcaagtacacagaagccttgctgcagtagctacatgtggccaagttctgatgttgccaaagttaggaaagagtttctttggccacttgggttctcttaaaantacaagcgagtctcttgttttaaggtacccttacaacatcatcctctcaacaacacggacaggataaagccacatgggaatagcacacttgaggcctagtatgtgtatttgttcagtggtctgacagatggggtttgaggaacaaaggaaggctttggtggcacgtcaggttttaagacggcgtcctctttagtcccgtcct

SEQ ID NO: 274415 - DNA, 439 bp, Homo Sapiens
  misc_feature (65)..(65): n is a, c, g, or t
gtgttaaatcaggtttcccttagggaattagcccactaagactttaaacctctgtaaaggagacnagacttaaaaaggaaaggggcatcttggcatccaggagccccttggacgactgcaagtcatcaagtagaatttaaattgtattccaatcaaaaaggaaaaagtgaacaccccagttcaagtcaaaactacccaaaatggttttatgatggctataacataatacaatttccattcaaaagactcaggaaaagaacaatgtctctttctgttttctctgtctttattcaacttgatgaggtaagagttgaaatgactttctttgtcatgggttccttgactgagttggttgaaatgcccacctggaagactctgtattttagtctagcatttattccctctgcactggaagctccttgagattagcagccctgca

SEQ ID NO: 274416 - DNA, 513 bp, Homo Sapiens
ggtgaggtgaggtttagaaagcacacctgagccgcagtgtgtaggatgctggaaatggtggagatgggcctgcgaaagtgatgacccaggagcagcagccgggcacctaacaatgggtcagcaccgtgggcgtggagacgagagcggggattgatcaataccggagaagtacaatgtacaggacttgggttccatttggatggaagtgggtgagggagagggaggagtcagaaatggcttccggtttcccagcttgggccctggggattggagatgtccccactgagagtagggcacaagtgaggaaatggtttggagaggaagataagttaccatcatggacatgctgagtctgagttgcctatgggacttggaatggggggtggcaaaatgtgtgtgatcttgagcaagatattcaacccttctgggccttggtcttcttatttgtaaaatggcgataagaatattacttcccatttgtgttgctgtgaatattaaatgcgctaccacatg

SEQ ID NO: 274417 - DNA, 668 bp, Homo Sapiens
  misc_feature (44)..(44): n is a, c, g, or t
  misc_feature (82)..(82): n is a, c, g, or t
  misc_feature (94)..(94): n is a, c, g, or t
  misc_feature (280)..(280): n is a, c, g, or t
  misc_feature (316)..(316): n is a, c, g, or t
  misc_feature (545)..(545): n is a, c, g, or t
  misc_feature (562)..(562): n is a, c, g, or t
  misc_feature (625)..(625): n is a, c, g, or t
  misc_feature (652)..(652): n is a, c, g, or t
tccctccccgggcttgtgatgggacggcgctgtggcccgagcancagaccgtcaggacaggcatggcaggggtgggcagctngcgggagcgcanggcccagaagacacctcacacgggttcatctgcagctcctcccgtccacagctcaatctggtggaaggcagcgtgggagccgatgaccaccagggtgctcccagcacccagaagacggccgagccgcaccagccagccagaagaaggggaaggagatgcctccagccagagcatactgatgcgctnggctcacctctcggccaaagagcacaagttggactncaaggtgcgcagatagagaatgtaacaggcgccgaaaaagactagccagagccaccagcaacatagggggacgtcaccacacagtacaggatgaggcccaggaacacgaacacatagttgctctggtagtactccacgttgcgtacgaggcgctggcacagctctcccaggttgcggggccgtgagaagcgctgctggtccacgaaggtgctccagggccggattggtnccggcgccgctccagcnactcccggcctgcaccggagggaatcagcttcggcagcagggtcgtgccgctcagcccttccnctcggcatctttctgctggtccttctngctgccatgtttgcgt

SEQ ID NO: 274418 - DNA, 606 bp, Homo Sapiens
  misc_feature (294)..(294): n is a, c, g, or t
  misc_feature (349)..(453): n is a, c, g, or t
tgatcctcattccagtttccaaagcgagaggagccttctgagcagaagtatgcaagactgattctgtttggaacagtttcctatttggctgcattctaggaggcctcctgacttattcatagtattgtcgcctggtggcattggtgtggggtagcttgtccctgctacttgcctaaagttcctctttccttgagaaaactgaggaacccagaatgcttagagttcataaaataatctctaaaccatgttaggttaaaacaaaatgaccatcctcacaaaaacggagtttagttngaatgctccaattcctttacaaaatcttcatttaaggctgagtgtggtgctcatnnnnnnnnnnnnnnnnnnnnnnnnnnnnnnnnnnnnnnnnnnnnnnnnnnnnnnnnnnnnnnnnnnnnnnnnnnnnnnnnnnnnnnnnnnnnnnnnnnnnnnnnnttttattataaaagtagctggggatggtggcacacacctgtagtcccagctactcaggaggttgaggtgggaagattgcttgagcccaggagtttgaggttgcagtgagctgatcatccactgcactctacctaggctacagagcaggccctt

SEQ ID NO: 274419 - DNA, 418 bp, Homo Sapiens
  misc_feature (18)..(18): n is a, c, g, or t
  misc_feature (30)..(30): n is a, c, g, or t
  misc_feature (79)..(79): n is a, c, g, or t
ccctggatgtatttttanacgcacttgaantccggcacacccaaccgcacccatgtcatcccacgtcccagcagctgancacagtcagcccagtttccctaaggaatggggtggaatgaggagcagaaggtccaaaggtgaaggatatgggagcccaaggggatgggtgcaggcaagccccagcaatgacgaaaacccataggatgggctgggatgttggggctgggagatcatctaagccaatcatcccattatatatctagatgagataactgagaccccaacagagttaagacaaacccaggccaggtgctgtggcttcctttaggtaggtcacaggatgtagacaggtaaccccaaagccaacaccagtgaataattcaataatgagttttaggccgggcacggtggctcacac

SEQ ID NO: 274420 - DNA, 496 bp, Homo Sapiens
  misc_feature (356)..(356): n is a, c, g, or t
  misc_feature (390)..(390): n is a, c, g, or t
  misc_feature (441)..(441): n is a, c, g, or t
  misc_feature (458)..(458): n is a, c, g, or t
  misc_feature (470)..(470): n is a, c, g, or t
agaagtgccaccagaggtcaaaatgtaagttttttatttttggcgaccacttacttgaacacttgagtggcaggactgggcaaagctttttgcccatttcattatctcgtttaactcttgcaacaccttcataaggttggaactctcattatcccctttcagactgtaaactggggcccagagaggttaactgtatgtgtcacacagctggttagtggtgggaaccagggccattgtcctttcccaaacaccttgcgcagttattgagacctcagcaggtgagggaatcccctatgggccagagtttattatcccagagtgcagaggttcctggggccaagtatgggagagagcantgagggggccagacaggatttttaccaaaagtantttttaattgcagtttaaaaccaacggccacacaccctttgcctaagcccngggttcttggttgcctnccttggagcagnaggggaacccccgggccgtggctgct

SEQ ID NO: 274421 - DNA, 515 bp, Homo Sapiens
  misc_feature (18)..(18): n is a, c, g, or t
  misc_feature (30)..(30): n is a, c, g, or t
  misc_feature (39)..(39): n is a, c, g, or t
  misc_feature (50)..(132): n is a, c, g, or t
  misc_feature (138)..(138): n is a, c, g, or t
  misc_feature (180)..(180): n is a, c, g, or t
  misc_feature (238)..(238): n is a, c, g, or t
cccctccctccccccagnaccctaggattngggaaaacnaggccaccggnnnnnnnnnnnnnnnnnnnnnnnnnnnnnnnnnnnnnnnnnnnnnnnnnnnnnnnnnnnnnnnnnnnnnnnnnnnnnnnnnnntagggncccttttaagccattttaaattttaaagaatgtgtttaaccncctaaaaccagtatattttgggttgcctgtttgggcccatttggtttatttgtacccntgttataatgaatgcaagtcagtgggtaatcattgcagcaaatatgattgctaggaatctcatgtaagtggaagtcaatataatgtatggcttaatttatccctgaactgacctaacatcacattttgttttttaataaaaactggtttaatgatatgataaatttctgtattttccacaactgttaataatgttatattttaacctattgcttagtcttcattacaaattattcagctgttaaatgtgttgttcagtgtgacattatttaaaaact

SEQ ID NO: 274422 - DNA, 407 bp, Homo Sapiens
  misc_feature (142)..(142): n is a, c, g, or t
  misc_feature (146)..(146): n is a, c, g, or t
  misc_feature (336)..(336): n is a, c, g, or t
  misc_feature (366)..(366): n is a, c, g, or t
  misc_feature (371)..(371): n is a, c, g, or t
  misc_feature (381)..(381): n is a, c, g, or t
gcgggcggagggctcgggaggcgcaggggactggaagagttggctgcgccaaggcaccaggtggaagaatttccataccagccctgcggaggtgcctctgtttccagaggcgtttttgtacgaagggcattttgaaagcganaganagccgtagaatcagcggcgacctgttgaaagaacccacaggtgcatttcacagcactctgggcgaaaattggatgtgaaaatgaagccagaccgagaaacgaggtcttcacttctgtttgcttcagcctgggtcttaaaactcattgtccctcaaagcaatctttcctgttattcaagcctccttaaaantcttggaatttaccaaagcattgagcccanccatngcctggggcnttccattattcccttttcttgttttt

SEQ ID NO: 274423 - DNA, 498 bp, Homo Sapiens
  misc_feature (366)..(366): n is a, c, g, or t
  misc_feature (418)..(418): n is a, c, g, or t
  misc_feature (423)..(423): n is a, c, g, or t
  misc_feature (429)..(429): n is a, c, g, or t
gcacgacagagcagcaccttgaacaaccttgatgccccagctggaccccctttttgaacagtgtgactactctggctggagcccagcaggagcttctgaacatgaagctatggaccatccacgagctgctgcaagatagcaagccggacaaggatatggaggcttcagaaccaggtgaaggctcgggaggcgagtctgctggaggtggagacaaagtctcttgaaactgggaacattcctgatctctccccacacagaggccagcagacctcttcctgaggactttctgttttaaaggaggacgaggaggagattggtgacagtcaggcctgggaggagcccacaaactggagcacagagacatgnacctagctacttcctgggaggtggggcgggactacggagaaggtgagccagntgtgnaaaggncccagtcacagccttggctgggaaggagggacgacagctgaaggtcgactaaaacaaagtctgttttca

SEQ ID NO: 274424 - DNA, 505 bp, Homo Sapiens
  misc_feature (44)..(44): n is a, c, g, or t
  misc_feature (458)..(458): n is a, c, g, or t
ccccgcccccttcccgcgtctccgctccctccctgcgcaggaanacatggcggcgggaagggagtgagccgcccgggccccgccgcgccctcagatggagaaattagcatacaaagaaactgacttgtaagaagtcaaagcaaggtatgggtggacccaaggataaaccccaaactcctaaacccctagaccggtttttagcccattgacctatgcagcctaatggtaaagtatctttttacccctatcgttggaggtaagagggattaagagacctagcaaggactggctttaaggaattcctcacgaataattagactactcgttatccttttctttatagccatgatgtcatttttgtcattggcatgaattttccagattgggagaggaggtctgaagttttgctttttaaatacttaaaaatatttctcggtgctcatgcctgtaattccaanactctgggaagccaaggtgggcggatcacctgaagtcaggagttcga

SEQ ID NO: 274425 - DNA, 549 bp, Homo Sapiens
  misc_feature (14)..(14): n is a, c, g, or t
  misc_feature (400)..(457): n is a, c, g, or t
  misc_feature (481)..(481): n is a, c, g, or t
  misc_feature (495)..(495): n is a, c, g, or t
  misc_feature (508)..(508): n is a, c, g, or t
aatgattgaagtcnaaccccaggcccaatgtaaatcaaaaaccccccagatgtggaagccccccaggtgaaacttcccccggtcggtgaataacacatcaaatgtgcctgaaaaggatggtgccgccctgaagggacacagaagtgtcaactgtgggacgctcctcagagtttcccactatgcgtctctgcttttgtcccggtccttaacttttgtcagtgtttttccttatgtaaaactgtagtgaaagtatcatgcttggtcgagaaaagtggctcatgctggtaatcccagcacttgggagaccgaggtgggaagatcacctgaggtcgagggttcgatgccagcctggccaatatggtaaaaccccctgtgtctactaaaaatacagaaattagcnnnnnnnnnnnnnnnnnnnnnnnnnnnnnnnnnnnnnnnnnnnnnnnnnnnnnnnnnnaatccgggaggcagaggttgcacntgagccgagatcantgccacctgcacntccatcctgggcgacagagcgagactccacaaataaaaaaa

SEQ ID NO: 274426 - DNA, 423 bp, Homo Sapiens
  misc_feature (55)..(55): n is a, c, g, or t
  misc_feature (73)..(73): n is a, c, g, or t
  misc_feature (114)..(114): n is a, c, g, or t
gctggtcgacccccctgactgcgggtccccaaccctggctcgcttccccctaccngccctggcactctccccnaaccctctgcttggacagccccccacacgagcacgaaaatntcgcccacccagttttcggcaccccctacccccgtgacctccctggggccatcccaccccccatgtcagcagcccaccagctgcaggccatgcatgcccagtcggccgagctgcagagactggccatggaacagcagtggctgcatggacacccccacatgcatggtggccacctaccaagtcaggaagattattacagtcgactgaagaaagaaggtgacaagcagttataagttatttatttgttaacgctggctgtggaaaccccagttcttggggggagaaacaggactttttacataaaatagg

SEQ ID NO: 274427 - DNA, 462 bp, Homo Sapiens
  misc_feature (29)..(29): n is a, c, g, or t
cctgtttgaggccctcctccttcccctgnattgccagttggctgagcaaaacagcaacatctgtctctgggtctgggaggctgaagagacatcctgagtctggtgaaaaagcagtgcaatcccatcttggagtgtggaccccaatgtcaagaacagcgagggaaccttttagaacactccccagaatatgttgttgagagaaatgaaagaaattagcaaacccccttttaatgggggtaagctaagggggaggttcaactgataagaacatgtcagcatttctagaatgactgagaaagtgcctccaggactcgatgtcctgggaccccgaggcaaaatgtgtcaggtggtcctcagcaccgacttcatatgtcagagtgccccagatagctccagaaagctccacaaaatgccataggctctgacattaacccctcccaggttagtagagggcagacatcc

SEQ ID NO: 274428 - DNA, 331 bp, Homo Sapiens
  misc_feature (21)..(21): n is a, c, g, or t
ccctgcctgaaaccttggtgnaagggggtccctgcctggtgaaaggtgaaaggtggaagtgaaatgtgaaaatgctggtgaatggtgcgaaagtcacgttgaacatctgcagtcgggcccaggggaatcgctggtcagcgatgccattggctcctgcgtggatacgctcggctgccagtctgtcagggtagctcatctcgggccgcagctggaggccgccagggccagtctctccctctccaaggggttcaggcccgggtggaaagaagcaaaagggtggggcccggcggtcggggggatggtgaagggcgctgtgccgggcaaaagtgct

SEQ ID NO: 274429 - DNA, 263 bp, Homo Sapiens
  misc_feature (67)..(122): n is a, c, g, or t
tgacggaaaaagggtgggaaaaaaagggaagaggaagcagaaacaggttatctgttcactctgatgnnnnnnnnnnnnnnnnnnnnnnnnnnnnnnnnnnnnnnnnnnnnnnnnnnnnnnnnccttcgatttctcacaagctcgggcataccacgaggcttggagactcaaaacctgaagagcctgcaatcagatttctcccttactattcctgctcattgtcttctgtggacttaatacttgaacatgaaactttgcttaca

SEQ ID NO: 274430 - DNA, 282 bp, Homo Sapiens
  misc_feature (221)..(221): n is a, c, g, or t
  misc_feature (255)..(255): n is a, c, g, or t
agcaggacggagccatggaccccgccaggaacagcaggtgcccaggccatgatctggactgcaggctggctgctgctgctgctgcttcgcggaggagcgcaggccctggagtgctacagctgcgtgcagaaagcagatgacggatgctccccaaacaagatgaagacagtgaagtgcgcgccgagcagggacgtctgcaccgaggccgtgggagcggtggnagaccatccacggacaattcttcgcttggcagtncggggtttgcggtttcgggatttcccc

SEQ ID NO: 274431 - DNA, 343 bp, Homo Sapiens
  misc_feature (31)..(31): n is a, c, g, or t
  misc_feature (84)..(84): n is a, c, g, or t
aacccacccacagttttattttccggggtanccccaaaaatgtggtgacaaagtcaagataactgcattcccctgaaaagggcnaactggatatgacaacatagaacagatgaagtcagccttaaatgaagaggagatgattagattagaagtcaaatgaccccaaactcaggtctttatttcacccacttgaccctttgaaaccctaatgaagtcacttcatcctctctgaacctcacttttctcatctgtaaaatggaataactacctgccctgcctacctcccagaggatcaaatgagctaatagtcataaaagcactttacaaactataaagtactgca

SEQ ID NO: 274432 - DNA, 369 bp, Homo Sapiens
  misc_feature (292)..(292): n is a, c, g, or t
gagaagcatgaggcactggggaggcacagggagctgatgaaaaagtggttctgatgaaaactatggtcagcaggaaacaggtaagagaccaagaggagaggggcttcagggcatctggggaggagtggagctccacagtacacgccaggagccttggtcctgtttcaggagtagcctgcctgagtgccaccatcaattacacatgtctggcttggttgtagatgtggcaagatagcaagaagtttcttggcttaaaagaactcttgttgaatgtttggatttcatggattgnggtgttgactgctcttggggtcttgccacccccagaaaagttttagccacgggttcacagagcagcgtcgggaggcc

SEQ ID NO: 274433 - DNA, 304 bp, Homo Sapiens
  misc_feature (17)..(17): n is a, c, g, or t
  misc_feature (25)..(25): n is a, c, g, or t
  misc_feature (186)..(186): n is a, c, g, or t
  misc_feature (201)..(201): n is a, c, g, or t
ataataatgacatgtanacatggtntctggtatcagctttctgttctactcctttccatcctagtttatcccttaaaagaatatattaactttgtatccattaaattattaatctattttatatcctggcactgtaagaaaatgacattttctgacctcttttttcctttggctttcaatctcaantttacatttcccaantttcatttttgaagttacatttgtgcatttgaagactgatactatttaccttttgttctctaaacaaaatgaggatgtctgccattatttattgattaaagtg

SEQ ID NO: 274434 - DNA, 384 bp, Homo Sapiens
tttggatccacaatggaaattaaccacttaataatttccctaaataattttgggcccattccacagaaaaataaggctatggcactttccaaatccatgattaccctactgtttttcctaataaagaatacaaaattttatatagacacacatttattttttgtaaaatattgctaattccacaggagagtatttgtaatgcttattaattttgcattttaatgttattcagaaatgcccccctccaatcagaaaaatatacacagaccaattctaggattgtcagtgtttgcctagttattacattgtcattaagacaacaaaataacttattcagttaattttataaattcagcaataataattcaatatgtacgttttaac

SEQ ID NO: 274435 - DNA, 364 bp, Homo Sapiens
  misc_feature (131)..(274): n is a, c, g, or t
  misc_feature (292)..(292): n is a, c, g, or t
  misc_feature (297)..(297): n is a, c, g, or t
  misc_feature (351)..(351): n is a, c, g, or t
tgagccagggccaggttgaagcatgtgcccaggtgaaaattatgcattatttattcatgtgagcaactctgcgcctattttgaaacattcactgctttgttttgtttgttttgtctaattgcatgaaagannnnnnnnnnnnnnnnnnnnnnnnnnnnnnnnnnnnnnnnnnnnnnnnnnnnnnnnnnnnnnnnnnnnnnnnnnnnnnnnnnnnnnnnnnnnnnnnnnnnnnnnnnnnnnnnnnnnnnnnnnnnnnnnnnnnnnnnnnnnnnnnggccatccagggcaggcntgggnggacatgagtcctcttaaaaaacaggaggactctttttccccagctgttgttcnaggaacccagaga

SEQ ID NO: 274436 - DNA, 308 bp, Homo Sapiens
  misc_feature (233)..(233): n is a, c, g, or t
  misc_feature (238)..(238): n is a, c, g, or t
  misc_feature (298)..(298): n is a, c, g, or t
tccagggggcagagtgctagtcccatctggatatttttcaagttccgcagacatctttaagaattatgactgatcctaccaaaagatcggaacagcatattggcaggttacagggtttttatgagaatatatgagatcatctagtgactttacttttaaggtaggtagagtataagtacatagagaggccaggcgcagtgcatcatgcctgtaatcccagcacctttggaaanccgangcgggcagaatcacgaggtctggagaacgagaccatcctggctagcaccggtgaaacccnccctctacta

SEQ ID NO: 274437 - DNA, 319 bp, Homo Sapiens
  misc_feature (27)..(27): n is a, c, g, or t
ataactcctaaacccacaggccccccncatttaaaaaagagccttaaacaaggaataccttcctgcaatatatttataaacaaccctaatatttatataataacacaaagttacaacttaaatcatgatgatcaaagttaatgtgcattttgatacccttatcagcttaaattattaaatatctaacggtcttgagagattgaattttaaaaaatgaaccacatgtactttaaaaatggttacctattcaataactaaggtgttggtcaagtgtttagaatataggccagagttttagaaaaattatttgagaaatata

SEQ ID NO: 274438 - DNA, 309 bp, Homo Sapiens
cagaatgatctattctgagctttcctgggagttaggcccttctagggagagaatttttttattgtcatcaggaaacgaaacctttgtgctctgcagcctttttcttctgaaaggctaagtggggctaaaattatccttttagttttctgctttaacaagaagagaaggacttggtgtgaaagaatttcttctctcagtccaatggtataatttttagcactccgcttcctctgtaggggtttagccctacaggttgaacaattattttaacccagctaagcatgtgggccaacactgtggaaagccagg

SEQ ID NO: 274439 - DNA, 334 bp, Homo Sapiens
  misc_feature (58)..(58): n is a, c, g, or t
tttttaaatgtacaattacttattgactatagtcaccccgttgtgctatcaaataganccttttttttgtaccccaaacacaacgaaattaccaaagccaaaggtattcctaggtacaggatttcaagtgactgacttttcatgtgatgatggactttatttctcccctctacttctgtccaaggtaaggacagcaaaaatatttgcctcaatgccttgcttgcagcagcagcccaaaggacatgctgagggagctgggagttccctccaacctcccaggattttacagctccaagagagattacatccttgcacccggggaaaatagaaactg

SEQ ID NO: 274440 - DNA, 502 bp, Homo Sapiens
  misc_feature (58)..(58): n is a, c, g, or t
  misc_feature (83)..(83): n is a, c, g, or t
  misc_feature (111)..(111): n is a, c, g, or t
  misc_feature (135)..(135): n is a, c, g, or t
  misc_feature (207)..(207): n is a, c, g, or t
  misc_feature (291)..(291): n is a, c, g, or t
actggtctctgcccaccctcatcttgggctttaaacctcactgtgatgcctgtttggnccccatctgtccaccataaagcatnccactggcaggaaggaggaaaagggcanaagaggcatgcccccttatttaanagactttgtgggggttgagcaggatgggctggactcagccatgagccgccctaattgcaggggaggccgganagtgcgctttctgtcggccacctgcccagctaaaactcagcattctgtccctgcagttaggggggcttctagggtctctgccanagcgcccctcccatttgtgggcctctgtgctgtgcctcccatggtcactgctggcttgtttgtctctgcttggccctaggaatgggacagtgcctgcctcagggttatcagtgagtgatggctaagattgaacctgggaaaggaagtcctgcttcatccctcaagcttacgaaggctcatcacaagaggcacaaattttctaaaagaaaaa

SEQ ID NO: 274441 - DNA, 444 bp, Homo Sapiens
  misc_feature (74)..(74): n is a, c, g, or t
  misc_feature (395)..(395): n is a, c, g, or t
  misc_feature (406)..(406): n is a, c, g, or t
  misc_feature (433)..(433): n is a, c, g, or t
accccaaggtgacatccttggtgagacaattgtgggcagcctgacacccagtgagattcagcagctgctgcggngtccccacgggcttgccctgagcagacgctgagctccctgacgcccgtcatcatcctgtcccgctatttggataccaccggccagtggggcaaggtcggggtggagcacagggaccaggtgatgaagaatattgtcagcggctacactcggatgctgacccaccggagttaagacggcacctaccaaacctccaaggggaacccagggaagcacttgggtggctaccaaggcttttgaaggaggatgttttcccgcacagtttttgttcctaattaggccctgaattgagggaaaggaatttttgcagacagaagattttnattggccagcntcgagagagcccttgtttcctgggaanagaaaatttcc

SEQ ID NO: 274442 - DNA, 900 bp, Homo Sapiens
ttggccaggagtgccagtggttgctgggctgcagacgttgtggaagttcactattgaatgtgcgaatgaatgagtgaaggaggctctgccatcgtctgtaacctgatacagaagtttgagctaggtccggtctgcagactggattccccaccgtctggtcaggtcagtggtctttgccctgcgatgtgctccttctccacgttcattatccttgtcagtatcagctccaccgccagagtatgactttatcttgaatcagtggcttgagaatgttgagggaccgagcacagattatgtgtccctgttcgggtctggattaagacatttaaagactctaagcactaaaaagattacggtgccttctactcacccccctccctttttgtccccattaaaaacaacaacagctgtaagccacagaatgaatataaggaagtctgatgacttgttcctttttctgttaaagattatttcaatgacaaacaaatgttgatcaaattattttaagaaaaatgaaattatttttgttgggcctctgctgtgctggctccagcgtgtcctttgcctgcttataggagtctggccctgctgtcctaatctgaccctggagcgtggccctctcacttccccctgctgctggcttcccgctgttgcgtgactagtgtgactcaacagagttccccttggagaaccgacaagcggctgaagcacctgtgtccaggccaccatggggcacgcccgagcctggagattccagggcaaggactgactccatggcacccactcataggcactgtttgcttgggtcatcggatgtgtattgatctccttgggttgctgcaagctgcagagtctcagccagggcacttcccaagagaagtggtgcgttctggctgcccc

SEQ ID NO: 274443 - DNA, 533 bp, Homo Sapiens
ttggtgcagccgctcttaaaggttcgtttgttcaacgattaaagtcctacgtgatctgagttcagaccggagtaatccaggtcggtttctatctacttcaaattcctccctgtacgaaaggacaagagaaataaggcctacttcacaaagcgccttcccccttaaatgaaagcataggggatcctggctgcagatgaatctgtaggtaccatggggaaccgcctgcctaggctaaaggtggaaaatattgagcagaaccgcccgcggttctcacaaatcctcttcgctgtggagagttccatcagcctgaacatcgggggtgtgatccttttcgcccagaccctctaccataaggacaaccagggaaagctgttcataaccctcccctaagaaaaggggatcgtggtggcaatcaagttagaccaaagaggtgctcctcttgctggaacaaaccaagaaaccacccttccagggattgaaggcctccccgaagcgctctgctcattaaagaaagatggtgttgactttgggaa

SEQ ID NO: 274444 - DNA, 901 bp, Homo Sapiens
ttgggtcaatggggagggcaggcccccacagcactagcaatggaagctgacaactgtggagcatgcggcccgttcacagataatttgtttttaatttaaaagatatctcaaagatcaagtgtatatttcctccaaagttaaaatataaaatattttgaaatattctgaactttttttggttaaaatgctgacacattccttaatgtggagcccttctcactatgctgggccacagtaatgaactgtaaatcccaagttataaaaaatgaaattgtgctggaagtatctatcctagtagatgaggcaaaagacatgccctgacaatgcatgctgacttgtaaagtcctttttaattgcactgagcatcatttaacatattcactaaataccatccaattataaataatggaaagcaaagaattattcattgtcaatatgccattatatatatatttaaaaatgataaacatttaaatactttgatttaactaaaaactgagtgtatataataatgtataatttctaataacatgacaaaataaaaattgtcatagtgtgatactttgttttatatattaataacatagtatataacataacactacaatattatgactgtggttacatatattaattaaatctaatgttaataatccattaagactatggctttttacatcttaaaaggaatcttcccccaattctgactgtagttttacaaaatgttgttattaagtacttcctagatactttttggggaggtgaatgtatgtgaagtaatgagtagagtatgtttgcaaatatcactgataccagaaaaataatcattggcctaggatagtgacatcatctgctaccttttatgtaataatttattattcatcccatccagcaatattta

SEQ ID NO: 274445 - DNA, 774 bp, Homo Sapiens
  misc_feature (478)..(558): n is a, c, g, or t
aataattaaaaaataggcgttcggggcgggggggattttttttctaagaaaagattcaaaattacaccaaagcactttaatctggacaacagagtgcggctttatcctttaaggaagaaaccgacaagattattattaccgatatatgatactaacactaatagaacgaaagctgagctgctatattaatttcagacaaggccaaattaagatcaaggaaaactgtcaggactaaatggagcattacatgatgataatgtatgtacttaacaacaaagcagcaaaatatgtgaagcaaaaactgataaaactgcaagaaaaaatatagtaatttactaacataattggagatttcaatacccctctatcagtaattgacagattcagcaagtcagaaaaccagtaaggccataattgaactgaacagcagcataaattaactggatccaattgccatttataaaacacttcttcgaannnnnnnnnnnnnnnnnnnnnnnnnnnnnnnnnnnnnnnnnnnnnnnnnnnnnnnnnnnnnnnnnnnnnnnnnnnnnnnnnatacacttttttatttgtacaaatttgtgcagtatatgtgcaattttgttacatgcatagaatgcagagtggtcaagtcagggcttttagagtatccatcacccaattaatgtacattgtatccattaactaatttcccatcgtccacttccctccaaccagctcatccttccaactctccactgtctatcactccactctctacgttcatgtgta

SEQ ID NO: 274446 - DNA, 884 bp, Homo Sapiens
ttggctggtcctcctttttctaccttcttggaaagcatctgcttcttcttttactacttattttctctcctaccaccgtgtactttcctctttgagcaaccttaacatcccttatctgaagaacctttggaactaactgtggcagatgcttttggggccactatcatatccattcaacccacctcttatttctaagcagctgtaacagaggattctatgcacatgattgagagccacatcaactatgttgcacagcttctttctgcttttttgtctcagggcttcctccatagctcaaaaactgtgttagcccatatgcggaagcagccagaagggtagggcactttatactctggggggcagccattaaacaatgggggagaggttacagtagatacttgacccagcatcttgtcttttgaaagcagggtttcttagagggtctactgtggaattaaacccagttcccacagtggtagccatgtcagtaacacatcctttatttattgttgttgctgttgttggcttatcctcctcacctctcattgtacccctgcctcaaccctgtttcctgggatcatctcccaaataaattacctgcatctagatcctaatctcaagaacctaaactgagatgtggcctcacaggaaacacacaacacagtcctagctattcattccttgcttgcttgtctgaggcgataggtgaaatttcaagagcaatggcctttggctggagtggacctgcaaatagcagaacatgggttagccagtttcctttgacactgcaaaagtgtttatagcattaaagatttacagtataaagtgtttacaggttgtttccaatttgagtgacaaatttatttacttaaaatggactcgac

SEQ ID NO: 274447 - DNA, 169 bp, Homo Sapiens
tgttcgttgcacaattgatgagcatgcttctatatgccactttgtacaaaagttggacctcatgtccctcatttggttctgtgttcatgctgagcagtcagcgtatcagtgtgttttaagtcatccagacatattttttgcttttgcttagatctgttactaattgcta

SEQ ID NO: 274448 - DNA, 833 bp, Homo Sapiens
ttgggtggatttgatccttcttatgggaaattgcaaagtttccctagactgtttttactcttggccacttcactctgggtcctaggagagcacaactttctcttttcccattctatactttcttttttggctgtgaaactgactaattgaacacgtgctgcaatatgcataagaaacattatcgcctatgactagaccagtgcctgcagttccaaaatcatcctcatactactcctgggttgccatgtaactctagcaaacagggatagaaaaagtgacacactttatctaactaatgagttaaaactatgaaatatgcagttaacttatcttcctcattaattcaagttaatgaagcaagtagaaaggagaattgttctgattcatgcaacatacaaagactattttcccaagcatttcaaattttttgctgtttctattcactctggctagctctatatacagagaaagtttcaatagacctatttcccatgtatttagactatatatgtatcctaatatggtcgtaagtacaaggtatttttatagatttagagaaggaactaggagggaaaaatgagaagagtaaagagaaggcacaaaaaaacagtttttgttattgctattgttgtttcagagccattcacctatagctaaagcatgtttaagatgctttacgttgtggaatgtctccagaatctttcctgggccatattctctgatgtatttactatgtctctgaagcaatctcatccctttcattgtttaaatgtcatttacatgctgatgttttctaagtatgaaaacctgggtcatcaacataagatgataaa

SEQ ID NO: 274449 - DNA, 394 bp, Homo Sapiens
ttggaaatcattattttctcgtcattgtggttgactaccaaacataattgagactgctatgttaactgtagtgttttctaattgttgctttgttttattttttacaatgaaaatcttcaaaaaatatacaaaatagagagaatattataattaattcatgaacttttcaccccatgcaactcttgcccggctttgataatttttaagaatttgtctactttgtttcatctatttccttactcatacttgttggtaaagcaagcctatatacgatattggtaccaccacatttatctctataaaaagttttcctgaaaagactaacaaacaaataccatttcacaccaatagatactatagtctgcagtacagtcatctctattctctgatactc

SEQ ID NO: 274450 - DNA, 688 bp, Homo Sapiens
ttggggttttgcataatttcctgaggaaattgaaaatttaactacttcagtaaataagaagcaaacaaacaaaagttgcatcatgatcgtgggaaggggaggcagaatcactttgacatgatcatattgccttggtgggctgagatccggagatctctaggaaaatatctgatgaacacctgtttctattgcttcatcagccttcattactacgatgttactattctcaggtgagaagcccaggttagcctcacttctgtggcctggtcctgactgagcatgttttggggagaacccgacttccacattcatgtgggtcaatcagctacgtcagctccagtttcctcacgacgctgtggtcaaacaatgtccacaacaagaatacagtcacaatacattctctctttgatctacatgagctcaagtcatcactttattcttttaatataatgagggtaatttggtatcaaactatacttgacctgtttccttcccctttgtcagctaacttatcagttgaggggaaaaaaatcagtttctagaaatgtaaatcaaattcatcttaccatcttctcagatgttaggcttgatccaaagcccaccaacatatgtgccatatcctgggaaaataagaccaactacacacaaatctgtcttttaaaaatgattgtgagcacctgagtgtgta

SEQ ID NO: 274451 - DNA, 303 bp, Homo Sapiens
cgtatgtttgtgggtgccctttttcccatctcataactcgttttaagaagcgcagcctaataacgtgtgggcttgggattcagttcttgaaacaaaactctgagccttcaatgacctttcggtctatgtaaaagcactcctgtcttcctggcagcagttggacctcacaatgtggattgtgccctcacccagcaatgtttatgccctatcgccatggtgacggaattaggggtctcctgctcttcgtcctaaggaccactgtctgtgctgtgtctttcaaaggtcagaagagattgaacccaa

SEQ ID NO: 274452 - DNA, 224 bp, Homo Sapiens
  misc_feature (95)..(110): n is a, c, g, or t
ctaacatagttattcttgtgtgggccaaagaatgtgaactgcttgttaccagttatggtgaagtaaatacagaaattgagagtaagactttagannnnnnnnnnnnnnnnaggcaatttgatgttgtgacatccaggtggcattttactttcctagtttgtttttattctacagaaatattgatttacggtggattggatgggagaagatccatcaccacccaa

SEQ ID NO: 274453 - DNA, 811 bp, Homo Sapiens
  misc_feature (49)..(59): n is a, c, g, or t
ccaactttgtacaaaaaagttggtctttttgagtttaataaagtaggannnnnnnnnnnaggaaaaatattaaaagacattctcaagcataaacttgcaaactagagaatgcaccaacggataaacatgaggaatattaaattgctgaaatgaatagaaatccctgtgggaacgttgtcttccactgctctctcctgtaacaaagcaaaaggtagcaaatctgctgatggcttgacttcgtgagtcatgtagcctccttccctgccctggttttggtgctaaccgtgccctcatctcttccaaaagacattcagcttctgacttgagattgcacaggtcaaaagcttttcagttcactcttaactccacagtggttttattctatcacatatttacacagggatttcacaaagtactcttgaaagcaaagcataagcaatttatcgtacacaacaggatttacttagtactgagcaggcatttcttgtgaccttcctgtaaacgttaaaaagtgttgttgtttttagtcagtttgcttgaggtagatattcatagggaatcattttgggtcatatgatcgctagaagaaaagctattttcagcaacttaggacaaggctgtaactgaaaagggcctgcctgctcactggtatcaagtccccgaggaaggcagcttgtggctgttttcttctcttggtccagcacagtttgcagagaagcttctggaaggactgagaccaccagatagcagtcatccttgggggatggatatttattgtttgcctgtgggctaagttgattggccagacaca

SEQ ID NO: 274454 - DNA, 863 bp, Homo Sapiens
aggggagcataatatgggtcagagaaagagagatactgttgaaaacaaatcattggagtgatgaagtgatgtgatatgagaagcctcactcatcatcactagctttgaagataagggaaggagaacacaagcctagaaatctgggcggcctacaaacaatggaaaaggaaggaaacattctctcctggagtcttcagaaaggaatgcacctctcctgacatcttgattttagcccagtgagacctgtgtcagacttctgaaccatagaactgtgagatataaaatttgtgttgttttaaggcacaaaacttgcaataatttgttataacagcagtagaaaactaatacaccattcctctaaagtgtaggctcaaagctgaagtatagttcccagctaagaaccagccattgctgagtaccttggacttttcttttctatcttcgatcctaatttcactgtatagcccacatttgcttttgtagctgccacctagtgctgttttctcatattgaattttcagaaaatgaaaaactgtaagaccgtaattgcatgtggaaagattacatttaccacattgctatttccatcataacatagtatggaccttggagtcaggaagaactgggttctaattcccattcacctatttacaagctatgtgaccttgaatgagccatttcacctcttaagtttacattatatgaacaaagtaaagccagtgacagtaccaacctcatggggttaccatgttagctaaatgagatgatatcttcaaggaacttagtacagtgcctgactcatcttaaacttgaaaagcgaaggagtaggctgatgttcagtttaatccagaaactctgcccaa

SEQ ID NO: 274455 - DNA, 1131 bp, Homo Sapiens
ttgggtaaactgaaggaatgctgtgaaaaacctctgttggaaaaatcccactgcattgccgaagtggaaaatgatgagatgcctgctgacttgccttcattagctgctgattttgttgaaagtaaggatgtttgcaaaaactatgctgaggcaaaggatgtcttcctgggcatgtttttgtatgaatatgcaagaaggcatcctgattactctgtcgtgctgctgctgagacttgccaagacatatgaaaccactctagagaagtgctgtgccgctgcagatcctcatgaatgctatgccaaagtgttcgatgaatttaaacctcttgtggaagagcctcagaatttaatcaaacaaaattgtgagctttttgagcagcttggagagtacaaattccagaatgcgctattagttcgttacaccaagaaagtaccccaagtgtcaactccaactcttgtagaggtctcaagaaacctaggaaaagtgggcagcaaatgttgtaaacatcctgaagcaaaaagaatgccctgtgcagaagactatctatccgtggtcctgaaccagttatgtgtgttgcatgagaaaacgccagtaagtgacagagtcaccaaatgctgcacagaatccttggtgaacaggcgaccatgcttttcagctctggaagtcgatgaaacatacgttcccaaagagtttaatgctgaaacattcaccttccatgcagatatatgcacactttctgagaaggagagacaaatcaagaaacaaactgcacttgttgagcttgtgaaacacaagcccaaggcaacaaaagagcaactgaaagctgttatggatgatttcgcagcttttgtagagaagtgctgcaaggctgacgataaggagacctgctttgccgaggagggtaaaaaacttgttgctgcaagtcaagctgccttaggcttataacatcacatttaaaagcatctcagcctaccatgagaataagagaaagaaaatgaagatcaaaagcttattcatctgtttttctttttcgttggtgtaaagccaacaccctgtctaaaaaacataaatttctttaatcattttgcctcttttctctgtgcttcaattaataaaaaatggaaagaatct

SEQ ID NO: 274456 - DNA, 1163 bp, Homo Sapiens
ttgggtgccagtgtgactcatccacaatgatttctccagtgctcatcttgttctcgagttttctctgccatgttgctattgcaggacggacctgtcccaagccagatgatttaccattttccacagtggtcccgttaaaaacattctatgagccaggagaagagattacgtattcctgcaagccgggctatgtgtcccgaggagggatgagaaagtttatctgccctctcacaggactgtggcccatcaacactctgaaatgtacacccagagtatgtccttttgctggaatcttagaaaatggagccgtacgctatacgacttttgaatatcccaacacgatcagtttttcttgtaacactgggttttatctgaatggcgctgattctgccaagtgcactgaggaaggaaaatggagcccggagcttcctgtctgtgctcccatcatctgccctccaccatccatacctacgtttgcaacacttcgtgtttataagccatcagctggaaacaattccctctatcgggacacagcagtttttgaatgtttgccacaacatgcgatgtttggaaatgatacaattacctgcacgacacatggaaattggactaaattaccagaatgcagggaagtaaaatgcccattcccatcaagaccagacaatggatttgtgaactatcctgcaaaaccaacactttattacaaggataaagccacatttggctgccatgatggatattctctggatggcccggaagaaatagaatgtaccaaactgggaaactggtctgccatgccaagttgtaaagcatcttgtaaagtacctgtgaaaaaagccactgtggtgtaccaaggagagagagtaaagattcaggaaaaatttaagaatggaatgctacatggtgataaagtttctttcttctgcaaaaataaggaaaagaagtgtagctatacagaggatgctcagtgtatagatggcactatcgaagtccccaaatgcttcaaggaacacagttctctggctttttggaaaactgatgcatccgatgtaaagccatgctaaggtggttttcagattccacataaaatgtcacacttgtttcttgttcatccaaggaacctaattgaaatttaaaaataaagctactgaatttattgccgc

SEQ ID NO: 274457 - DNA, 571 bp, Homo Sapiens
ttggccctgatccatgggctaagaatctgaatgaaaaagactatgagttgctgtgccttgatggtaccaggaaacctgtggaggagtatgcgaactgccacctggccagagccccgaatcacgctgtggtcacacggaaagataaggaagcttgcgtccacaagatattacgtcaacagcagcacctatttggaagcaacgtaactgactgctcgggcaacttttgtttgttccggtcggaaaccaaggaccttctgttcagagatgacacagtatgtttggccaaacttcatgacagaaacacatatgaaaaatacttaggagaagaatatgtcaaggctgttggtaacctgagaaaatgctccacctcatcactcctggaagcctgcactttccgtagaccttaaaatctcagaggtagggctgccaccaaggtgaagatgggaacgcagatgatccatgagtttgccctggtttcactggcccaagtggtttgtgctaaccacgtctgtcttcacagctctgtgttgccatgtgtgctgaacaaaaaataaaaattattattgatttt

SEQ ID NO: 274458 - DNA, 692 bp, Homo Sapiens
ttggcttcttgccaaccaaccatgagctcccagattcgtcagaattattccaccgacgtggaggcagccgtcaacagcctggtcaatttgtacctgcaggcctcctacacctacctctctctgggcttctatttcgaccgcgatgatgtggctctggaaggcgtgagccacttcttccgcgaattggccgaggagaagcgcgagggctacgagcgtctcctgaagatgcaaaaccagcgtggcggccgcgctctcttccaggacatcaagaagccagctgaagatgagtggggtaaaaccccagacgccatgaaagctgccatggccctggagaaaaagctgaaccaggcccttttggatcttcatgccctgggttctgcccgcacggacccccatctctgtgacttcctggagactcacttcctagatgaggaagtgaagcttatcaagaagatgggtgaccacctgaccaacctccacaggctgggtggcccggaggctgggctgggcgagtatctcttcgaaaggctcactctcaagcacgactaagagccttctgagcccagcgacttctgaagggccccttgcaaagtaatagggcttctgcctaagcctctccctccagccaataggcagctttcttaactatcctaacaagccttggaccaaatggaaataaagctttttgatgc

SEQ ID NO: 274459 - DNA, 539 bp, Homo Sapiens
  misc_feature (46)..(71): n is a, c, g, or t
  misc_feature (125)..(145): n is a, c, g, or t
ttggggtcatcaaattattaatctgaaaatagcaacccagaatgtnnnnnnnnnnnnnnnnnnnnnnnnnngaccaggtctacagtgatagagcaaagcatcaaagaatctttaagggaggtttnnnnnnnnnnnnnnnnnnnnngattggttgcctctgcctttgtgatcctgagtccagaatggtacacaatgtgattttatggtgatgtcactcacctagacaaccagaggctggcattgaggctaacctccaacacagtgcatctcagatgcctcagtaggcatcagtatgtcactctggtccctttaaagagcaatcctggaagaagcaggagggagggtggctttgctgttgttgggacatggcaatctagaccggtagcagcgctcgctgacagcttggggaaacctgagatctgtgttttttaaattgatcgttcttcatgggggtaagaaaagctggtctggagttgctgaatgttgcattaattgtgctgtttgcttgtagttgaataaaaatagaaacctgaatgaag

SEQ ID NO: 274460 - DNA, 520 bp, Homo Sapiens
ttggcctagaggcagctgctccaggaacagaggtgccatgcagccccgggtactccttgttgttgccctcctggcgctcctggcctctgcccgagcttcagaggccgaggatgcctcccttctcagcttcatgcagggctacatgaagcacgccaccaagaccgccaaggatgcactgagcagcgtgcaggagtcccaggtggcccagcaggccaggggctgggtgaccgatggcttcagttccctgaaagactactggagcaccgttaaggacaagttctctgagttctgggatttggaccctgaggtcagaccaacttcagccgtggctgcctgagacctcaataccccaagtccacctgcctatccatcctgccagctccttgggtcctgcaatctccagggcttcccctgtaggttgcttaaaagggacagtattctcagtgctctcctaccccacctcatgcctggcccccctccaggcatgctggcctcccaataaagctggacaagaagctgc

SEQ ID NO: 274461 - DNA, 795 bp, Homo Sapiens
actttgtacaaaaaagttggggccaccgtaacagctctccaccgtactgttcctgcagctgttcctggcatctgctttttgtctggtggcatgagtgaagaggatgccactctcaacctcaatgctatcaacctttgccctctaccaaagccctggaaactaagtttctcttatggacgggccctgcaggccagtgcactggctgcctggggtggcaaggctgcaaacaaggaggcaacccaggaggcttttatgaagcgggccatggctaactgccaggcggccaaaggacagtatgttcacacgggttcttctggggctgcttccacccagtcgctcttcacagcctgctatacctactagggtccaatgcccgccagcctagctccagtgcttctagtaggagggctgaaagggagcaacttttcctccaatcctggaaattcgacacaattagatttgaactgctggaaatacaacacatgttaaatcttaagtacaagggggaaaaaataaatcagttattgaaacataaaaatgaataccaaggacctgatcaaatttcacacagcagtttccttgcaacactttcagctccccatgctccagaatacccacccaagaaaataataggctttaaaacaatatcggctcctcatccaaagaacaactgctgattgaaacacctcattagctgagtgtagagaagtgcatcttatgaaacagtcttagcagtggtaggttgggaaggagatagctgcaaccaaaaaagaaataaatattctataaaccttc

SEQ ID NO: 274462 - DNA, 2781 bp, Homo Sapiens
  misc_feature (202)..(322): n is a, c, g, or t
  misc_feature (325)..(376): n is a, c, g, or t
cattgttaattccctggaagagctggatatcagcatttctcatcccatccgtcacccacagctatatgtcatagttattaaatttcagggagtgcagtcgagagggcaagagctctccttacacctaaccctcacttgtaaggcagaggatgctgagaataatggggccatgaaataatagggcctatagaatattattctnnnnnnnnnnnnnnnnnnnnnnnnnnnnnnnnnnnnnnnnnnnnnnnnnnnnnnnnnnnnnnnnnnnnnnnnnnnnnnnnnnnnnnnnnnnnnnnnnnnnnnnnnnnnnnnnnnnnnnnnngannnnnnnnnnnnnnnnnnnnnnnnnnnnnnnnnnnnnnnnnnnnnnnnnnnntttcagctttctagccagttttcccagcaccatttattaaatagggaatcctttccccattgctggtttttctcaggtttgtcaaagatcagatagttgtagatatgtggcgttatttctgagggctctgttctgttccattggtctatatctctgatttggtaccagtaccatgatgttttggttactgtagccttgtagtatagtttggagtcaggtagcatgatgcctccagctttgttcttttggcttaggattgtcttggcaatgtgggctctttttgtttccatatgaactttaaagtagttttttccaattctgtgaagaaagtaattggtagcttgatggggatggcattgaatttataaattaccttgggcagtatgaccattttcatgatattgattcatcctatccatgatcatggaaggttcttccatttgtttgtatcctcttttatttcattgagcagtggtttgtagttctccttgaagaggtccctcacatcccttgtaagttggattcctaggtattttattctctttgaagcaattgagaatgggatttcactcatgatttggctctctgtttgtctgttattggtgtataagaatgcttgtgatttttgcacattgattttgtatcctgagactttgctgaagttgcttatcagcttaagagattttgggctgagatgatggggttttctagatatacaatcatgtcgtctgcaaacagggatagtttgacttcctcttttcctaattaaataccctttatttccttctcctgcctgatgtccttgccagaacttccaacactatgttgaataggagtggtgagagagggcatccctgtcttgtgccagttttcaaagggaatgcttccagtttttgcccattcagtatgatattggctgtgggtttgtcatagatagctcttattattttgagatacgtcccatcaatacctaatttattgagagtttttagcatgaagggttgttgaattttgtcaaaggccttttctgcatctactgagataatcatgtggtttttgtctttagttctgtttatatgctggattacatttattgatttgcgtatattgaaccagccctgcatcccagggatgaagcccacttgatcatggtggataagctttttgatgtgctgctggactcggtttgccagtattttattgaggatttttgcatcaatgttcatcaaggatattggtctaaaattctctttttttgttatgtctctgcccggctttggtaacaggatgatgctggcctcataaaatgagttagggaggattctctctttttctattgattggaatagtttcagaaggaatggtaccagttcctccttgtacctctggtagaatttggctgtgaatccatctggtcctggactctttttggttggtaagctattgattattgccacaatttcagctcctgttattggtctattcagagattcaacttcttcctggtttagtctgtgtcgaggaatttatccatttcttctagattttctagtttatttgtgtagaggtgtttgtagtattctctgatggtagtttgtatttctgtgggattggtggtgatatcccctttatcattttttattgcatctatttgattcttctctctttttttctttattagtcttgctagcggtcgatgaattttgttgatcctttcaaaaaaccagctcctggattcactaattttttgaagggttttttgtgtctctatttccttgagttctgctctgactttagttatttcttgccttctgctagcttttgaatgtgtttgctcttgcttctctaattcttttagttgtgatgttaggttgttaacttgtgatcttcctaacttttcgatgtgagcatttaacactacctttgctgtgtcccatagattctggtatggtgtatctttgttctcattagtttcaaagaacttcttgatttctgcctttacttcattatttacccaaaagtaattcagaagcagcttattcaatttctatgtaattgcatggtttttagcaaatttcttagtcttgatttctaatttgattgtgctgtggtccaagagagtggttgttataatttcagttattttgcatttgctgagagtgttttgtgtccaattatgtgattgattttagagtatgtgccatatggtcatgagaagaatgtatattctgttgctttggggtagagagttctgtagaggtctatcgtctccatttgatccagtgctgagttcacgtactaaatatctttgttaattttctgcctcagtgatctgtctaatactgtcaatggggtgtcaatgtctctcactattattgtgcgggagtctatgtctctttgtcaaa

SEQ ID NO: 274463 - DNA, 519 bp, Homo Sapiens
ctttgtacaaaaaagttggctagattggatcaataatgtaaatatacgagtgaaaaccatacatgcttagaagaaaacatggaaataaaacattgctgtggattggcaatgcattcttagataatacaccaaaaatacaagcatgaaacaaacaaatgtagccaaaatgtaccagaatctgaaaacatgtattatctataaagaattagaggggaatttggtgaaagaaatatgggagaatgggatattgctctgtgaatgcttttgtgcataattgtacatttttaattaagttaatcttttacactctcaaagtgtgatattaagcaagcaaagataagttattacaagactctaaaaccgaatgcaatgagaaacaagtgaatccaaatatatttcaaatgaatgaatgacataatcaaacttaaggggaaaataataattaatctgattaatttttgactgttctcttatttcaaattgacttttgaacatactttgactacatactattgcttg

SEQ ID NO: 274464 - DNA, 409 bp, Homo Sapiens
actttgtacaaaaaagttgggacaaatcaagacaagaaacaaactgcacttgttgagctcgtgaaacacaagcccaaggcaacaaaagagcaactgaaagctgttatggatgatttcgcagcttttgtagagaagtgctgcaaggctgacgataaggagacctgctttgccgaggagggtaaaaaacttgttgctgcaagtcaagctgccttaggcttataacatcacatttaaaagcatctcagcctaccatgagaataagagaaagaaaatgaagatcaaaagcttattcatctgtttttctttttcgttggtgtaaagccaacaccctgtctaaaaaacataaatttctttaatcattttgcctcttttctctgtgcttcaattaataaaaaatggaaagaatcta

SEQ ID NO: 274465 - DNA, 168 bp, Homo Sapiens
actttgtacaaaaaagttggggagtcccaggtggcccagcaggccaggggctgggtgaccgatggcttcagttccctgaaagactactggagcaccgttaaggacaagttctctgagttctgggatttggaccctgaggtcagaccaacttcagccgtggctgcctga

SEQ ID NO: 274466 - DNA, 1229 bp, Homo Sapiens
ttggggcaagaccaaccaagatgagtgccctgggagctgtcattgccctcctgctctggggacagctttttgcagtggactcaggcaatgatgtcacggatatcgcagatgacggctgcccgaagccccccgagattgcacatggctatgtggagcactcggttcgctaccagtgtaagaactactacaaactgcgcacagaaggagatggagtgtacaccttaaacaatgagaagcagtggataaataaggctgttggagataaacttcctgaatgtgaagcagtatgtgggaagcccaagaatccggcaaacccagtgcagcggatcctgggtggacacctggatgccaaaggcagctttccctggcaggctaagatggtttcccaccataatctcaccacaggtgccacgctgatcaatgaacaatggctgctgaccacggctaaaaatctcttcctgaaccattcagaaaatgcaacagcgaaagacattgcccctactttaacactctatgtggggaaaaagcagcttgtagagattgagaaggttgttctacaccctaactactcccaggtagatattggggctcatcaaactcaaacagaaggtgtctgttaatgagagagtgatgcccatctgcctaccttcaaaggattatgcagaagtagggcgtgtgggttatgtttctggctgggggcgaaatgccaattttaaatttactgaccatctgaagtatgtcatgctgcctgtggctgaccaagaccaatgcataaggcattatgaaggcagcacagtccccgaaaagaagacaccgaagagccctgtaggggtgcagcccatactgaatgaacacaccttctgtgctggcatgtctaagtaccaagaagacacctgctatggcgatgcgggcagtgcctttgccgttcacgacctggaggaggacacctggtatgcgactgggatcttaagctttgataagagctgtgctgtggctgagtatggtgtgtatgtgaaggtgacttccatccaggactgggttcagaagaccatagctgagaactaatgcaaggctggccggaagcccttgcctgaaagcaagatttcagcctggaagagggcaaagtggacgggagtggacaggagtggatgcgataagatgtggtttgaagctgatgggtgccagccctgcattgctgagtcaatcaataaagagctttcttttgaccc

SEQ ID NO: 274467 - DNA, 1710 bp, Homo Sapiens
  misc_feature (1555)..(1577): n is a, c, g, or t
ggaaagtttcatgctagaattcaatgcacacgtcactgccactcacaacttcttggttgaactggttacacattcctgcctgtgggtgagaaagtataatcagagacactggatactggtgactccaagcagcctgtagtgcatgctcatatataccattttattcagtaccatgatgataatttctcaaaatattatctcaaagtatttctcaaaatattaatttctcaaaatattaaaagtagtatttaagaatataagttctataaggctgaaggcatcacactacctgacttcaaactatactacaaggctacagtaaccaaaacagcatggtactggtacaagaacagacacatagaccagtggaacagaaaagagatttcagaaataagatgcacatatacaaccatctgatatttaacaaacctgacaaaaacaagcaatggggaaagggctccctgtttaataaatggtgctgggaaaactggctagccatatgtagaaagctgaaactggataccttccttacaccttacacaaaaatcaattcaagatagattgaagacttaaacgttagacctaaaaccataaaaaccctagaagaaaacctaggcattaccattcaggacataggcatgggcaaggacttcatgtctaaaacaccaaaagcaatggcaacaaaagccaaaattgacaaatgggatctaattaaactaaagagcttctgcacagcaaaagaaactaccatcagagtgaacaggcaacctacaaaatgggagaaaatttttgcaacctactcatctgacaaagggctaatatccagaatctacaatgaactcaaacaaatttacaagaaaaaaacaaacaaccccatcaataagtgggcaaaggatatgaacagacacttctcaaaagaagacatttatgcaaccaacagacacatgaaaaaatgctcatcatcattggtcatcagagaaatgcaaatcaaaaccaaaatgagataccatctcatgccaattagaatggcgatcattaaaaagtcaggaaaccacaggtgctggagaggatgtggagaaataggaacacttttacactgttggtgggactataaactagttcaaccattgtggaagtcagtgtggcgattcctcagggatccagaactagaaatatcatttgactcagccatcccattactgagtatatacccaaaggactataaatcatgctgctataaagacacatgcacacgtatgtttattgcggcactattcacaatagcaaagacttggaaacaacccaaacgtccaacaatgatagactggattaagaaaatgtggcacatatacaccatggaatactatgcagtcctaaaaaatgatgagttcatgtcctttgtagggacatggatgaaattggaaatcatcattctcagtaaactatcgcaagaacaaaaacccaaacaccgcatattctcactcataggtgggaattgaacaatgagaacacatggacacaggaagggaaacatcacactctggggactgttgtnnnnnnnnnnnnnnnnnnnnnnntagctttaggagatatacctaatgctaaatgacgagttagtgggtgcagcacaccaacatggcacatgtatacatatgtaactaacctgcacattgtgcacatgtaccctaaaacttaaagtataataataat

SEQ ID NO: 274468 - DNA, 827 bp, Homo Sapiens
  misc_feature (459)..(657): n is a, c, g, or t
aaaagtgacacattaatagggtgaaaaggcaactgtagaatgggataaaatatttgcaagtcatatatctgaggaggggttactatctagaaatatagaaggaactcctaacactcaacactcagaaaacccccaaataatccaatttaaaaataggcaacggatctcaatgaacatttctccaaagagcatgtacaaatggtcaagaagcatatgaaaagatgttcaacatcattagagaaatgcaaatcaaaattataatcaaatattacctcacacccattaggatgactactataaaaaagatgataagtgttggcaaggatgtggggaaactggaaactttgttggtgggatttttaaatggtgcgaccttttaaatagaaaacagtatggtggttcttcaaaaaattagaaatagaactaccattgattcagcaattccacttctaggtatannnnnnnnnnnnnnnnnnnnnnnnnnnnnnnnnnnnnnnnnnnnnnnnnnnnnnnnnnnnnnnnnnnnnnnnnnnnnnnnnnnnnnnnnnnnnnnnnnnnnnnnnnnnnnnnnnnnnnnnnnnnnnnnnnnnnnnnnnnnnnnnnnnnnnnnnnnnnnnnnnnnnnnnnnnnnnnnnnnnnnnnnnnnnnnnnnnnnnncaggatggggaacctggccaatccctgcatatactgagggatgactgtatatccaaaaaaatggaaaggagtaagatctcagagagatatctgcacacccatgttcatagccaagagatagaagcaactgaagggttcattgatggataaatgtagtatatacatacaat

SEQ ID NO: 274469 - DNA, 874 bp, Homo Sapiens
ttggcccgggtcaaacagcaacaggtcaagatcaagcagcttttgcaggagaatgaagtccagttccttgataaaggagatgagaatactgtcgttgatcttggaagcaagaggcagtatgcagattgttcagagattttcaatgatgggtataagctcagtggattttacaaaatcaaacctctccagagcccagcagaattttctgtttattgtgacatgtccgatggaggaggatggactgtaattcagagacgatctgatggcagtgaaaactttaacagaggatggaaagactatgaaaatggctttggaaattttgtccaaaaacatggtgaatattggctgggcaataaaaatcttcacttcttgaccactcaagaagactacactttaaaaatcgaccttgcagattttgaaaaaaatagccgttatgcacaatataagaatttcaaagttggagatgaaaagaatttctacgagttgaatattggggaatattctggaacagctggagattcccttgcggggaattttcatcctgaggtgcagtggtgggctagtcaccaaagaatgaaattcagcacgtgggacagagatcatgacaactatgaagggaactgcgcagaagaagatcagtctggctggtggtttaacaggtgtcactctgcaaacctgaatggtgtatactacagcggcccctacacggctaaaacagacaatgggattgtctggtacacctggcatgggtggtggtattctctgaaatctgtggttatgaaaattagccaaatgattttattccaaatgtaatttaattgctgctgttgggctttcgtttctgcattcagctttgtttaaagtgatttgaaaa

SEQ ID NO: 274470 - DNA, 1044 bp, Homo Sapiens
  misc_feature (389)..(698): n is a, c, g, or t
gtcgaccgacagccttccaaatgttcttcgggtgatgctgccaacttagtcgaccgacagccttccaaatgttcttctcaaacggaatcgtcgtatccagcctactcgctattgtcctcaatgccgtattaaatcataaaaagaaataaggaaaagaggtgcgagcctcttttttgtgtgacaaaataaaaacatctacctattcatatacgctagtgtcatagtcctgaaaatcatctgcatcaagaacaatttcacaactcttatacttttctcttacaagtcgttcggcttcatctggattttcagcctctatacttactaaacgtgataaagtttctgtaatttctactgtatcgacctgcagactggctgtgtataagggagcnnnnnnnnnnnnnnnnnnnnnnnnnnnnnnnnnnnnnnnnnnnnnnnnnnnnnnnnnnnnnnnnnnnnnnnnnnnnnnnnnnnnnnnnnnnnnnnnnnnnnnnnnnnnnnnnnnnnnnnnnnnnnnnnnnnnnnnnnnnnnnnnnnnnnnnnnnnnnnnnnnnnnnnnnnnnnnnnnnnnnnnnnnnnnnnnnnnnnnnnnnnnnnnnnnnnnnnnnnnnnnnnnnnnnnnnnnnnnnnnnnnnnnnnnnnnnnnnnnnnnnnnnnnnnnnnnnnnnnnnnnnnnnnnnnnnnnnnnnnnnnnnnnnnnnatttcaccagcccctgttctcgtcagcaaaagagccgttcatttcaataaaccgggcgacctcagccatcccttcctgattttccgctttccagcgttcggcacgcagacgacgggcttcattctgcatggttgtgcttaccagaccggagatattgacatcatatatgccttgagcaactgatagctgtcgctgtcaactgtcactgtaatacgctgcttcatagcatacctctttttgacatacttcgggtatacatatcagtatatattcttataccgcaaaaatcagcgcgcaaatacgcatactgttatctggcttttagtaagccggatccacgcggcgt

SEQ ID NO: 274471 - DNA, 589 bp, Homo Sapiens
ttggtgtgcgcagacatggtgggcaccttcacagacaccgaggaccctgccaagttcaagatgaagtactggggcgtagcctcctttctccagaaaggaaatgatgaccactggatcgtcgacacagactacgacacgtatgccgtgcagtactcctgccgcctcctgaacctcgatggcacctgtgctgacagctactccttcgtgttttcccgggaccccaacggcctgcccccagaagcgcagaagattgtaaggcagcggcaggaggagctgtgcctggccaggcagtacaggctgatcgtccacaacggttactgcgatggcagatcagaaagaaaccttttgtagcaatatcaagaatctagtttcatctgagaacttctgattagctctcagtcttcagctctatttatcttaggagtttaatttgcccttctctccccatcttccctcagttcccataaaaccttcattacacataaagatacacgtgggggtcagtgaatctgcttgcctttcctgaaagtttctggggcttaagattccagactctgattcattaaactatagtcacccgtgtcctgtg

SEQ ID NO: 274472 - DNA, 219 bp, Homo Sapiens
ttgactgatagtgactgttcgttgcacaattgatgagcatgcttctatatgccactttgtacaaaagttggagagagcagctttctggactccagagtctgatagactgtgctttgtagatacacactacagccacctgagatccagcagagtgagtacaggggaataaaatctctgcttcacatcctcattttcctcctcattaactctcagttattt

SEQ ID NO: 274473 - DNA, 394 bp, Homo Sapiens
cacagtgtcttccttctcaatgccagcttcctgggtgctgctgttgtcacagcatcccaactccttaattttctcacagtctacctgaatgccagtgtatgttcccacaagagagcaatcaagttgtatttgtaaaaagccagggagggagggcattgttctttatgtccctaagccttcatccttccaccctcagatttcttttctttatccaactgggatattttctttatccaactgggacaataattttaatgtccaattttactgtcatgattcctaatctatttgctaggacttgcttactcagattctatctctagatttcctcctccatcaactctgcaactgtgaacatgactgagaatttcattttcagcccttttctccccaa

SEQ ID NO: 274474 - DNA, 84 bp, Homo Sapiens
gcaatgtaaatggcacccccagagtagtgcagtgtacagcctatgcagccctttacatctatatatacagccaatgtaccaaaa

SEQ ID NO: 274475 - DNA, 990 bp, Homo Sapiens
ttgggggtgaagaaaacatttatgcatagcaccctgctcatagcaggggttccacagttccagcagtaatgtttgagataaagactgctctgtccttgaggcttatccccctctttgtgtctacatgttggagttacccagaaataagaacatctgggttcttaaaaagtagcatcccaacacaccaactttgatgcccactccctccttcaatgctcaactttgccctcagctataggagatccgagaacagtgactattccaagactaaaacctgactccctccttggtacattctaattctcctcaacagcaccactgagtaacaaggacgctgcctaaggtgagtaagggtcctcaattccccccaagtttactagcacatgcataaaatattattaacaccatgaatggaagaggatgacgggataaaagaaattaggcttaataaagtgaatgtctataaaggaagaccagatcctgaaatgaaaaggcaaaacttatttgtgagctttggttaaatttatcatgaaaattatacttattaatgttttattgttattaacagcgtccgaacaatcctcatcttttgaagatgccaggagcaattcagaatactatctgattgaatgtgaacctgcctggttaatttattacctgatttgatgaaccaaggaaagccatgagtttaaacaaatatttacatttaatatgggaacataaaagagcttaaatattatagactttgtacctgttatatatatgaatattccctatgttaaataataataataactagtgtttatgaatagaatcatatcatctttagaaattgtttaaaattagttctgggaagttgaaagtggggaatgaagagataataaataaaactagattggccatatgtttataatttttttagattgggtaatgaatacatggagtttcattatacttttctctccacttttgtctatgttgaaaattttc

SEQ ID NO: 274476 - DNA, 1020 bp, Homo Sapiens
  misc_feature (124)..(183): n is a, c, g, or t
  misc_feature (332)..(626): n is a, c, g, or t
  misc_feature (637)..(705): n is a, c, g, or t
  misc_feature (766)..(910): n is a, c, g, or t
agaatttatttttattctttcagacctctcagggatgaacggacataggcttctaacacttaggtgtgggcaacattcttcgaagcacctccctcaaagtggaaaaggcctgggggctcagacnnnnnnnnnnnnnnnnnnnnnnnnnnnnnnnnnnnnnnnnnnnnnnnnnnnnnnnnnnnntcagtggggtgttggggagggtgggattccaccggggtttgcccatccacagctcagtggggggatctatggagtgtgtctagcaagagaggacccatggcaggcttggtaactaacatcatgcagtagcttcttctattctctcttannnnnnnnnnnnnnnnnnnnnnnnnnnnnnnnnnnnnnnnnnnnnnnnnnnnnnnnnnnnnnnnnnnnnnnnnnnnnnnnnnnnnnnnnnnnnnnnnnnnnnnnnnnnnnnnnnnnnnnnnnnnnnnnnnnnnnnnnnnnnnnnnnnnnnnnnnnnnnnnnnnnnnnnnnnnnnnnnnnnnnnnnnnnnnnnnnnnnnnnnnnnnnnnnnnnnnnnnnnnnnnnnnnnnnnnnnnnnnnnnnnnnnnnnnnnnnnnnnnnnnnnnnnnnnnnnnnnnnnnnnnnnnnnnnnnnnntattattctcnnnnnnnnnnnnnnnnnnnnnnnnnnnnnnnnnnnnnnnnnnnnnnnnnnnnnnnnnnnnnnnnnnnnnactcctcactgacttgaagctcaaaactttcctatttagcttctaatcacacactctctcnnnnnnnnnnnnnnnnnnnnnnnnnnnnnnnnnnnnnnnnnnnnnnnnnnnnnnnnnnnnnnnnnnnnnnnnnnnnnnnnnnnnnnnnnnnnnnnnnnnnnnnnnnnnnnnnnnnnnnnnnnnnnnnnnnnnnnnnnnnnnnnnntaataaatgctttctgaatggatggacggaagtatgaatgaatggcgaagtgaatgaaggaatcaacttctttctccttagtgggtgtgtgtgggcacagcaggctccaa

SEQ ID NO: 274477 - DNA, 588 bp, Homo Sapiens
ttggagcttttataactcatggtggagccaatggcatctacgaggcaatctaccatgggatccctatggtggggattccattgtttgccgatcaacctgataacattgctcacatgaaggccaggggagcagctgttagagtggacttcaacacaatgtcgagtacagacttgctgaatgcattgaagagagtaattaatgatccttcatataaagagaatgttatgaaattatcaagaattcaacatgatcaaccagtgaagcccctggatcgagcagtcttctggattgaatttgtcatgcgccacaaaggagctaaacaccttcgggttgcagcccacgacctcacctggttccagtaccactctttggatgtgattgggttcctgctggtctgtgtggcaactgtgatatttatcgtcacaaaatgttgtctgttttgtttctggaagtttgctagaaaagcaaagaagggaaaaaatgattagttatatctgagatttgaagctggaaaacctgataggtgagactacttcagtttattccagcaagaaagattgtgatgcaagatttctttcttcctgagac

SEQ ID NO: 274478 - DNA, 937 bp, Homo Sapiens
ttggataaaactgagaaatcatgattgtattacttggttgtctaatgaatatagataatatatgaaataacccactaccgctaagatctgctaggaagtgatttacaaagtctatttttataaaaattttcaactaaattagatcttaaatttgagaaatctcatgcacttacaaggtaagtagcttgtacctggaagaataaggtgatggtataaaactttttcaactggacaaatcttaaaattagctcgagattacttagagcaacactgggtattttctctttatgttacatagaagtgtcattcattgatgcctaggctgagataattttttcctttatacaacagatatttactgaacatctgctaagaacataactctctagaatatgctgaatagcatatcagtatattataattttattttaataacaattctccaggattgtgtcttggaagaaatataggccaagccttgtaacactgatagacaaaaactactgcagtaggtgcaagaatggggaaggcaaatcatctgaaataattggaggtttcttccaggtggcgtgtagatgtagggaataatgagtagaatttgatgatggagggagagggaaaagacaatgcaaattttactaacctagaaataggtccagcatgttcctacccccatggatttatttataaatttctcctggaagcacaatctgccacagaaatgggtgtattttttaaatttaggttttgattatctagtggaaatactataatgcctgattgatgtgtttaaactttactttttttacatactttaagttctggtgtacatgttcgttgaacgtgttgagcttcagataattcctctaagaacaattagtcagcattttacaacctctctggccttttgcttagtttcttttcattgctccttatt

SEQ ID NO: 274479 - DNA, 987 bp, Homo Sapiens
  misc_feature (51)..(70): n is a, c, g, or t
actttgtacaaaaaagttggggccgcacaactttgtacaagaaagttgggnnnnnnnnnnnnnnnnnnnngtgaacataccaatgcttcaatttttttccagtaatataatcaactatactataagagaaaaattttgataaaacacaaatttcgtgttttcctactctaattggcttttacgtaaaaatacaggtaaaatttatttgtgcttttttgctatttctgttttgctattctctgtctatgtcttcacctatgtcatagacacaattagggaattttgtacactcttgtgccaactgctttgatagtaacaaaatgtacttctcgaactcctaggtataaaactcaagtatccacgatttaaattcttttttgctcacttccattatgtttccagtctcaatagaaatcgatgccaatccagaaatacacgcattattctaatacttttcacacattactgatatagattaacctttctagatctccttaaatactatcatttttcactacttgtatcttaactgttaagttcaacattttctgtaatattaatatattctgaaaatttccttactttcttctttgtcccaggttcaatgttttgcagtctctacctcaccctgtgaagcataaacattgtacatgctgtacaaataatacatcgttcatgtacttagagactgcacaatttttatttggttgacaatagctaatgttttcttcttcattttctatttcctgatttttctttatttagtatatactacattattataaaaataagaacgttttacaaactaaagcaaaaagcaaccctaggaataaaatgcacaaataaaatatataaacatacatgtagatgtaccacgtacccttgtaatttatttagacttttgattttagtacaattttaattaaagtctgtgtattatctgtcatcgtcttagtatttttatgtaacaaattgtgtaaatcaaaa

SEQ ID NO: 274480 - DNA, 659 bp, Homo Sapiens
ttggctgctctcagaccctgagcaaggggttgggtgactggccagtatgagagggagaaggctgggttctcatggatcgaagtgaccttcaagaaccccctggtatgggttcacgcatcccctgaacacgtggtggtgactcggaaccgaagaagctctgcgtacaagtggaaggagacgctattctcagtgatgcccggcctgaagatgaccatggacaagacgggtctcctgctgctcagtgacccagacaaagtgaccatcggcctgttgttctgggatggccgtggggaggggctccggctccttctgcgtgacactgaccgcttctccagccacgttggagggacccttggccagttttaccaggaggtgctctggggatctccagcagcatcagatgacggcagacgcacgctgagggttcagggcaatgaccactctgccaccagagagcgcaggctggattaccaggaggggcccccgggagtggagatttcctgctggtctgtggagctgtagttctgatggaaggagctgtgcccaccctgtacacttggcttccccctgcaactgcagggccgcttctggggcctggaccaccatggggaggaagagtcccactcattacaaataaagaaaggtggtgtgagcctggg

SEQ ID NO: 274481 - DNA, 379 bp, Homo Sapiens
atgatacacaataaagactccatttatttgttcctcctcccccaagtttagcaaaataactcagatcctgattttctttaacttgcaaaaaatgccatccttctgagttcagagaccttccgagccctggtgccagctttggtgcaggtccagttcatatgtgcttctgcttatagtctactgcctactgcaaggctggctcactgtatggttttatcaatataggcagtttgaattttttctgtgctatgtgaaagttcaattggaaaagaagaataaatgaagatttcttttaaaaaattagaggatgatagtaagttctcctggagcaagcttcatgtaggggtatacgatgactgtggttccaacttttttgtac

SEQ ID NO: 274482 - DNA, 665 bp, Homo Sapiens
gtgtgagacagtgcacctggccgaaatagctcaagtttctgaaaaacaaatctgaatctatttgttattcttagcgtcactggtctggctttcagaattaacatacaaggttgccacacctagttctgcccagctttatgtcttttattccagtattccaccaaagtttgttttcctgcattccagttctcaagtcttaagataaagattgtacttgacagtttagtatatccataaaactatttgaggtggttaaggttcttgggttcattttccttaatactttgctgaatattgtagattgtaggcaatgaaaaagtctactaaattaggaaaaccttgaataattaggtatcctaggtaagagcccctaaacatcaagcaatctgtgagtctgtaaagaaataaatattttttggattattcttatctaattccacccctgttggaagatgatttctttgttctttgcaactatggaagctgtgaaaatcatcacaagtgcctctgaaagcgagtgttaggttggttagagggtttaatattttctgcaatggtttgtaggaattttaataaatgtagtatattttctgagatgattttgtaaaagtactattttaaatatcaaatcaaccaataaattcacatttgtgttaggaacagaa

SEQ ID NO: 274483 - DNA, 576 bp, Homo Sapiens
ccaactttgtacaaaaaagttgggattgatcgccgttctggtaaaaagctggaagatggccctaaattcttgaagtctggtgatgctgccattgttgatatggttcctggcaagcccatgtgtgttgagagcttctcagactatccacctttgggtcgctttgctgttcgtgatatgagacagacagttgcggtgggtgtcatcaaagcagtggacaagaaggctgctggagctggcaaggtcaccaagtctgcccagaaagctcagaaggctaaatgaatattatccctaatacctgccaccccactcttaatcagtggtggaagaacggtctcagaactgtttgtttcaattggccatttaagtttagtagtaaaagactggttaatgataacaatgcatcgtaaaaccttcagaaggaaaggagaatgttttgtggaccactttggttttcttttttgcgtgtggcagttttaagttattagtttttaaaatcagtactttttaatggaaacaacttgaccaaaaatttgtcacagaattttgagacccattaaaaaagttaaatgagaaaaa

SEQ ID NO: 274484 - DNA, 331 bp, Homo Sapiens
ggcaggagctttggttcggagacaggcaaaggagccatgtgtggagagcctggtttctcagtacttccagaccgtgactgactatggcaaggacctgatggagaaggtcaagagcccagagcttcaggccgaggccaagtcttactttgaaaagtcaaaggagcagctgacacccctgatcaagaaggctggaacggaactggttaacttcttgagctatttcgtggaacttggaacacagcctgccacccagtgaagtgtccagaccattgtcttccaaccccagctggcctctagaacacccactggccagtcctagagctcctgtccc

SEQ ID NO: 274485 - DNA, 1142 bp, Homo Sapiens
  misc_feature (875)..(892): n is a, c, g, or t
ttggcagcacagggcatttggaagaatgaacagaagggagagaagattcctcggtgcttgccagtgtgtgggaagcccgtgaaccccgtggaacagaggcagcgcatcatcggagggcaaaaagccaagatgggcaacttcccctggcaggtgttcaccaacatccacgggcgcgggggcggggccctgctgggcgaccgctggatcctcacagctgcccacaccctgtatcccaaggaacacgaagcgcaaagcaacgcctctttggatgtgttcctgggccacacaaatgtggaagagctcatgaagctaggaaatcaccccatccgcagggtcagcgtccacccggactaccgtcaggatgagtcctacaattttgagggggacatcgccctgctggagctggaaaatagtgtcaccctgggtcccaacctcctccccatctgcctccctgacaacgataccttctacgacctgggcttgatgggctatgtcagtggcttcggggtcatggaggagaagattgctcatgacctcaggtttgtccgtctgcccgtagctaatccacaggcctgtgagaactggctccggggaaagaataggatggatgtgttctctcaaaacatgttctgtgctggacacccatctctaaagcaggacgcctgccagggggatagtgggggcgtttttgcagtaagggacccgaacactgatcgctgggtggccacgggcatcgtgtcctggggcatcgggtgcagcaggggctatggcttctacaccaaagtgctcaactacgtggactggatcaagaaagagatggaggaggaggactgagcccagaattcactaggttcgaatccagagagcagtgtggnnnnnnnnnnnnnnnnnncaactgaccagttgttgataaccactaagagtctctattaaaattactgatgcagaaagaccgtgtgtgaaattctctttcctgtagtcccattgatgtactttacctgaaacaacccaaagggcccctttctttcttctgaggattgcagaggatatagttatcaatctctagttgtcactttcctcttccactttgataccattgggtcattgaatataactttttccaaataaagttttatgagaaa

SEQ ID NO: 274486 - DNA, 992 bp, Homo Sapiens
tttgtacaaaaaagttggaattactgtggccttacacaaggtgaatattggcttggaaatgataaaattagccagcttaccaggatgggacccacagaacttttgatagaaatggaggactggaaaggagacaaagtaaaggctcactatggaggattcactgtacagaatgaagccaacaaataccagatctcagtgaacaaatacagaggaacagccggtaatgccctcatggatggagcatctcagctgatgggagaaaacaggaccatgaccattcacaacggcatgttcttcagcacgtatgacagagacaatgacggctggttaacatcagatcccagaaaacagtgttctaaagaagacggtggtggatggtggtataatagatgtcatgcagccaatccaaacggcagatactactggggtggacagtacacctgggacatggcaaagcatggcacagatgatggtgtagtatggatgaattggaaggggtcatggtactcaatgaggaagatgagtatgaagatcaggcccttcttcccacagcaatagtccccaatacgtagatttttgctcttctgtatgtgacaacatttttgtacattatgttattggaattttctttcatacattatattcctctaaaactctcaagcagacgtgagtgtgactttttgaaaaaagtataggataaattacattaaaatagcacatgattttcttttgttttcttcatttctcttgctcaccaagaagtaacaaaagtatagttttgacagagttggtgttcataatttcagttctagttgattgcgagaattttcaaataaggaagaggggtcttttatccttgtcgtaggaaaaccatgacggaaaggaaaaactgatgtttaaaagtccacttttaaaactatatttatttatgtaggatctgtcaaagaaaacttccaaaaagatttattaattaaaccagactctgttgcaat

SEQ ID NO: 274487 - DNA, 1131 bp, Homo Sapiens; identical to SEQ ID NO: 274455

SEQ ID NO: 274488 - DNA, 1163 bp, Homo Sapiens; identical to SEQ ID NO: 274456

SEQ ID NO: 274489 - DNA, 571 bp, Homo Sapiens; identical to SEQ ID NO: 274457

SEQ ID NO: 274490 - DNA, 692 bp, Homo Sapiens; identical to SEQ ID NO: 274458

SEQ ID NO: 274491 - DNA, 539 bp, Homo Sapiens; identical to SEQ ID NO: 274459
  misc_feature (46)..(71): n is a, c, g, or t
  misc_feature (125)..(145): n is a, c, g, or t

SEQ ID NO: 274492 - DNA, 520 bp, Homo Sapiens; identical to SEQ ID NO: 274460

SEQ ID NO: 274493 - DNA, 795 bp, Homo Sapiens; identical to SEQ ID NO: 274461

SEQ ID NO: 274494 - DNA, 2781 bp, Homo Sapiens; identical to SEQ ID NO: 274462
  misc_feature (202)..(322): n is a, c, g, or t
  misc_feature (325)..(376): n is a, c, g, or t

SEQ ID NO: 274495 - DNA, 519 bp, Homo Sapiens; identical to SEQ ID NO: 274463

SEQ ID NO: 274496 - DNA, 409 bp, Homo Sapiens; identical to SEQ ID NO: 274464

SEQ ID NO: 274497 - DNA, 168 bp, Homo Sapiens; identical to SEQ ID NO: 274465

SEQ ID NO: 274498 - DNA, 1229 bp, Homo Sapiens; identical to SEQ ID NO: 274466

SEQ ID NO: 274499 - DNA, 1710 bp, Homo Sapiens; identical to SEQ ID NO: 274467
  misc_feature (1555)..(1577): n is a, c, g, or t

SEQ ID NO: 274500 - DNA, 219 bp, Homo Sapiens; identical to SEQ ID NO: 274472

SEQ ID NO: 274501 - DNA, 169 bp, Homo Sapiens; identical to SEQ ID NO: 274447

SEQ ID NO: 274502 - DNA, 1805 bp, Homo Sapiens; identical to SEQ ID NO: 249698

SEQ ID NO: 274503 - DNA, 1695 bp, Homo Sapiens; identical to SEQ ID NO: 249699
  misc_feature (53)..(53): n is a, c, g, or t
  misc_feature (1625)..(1625): n is a, c, g, or t
  misc_feature (1634)..(1634): n is a, c, g, or t

SEQ ID NO: 274504 - DNA, 1183 bp, Homo Sapiens; identical to SEQ ID NO: 249700
  misc_feature (971)..(998): n is a, c, g, or t

SEQ ID NO: 274505 - DNA, 403 bp, Homo Sapiens; identical to SEQ ID NO: 249701
  misc_feature (72)..(72): n is a, c, g, or t

SEQ ID NO: 274506 - DNA, 728 bp, Homo Sapiens; identical to SEQ ID NO: 249706

SEQ ID NO: 274507 - DNA, 1470 bp, Homo Sapiens; identical to SEQ ID NO: 249707
  misc_feature (47)..(47): n is a, c, g, or t

SEQ ID NO: 274508 - DNA, 1055 bp, Homo Sapiens; identical to SEQ ID NO: 249708
  misc_feature (357)..(357): n is a, c, g, or t
  misc_feature (369)..(369): n is a, c, g, or t
  misc_feature (371)..(371): n is a, c, g, or t

SEQ ID NO: 274509 - DNA, 1355 bp, Homo Sapiens; identical to SEQ ID NO: 249709
  misc_feature (151)..(165): n is a, c, g, or t
  misc_feature (247)..(304): n is a, c, g, or t
  misc_feature (379)..(379): n is a, c, g, or t
  misc_feature (445)..(445): n is a, c, g, or t
  misc_feature (502)..(515): n is a, c, g, or t
  misc_feature (628)..(688): n is a, c, g, or t
  misc_feature (743)..(775): n is a, c, g, or t

SEQ ID NO: 274510 - DNA, 415 bp, Homo Sapiens; identical to SEQ ID NO: 249710
  misc_feature (21)..(21): n is a, c, g, or t
  misc_feature (38)..(38): n is a, c, g, or t

SEQ ID NO: 274511 - DNA, 817 bp, Homo Sapiens; identical to SEQ ID NO: 249711
  misc_feature (42)..(42): n is a, c, g, or t
  misc_feature (58)..(58): n is a, c, g, or t
  misc_feature (66)..(66): n is a, c, g, or t

SEQ ID NO: 274512 - DNA, 439 bp, Homo Sapiens; identical to SEQ ID NO: 249712

SEQ ID NO: 274513 - DNA, 599 bp, Homo Sapiens; identical to SEQ ID NO: 249714
  misc_feature (29)..(29): n is a, c, g, or t
  misc_feature (50)..(50): n is a, c, g, or t
  misc_feature (117)..(117): n is a, c, g, or t

SEQ ID NO: 274514 - DNA, 342 bp, Homo Sapiens; identical to SEQ ID NO: 249715

SEQ ID NO: 274515 - DNA, 1595 bp, Homo Sapiens; identical to SEQ ID NO: 249717
  misc_feature (13)..(14): n is a, c, g, or t
  misc_feature (58)..(58): n is a, c, g, or t
  misc_feature (66)..(66): n is a, c, g, or t
  misc_feature (85)..(85): n is a, c, g, or t
  misc_feature (104)..(104): n is a, c, g, or t
  misc_feature (183)..(183): n is a, c, g, or t
  misc_feature (200)..(200): n is a, c, g, or t
  misc_feature (261)..(261): n is a, c, g, or t
  misc_feature (263)..(263): n is a, c, g, or t
  misc_feature (269)..(269): n is a, c, g, or t
  misc_feature (277)..(277): n is a, c, g, or t
  misc_feature (289)..(289): n is a, c, g, or t
  misc_feature (329)..(329): n is a, c, g, or t
  misc_feature (343)..(343): n is a, c, g, or t
  misc_feature (346)..(346): n is a, c, g, or t
  misc_feature (380)..(380): n is a, c, g, or t
  misc_feature (428)..(428): n is a, c, g, or t
  misc_feature (447)..(447): n is a, c, g, or t
  misc_feature (467)..(468): n is a, c, g, or t
  misc_feature (486)..(486): n is a, c, g, or t
  misc_feature (498)..(498): n is a, c, g, or t
  misc_feature (500)..(500): n is a, c, g, or t
  misc_feature (525)..(525): n is a, c, g, or t

SEQ ID NO: 274516 - DNA, 1028 bp, Homo Sapiens; identical to SEQ ID NO: 249718
  misc_feature (897)..(897): n is a, c, g, or t
  misc_feature (912)..(912): n is a, c, g, or t
  misc_feature (915)..(915): n is a, c, g, or t
  misc_feature (919)..(919): n is a, c, g, or t
  misc_feature (938)..(938): n is a, c, g, or t
  misc_feature (940)..(940): n is a, c, g, or t
  misc_feature (945)..(946): n is a, c, g, or t
  misc_feature (948)..(948): n is a, c, g, or t
  misc_feature (952)..(952): n is a, c, g, or t
  misc_feature (977)..(979): n is a, c, g, or t
  misc_feature (981)..(981): n is a, c, g, or t
  misc_feature (984)..(984): n is a, c, g, or t
  misc_feature (994)..(994): n is a, c, g, or t
  misc_feature (1002)..(1003): n is a, c, g, or t
  misc_feature (1007)..(1007): n is a, c, g, or t
  misc_feature (1028)..(1028): n is a, c, g, or t

SEQ ID NO: 274517 - DNA, 663 bp, Homo Sapiens; identical to SEQ ID NO: 249719

SEQ ID NO: 274518 - DNA, 809 bp, Homo Sapiens; identical to SEQ ID NO: 249720

SEQ ID NO: 274519 - DNA, 413 bp, Homo Sapiens; identical to SEQ ID NO: 249721
  misc_feature (398)..(398): n is a, c, g, or t

SEQ ID NO: 274520 - DNA, 357 bp, Homo Sapiens; identical to SEQ ID NO: 249725

SEQ ID NO: 274521 - DNA, 711 bp, Homo Sapiens; identical to SEQ ID NO: 249726
  misc_feature (235)..(284): n is a, c, g, or t

SEQ ID NO: 274522 - DNA, 654 bp, Homo Sapiens; identical to SEQ ID NO: 80586
  misc_feature (470)..(471): n is a, c, g, or t
  misc_feature (474)..(475): n is a, c, g, or t
  misc_feature (477)..(479): n is a, c, g, or t
  misc_feature (481)..(482): n is a, c, g, or t
  misc_feature (489)..(492): n is a, c, g, or t
  misc_feature (541)..(541): n is a, c, g, or t

SEQ ID NO: 274523 - DNA, 1412 bp, Homo Sapiens; identical to SEQ ID NO: 249728

SEQ ID NO: 274524 - DNA, 2171 bp, Homo Sapiens; identical to SEQ ID NO: 249729
  misc_feature (1311)..(1335): n is a, c, g, or t
  misc_feature (1879)..(1879): n is a, c, g, or t
  misc_feature (1943)..(1943): n is a, c, g, or t
  misc_feature (2056)..(2056): n is a, c, g, or t

SEQ ID NO: 274525 - DNA, 1500 bp, Homo Sapiens; identical to SEQ ID NO: 249731
  misc_feature (257)..(318): n is a, c, g, or t

SEQ ID NO: 274526 - DNA, 505 bp, Homo Sapiens; identical to SEQ ID NO: 249732
  misc_feature (430)..(430): n is a, c, g, or t
  misc_feature (437)..(437): n is a, c, g, or t
  misc_feature (468)..(468): n is a, c, g, or t
  misc_feature (477)..(477): n is a, c, g, or t
  misc_feature (491)..(491): n is a, c, g, or t

SEQ ID NO: 274527 - DNA, 795 bp, Homo Sapiens; identical to SEQ ID NO: 249733
  misc_feature (652)..(677): n is a, c, g, or t
  misc_feature (735)..(735): n is a, c, g, or t

SEQ ID NO: 274528 - DNA, 895 bp, Homo Sapiens; identical to SEQ ID NO: 249734
  misc_feature (271)..(398): n is a, c, g, or t
  misc_feature (545)..(569): n is a, c, g, or t
  misc_feature (610)..(644): n is a, c, g, or t

SEQ ID NO: 274529 - DNA, 497 bp, Homo Sapiens; identical to SEQ ID NO: 249735
  misc_feature (14)..(14): n is a, c, g, or t
  misc_feature (65)..(65): n is a, c, g, or t

SEQ ID NO: 274530 - DNA, 977 bp, Homo Sapiens; identical to SEQ ID NO: 249737
  misc_feature (7)..(7): n is a, c, g, or t
  misc_feature (40)..(40): n is a, c, g, or t
  misc_feature (42)..(43): n is a, c, g, or t
  misc_feature (51)..(51): n is a, c, g, or t
  misc_feature (58)..(58): n is a, c, g, or t
  misc_feature (61)..(61): n is a, c, g, or t
  misc_feature (67)..(69): n is a, c, g, or t
  misc_feature (75)..(75): n is a, c, g, or t
  misc_feature (80)..(80): n is a, c, g, or t
  misc_feature (97)..(97): n is a, c, g, or t
  misc_feature (174)..(174): n is a, c, g, or t
  misc_feature (184)..(184): n is a, c, g, or t
  misc_feature (195)..(195): n is a, c, g, or t
  misc_feature (207)..(207): n is a, c, g, or t
  misc_feature (215)..(215): n is a, c, g, or t
  misc_feature (237)..(237): n is a, c, g, or t
  misc_feature (244)..(246): n is a, c, g, or t
  misc_feature (304)..(304): n is a, c, g, or t

SEQ ID NO: 274531 - DNA, 1722 bp, Homo Sapiens; identical to SEQ ID NO: 249738

SEQ ID NO: 274532 - DNA, 606 bp, Homo Sapiens; identical to SEQ ID NO: 249739

SEQ ID NO: 274533 - DNA, 1574 bp, Homo Sapiens; identical to SEQ ID NO: 249740
  misc_feature (1473)..(1473): n is a, c, g, or t
  misc_feature (1502)..(1502): n is a, c, g, or t
  misc_feature (1510)..(1522): n is a, c, g, or t
  misc_feature (1531)..(1531): n is a, c, g, or t
  misc_feature (1538)..(1538): n is a, c, g, or t
  misc_feature (1544)..(1544): n is a, c, g, or t

SEQ ID NO: 274534 - DNA, 969 bp, Homo Sapiens; identical to SEQ ID NO: 249741

SEQ ID NO: 274535 - DNA, 931 bp, Homo Sapiens; identical to SEQ ID NO: 249742

SEQ ID NO: 274536 - DNA, 627 bp, Homo Sapiens; identical to SEQ ID NO: 249747
  misc_feature (117)..(118): n is a, c, g, or t
  misc_feature (143)..(143): n is a, c, g, or t

SEQ ID NO: 274537 - DNA, 1980 bp, Homo Sapiens; identical to SEQ ID NO: 249748
  misc_feature (274)..(274): n is a, c, g, or t
  misc_feature (297)..(297): n is a, c, g, or t
  misc_feature (326)..(326): n is a, c, g, or t
  misc_feature (1281)..(1294): n is a, c, g, or t
  misc_feature (1314)..(1314): n is a, c, g, or t
  misc_feature (1783)..(1796): n is a, c, g, or t

SEQ ID NO: 274538 - DNA, 605 bp, Homo Sapiens; identical to SEQ ID NO: 249749
  misc_feature (396)..(396): n is a, c, g, or t
  misc_feature (446)..(446): n is a, c, g, or t

SEQ ID NO: 274539 - DNA, 619 bp, Homo Sapiens; identical to SEQ ID NO: 249750
  misc_feature (54)..(54): n is a, c, g, or t
  misc_feature (107)..(107): n is a, c, g, or t

SEQ ID NO: 274540 - DNA, 549 bp, Homo Sapiens; identical to SEQ ID NO: 249751
  misc_feature (114)..(126): n is a, c, g, or t

SEQ ID NO: 274541 - DNA, 417 bp, Homo Sapiens; identical to SEQ ID NO: 249752

SEQ ID NO: 274542 - DNA, 1046 bp, Homo Sapiens; identical to SEQ ID NO: 249753
  misc_feature (417)..(431): n is a, c, g, or t
  misc_feature (874)..(883): n is a, c, g, or t
  misc_feature (977)..(991): n is a, c, g, or t

SEQ ID NO: 274543 - DNA, 439 bp, Homo Sapiens; identical to SEQ ID NO: 249754

SEQ ID NO: 274544 - DNA, 718 bp, Homo Sapiens; identical to SEQ ID NO: 249759

SEQ ID NO: 274545 - DNA, 1098 bp, Homo Sapiens; identical to SEQ ID NO: 249760

SEQ ID NO: 274546 - DNA, 745 bp, Homo Sapiens; identical to SEQ ID NO: 249761

SEQ ID NO: 274547 - DNA, 1313 bp, Homo Sapiens; identical to SEQ ID NO: 249763

SEQ ID NO: 274548 - DNA, 1006 bp, Homo Sapiens; identical to SEQ ID NO: 249764
  misc_feature (691)..(746): n is a, c, g, or t
  misc_feature (748)..(798): n is a, c, g, or t
  misc_feature (931)..(931): n is a, c, g, or t
  misc_feature (942)..(942): n is a, c, g, or t
  misc_feature (948)..(948): n is a, c, g, or t
  misc_feature (961)..(962): n is a, c, g, or t
  misc_feature (971)..(971): n is a, c, g, or t
  misc_feature (979)..(979): n is a, c, g, or t
  misc_feature (988)..(989): n is a, c, g, or t
  misc_feature (992)..(992): n is a, c, g, or t
  misc_feature (1001)..(1001): n is a, c, g, or t

SEQ ID NO: 274549 - DNA, 1138 bp, Homo Sapiens; identical to SEQ ID NO: 249765

SEQ ID NO: 274550 - DNA, 423 bp, Homo Sapiens; identical to SEQ ID NO: 249766

SEQ ID NO: 274551 - DNA, 654 bp, Homo Sapiens; identical to SEQ ID NO: 249767

SEQ ID NO: 274552 - DNA, 1128 bp, Homo Sapiens; identical to SEQ ID NO: 249768
  misc_feature (697)..(752): n is a, c, g, or t
  misc_feature (754)..(804): n is a, c, g, or t
  misc_feature (1002)..(1002): n is a, c, g, or t
  misc_feature (1005)..(1005): n is a, c, g, or t
  misc_feature (1026)..(1027): n is a, c, g, or t
  misc_feature (1031)..(1031): n is a, c, g, or t
  misc_feature (1036)..(1036): n is a, c, g, or t
  misc_feature (1068)..(1068): n is a, c, g, or t
  misc_feature (1086)..(1086): n is a, c, g, or t
  misc_feature (1111)..(1111): n is a, c, g, or t

SEQ ID NO: 274553 - DNA, 1561 bp, Homo Sapiens; identical to SEQ ID NO: 249769
  misc_feature (25)..(25): n is a, c, g, or t
  misc_feature (56)..(56): n is a, c, g, or t
  misc_feature (986)..(987): n is a, c, g, or t
  misc_feature (997)..(997): n is a, c, g, or t
  misc_feature (1006)..(1006): n is a, c, g, or t
  misc_feature (1009)..(1009): n is a, c, g, or t
  misc_feature (1012)..(1012): n is a, c, g, or t
  misc_feature (1022)..(1022): n is a, c, g, or t
  misc_feature (1061)..(1061): n is a, c, g, or t
  misc_feature (1124)..(1124): n is a, c, g, or t
  misc_feature (1134)..(1134): n is a, c, g, or t
  misc_feature (1160)..(1160): n is a, c, g, or t
  misc_feature (1173)..(1173): n is a, c, g, or t
  misc_feature (1186)..(1186): n is a, c, g, or t
  misc_feature (1191)..(1191): n is a, c, g, or t
  misc_feature (1214)..(1214): n is a, c, g, or t
  misc_feature (1229)..(1229): n is a, c, g, or t
  misc_feature (1236)..(1236): n is a, c, g, or t
  misc_feature (1245)..(1245): n is a, c, g, or t
  misc_feature (1247)..(1247): n is a, c, g, or t
  misc_feature (1253)..(1253): n is a, c, g, or t
  misc_feature (1256)..(1256): n is a, c, g, or t
  misc_feature (1263)..(1263): n is a, c, g, or t
  misc_feature (1276)..(1276): n is a, c, g, or t
  misc_feature (1281)..(1282): n is a, c, g, or t
  misc_feature (1285)..(1286): n is a, c, g, or t
  misc_feature (1297)..(1297): n is a, c, g, or t
  misc_feature (1301)..(1301): n is a, c, g, or t
  misc_feature (1310)..(1310): n is a, c, g, or t
  misc_feature (1336)..(1336): n is a, c, g, or t
  misc_feature (1343)..(1343): n is a, c, g, or t
  misc_feature (1345)..(1345): n is a, c, g, or t
  misc_feature (1354)..(1354): n is a, c, g, or t
  misc_feature (1389)..(1389): n is a, c, g, or t
  misc_feature (1462)..(1462): n is a, c, g, or t
  misc_feature (1464)..(1464): n is a, c, g, or t
  misc_feature (1548)..(1548): n is a, c, g, or t

SEQ ID NO: 274554 - DNA, 814 bp, Homo Sapiens; identical to SEQ ID NO: 249770
  misc_feature (154)..(209): n is a, c, g, or t
  misc_feature (211)..(261): n is a, c, g, or t
  misc_feature (565)..(565): n is a, c, g, or t
  misc_feature (602)..(602): n is a, c, g, or t
  misc_feature (607)..(607): n is a, c, g, or t
  misc_feature (706)..(706): n is a, c, g, or t

SEQ ID NO: 274555 - DNA, 1266 bp, Homo Sapiens; identical to SEQ ID NO: 249771

SEQ ID NO: 274556 - DNA, 1012 bp, Homo Sapiens; identical to SEQ ID NO: 249772
  misc_feature (320)..(375): n is a, c, g, or t
  misc_feature (377)..(427): n is a, c, g, or t
  misc_feature (953)..(953): n is a, c, g, or t

SEQ ID NO: 274557 - DNA, 1073 bp, Homo Sapiens; identical to SEQ ID NO: 249773
  misc_feature (26)..(26): n is a, c, g, or t
  misc_feature (857)..(857): n is a, c, g, or t
  misc_feature (1038)..(1039): n is a, c, g, or t
  misc_feature (1061)..(1061): n is a, c, g, or t

SEQ ID NO: 274558 - DNA, 1265 bp, Homo Sapiens; identical to SEQ ID NO: 249774
  misc_feature (435)..(435): n is a, c, g, or t
  misc_feature (459)..(459): n is a, c, g, or t
  misc_feature (636)..(636): n is a, c, g, or t
  misc_feature (699)..(754): n is a, c, g, or t
  misc_feature (756)..(806): n is a, c, g, or t
  misc_feature (1144)..(1144): n is a, c, g, or t
  misc_feature (1193)..(1193): n is a, c, g, or t
  misc_feature (1219)..(1219): n is a, c, g, or t

SEQ ID NO: 274559 - DNA, 781 bp, Homo Sapiens; identical to SEQ ID NO: 249775
  misc_feature (15)..(15): n is a, c, g, or t
  misc_feature (31)..(31): n is a, c, g, or t
  misc_feature (60)..(60): n is a, c, g, or t
  misc_feature (78)..(78): n is a, c, g, or t
  misc_feature (98)..(98): n is a, c, g, or t
  misc_feature (108)..(108): n is a, c, g, or t
  misc_feature (539)..(589): n is a, c, g, or t
  misc_feature (591)..(646): n is a, c, g, or t

SEQ ID NO: 274560 - DNA, 523 bp, Homo Sapiens; identical to SEQ ID NO: 249776
  misc_feature (365)..(379): n is a, c, g, or t

SEQ ID NO: 274561 - DNA, 468 bp, Homo Sapiens; identical to SEQ ID NO: 249777
  misc_feature (33)..(33): n is a, c, g, or t
  misc_feature (67)..(67): n is a, c, g, or t
  misc_feature (89)..(89): n is a, c, g, or t
  misc_feature (113)..(113): n is a, c, g, or t
  misc_feature (404)..(404): n is a, c, g, or t

SEQ ID NO: 274562 - DNA, 847 bp, Homo Sapiens; identical to SEQ ID NO: 249778
  misc_feature (32)..(32): n is a, c, g, or t
  misc_feature (39)..(39): n is a, c, g, or t

SEQ ID NO: 274563 - DNA, 405 bp, Homo Sapiens; identical to SEQ ID NO: 249779
  misc_feature (321)..(321): n is a, c, g, or t
  misc_feature (347)..(347): n is a, c, g, or t
  misc_feature (392)..(392): n is a, c, g, or t

SEQ ID NO: 274564 - DNA, 2829 bp, Homo Sapiens; identical to SEQ ID NO: 249782

SEQ ID NO: 274565 - DNA, 1047 bp, Homo Sapiens; identical to SEQ ID NO: 249783

SEQ ID NO: 274566 - DNA, 1006 bp, Homo Sapiens; identical to SEQ ID NO: 249784

SEQ ID NO: 274567 - DNA, 1049 bp, Homo Sapiens; identical to SEQ ID NO: 249785

SEQ ID NO: 274568 - DNA, 515 bp, Homo Sapiens; identical to SEQ ID NO: 249786
  misc_feature (55)..(55): n is a, c, g, or t

SEQ ID NO: 274569 - DNA, 538 bp, Homo Sapiens; identical to SEQ ID NO: 249787
  misc_feature (67)..(104): n is a, c, g, or t
  misc_feature (304)..(304): n is a, c, g, or t
  misc_feature (307)..(307): n is a, c, g, or t
  misc_feature (505)..(505): n is a, c, g, or t

SEQ ID NO: 274570 - DNA, 579 bp, Homo Sapiens; identical to SEQ ID NO: 249789

SEQ ID NO: 274571 - DNA, 705 bp, Homo Sapiens; identical to SEQ ID NO: 249790

SEQ ID NO: 274572 - DNA, 1348 bp, Homo Sapiens; identical to SEQ ID NO: 249791
  misc_feature (1264)..(1265): n is a, c, g, or t
  misc_feature (1294)..(1294): n is a, c, g, or t
  misc_feature (1296)..(1296): n is a, c, g, or t
  misc_feature (1298)..(1298): n is a, c, g, or t
  misc_feature (1304)..(1304): n is a, c, g, or t
  misc_feature (1316)..(1317): n is a, c, g, or t
  misc_feature (1319)..(1320): n is a, c, g, or t

SEQ ID NO: 274573 - DNA, 1028 bp, Homo Sapiens; identical to SEQ ID NO: 249793

SEQ ID NO: 274574 - DNA, 893 bp, Homo Sapiens; identical to SEQ ID NO: 249794

SEQ ID NO: 274575 - DNA, 2153 bp, Homo Sapiens; identical to SEQ ID NO: 249795
  misc_feature (732)..(751): n is a, c, g, or t
  misc_feature (1815)..(1973): n is a, c, g, or t
  misc_feature (1976)..(1976): n is a, c, g, or t
  misc_feature (1979)..(1981): n is a, c, g, or t
  misc_feature (1983)..(1988): n is a, c, g, or t
  misc_feature (1997)..(2013): n is a, c, g, or t

SEQ ID NO: 274576 - DNA, 462 bp, Homo Sapiens; identical to SEQ ID NO: 249796
  misc_feature (149)..(149): n is a, c, g, or t
  misc_feature (437)..(437): n is a, c, g, or t

SEQ ID NO: 274577 - DNA, 498 bp, Homo Sapiens; identical to SEQ ID NO: 249797
  misc_feature (11)..(11): n is a, c, g, or t
  misc_feature (30)..(30): n is a, c, g, or t
  misc_feature (32)..(32): n is a, c, g, or t
  misc_feature (42)..(42): n is a, c, g, or t
  misc_feature (80)..(80): n is a, c, g, or t
  misc_feature (421)..(421): n is a, c, g, or t

SEQ ID NO: 274578 - DNA, 1178 bp, Homo Sapiens; identical to SEQ ID NO: 249799

SEQ ID NO: 274579 - DNA, 984 bp, Homo Sapiens; identical to SEQ ID NO: 249800

SEQ ID NO: 274580 - DNA, 1057 bp, Homo Sapiens; identical to SEQ ID NO: 249801
  misc_feature (468)..(492): n is a, c, g, or t
  misc_feature (495)..(497): n is a, c, g, or t
  misc_feature (500)..(500): n is a, c, g, or t
  misc_feature (502)..(502): n is a, c, g, or t
  misc_feature (506)..(511): n is a, c, g, or t
  misc_feature (513)..(517): n is a, c, g, or t
  misc_feature (521)..(521): n is a, c, g, or t
  misc_feature (528)..(864): n is a, c, g, or t
  misc_feature (882)..(882): n is a, c, g, or t
  misc_feature (959)..(959): n is a, c, g, or t
  misc_feature (992)..(992): n is a, c, g, or t
  misc_feature (1002)..(1002): n is a, c, g, or t
  misc_feature (1012)..(1012): n is a, c, g, or t
  misc_feature (1015)..(1015): n is a, c, g, or t
  misc_feature (1021)..(1021): n is a, c, g, or t

SEQ ID NO: 274581 - DNA, 359 bp, Homo Sapiens; identical to SEQ ID NO: 249802

SEQ ID NO: 274582 - DNA, 533 bp, Homo Sapiens; identical to SEQ ID NO: 249803

SEQ ID NO: 274583 - DNA, 1014 bp, Homo Sapiens; identical to SEQ ID NO: 249804
  misc_feature (889)..(889): n is a, c, g, or t

SEQ ID NO: 274584 - DNA, 456 bp, Homo Sapiens; identical to SEQ ID NO: 249805
  misc_feature (432)..(432): n is a, c, g, or t
  misc_feature (439)..(439): n is a, c, g, or t

SEQ ID NO: 274585 - DNA, 438 bp, Homo Sapiens; identical to SEQ ID NO: 249806
  misc_feature (13)..(13): n is a, c, g, or t
  misc_feature (428)..(428): n is a, c, g, or t

SEQ ID NO: 274586 - DNA, 630 bp, Homo Sapiens; identical to SEQ ID NO: 249811
  misc_feature (426)..(426): n is a, c, g, or t
  misc_feature (593)..(593): n is a, c, g, or t

SEQ ID NO: 274587 - DNA, 1217 bp, Homo Sapiens; identical to SEQ ID NO: 249812
  misc_feature (1113)..(1116): n is a, c, g, or t
  misc_feature (1119)..(1119): n is a, c, g, or t
  misc_feature (1121)..(1122): n is a, c, g, or t

SEQ ID NO: 274588 - DNA, 1773 bp, Homo Sapiens; identical to SEQ ID NO: 249813
  misc_feature (17)..(17): n is a, c, g, or t
  misc_feature (27)..(27): n is a, c, g, or t
  misc_feature (85)..(239): n is a, c, g, or t

SEQ ID NO: 274589 - DNA, 1260 bp, Homo Sapiens; identical to SEQ ID NO: 249814

SEQ ID NO: 274590 - DNA, 1659 bp, Homo Sapiens; identical to SEQ ID NO: 249815
  misc_feature (228)..(229): n is a, c, g, or t

SEQ ID NO: 274591 - DNA, 964 bp, Homo Sapiens; identical to SEQ ID NO: 249816
  misc_feature (550)..(592): n is a, c, g, or t

SEQ ID NO: 274592 - DNA, 695 bp, Homo Sapiens; identical to SEQ ID NO: 249817
  misc_feature (96)..(105): n is a, c, g, or t

SEQ ID NO: 274593 - DNA, 462 bp, Homo Sapiens; identical to SEQ ID NO: 249818

SEQ ID NO: 274594 - DNA, 522 bp, Homo Sapiens; identical to SEQ ID NO: 249819

SEQ ID NO: 274595 - DNA, 553 bp, Homo Sapiens; identical to SEQ ID NO: 249820
  misc_feature (12)..(12): n is a, c, g, or t
  misc_feature (25)..(25): n is a, c, g, or t
  misc_feature (44)..(44): n is a, c, g, or t
  misc_feature (100)..(100): n is a, c, g, or t
  misc_feature (124)..(124): n is a, c, g, or t
  misc_feature (163)..(163): n is a, c, g, or t

SEQ ID NO: 274596 - DNA, 430 bp, Homo Sapiens; identical to SEQ ID NO: 249821
  misc_feature (23)..(23): n is a, c, g, or t
  misc_feature (35)..(35): n is a, c, g, or t

SEQ ID NO: 274597 - DNA, 487 bp, Homo Sapiens; identical to SEQ ID NO: 249822
  misc_feature (40)..(40): n is a, c, g, or t
  misc_feature (72)..(72): n is a, c, g, or t
  misc_feature (384)..(384): n is a, c, g, or t

SEQ ID NO: 274598 - DNA, 1023 bp, Homo Sapiens; identical to SEQ ID NO: 249823

SEQ ID NO: 274599 - DNA, 502 bp, Homo Sapiens; identical to SEQ ID NO: 249824

SEQ ID NO: 274600 - DNA, 622 bp, Homo Sapiens; identical to SEQ ID NO: 249825
  misc_feature (43)..(43): n is a, c, g, or t
  misc_feature (57)..(57): n is a, c, g, or t

SEQ ID NO: 274601 - DNA, 373 bp, Homo Sapiens; identical to SEQ ID NO: 249826

SEQ ID NO: 274602 - DNA, 711 bp, Homo Sapiens; identical to SEQ ID NO: 249827
  misc_feature (614)..(614): n is a, c, g, or t

SEQ ID NO: 274603 - DNA, 618 bp, Homo Sapiens; identical to SEQ ID NO: 249828
  misc_feature (48)..(66): n is a, c, g, or t

SEQ ID NO: 274604 - DNA, 725 bp, Homo Sapiens; identical to SEQ ID NO: 249829
  misc_feature (17)..(17): n is a, c, g, or t
  misc_feature (35)..(35): n is a, c, g, or t
  misc_feature (432)..(450): n is a, c, g, or t
  misc_feature (526)..(530): n is a, c, g, or t
  misc_feature (534)..(546): n is a, c, g, or t
  misc_feature (550)..(550): n is a, c, g, or t
  misc_feature (552)..(552): n is a, c, g, or t
  misc_feature (555)..(559): n is a, c, g, or t
  misc_feature (633)..(633): n is a, c, g, or t

SEQ ID NO: 274605 - DNA, 463 bp, Homo Sapiens; identical to SEQ ID NO: 249830
  misc_feature (426)..(426): n is a, c, g, or t

SEQ ID NO: 274606 - DNA, 289 bp, Homo Sapiens; identical to SEQ ID NO: 249831
  misc_feature (29)..(29): n is a, c, g, or t
  misc_feature (37)..(37): n is a, c, g, or t
  misc_feature (194)..(212): n is a, c, g, or t

SEQ ID NO: 274607 - DNA, 769 bp, Homo Sapiens; identical to SEQ ID NO: 249834

SEQ ID NO: 274608 - DNA, 824 bp, Homo Sapiens; identical to SEQ ID NO: 249835
  misc_feature (309)..(365): n is a, c, g, or t
  misc_feature (651)..(651): n is a, c, g, or t

SEQ ID NO: 274609 - DNA, 688 bp, Homo Sapiens; identical to SEQ ID NO: 249837

SEQ ID NO: 274610 - DNA, 1009 bp, Homo Sapiens; identical to SEQ ID NO: 249838

SEQ ID NO: 274611 - DNA, 1814 bp, Homo Sapiens; identical to SEQ ID NO: 249839

SEQ ID NO: 274612 - DNA, 2287 bp, Homo Sapiens; identical to SEQ ID NO: 249840

SEQ ID NO: 274613 - DNA, 419 bp, Homo Sapiens; identical to SEQ ID NO: 249841
  misc_feature (16)..(16): n is a, c, g, or t
  misc_feature (30)..(30): n is a, c, g, or t
  misc_feature (53)..(53): n is a, c, g, or t

SEQ ID NO: 274614 - DNA, 419 bp, Homo Sapiens; identical to SEQ ID NO: 249842
  misc_feature (17)..(17): n is a, c, g, or t
  misc_feature (43)..(43): n is a, c, g, or t

SEQ ID NO: 274615 - DNA, 232 bp, Homo Sapiens; identical to SEQ ID NO: 249843

SEQ ID NO: 274616 - DNA, 1702 bp, Homo Sapiens; identical to SEQ ID NO: 249844
  misc_feature (103)..(167): n is a, c, g, or t

SEQ ID NO: 274617 - DNA, 1043 bp, Homo Sapiens; identical to SEQ ID NO: 70515

SEQ ID NO: 274618 - DNA, 797 bp, Homo Sapiens; identical to SEQ ID NO: 249846

SEQ ID NO: 274619 - DNA, 560 bp, Homo Sapiens; identical to SEQ ID NO: 249849

SEQ ID NO: 274620 - DNA, 478 bp, Homo Sapiens; identical to SEQ ID NO: 249850

SEQ ID NO: 274621 - DNA, 451 bp, Homo Sapiens; identical to SEQ ID NO: 249851

SEQ ID NO: 274622 - DNA, 463 bp, Homo Sapiens; identical to SEQ ID NO: 249852

SEQ ID NO: 274623 - DNA, 620 bp, Homo Sapiens; identical to SEQ ID NO: 249853

SEQ ID NO: 274624 - DNA, 548 bp, Homo Sapiens; identical to SEQ ID NO: 249854

SEQ ID NO: 274625 - DNA, 438 bp, Homo Sapiens; identical to SEQ ID NO: 249855

SEQ ID NO: 274626 - DNA, 768 bp, Homo Sapiens; identical to SEQ ID NO: 249856
  misc_feature (567)..(567): n is a, c, g, or t
  misc_feature (570)..(570): n is a, c, g, or t
  misc_feature (574)..(585): n is a, c, g, or t
  misc_feature (628)..(644): n is a, c, g, or t
  misc_feature (646)..(654): n is a, c, g, or t
  misc_feature (662)..(662): n is a, c, g, or t

SEQ ID NO: 274627 - DNA, 810 bp, Homo Sapiens; identical to SEQ ID NO: 249857

SEQ ID NO: 274628 - DNA, 842 bp, Homo Sapiens; identical to SEQ ID NO: 249858
  misc_feature (672)..(700): n is a, c, g, or t
  misc_feature (782)..(782): n is a, c, g, or t
  misc_feature (806)..(806): n is a, c, g, or t

SEQ ID NO: 274629 - DNA, 856 bp, Homo Sapiens; identical to SEQ ID NO: 249859
  misc_feature (315)..(315): n is a, c, g, or t

SEQ ID NO: 274630 - DNA, 794 bp, Homo Sapiens; identical to SEQ ID NO: 249860

SEQ ID NO: 274631 - DNA, 1397 bp, Homo Sapiens; identical to SEQ ID NO: 249861
  misc_feature (21)..(21): n is a, c, g, or t
  misc_feature (135)..(135): n is a, c, g, or t
  misc_feature (356)..(501): n is a, c, g, or t

SEQ ID NO: 274632 - DNA, 624 bp, Homo Sapiens; identical to SEQ ID NO: 249864
  misc_feature (88)..(88): n is a, c, g, or t

SEQ ID NO: 274633 - DNA, 2540 bp, Homo Sapiens; identical to SEQ ID NO: 249865
  misc_feature (1928)..(1932): n is a, c, g, or t
  misc_feature (1935)..(1970): n is a, c, g, or t
  misc_feature (1995)..(2029): n is a, c, g, or t
  misc_feature (2075)..(2090): n is a, c, g, or t
  misc_feature (2131)..(2146): n is a, c, g, or t
  misc_feature (2166)..(2175): n is a, c, g, or t
  misc_feature (2205)..(2262): n is a, c, g, or t
  misc_feature (2268)..(2330): n is a, c, g, or t
  misc_feature (2346)..(2359): n is a, c, g, or t

SEQ ID NO: 274634 - DNA, 955 bp, Homo Sapiens; identical to SEQ ID NO: 249866
  misc_feature (902)..(902): n is a, c, g, or t

SEQ ID NO: 274635 - DNA, 599 bp, Homo Sapiens; identical to SEQ ID NO: 249867
  misc_feature (425)..(425): n is a, c, g, or t
  misc_feature (526)..(526): n is a, c, g, or t
  misc_feature (547)..(547): n is a, c, g, or t
  misc_feature (557)..(557): n is a, c, g, or t
  misc_feature (576)..(576): n is a, c, g, or t

SEQ ID NO: 274636 - DNA, 1432 bp, Homo Sapiens; identical to SEQ ID NO: 249869
  misc_feature (154)..(155): n is a, c, g, or t
  misc_feature (380)..(380): n is a, c, g, or t
  misc_feature (487)..(487): n is a, c, g, or t
  misc_feature (489)..(489): n is a, c, g, or t

SEQ ID NO: 274637 - DNA, 483 bp, Homo Sapiens; identical to SEQ ID NO: 249870

SEQ ID NO: 274638 - DNA, 982 bp, Homo Sapiens; identical to SEQ ID NO: 249871
  misc_feature (789)..(792): n is a, c, g, or t
  misc_feature (794)..(794): n is a, c, g, or t
  misc_feature (796)..(797): n is a, c, g, or t
  misc_feature (801)..(801): n is a, c, g, or t
  misc_feature (803)..(803): n is a, c, g, or t
  misc_feature (809)..(810): n is a, c, g, or t
  misc_feature (813)..(813): n is a, c, g, or t
  misc_feature (816)..(816): n is a, c, g, or t
  misc_feature (818)..(819): n is a, c, g, or t
  misc_feature (828)..(828): n is a, c, g, or t
  misc_feature (831)..(831): n is a, c, g, or t
  misc_feature (835)..(835): n is a, c, g, or t
  misc_feature (842)..(842): n is a, c, g, or t
  misc_feature (857)..(857): n is a, c, g, or t
  misc_feature (870)..(870): n is a, c, g, or t
  misc_feature (873)..(873): n is a, c, g, or t
  misc_feature (875)..(875): n is a, c, g, or t
  misc_feature (884)..(885): n is a, c, g, or t
  misc_feature (888)..(890): n is a, c, g, or t
  misc_feature (897)..(903): n is a, c, g, or t
  misc_feature (906)..(906): n is a, c, g, or t
  misc_feature (908)..(908): n is a, c, g, or t
  misc_feature (912)..(912): n is a, c, g, or t
  misc_feature (931)..(931): n is a, c, g, or t
  misc_feature (937)..(938): n is a, c, g, or t
  misc_feature (961)..(961): n is a, c, g, or t

SEQ ID NO: 274639 - DNA, 1298 bp, Homo Sapiens; identical to SEQ ID NO: 249872
  misc_feature (1209)..(1209): n is a, c, g, or t
  misc_feature (1285)..(1285): n is a, c, g, or t

SEQ ID NO: 274640 - DNA, 867 bp, Homo Sapiens; identical to SEQ ID NO: 249876
  misc_feature (571)..(617): n is a, c, g, or t
  misc_feature (619)..(640): n is a, c, g, or t
  misc_feature (642)..(642): n is a, c, g, or t
  misc_feature (644)..(649): n is a, c, g, or t
  misc_feature (651)..(699): n is a, c, g, or t
  misc_feature (701)..(716): n is a, c, g, or t
  misc_feature (718)..(719): n is a, c, g, or t

SEQ ID NO: 274641 - DNA, 384 bp, Homo Sapiens; identical to SEQ ID NO: 249877
  misc_feature (26)..(26): n is a, c, g, or t

SEQ ID NO: 274642 - DNA, 879 bp, Homo Sapiens; identical to SEQ ID NO: 249878

SEQ ID NO: 274643 - DNA, 483 bp, Homo Sapiens; identical to SEQ ID NO: 249879
  misc_feature (56)..(56): n is a, c, g, or t
  misc_feature (68)..(68): n is a, c, g, or t

SEQ ID NO: 274644 - DNA, 1795 bp, Homo Sapiens; identical to SEQ ID NO: 249880
  misc_feature (1367)..(1648): n is a, c, g, or t
  misc_feature (1653)..(1691): n is a, c, g, or t
  misc_feature (1714)..(1714): n is a, c, g, or t
  misc_feature (1716)..(1716): n is a, c, g, or t

SEQ ID NO: 274645 - DNA, 926 bp, Homo Sapiens; identical to SEQ ID NO: 249881

SEQ ID NO: 274646 - DNA, 1122 bp, Homo Sapiens; identical to SEQ ID NO: 249885

SEQ ID NO: 274647 - DNA, 360 bp, Homo Sapiens; identical to SEQ ID NO: 249886
  misc_feature (340)..(340): n is a, c, g, or t

SEQ ID NO: 274648 - DNA, 356 bp, Homo Sapiens; identical to SEQ ID NO: 249887
  misc_feature (19)..(19): n is a, c, g, or t
  misc_feature (74)..(74): n is a, c, g, or t

SEQ ID NO: 274649 - DNA, 2809 bp, Homo Sapiens; identical to SEQ ID NO: 249891
  misc_feature (1295)..(1295): n is a, c, g, or t
  misc_feature (1525)..(1525): n is a, c, g, or t

SEQ ID NO: 274650 - DNA, 461 bp, Homo Sapiens; identical to SEQ ID NO: 249892
  misc_feature (22)..(22): n is a, c, g, or t
  misc_feature (255)..(255): n is a, c, g, or t

SEQ ID NO: 274651 - DNA, 1343 bp, Homo Sapiens; identical to SEQ ID NO: 249894

SEQ ID NO: 274652 - DNA, 486 bp, Homo Sapiens; identical to SEQ ID NO: 249895
  misc_feature (12)..(12): n is a, c, g, or t
  misc_feature (381)..(381): n is a, c, g, or t
  misc_feature (387)..(387): n is a, c, g, or t
  misc_feature (418)..(418): n is a, c, g, or t
  misc_feature (430)..(430): n is a, c, g, or t
  misc_feature (461)..(461): n is a, c, g, or t
  misc_feature (473)..(473): n is a, c, g, or t

SEQ ID NO: 274653 - DNA, 2042 bp, Homo Sapiens; identical to SEQ ID NO: 249897

SEQ ID NO: 274654 - DNA, 344 bp, Homo Sapiens; identical to SEQ ID NO: 249898

SEQ ID NO: 274655 - DNA, 648 bp, Homo Sapiens; identical to SEQ ID NO: 249899
  misc_feature (18)..(18): n is a, c, g, or t

SEQ ID NO: 274656 - DNA, 358 bp, Homo Sapiens; identical to SEQ ID NO: 249900

SEQ ID NO: 274657 - DNA, 1036 bp, Homo Sapiens; identical to SEQ ID NO: 249901
  misc_feature (11)..(11): n is a, c, g, or t
  misc_feature (19)..(19): n is a, c, g, or t
  misc_feature (22)..(22): n is a, c, g, or t
  misc_feature (29)..(29): n is a, c, g, or t
  misc_feature (34)..(35): n is a, c, g, or t
  misc_feature (41)..(41): n is a, c, g, or t
  misc_feature (55)..(55): n is a, c, g, or t
  misc_feature (64)..(64): n is a, c, g, or t
  misc_feature (77)..(77): n is a, c, g, or t
  misc_feature (81)..(82): n is a, c, g, or t
  misc_feature (140)..(141): n is a, c, g, or t

SEQ ID NO: 274658 - DNA, 511 bp, Homo Sapiens; identical to SEQ ID NO: 249902
  misc_feature (29)..(29): n is a, c, g, or t

SEQ ID NO: 274659 - DNA, 1001 bp, Homo Sapiens; identical to SEQ ID NO: 249906

SEQ ID NO: 274660 - DNA, 830 bp, Homo Sapiens; identical to SEQ ID NO: 249907

SEQ ID NO: 274661 - DNA, 1487 bp, Homo Sapiens; identical to SEQ ID NO: 249908
  misc_feature (31)..(31): n is a, c, g, or t
  misc_feature (68)..(68): n is a, c, g, or t
  misc_feature (70)..(70): n is a, c, g, or t
  misc_feature (77)..(77): n is a, c, g, or t
  misc_feature (92)..(92): n is a, c, g, or t
  misc_feature (201)..(201): n is a, c, g, or t
  misc_feature (1007)..(1093): n is a, c, g, or t
  misc_feature (1103)..(1103): n is a, c, g, or t

SEQ ID NO: 274662 - DNA, 480 bp, Homo Sapiens; identical to SEQ ID NO: 249909

SEQ ID NO: 274663 - DNA, 988 bp, Homo Sapiens; identical to SEQ ID NO: 249910
  misc_feature (77)..(100): n is a, c, g, or t
  misc_feature (638)..(676): n is a, c, g, or t

SEQ ID NO: 274664 - DNA, 586 bp, Homo Sapiens; identical to SEQ ID NO: 249911

SEQ ID NO: 274665 - DNA, 1696 bp, Homo Sapiens; identical to SEQ ID NO: 249912
  misc_feature (143)..(143): n is a, c, g, or t
  misc_feature (156)..(156): n is a, c, g, or t
  misc_feature (160)..(162): n is a, c, g, or t
  misc_feature (165)..(165): n is a, c, g, or t
  misc_feature (177)..(177): n is a, c, g, or t
  misc_feature (179)..(179): n is a, c, g, or t
  misc_feature (181)..(182): n is a, c, g, or t
  misc_feature (228)..(228): n is a, c, g, or t
  misc_feature (251)..(251): n is a, c, g, or t
  misc_feature (257)..(257): n is a, c, g, or t
  misc_feature (260)..(260): n is a, c, g, or t
  misc_feature (284)..(322): n is a, c, g, or t
  misc_feature (325)..(325): n is a, c, g, or t
  misc_feature (327)..(327): n is a, c, g, or t
  misc_feature (330)..(333): n is a, c, g, or t
  misc_feature (353)..(353): n is a, c, g, or t
  misc_feature (362)..(362): n is a, c, g, or t
  misc_feature (376)..(376): n is a, c, g, or t
  misc_feature (393)..(393): n is a, c, g, or t
  misc_feature (432)..(432): n is a, c, g, or t
  misc_feature (441)..(441): n is a, c, g, or t
  misc_feature (446)..(446): n is a, c, g, or t
  misc_feature (450)..(451): n is a, c, g, or t
  misc_feature (476)..(476): n is a, c, g, or t
  misc_feature (500)..(502): n is a, c, g, or t
  misc_feature (504)..(504): n is a, c, g, or t
  misc_feature (529)..(530): n is a, c, g, or t
  misc_feature (561)..(561): n is a, c, g, or t
  misc_feature (565)..(566): n is a, c, g, or t
  misc_feature (576)..(576): n is a, c, g, or t
  misc_feature (578)..(578): n is a, c, g, or t
  misc_feature (861)..(884): n is a, c, g, or t
  misc_feature (1448)..(1449): n is a, c, g, or t

SEQ ID NO: 274666 - DNA, 1717 bp, Homo Sapiens; identical to SEQ ID NO: 249914
  misc_feature (36)..(36): n is a, c, g, or t
  misc_feature (41)..(41): n is a, c, g, or t
  misc_feature (1210)..(1210): n is a, c, g, or t
  misc_feature (1259)..(1271): n is a, c, g, or t

SEQ ID NO: 274667 - DNA, 1001 bp, Homo Sapiens; identical to SEQ ID NO: 249915
  misc_feature (150)..(159): n is a, c, g, or t

SEQ ID NO: 274668 - DNA, 676 bp, Homo Sapiens; identical to SEQ ID NO: 249921
  misc_feature (430)..(450): n is a, c, g, or t

SEQ ID NO: 274669 - DNA, 751 bp, Homo Sapiens; identical to SEQ ID NO: 249922
  misc_feature (480)..(501): n is a, c, g, or t

SEQ ID NO: 274670 - DNA, 456 bp, Homo Sapiens; identical to SEQ ID NO: 249923
  misc_feature (262)..(262): n is a, c, g, or t

SEQ ID NO: 274671 - DNA, 663 bp, Homo Sapiens; identical to SEQ ID NO: 249927

SEQ ID NO: 274672 - DNA, 377 bp, Homo Sapiens; identical to SEQ ID NO: 249928

SEQ ID NO: 274673 - DNA, 999 bp, Homo Sapiens; identical to SEQ ID NO: 249929
  misc_feature (890)..(928): n is a, c, g, or t

SEQ ID NO: 274674 - DNA, 1697 bp, Homo Sapiens; identical to SEQ ID NO: 249930

SEQ ID NO: 274675 - DNA, 272 bp, Homo Sapiens; identical to SEQ ID NO: 249931

SEQ ID NO: 274676 - DNA, 784 bp, Homo Sapiens; identical to SEQ ID NO: 249934

SEQ ID NO: 274677 - DNA, 991 bp, Homo Sapiens; identical to SEQ ID NO: 249935
  misc_feature (145)..(145): n is a, c, g, or t
  misc_feature (617)..(617): n is a, c, g, or t
  misc_feature (634)..(634): n is a, c, g, or t
  misc_feature (845)..(845): n is a, c, g, or t
  misc_feature (847)..(847): n is a, c, g, or t
  misc_feature (871)..(871): n is a, c, g, or t
  misc_feature (881)..(881): n is a, c, g, or t
  misc_feature (922)..(922): n is a, c, g, or t
  misc_feature (925)..(925): n is a, c, g, or t
  misc_feature (944)..(946): n is a, c, g, or t
  misc_feature (948)..(949): n is a, c, g, or t
  misc_feature (951)..(951): n is a, c, g, or t
  misc_feature (969)..(969): n is a, c, g, or t
  misc_feature (971)..(971): n is a, c, g, or t
  misc_feature (980)..(980): n is a, c, g, or t
  misc_feature (982)..(982): n is a, c, g, or t

SEQ ID NO: 274678 - DNA, 411 bp, Homo Sapiens; identical to SEQ ID NO: 249939
  misc_feature (305)..(366): n is a, c, g, or t

SEQ ID NO: 274679 - DNA, 1011 bp, Homo Sapiens; identical to SEQ ID NO: 249940
  misc_feature (826)..(844): n is a, c, g, or t
  misc_feature (884)..(884): n is a, c, g, or t
  misc_feature (904)..(904): n is a, c, g, or t
  misc_feature (978)..(978): n is a, c, g, or t

SEQ ID NO: 274680 - DNA, 630 bp, Homo Sapiens; identical to SEQ ID NO: 249941
  misc_feature (70)..(104): n is a, c, g, or t

SEQ ID NO: 274681 - DNA, 937 bp, Homo Sapiens; identical to SEQ ID NO: 249942
  misc_feature (841)..(857): n is a, c, g, or t

SEQ ID NO: 274682 - DNA, 573 bp, Homo Sapiens; identical to SEQ ID NO: 249943
  misc_feature (548)..(548): n is a, c, g, or t

SEQ ID NO: 274683 - DNA, 981 bp, Homo Sapiens; identical to SEQ ID NO: 249944
  misc_feature (562)..(591): n is a, c, g, or t
  misc_feature (593)..(606): n is a, c, g, or t

SEQ ID NO: 274684 - DNA, 1378 bp, Homo Sapiens; identical to SEQ ID NO: 249947

SEQ ID NO: 274685 - DNA, 673 bp, Homo Sapiens; identical to SEQ ID NO: 249948

SEQ ID NO: 274686 - DNA, 1436 bp, Homo Sapiens; identical to SEQ ID NO: 249949

SEQ ID NO: 274687 - DNA, 974 bp, Homo Sapiens; identical to SEQ ID NO: 249950

SEQ ID NO: 274688 - DNA, 630 bp, Homo Sapiens; identical to SEQ ID NO: 249951
  misc_feature (127)..(127): n is a, c, g, or t
  misc_feature (241)..(241): n is a, c, g, or t
  misc_feature (252)..(252): n is a, c, g, or t
  misc_feature (264)..(264): n is a, c, g, or t

SEQ ID NO: 274689 - DNA, 662 bp, Homo Sapiens; identical to SEQ ID NO: 249952

SEQ ID NO: 274690 - DNA, 384 bp, Homo Sapiens; identical to SEQ ID NO: 249953

SEQ ID NO: 274691 - DNA, 1153 bp, Homo Sapiens; identical to SEQ ID NO: 249954
  misc_feature (72)..(72): n is a, c, g, or t

SEQ ID NO: 274692 - DNA, 595 bp, Homo Sapiens; identical to SEQ ID NO: 249955
  misc_feature (101)..(101): n is a, c, g, or t
  misc_feature (120)..(120): n is a, c, g, or t
  misc_feature (149)..(149): n is a, c, g, or t

SEQ ID NO: 274693 - DNA, 687 bp, Homo Sapiens; identical to SEQ ID NO: 249956

SEQ ID NO: 274694 - DNA, 584 bp, Homo Sapiens; identical to SEQ ID NO: 249957

SEQ ID NO: 274695 - DNA, 2233 bp, Homo Sapiens; identical to SEQ ID NO: 249960

SEQ ID NO: 274696 - DNA, 727 bp, Homo Sapiens; identical to SEQ ID NO: 249961

SEQ ID NO: 274697 - DNA, 651 bp, Homo Sapiens; identical to SEQ ID NO: 249962

SEQ ID NO: 274698 - DNA, 1139 bp, Homo Sapiens; identical to SEQ ID NO: 249963
  misc_feature (393)..(419): n is a, c, g, or t

SEQ ID NO: 274699 - DNA, 618 bp, Homo Sapiens; identical to SEQ ID NO: 249964
  misc_feature (25)..(25): n is a, c, g, or t
  misc_feature (50)..(50): n is a, c, g, or t
  misc_feature (53)..(53): n is a, c, g, or t
  misc_feature (73)..(105): n is a, c, g, or t

SEQ ID NO: 274700 - DNA, 410 bp, Homo Sapiens; identical to SEQ ID NO: 249965

SEQ ID NO: 274701 - DNA, 604 bp, Homo Sapiens; identical to SEQ ID NO: 249966

SEQ ID NO: 274702 - DNA, 1106 bp, Homo Sapiens; identical to SEQ ID NO: 249967
  misc_feature (199)..(230): n is a, c, g, or t

SEQ ID NO: 274703 - DNA, 626 bp, Homo Sapiens; identical to SEQ ID NO: 249968
  misc_feature (166)..(169): n is a, c, g, or t
  misc_feature (171)..(267): n is a, c, g, or t

SEQ ID NO: 274704 - DNA, 1016 bp, Homo Sapiens; identical to SEQ ID NO: 249969
  misc_feature (372)..(476): n is a, c, g, or t
  misc_feature (481)..(487): n is a, c, g, or t
  misc_feature (489)..(505): n is a, c, g, or t
  misc_feature (543)..(564): n is a, c, g, or t
  misc_feature (673)..(682): n is a, c, g, or t
  misc_feature (694)..(694): n is a, c, g, or t

SEQ ID NO: 274705 - DNA, 446 bp, Homo Sapiens; identical to SEQ ID NO: 249970
  misc_feature (147)..(164): n is a, c, g, or t
  misc_feature (171)..(172): n is a, c, g, or t
  misc_feature (174)..(175): n is a, c, g, or t
  misc_feature (312)..(312): n is a, c, g, or t

SEQ ID NO: 274706 - DNA, 631 bp, Homo Sapiens; identical to SEQ ID NO: 249971

SEQ ID NO: 274707 - DNA, 1115 bp, Homo Sapiens; identical to SEQ ID NO: 249975
  misc_feature (635)..(703): n is a, c, g, or t
  misc_feature (725)..(733): n is a, c, g, or t

SEQ ID NO: 274708 - DNA, 1017 bp, Homo Sapiens; identical to SEQ ID NO: 249976

SEQ ID NO: 274709 - DNA, 1117 bp, Homo Sapiens; identical to SEQ ID NO: 249977

SEQ ID NO: 274710 - DNA, 1197 bp, Homo Sapiens; identical to SEQ ID NO: 249978

SEQ ID NO: 274711 - DNA, 809 bp, Homo Sapiens; identical to SEQ ID NO: 249979
  misc_feature (43)..(43): n is a, c, g, or t
  misc_feature (94)..(94): n is a, c, g, or t
  misc_feature (168)..(168): n is a, c, g, or t
  misc_feature (181)..(181): n is a, c, g, or t
  misc_feature (383)..(383): n is a, c, g, or t
  misc_feature (548)..(548): n is a, c, g, or t

SEQ ID NO: 274712 - DNA, 1216 bp, Homo Sapiens; identical to SEQ ID NO: 249980

SEQ ID NO: 274713 - DNA, 832 bp, Homo Sapiens; identical to SEQ ID NO: 249981
  misc_feature (689)..(722): n is a, c, g, or t

SEQ ID NO: 274714 - DNA, 389 bp, Homo Sapiens; identical to SEQ ID NO: 249982

SEQ ID NO: 274715 - DNA, 1581 bp, Homo Sapiens; identical to SEQ ID NO: 249983

SEQ ID NO: 274716 - DNA, 1778 bp, Homo Sapiens; identical to SEQ ID NO: 249986
  misc_feature (1227)..(1227): n is a, c, g, or t
  misc_feature (1350)..(1424): n is a, c, g, or t
  misc_feature (1436)..(1554): n is a, c, g, or t
  misc_feature (1678)..(1678): n is a, c, g, or t
  misc_feature (1748)..(1748): n is a, c, g, or t

SEQ ID NO: 274717 - DNA, 428 bp, Homo Sapiens; identical to SEQ ID NO: 249987
  misc_feature (19)..(19): n is a, c, g, or t
  misc_feature (32)..(32): n is a, c, g, or t

SEQ ID NO: 274718 - DNA, 790 bp, Homo Sapiens; identical to SEQ ID NO: 170413
  misc_feature (647)..(647): n is a, c, g, or t
  misc_feature (675)..(675): n is a, c, g, or t

SEQ ID NO: 274719 - DNA, 1271 bp, Homo Sapiens; identical to SEQ ID NO: 249989

SEQ ID NO: 274720 - DNA, 1093 bp, Homo Sapiens; identical to SEQ ID NO: 249990
  misc_feature (748)..(767): n is a, c, g, or t

SEQ ID NO: 274721 - DNA, 367 bp, Homo Sapiens; identical to SEQ ID NO: 249991

SEQ ID NO: 274722 - DNA, 537 bp, Homo Sapiens; identical to SEQ ID NO: 249993

SEQ ID NO: 274723 - DNA, 1311 bp, Homo Sapiens; identical to SEQ ID NO: 249994

SEQ ID NO: 274724 - DNA, 987 bp, Homo Sapiens; identical to SEQ ID NO: 249995
  misc_feature (932)..(942): n is a, c, g, or t

SEQ ID NO: 274725 - DNA, 750 bp, Homo Sapiens; identical to SEQ ID NO: 249996

SEQ ID NO: 274726 - DNA, 588 bp, Homo Sapiens; identical to SEQ ID NO: 249997
  misc_feature (16)..(16): n is a, c, g, or t
  misc_feature (434)..(434): n is a, c, g, or t
  misc_feature (462)..(462): n is a, c, g, or t
  misc_feature (489)..(489): n is a, c, g, or t
  misc_feature (514)..(514): n is a, c, g, or t
  misc_feature (567)..(567): n is a, c, g, or t

SEQ ID NO: 274727 - DNA, 426 bp, Homo Sapiens; identical to SEQ ID NO: 250004
  misc_feature (306)..(306): n is a, c, g, or t

SEQ ID NO: 274728 - DNA, 378 bp, Homo Sapiens; identical to SEQ ID NO: 250005
  misc_feature (28)..(28): n is a, c, g, or t
  misc_feature (42)..(42): n is a, c, g, or t
  misc_feature (52)..(52): n is a, c, g, or t

SEQ ID NO: 274729 - DNA, 1259 bp, Homo Sapiens; identical to SEQ ID NO: 250007

SEQ ID NO: 274730 - DNA, 800 bp, Homo Sapiens; identical to SEQ ID NO: 250008

SEQ ID NO: 274731 - DNA, 779 bp, Homo Sapiens; identical to SEQ ID NO: 250010

SEQ ID NO: 274732 - DNA, 793 bp, Homo Sapiens; identical to SEQ ID NO: 250011
  misc_feature (732)..(732): n is a, c, g, or t

SEQ ID NO: 274733 - DNA, 480 bp, Homo Sapiens; identical to SEQ ID NO: 250012
  misc_feature (408)..(408): n is a, c, g, or t
  misc_feature (432)..(432): n is a, c, g, or t
  misc_feature (438)..(438): n is a, c, g, or t
  misc_feature (444)..(444): n is a, c, g, or t
  misc_feature (457)..(457): n is a, c, g, or t

SEQ ID NO: 274734 - DNA, 847 bp, Homo Sapiens; identical to SEQ ID NO: 250015
  misc_feature (631)..(655): n is a, c, g, or t

SEQ ID NO: 274735 - DNA, 335 bp, Homo Sapiens; identical to SEQ ID NO: 250016
  misc_feature (286)..(286): n is a, c, g, or t
  misc_feature (289)..(289): n is a, c, g, or t

SEQ ID NO: 274736 - DNA, 668 bp, Homo Sapiens; identical to SEQ ID NO: 250018
  misc_feature (52)..(52): n is a, c, g, or t

SEQ ID NO: 274737 - DNA, 346 bp, Homo Sapiens; identical to SEQ ID NO: 250019
  misc_feature (291)..(300): n is a, c, g, or t

SEQ ID NO: 274738 - DNA, 748 bp, Homo Sapiens; identical to SEQ ID NO: 250020
  misc_feature (204)..(204): n is a, c, g, or t

SEQ ID NO: 274739 - DNA, 1433 bp, Homo Sapiens; identical to SEQ ID NO: 250021
  misc_feature (21)..(21): n is a, c, g, or t
  misc_feature (23)..(23): n is a, c, g, or t
  misc_feature (82)..(107): n is a, c, g, or t
  misc_feature (121)..(186): n is a, c, g, or t
  misc_feature (260)..(373): n is a, c, g, or t
  misc_feature (1008)..(1008): n is a, c, g, or t

SEQ ID NO: 274740 - DNA, 721 bp, Homo Sapiens; identical to SEQ ID NO: 250022
  misc_feature (222)..(508): n is a, c, g, or t

SEQ ID NO: 274741 - DNA, 657 bp, Homo Sapiens; identical to SEQ ID NO: 250023
  misc_feature (434)..(434): n is a, c, g, or t
  misc_feature (462)..(462): n is a, c, g, or t
  misc_feature (500)..(500): n is a, c, g, or t
  misc_feature (511)..(512): n is a, c, g, or t
  misc_feature (525)..(525): n is a, c, g, or t
  misc_feature (566)..(566): n is a, c, g, or t
  misc_feature (605)..(605): n is a, c, g, or t
  misc_feature (629)..(629): n is a, c, g, or t

SEQ ID NO: 274742 - DNA, 1699 bp, Homo Sapiens; identical to SEQ ID NO: 250024
  misc_feature (840)..(848): n is a, c, g, or t
  misc_feature (1001)..(1016): n is a, c, g, or t
  misc_feature (1041)..(1050): n is a, c, g, or t
  misc_feature (1127)..(1136): n is a, c, g, or t
  misc_feature (1530)..(1542): n is a, c, g, or t

SEQ ID NO: 274743 - DNA, 1291 bp, Homo Sapiens; identical to SEQ ID NO: 250026
  misc_feature (79)..(87): n is a, c, g, or t

SEQ ID NO: 274744 - DNA, 836 bp, Homo Sapiens; identical to SEQ ID NO: 250027

SEQ ID NO: 274745 - DNA, 483 bp, Homo Sapiens; identical to SEQ ID NO: 250028
  misc_feature (359)..(359): n is a, c, g, or t
  misc_feature (459)..(459): n is a, c, g, or t

SEQ ID NO: 274746 - DNA, 896 bp, Homo Sapiens; identical to SEQ ID NO: 250030
  misc_feature (17)..(17): n is a, c, g, or t

SEQ ID NO: 274747 - DNA, 795 bp, Homo Sapiens; identical to SEQ ID NO: 250031
  misc_feature (656)..(656): n is a, c, g, or t
  misc_feature (684)..(684): n is a, c, g, or t

SEQ ID NO: 274748 - DNA, 895 bp, Homo Sapiens; identical to SEQ ID NO: 250032

SEQ ID NO: 274749 - DNA, 402 bp, Homo Sapiens; identical to SEQ ID NO: 250033

SEQ ID NO: 274750 - DNA, 730 bp, Homo Sapiens; identical to SEQ ID NO: 250036

SEQ ID NO: 274751 - DNA, 927 bp, Homo Sapiens; identical to SEQ ID NO: 250037
  misc_feature (220)..(220): n is a, c, g, or t
  misc_feature (502)..(679): n is a, c, g, or t

SEQ ID NO: 274752 - DNA, 467 bp, Homo Sapiens; identical to SEQ ID NO: 250038
  misc_feature (174)..(174): n is a, c, g, or t
  misc_feature (334)..(334): n is a, c, g, or t

SEQ ID NO: 274753 - DNA, 1387 bp, Homo Sapiens; identical to SEQ ID NO: 250039

SEQ ID NO: 274754 - DNA, 1064 bp, Homo Sapiens; identical to SEQ ID NO: 250040

SEQ ID NO: 274755 - DNA, 1212 bp, Homo Sapiens; identical to SEQ ID NO: 250041

SEQ ID NO: 274756 - DNA, 1007 bp, Homo Sapiens; identical to SEQ ID NO: 250042
  misc_feature (229)..(267): n is a, c, g, or t

SEQ ID NO: 274757 - DNA, 393 bp, Homo Sapiens; identical to SEQ ID NO: 250043
  misc_feature (319)..(319): n is a, c, g, or t
  misc_feature (331)..(331): n is a, c, g, or t
  misc_feature (340)..(340): n is a, c, g, or t
  misc_feature (377)..(377): n is a, c, g, or t

SEQ ID NO: 274758 - DNA, 418 bp, Homo Sapiens; identical to SEQ ID NO: 250044
  misc_feature (16)..(16): n is a, c, g, or t
  misc_feature (37)..(37): n is a, c, g, or t
  misc_feature (65)..(65): n is a, c, g, or t
  misc_feature (102)..(102): n is a, c, g, or t
  misc_feature (174)..(174): n is a, c, g, or t
  misc_feature (210)..(210): n is a, c, g, or t

SEQ ID NO: 274759 - DNA, 566 bp, Homo Sapiens; identical to SEQ ID NO: 250046

SEQ ID NO: 274760 - DNA, 483 bp, Homo Sapiens; identical to SEQ ID NO: 250047

SEQ ID NO: 274761 - DNA, 543 bp, Homo Sapiens; identical to SEQ ID NO: 250048
  misc_feature (60)..(60): n is a, c, g, or t

SEQ ID NO: 274762 - DNA, 362 bp, Homo Sapiens; identical to SEQ ID NO: 250052

SEQ ID NO: 274763 - DNA, 607 bp, Homo Sapiens; identical to SEQ ID NO: 250053

SEQ ID NO: 274764 - DNA, 2009 bp, Homo Sapiens; identical to SEQ ID NO: 250054

SEQ ID NO: 274765 - DNA, 729 bp, Homo Sapiens; identical to SEQ ID NO: 250055

SEQ ID NO: 274766 - DNA, 475 bp, Homo Sapiens; identical to SEQ ID NO: 250056
  misc_feature (433)..(433): n is a, c, g, or t

SEQ ID NO: 274767 - DNA, 1957 bp, Homo Sapiens; identical to SEQ ID NO: 250058

SEQ ID NO: 274768 - DNA, 1395 bp, Homo Sapiens; identical to SEQ ID NO: 250059

SEQ ID NO: 274769 - DNA, 1686 bp, Homo Sapiens; identical to SEQ ID NO: 250060
  misc_feature (7)..(7): n is a, c, g, or t

SEQ ID NO: 274770 - DNA, 988 bp, Homo Sapiens; identical to SEQ ID NO: 250061
  misc_feature (95)..(95): n is a, c, g, or t
  misc_feature (531)..(531): n is a, c, g, or t

SEQ ID NO: 274771 - DNA, 365 bp, Homo Sapiens; identical to SEQ ID NO: 250067

SEQ ID NO: 274772 - DNA, 2014 bp, Homo Sapiens; identical to SEQ ID NO: 250068
  misc_feature (1801)..(1820): n is a, c, g, or t

SEQ ID NO: 274773 - DNA, 655 bp, Homo Sapiens; identical to SEQ ID NO: 250070
  misc_feature (272)..(272): n is a, c, g, or t
  misc_feature (319)..(328): n is a, c, g, or t

SEQ ID NO: 274774 - DNA, 397 bp, Homo Sapiens; identical to SEQ ID NO: 250071

SEQ ID NO: 274775 - DNA, 846 bp, Homo Sapiens; identical to SEQ ID NO: 250074

SEQ ID NO: 274776 - DNA, 759 bp, Homo Sapiens; identical to SEQ ID NO: 250075
  misc_feature (570)..(606): n is a, c, g, or t

SEQ ID NO: 274777 - DNA, 421 bp, Homo Sapiens; identical to SEQ ID NO: 250076
  misc_feature (17)..(17): n is a, c, g, or t
  misc_feature (102)..(102): n is a, c, g, or t
  misc_feature (109)..(109): n is a, c, g, or t
  misc_feature (119)..(119): n is a, c, g, or t
  misc_feature (139)..(139): n is a, c, g, or t
  misc_feature (234)..(271): n is a, c, g, or t
  misc_feature (277)..(277): n is a, c, g, or t
  misc_feature (283)..(283): n is a, c, g, or t

SEQ ID NO: 274778 - DNA, 1295 bp, Homo Sapiens; identical to SEQ ID NO: 250077

SEQ ID NO: 274779 - DNA, 482 bp, Homo Sapiens; identical to SEQ ID NO: 250078
  misc_feature (27)..(27): n is a, c, g, or t
  misc_feature (55)..(55): n is a, c, g, or t
  misc_feature (70)..(70): n is a, c, g, or t

SEQ ID NO: 274780 - DNA, 756 bp, Homo Sapiens; identical to SEQ ID NO: 250079
  misc_feature (311)..(325): n is a, c, g, or t
  misc_feature (724)..(724): n is a, c, g, or t
  misc_feature (733)..(733): n is a, c, g, or t

SEQ ID NO: 274781 - DNA, 603 bp, Homo Sapiens; identical to SEQ ID NO: 250080

SEQ ID NO: 274782 - DNA, 475 bp, Homo Sapiens; identical to SEQ ID NO: 250081
  misc_feature (388)..(388): n is a, c, g, or t
  misc_feature (458)..(458): n is a, c, g, or t

SEQ ID NO: 274783 - DNA, 1652 bp, Homo Sapiens; identical to SEQ ID NO: 250083
  misc_feature (1400)..(1543): n is a, c, g, or t
  misc_feature (1551)..(1551): n is a, c, g, or t
  misc_feature (1582)..(1582): n is a, c, g, or t
  misc_feature (1584)..(1584): n is a, c, g, or t
  misc_feature (1588)..(1600): n is a, c, g, or t

SEQ ID NO: 274784 - DNA, 438 bp, Homo Sapiens; identical to SEQ ID NO: 250084
  misc_feature (285)..(285): n is a, c, g, or t
  misc_feature (304)..(304): n is a, c, g, or t
  misc_feature (318)..(318): n is a, c, g, or t
  misc_feature (399)..(399): n is a, c, g, or t

SEQ ID NO: 274785 - DNA, 830 bp, Homo Sapiens; identical to SEQ ID NO: 250086

SEQ ID NO: 274786 - DNA, 915 bp, Homo Sapiens; identical to SEQ ID NO: 250087

SEQ ID NO: 274787 - DNA, 448 bp, Homo Sapiens; identical to SEQ ID NO: 250088
  misc_feature (28)..(28): n is a, c, g, or t

SEQ ID NO: 274788 - DNA, 469 bp, Homo Sapiens; identical to SEQ ID NO: 250090
  misc_feature (85)..(136): n is a, c, g, or t
  misc_feature (302)..(344): n is a, c, g, or t

SEQ ID NO: 274789 - DNA, 1592 bp, Homo Sapiens; identical to SEQ ID NO: 250091
  misc_feature (374)..(374): n is a, c, g, or t
  misc_feature (447)..(447): n is a, c, g, or t
  misc_feature (735)..(735): n is a, c, g, or t
  misc_feature (900)..(912): n is a, c, g, or t

SEQ ID NO: 274790 - DNA, 649 bp, Homo Sapiens; identical to SEQ ID NO: 250092
  misc_feature (37)..(37): n is a, c, g, or t
  misc_feature (40)..(40): n is a, c, g, or t

SEQ ID NO: 274791 - DNA, 1413 bp, Homo Sapiens; identical to SEQ ID NO: 250093
  misc_feature (1182)..(1286): n is a, c, g, or t
  misc_feature (1288)..(1293): n is a, c, g, or t

SEQ ID NO: 274792 - DNA, 1036 bp, Homo Sapiens; identical to SEQ ID NO: 250094
  misc_feature (1007)..(1007): n is a, c, g, or t

SEQ ID NO: 274793 - DNA, 1110 bp, Homo Sapiens; identical to SEQ ID NO: 250095

SEQ ID NO: 274794 - DNA, 979 bp, Homo Sapiens; identical to SEQ ID NO: 250098
  misc_feature (15)..(15): n is a, c, g, or t

SEQ ID NO: 274795 - DNA, 511 bp, Homo Sapiens; identical to SEQ ID NO: 250099

SEQ ID NO: 274796 - DNA, 2007 bp, Homo Sapiens; identical to SEQ ID NO: 250100

SEQ ID NO: 274797 - DNA, 1035 bp, Homo Sapiens; identical to SEQ ID NO: 250101

SEQ ID NO: 274798 - DNA, 453 bp, Homo Sapiens; identical to SEQ ID NO: 250102
  misc_feature (436)..(436): n is a, c, g, or t

SEQ ID NO: 274799 - DNA, 743 bp, Homo Sapiens; identical to SEQ ID NO: 250103

SEQ ID NO: 274800 - DNA, 544 bp, Homo Sapiens; identical to SEQ ID NO: 250104

SEQ ID NO: 274801 - DNA, 1087 bp, Homo Sapiens; identical to SEQ ID NO: 250106
  misc_feature (5)..(5): n is a, c, g, or t
  misc_feature (8)..(8): n is a, c, g, or t
  misc_feature (16)..(16): n is a, c, g, or t
  misc_feature (20)..(20): n is a, c, g, or t
  misc_feature (27)..(27): n is a, c, g, or t
  misc_feature (41)..(41): n is a, c, g, or t
  misc_feature (52)..(52): n is a, c, g, or t
  misc_feature (59)..(59): n is a, c, g, or t
  misc_feature (62)..(64): n is a, c, g, or t
  misc_feature (75)..(75): n is a, c, g, or t
  misc_feature (79)..(79): n is a, c, g, or t

SEQ ID NO: 274802 - DNA, 1255 bp, Homo Sapiens; identical to SEQ ID NO: 250107

SEQ ID NO: 274803 - DNA, 682 bp, Homo Sapiens; identical to SEQ ID NO: 250109
  misc_feature (627)..(627): n is a, c, g, or t

SEQ ID NO: 274804 - DNA, 986 bp, Homo Sapiens; identical to SEQ ID NO: 250110
  misc_feature (852)..(929): n is a, c, g, or t

SEQ ID NO: 274805 - DNA, 952 bp, Homo Sapiens; identical to SEQ ID NO: 250116
  misc_feature (734)..(734): n is a, c, g, or t
  misc_feature (770)..(770): n is a, c, g, or t
  misc_feature (835)..(835): n is a, c, g, or t
  misc_feature (858)..(858): n is a, c, g, or t
  misc_feature (876)..(876): n is a, c, g, or t
  misc_feature (878)..(878): n is a, c, g, or t
  misc_feature (908)..(908): n is a, c, g, or t
  misc_feature (924)..(924): n is a, c, g, or t
  misc_feature (926)..(926): n is a, c, g, or t
  misc_feature (946)..(946): n is a, c, g, or t

SEQ ID NO: 274806 - DNA, 839 bp, Homo Sapiens; identical to SEQ ID NO: 250117
  misc_feature (116)..(116): n is a, c, g, or t

SEQ ID NO: 274807 - DNA, 2070 bp, Homo Sapiens; identical to SEQ ID NO: 250118
  misc_feature (54)..(54): n is a, c, g, or t
  misc_feature (142)..(142): n is a, c, g, or t

SEQ ID NO: 274808 - DNA, 1111 bp, Homo Sapiens; identical to SEQ ID NO: 250119
  misc_feature (23)..(23): n is a, c, g, or t
  misc_feature (34)..(34): n is a, c, g, or t

SEQ ID NO: 274809 - DNA, 930 bp, Homo Sapiens; identical to SEQ ID NO: 250120

SEQ ID NO: 274810 - DNA, 1037 bp, Homo Sapiens; identical to SEQ ID NO: 250121
  misc_feature (1003)..(1004): n is a, c, g, or t
  misc_feature (1012)..(1012): n is a, c, g, or t
  misc_feature (1014)..(1015): n is a, c, g, or t
  misc_feature (1029)..(1029): n is a, c, g, or t

SEQ ID NO: 274811 - DNA, 368 bp, Homo Sapiens; identical to SEQ ID NO: 250122

SEQ ID NO: 274812 - DNA, 868 bp, Homo Sapiens; identical to SEQ ID NO: 250123

SEQ ID NO: 274813 - DNA, 520 bp, Homo Sapiens; identical to SEQ ID NO: 250124

SEQ ID NO: 274814 - DNA, 1888 bp, Homo Sapiens; identical to SEQ ID NO: 250137
  misc_feature (1278)..(1326): n is a, c, g, or t
  misc_feature (1602)..(1654): n is a, c, g, or t

SEQ ID NO: 274815 - DNA, 531 bp, Homo Sapiens; identical to SEQ ID NO: 250138

SEQ ID NO: 274816 - DNA, 573 bp, Homo Sapiens; identical to SEQ ID NO: 250139
  misc_feature (23)..(23): n is a, c, g, or t
  misc_feature (35)..(35): n is a, c, g, or t
  misc_feature (45)..(45): n is a, c, g, or t
  misc_feature (88)..(88): n is a, c, g, or t

SEQ ID NO: 274817 - DNA, 1363 bp, Homo Sapiens; identical to SEQ ID NO: 250149

SEQ ID NO: 274818 - DNA, 1332 bp, Homo Sapiens; identical to SEQ ID NO: 250150

SEQ ID NO: 274819 - DNA, 3239 bp, Homo Sapiens; identical to SEQ ID NO: 250156

SEQ ID NO: 274820 - DNA, 1074 bp, Homo Sapiens; identical to SEQ ID NO: 250157
  misc_feature (792)..(858): n is a, c, g, or t

SEQ ID NO: 274821 - DNA, 1134 bp, Homo Sapiens; identical to SEQ ID NO: 250158

SEQ ID NO: 274822 - DNA, 1006 bp, Homo Sapiens; identical to SEQ ID NO: 250159
  misc_feature (409)..(438): n is a, c, g, or t
  misc_feature (442)..(442): n is a, c, g, or t
  misc_feature (881)..(881): n is a, c, g, or t
  misc_feature (883)..(883): n is a, c, g, or t
  misc_feature (888)..(888): n is a, c, g, or t
  misc_feature (905)..(905): n is a, c, g, or t
  misc_feature (910)..(910): n is a, c, g, or t
  misc_feature (912)..(913): n is a, c, g, or t
  misc_feature (918)..(920): n is a, c, g, or t
  misc_feature (922)..(922): n is a, c, g, or t
  misc_feature (924)..(924): n is a, c, g, or t
  misc_feature (936)..(939): n is a, c, g, or t
  misc_feature (963)..(963): n is a, c, g, or t
  misc_feature (973)..(975): n is a, c, g, or t

SEQ ID NO: 274823 - DNA, 1523 bp, Homo Sapiens; identical to SEQ ID NO: 250160
  misc_feature (1021)..(1048): n is a, c, g, or t

SEQ ID NO: 274824 - DNA, 768 bp, Homo Sapiens; identical to SEQ ID NO: 250161
  misc_feature (450)..(523): n is a, c, g, or t

SEQ ID NO: 274825 - DNA, 444 bp, Homo Sapiens; identical to SEQ ID NO: 250162
  misc_feature (149)..(215): n is a, c, g, or t

SEQ ID NO: 274826 - DNA, 578 bp, Homo Sapiens; identical to SEQ ID NO: 250163
  misc_feature (279)..(305): n is a, c, g, or t
  misc_feature (548)..(548): n is a, c, g, or t

SEQ ID NO: 274827 - DNA, 1372 bp, Homo Sapiens; identical to SEQ ID NO: 250167
  misc_feature (1265)..(1265): n is a, c, g, or t
  misc_feature (1338)..(1338): n is a, c, g, or t
  misc_feature (1350)..(1350): n is a, c, g, or t

SEQ ID NO: 274828 - DNA, 408 bp, Homo Sapiens; identical to SEQ ID NO: 250168
  misc_feature (333)..(333): n is a, c, g, or t
  misc_feature (386)..(386): n is a, c, g, or t

SEQ ID NO: 274829 - DNA, 895 bp, Homo Sapiens; identical to SEQ ID NO: 250170

SEQ ID NO: 274830 - DNA, 1764 bp, Homo Sapiens; identical to SEQ ID NO: 250171
  misc_feature (1393)..(1393): n is a, c, g, or t
  misc_feature (1435)..(1435): n is a, c, g, or t

SEQ ID NO: 274831 - DNA, 543 bp, Homo Sapiens; identical to SEQ ID NO: 250172

SEQ ID NO: 274832 - DNA, 602 bp, Homo Sapiens; identical to SEQ ID NO: 250179

SEQ ID NO: 274833 - DNA, 542 bp, Homo Sapiens; identical to SEQ ID NO: 250180

SEQ ID NO: 274834 - DNA, 751 bp, Homo Sapiens; identical to SEQ ID NO: 250181
  misc_feature (252)..(252): n is a, c, g, or t
  misc_feature (259)..(259): n is a, c, g, or t
  misc_feature (692)..(692): n is a, c, g, or t

SEQ ID NO: 274835 - DNA, 1010 bp, Homo Sapiens; identical to SEQ ID NO: 250182
  misc_feature (564)..(564): n is a, c, g, or t

SEQ ID NO: 274836 - DNA, 632 bp, Homo Sapiens; identical to SEQ ID NO: 250183

SEQ ID NO: 274837 - DNA, 435 bp, Homo Sapiens; identical to SEQ ID NO: 250184
  misc_feature (31)..(31): n is a, c, g, or t
  misc_feature (87)..(87): n is a, c, g, or t

SEQ ID NO: 274838 - DNA, 769 bp, Homo Sapiens; identical to SEQ ID NO: 170889
  misc_feature (650)..(650): n is a, c, g, or t

SEQ ID NO: 274839 - DNA, 959 bp, Homo Sapiens; identical to SEQ ID NO: 250189

SEQ ID NO: 274840 - DNA, 1106 bp, Homo Sapiens; identical to SEQ ID NO: 176833
  misc_feature (602)..(603): n is a, c, g, or t
  misc_feature (684)..(859): n is a, c, g, or t
  misc_feature (875)..(889): n is a, c, g, or t

SEQ ID NO: 274841 - DNA, 779 bp, Homo Sapiens; identical to SEQ ID NO: 250191
  misc_feature (291)..(351): n is a, c, g, or t

SEQ ID NO: 274842 - DNA, 501 bp, Homo Sapiens; identical to SEQ ID NO: 250192
  misc_feature (462)..(462): n is a, c, g, or t
  misc_feature (468)..(468): n is a, c, g, or t

SEQ ID NO: 274843 - DNA, 1420 bp, Homo Sapiens; identical to SEQ ID NO: 250195
  misc_feature (1045)..(1045): n is a, c, g, or t

SEQ ID NO: 274844 - DNA, 662 bp, Homo Sapiens; identical to SEQ ID NO: 250196

SEQ ID NO: 274845 - DNA, 794 bp, Homo Sapiens; identical to SEQ ID NO: 250197
  misc_feature (32)..(32): n is a, c, g, or t
  misc_feature (49)..(49): n is a, c, g, or t
  misc_feature (57)..(57): n is a, c, g, or t
  misc_feature (68)..(68): n is a, c, g, or t

SEQ ID NO: 274846 - DNA, 2115 bp, Homo Sapiens; identical to SEQ ID NO: 250200

SEQ ID NO: 274847 - DNA, 643 bp, Homo Sapiens; identical to SEQ ID NO: 250201

SEQ ID NO: 274848 - DNA, 1821 bp, Homo Sapiens; identical to SEQ ID NO: 250202

SEQ ID NO: 274849 - DNA, 1337 bp, Homo Sapiens; identical to SEQ ID NO: 250203
  misc_feature (338)..(353): n is a, c, g, or t

SEQ ID NO: 274850 - DNA, 411 bp, Homo Sapiens; identical to SEQ ID NO: 250204

SEQ ID NO: 274851 - DNA, 1108 bp, Homo Sapiens; identical to SEQ ID NO: 250205
  misc_feature (31)..(31): n is a, c, g, or t
  misc_feature (52)..(52): n is a, c, g, or t
  misc_feature (54)..(54): n is a, c, g, or t
  misc_feature (139)..(139): n is a, c, g, or t

SEQ ID NO: 274852 - DNA, 1096 bp, Homo Sapiens; identical to SEQ ID NO: 250206
  misc_feature (980)..(1005): n is a, c, g, or t

SEQ ID NO: 274853 - DNA, 1070 bp, Homo Sapiens; identical to SEQ ID NO: 15304
  misc_feature (705)..(705): n is a, c, g, or t

SEQ ID NO: 274854 - DNA, 610 bp, Homo Sapiens; identical to SEQ ID NO: 250209

SEQ ID NO: 274855 - DNA, 360 bp, Homo Sapiens; identical to SEQ ID NO: 250210
  misc_feature (313)..(313): n is a, c, g, or t
  misc_feature (334)..(334): n is a, c, g, or t

SEQ ID NO: 274856 - DNA, 2172 bp, Homo Sapiens; identical to SEQ ID NO: 250211
  misc_feature (2106)..(2107): n is a, c, g, or t
  misc_feature (2117)..(2117): n is a, c, g, or t

SEQ ID NO: 274857 - DNA, 1115 bp, Homo Sapiens; identical to SEQ ID NO: 250212
  misc_feature (9)..(9): n is a, c, g, or t
  misc_feature (11)..(12): n is a, c, g, or t
  misc_feature (24)..(24): n is a, c, g, or t
  misc_feature (36)..(36): n is a, c, g, or t
  misc_feature (43)..(43): n is a, c, g, or t
  misc_feature (48)..(48): n is a, c, g, or t
  misc_feature (52)..(52): n is a, c, g, or t
  misc_feature (65)..(65): n is a, c, g, or t
  misc_feature (71)..(71): n is a, c, g, or t
  misc_feature (74)..(74): n is a, c, g, or t
  misc_feature (94)..(94): n is a, c, g, or t
  misc_feature (101)..(101): n is a, c, g, or t
  misc_feature (106)..(106): n is a, c, g, or t
  misc_feature (118)..(118): n is a, c, g, or t
  misc_feature (127)..(127): n is a, c, g, or t
  misc_feature (135)..(135): n is a, c, g, or t
  misc_feature (147)..(147): n is a, c, g, or t
  misc_feature (157)..(157): n is a, c, g, or t
  misc_feature (181)..(181): n is a, c, g, or t
  misc_feature (335)..(335): n is a, c, g, or t
  misc_feature (409)..(409): n is a, c, g, or t

SEQ ID NO: 274858 - DNA, 397 bp, Homo Sapiens; identical to SEQ ID NO: 250213
  misc_feature (127)..(127): n is a, c, g, or t

SEQ ID NO: 274859 - DNA, 353 bp, Homo Sapiens; identical to SEQ ID NO: 250215

SEQ ID NO: 274860 - DNA, 621 bp, Homo Sapiens; identical to SEQ ID NO: 250216
  misc_feature (312)..(362): n is a, c, g, or t

SEQ ID NO: 274861 - DNA, 737 bp, Homo Sapiens; identical to SEQ ID NO: 250217

SEQ ID NO: 274862 - DNA, 338 bp, Homo Sapiens; identical to SEQ ID NO: 250218
  misc_feature (1)..(1): n is a, c, g, or t
  misc_feature (5)..(5): n is a, c, g, or t
  misc_feature (7)..(7): n is a, c, g, or t
  misc_feature (11)..(11): n is a, c, g, or t

SEQ ID NO: 274863 - DNA, 767 bp, Homo Sapiens; identical to SEQ ID NO: 250219
